United States Patent Application Publication US 2016/0230186 A1 - sequence listing, part 5

SEQ ID NO: 6019 - DNA, 1818 bp, Diabrotica virgifera
  SmartBlast Evalue=0; Info="ATP synthase subunit beta, mitochondrial n=7 Tax=Endopterygota RepID=E2C3U0_9HYME"
attctgcagtctgcgttcttgtcgaagttggaccatgttgggtgctgtggcaagagcaacttccagccttttggctggaaaatccatcgaaaaagttggttccgaatcccttaaaattgtctcttcatacaatgttcaaaaaagagacttcgctgccaaggctgctgccggtaaggcacaaggaaaagttgtagcggtcattggtgccgtcgttgacgtacaattcgatgaagaactacccccaattctaaatgcattggaagtacaaaaccgtcaacctaggctggtccttgaagttgctcagcatttgggagagaacacagtccgtactattgctatggatggtactgaaggtattgtccgtggtcaacaggttaacgacacaggatacccaatccgtatccctgttggtgaagcaaccctgggccgtatcatgaatgtcattggtgaacctattgatgaaaggggtcctattgatacagacaagagagcttccatccacgctgaagcccctgaattcgttgacatgagtgtagagcaagaaatcttggtaactggtattaaggtagtagaccttttagccccttacgctaagggtggtaagattggtctctttggaggtgctggagtaggaaaaactgtactgattatggaacttattaacaacgtagctaaagcccatggtggttactcagtattcgctggagtaggagaacgtacccgtgaaggtaacgatttataccatgaaatgattgaatctggagtaatctccttaaaagataagacctccaaagtagccttggtctacggacaaatgaacgaacccccaggcgctcgtgctcgtgtagctttgactggattaactgttgctgaatatttccgtgatcaagaaggacaagatgtactgcttttcattgacaacattttcagatttactcaagctggttcagaggtatctgccttgttgggtcgtatcccctctgctgtaggttaccagcctactttggccactgacatgggtagcatgcaggaacgtattaccaccaccaagaagggttccattacatcagtacaggctatctatgtacctgctgatgacttgacagatcctgccccagccaccacattcgctcacttggacgccaccactgtattgtcccgtgccattgctgaattgggtatctacccagctgtagatcctttggattccacctcacgtatcatggaccccaacattattggagccgaacattacaaagttgctcgtgatgtacaaaagatcttgcaagattataaatcactacaggatattattgctatcttgggtatggatgaattgtctgaagatgacaaacttactgtatctcgtgctagaaagatccaacgtttcctttcacaacctttccaagttgctgaagtcttcactggtcatgctggaaaacttgttcctcttgaagaaaccattaagggattccaaaagattcttgctggtgaattagatcacttaccagaagtcgccttctacatggtaggacccattgaagaggttgtccaaaaggcagaaaaattagctgaatctacataaatgctaggataactttgtatatttatttgtatgtgattccatcaatctgcagagagaaagatgtttctttttattaagatcatgtaaagaacttttcattacactaccagattttttttatatcgaaaatttttgtttattagccctaatttcatctgtcatgggtattgttgtatttttaattaatccataaataaaatagatctaaaaaatgaaaaaaaatactgctagtc

SEQ ID NO: 6020 - DNA, 1711 bp, Diabrotica virgifera
  SmartBlast Evalue=0; Info="Protein disulfide-isomerase A3, putative n=1 Tax=Pediculus humanus corporis RepID=E0VQN7_PEDHC"
tttagagaaaaccactttattagaaaattaatcactacatggaattcgtttaaaaagtatgagaacatctcaaaaattatttttaaaaatcacatattttaaatttattacaacacattacaactcagtcttgccttccttaggagatccactcctatcgtaacccttaagttcgttggtagcgtgtttggctacatatttaacgaagtcgtctacatctcgaccaccctcgtaggtgacaggagagtctttggaatttttgggaacccagaagattgttgggaaacctcgtacttcgaagtttgatggaacatcattggctgtagcatccatcttagcgatgactacatcttcgtctttgagcttttcggctagctcttcataaatgggtgcaagttttttacagtgtccacaccaaggagcatagaattcaatcaaagcatcttttgagttatcaatcacttgatcgaagttcttggcaactaaagttttcaatggtgcgtctgcgtcttctggaattggctcagatttaaggtatggctcgagagcaccatctagaacatcgcttacgaacacttcgaaggcttcgagggagaattctttgaggacgaatttttggtttttagcatctctagcaccaacaactggtttgtctcctttcacatagtccaatccaaattcatttaattcatgttggaattcatcgtttgagctgatagcaaagttagccctttcttggaattctttggcaaccttcaatattctgttacgccagtagttggtacctttgggatttttggcgtaatcaacagagaagtaagcaacgaacaaggggttttcgaattcttgtttgttatcaggtttgcggtgtcctactaggccatgtaagtttttggtgataaatgtttggatgcttcctgcatcagcagatccactgtattgaactttgctatcttcgaatttgttttgcagatgaactggacggaacaagaccaaaccatctttcactttctgggcatctaaaagttccttgaatgaagtgtgggcaaatttaactttttctctaagcttatcagcggttttaaggaatgcagctttaaggtctgattctttttcgaagaaacccacgactactgattctttttgggtttctaggaagtttttcaagcattcagatgttttcagttctcttgagctgggaccaaccttggattgcatgtattttacaatacctgatgcatctctaggaccattgtagtcttgagatacctcaccatttctgaagattttcaatgtggggtaaccacttacactgtttttatcacaagtttctttaccagcctctgtacagtctactttcaccaaagcaataggaggatcatttcttagtaaatcttcagcagctttagcatactctggtttcaatcgtttgcagtgtccacaccaaggggcataaaacataacaagagcggtctcatgttcggcaattcttgatgcgaaatcactgtcacccagatctagaacatcttcttctttggctgatccaagaaggaaaaacatggaaatagtgagtactttaaataaaatcatcattacaggagttttgtgatagcctaaacccgaaaaagttatactccaaaacgaaaccgagttgggatgtggttgtgttacacttgaccactcaaaatgtgccacaaacaaaccggtgttc

SEQ ID NO: 6021 - DNA, 1708 bp, Diabrotica virgifera
  SmartBlast Evalue=0; Info="Protein disulfide-isomerase A3, putative n=1 Tax=Pediculus humanus corporis RepID=E0VQN7_PEDHC"
agagaaaaccactttattagaaaattaatcactacatggaattcgtttaaaaagtatgagaacatctcaaaaattatttttaaaaatcacatattttaaatttattacaacacattacaactcagtcttgccttccttaggagatccactcctatcgtaacccttaagttcgttggtagcgtgtttggctacatatttaacgaagtcgtctacatctcgaccaccctcgtaggtgacaggagagtctttggaatttttgggaacccagaagattgttgggaaacctcgtacttcgaagtttgatggaacatcattggctgtagcatccatcttagcgatgactacatcttcgtctttgagcttttcggctagctcttcataaatgggtgcaagttttttacagtgtccacaccaaggagcatagaattcaatcaaagcatcttttgagttatcaatcacttgatcgaagttcttggcaactaaagttttcaatggtgcgtctgcgtcttctggaattggctcagatttaaggtatggctcgagagcaccatctagaacatcgcttacgaacacttcgaaggcttcgagggagaattctttgaggacgaatttttggtttttagcatctctagcaccaacaactggtttgtctcctttcacatagtccaatccaaattcatttaattcatgttggaattcatcgtttgagctgatagcaaagttagccctttcttggaattctttggcaaccttcaatattctgttacgccagtagttggtacctttgggatttttggcgtaatcaacagagaagtaagcaacgaacaaggggttttcgaattcttgtttgttatcaggtttgcggtgtcctactaggccatgtaagtttttggtgataaatgtttggatgcttcctgcatcagcagatccactgtattgaactttgctatcttcgaatttgttttgcagatgaactggacggaacaagaccaaaccatctttcactttctgggcatctaaaagttccttgaatgaagtgtgggcaaatttaactttttctctaagcttatcagcggttttaaggaatgcagctttaaggtctgattctttttcgaagaaacccacgactactgattctttttgggtttctaggaagtttttcaagcattcagatgttttcagttctcttgagctgggaccaaccttggattgcatgtattttacaatacctgatgcatctctaggaccattgtagtcttgagatacctcaccatttctgaagattttcaatgtggggtaaccacttacactgtttttatcacaagtttctttaccagcctctgtacagtctactttcaccaaagcaataggaggatcatttcttagtaaatcttcagcagctttagcatactctggtttcaatcgtttgcagtgtccacaccaaggggcataaaacataacaagagcggtctcatgttcggcaattcttgatgcgaaatcactgtcacccagatctagaacatcttcttctttggctgatccaagaaggaaaaacatggaaatagtgagtactttaaataaaatcatcattacaggagttttgtgatagcctaaacccgaaaaagttatactccaaaacgaaaccgagttgggatgtggttgtgttacacttgaccactcaaaatgtgccacaaacaaaccggtgttc

SEQ ID NO: 6022 - DNA, 1676 bp, Diabrotica virgifera
  SmartBlast Evalue=1E-166; Info="Glutamine synthetase 1, 2 (Glutamate-amonia ligase) (Gs) n=2 Tax=Aedes aegypti RepID= Q16J32_AEDAE"
attgaagtctatcacggcaacgaaaaatatatccaaaaatacagaaaaccctatcacagccttatctcccattgtgtactatcatactctcgtctctattgctccggcaatattcaaatagacattaattagtttaaaatgacgtggtgggtataatatctcaacatcccatcagtgtataaatgtacaacaaattattacttcgacttattccaattggacttgtttagtgtatcagaggtcggaatacccatatcacggcgcgagggtatccgttttgtcgaacagtgtactcggtcagtattaataataattattgttgctagaataaacgcaagttaataatggcgaaaatgttggatagtagtcccaatgcggcactcaacaaatcgcttcttcagcattaccttactctacccattccagatggtaaatgccaggctacgtatatttggattgacggatcaggagaaaatgtcagatgcaaaactaggactttagattttgttccaacatgcccaaaagaattaccagtgtggaacttcgacggaagttcaacaaatcaagccaaaggacacaactcagatgtctttctgtgcccagtagctatgtacaaagatccattcctcagaggaaacaacaaattagtcctatgtgatacatacaaatacgatagaactcccacggagaccaaccatagagtaacatgcctgcaggcaatgaaagcggcacaagaagagaaaccgtggttcggaatcgaacaggaatacacattgttagatatggacttgcgcccgcttggctggcccaagcacggttttccaggaccccaaggaccttactactgtggtgttggagcgaacaaagtgtatgctcgtgatattgtcgaggcgcactataggtgctgtttgtatgctggtgtcacaatctccggaaccaatgctgaggttatgcctgcacagtgggaataccaagtaggaccttgcgaaggcatttcaattggtgatgaattgtggatctctaggtatatcttacagcgagtagccgaagattacggtgtaattgtaacttttgatcccaaaccgatggaaggtgactggaacggagctggagctcacaccaacttctcaactcaggttatgagagaaccaaatggcattggggcaattgaaaaggccattgaaaaacttagcaaaaaccacgctaggcacatcaaagcctacgatcccaaaggaggaaaagacaacgaacgtcgtcttactggcaaacacgaaacatcttctatccatgactttagtgctggtgttgcaaatcgtggagccagtatcagaattccccgtggctgtgccgaagacaagaaaggatacctggaagacagaagacctgcctcaaattgcgatccttactcagtatctgaagctatcatcagaacatgctgtttaaatgaatgaatgtagaatgtacacctaattgtattatacttccttacacattttataaattaatgttatatattttatgttataatataggtattgttttaatttaattttccaaattagtgtaaaattaaaatccatcagtttattatgatggtatagttatcacatcacacgaaataatattattgttgctatttgtatatgtattctattaaataatatctattgatattt

SEQ ID NO: 6023 - DNA, 1672 bp, Diabrotica virgifera
  SmartBlast Evalue=1E-166; Info="Glutamine synthetase 1, 2 (Glutamate-amonia ligase) (Gs) n=2 Tax=Aedes aegypti RepID= Q16J32_AEDAE"
atcaatagatattatttaatagaatacatatacaaatagcaacaataatattatttcgtgtgatgtgataactataccatcataataaactgatggattttaattttacactaatttggaaaattaaattaaaacaatacctatattataacataaaatatataacattaatttataaaatgtgtaaggaagtataatacaattaggtgtacattctacattcattcatttaaacagcatgttctgatgatagcttcagatactgagtaaggatcgcaatttgaggcaggtcttctgtcttccaggtatcctttcttgtcttcggcacagccacggggaattctgatactggctccacgatttgcaacaccagcactaaagtcatggatagaagatgtttcgtgtttgccagtaagacgacgttcgttgtcttttcctcctttgggatcgtaggctttgatgtgcctagcgtggtttttgctaagtttttcaatggccttttcaattgccccaatgccatttggttctctcataacctgagttgagaagttggtgtgagctccagctccgttccagtcaccttccatcggtttgggatcaaaagttacaattacaccgtaatcttcggctactcgctgtaagatatacctagagatccacaattcatcaccaattgaaatgccttcgcaaggtcctacttggtattcccactgtgcaggcataacctcagcattggttccggagattgtgacaccagcatacaaacagcacctatagtgcgcctcgacaatatcacgagcatacactttgttcgctccaacaccacagtagtaaggtccttggggtcctggaaaaccgtgcttgggccagccaagcgggcgcaagtccatatctaacaatgtgtattcctgttcgattccgaaccacggtttctcttcttgtgccgctttcattgcctgcaggcatgttactctatggttggtctccgtgggagttctatcgtatttgtatgtatcacataggactaatttgttgtttcctctgaggaatggatctttgtacatagctactgggcacagaaagacatctgagttgtgtcctttggcttgatttgttgaacttccgtcgaagttccacactggtaattcttttgggcatgttggaacaaaatctaaagtcctagttttgcatctgacattttctcctgatccgtcaatccaaatatacgtagcctggcatttaccatctggaatgggtagagtaaggtaatgctgaagaagcgatttgttgagtgccgcattgggactactatccaacattttcgccattattaacttgcgtttattctagcaacaataattattattaatactgaccgagtacactgttcgacaaaacggataccctcgcgccgtgatatgggtattccgacctctgatacactaaacaagtccaattggaataagtcgaagtaataatttgttgtacatttatacactgatgggatgttgagatattatacccaccacgtcattttaaactaattaatgtctatttgaatattgccggagcaatagagacgagagtatgatagtacacaatgggagataaggctgtgatagggttttctgtatttttggatatatttttcgttgccgtgatagacttcaat

SEQ ID NO: 6024 - DNA, 1702 bp, Diabrotica virgifera
  SmartBlast Evalue=0; Info=Elongation factor 1-alpha 1 n=1272 Tax=Pterygota RepID=EF1A1_DROME
gacagagcgcaagttgagattatcttcctttttaatttgctcgtcgtacggtgtggacctcgcgcctggtgttacatcccaagtagtgttccttttattctaagtttaatttcgaacagttgcatttactttatttccaaacaatcaaaatgggtaaagaaaagattcatattaacatcgttgtcattggacacgtagattctggtaaatctactactactggacatttaatttacaaatgtggtggtatcgacaaacgtaccatcgaaaagttcgaaaaagaagcccaagaaatgggtaaaggttcattcaaatatgcctgggtactcgacaaacttaaggccgagagagaacgtggtattaccattgatattgctttgtggaaattcgaaacagctaaatactatgtaaccatcattgatgcccctggacacagagatttcattaagaacatgatcactggtacatcacaagctgactgtgctgtactcattgttgcagctggtactggtgaatttgaagcaggtatttcaaagaatggacaaacacgtgaacatgctcttcttgctttcacccttggtgtaaaacaacttattgttggtgtcaacaaaatggactcgactgaaccagcatacagtgaatcacgtttcgaggaaatcaagaaggaagtatcctcatacatcaagaaaattggttacaacccagctgccgttgctttcgtaccaatttcaggatggcacggagacaacatgttagaaggatctgacaagatgccatggttcaagggatggcaaatcgaacgtaaagaaggaaaagctgaaggaaagtgcttgattgaggctttggatgctatccttcccccatctcgtccaactgagaaacccctccgtcttccactccaggatgtctacaaaattggtggtattggaacagtacctgtaggtcgtgttgaaactggtgtattgaaacctggtatggttgtagtattcgctccagccaatttgacgactgaagtaaaatccgttgaaatgcatcacgaagccctccaggaagcagtacctggtgacaatgttggtttcaacgtcaagaatgtctctgttaaagaattgcgtcgtggttacgtagctggagacaccaagaacaacccacccagaggagcttcagacttcactgcccaagtcattgttctcaaccaccctggtcaaatctcaaacggatatacccctgtactcgactgtcacacagctcacattgcctgcaaattcgctgaaatcaaagaaaaggttgaccgtcgttctggtaagaccactgaagaaaatcccaaagccatcaaatctggtgatgccgccattgtcaacttggtacccaccaagcccatgtgtgtagaatcattccaagaattcccaccccttggacgttttgctgtccgtgacatgaggcaaaccgttgcagtaggagtcatcaagagcgttgccttcaaagatcccagcgccggaaaagtcacaaaagctgcagaaaaagcccaaaagaagaaatagtctatttggactccactacttaaataattttgatatgttttgtttcttttatatattaatattggagtatcaatgtatttttaataactaatggacttattacttgcattgcattatttgtgatctgtaaattaaacttggacaaataaagaaaaaaattaaaa

SEQ ID NO: 6025 - DNA, 1685 bp, Diabrotica virgifera
  SmartBlast Evalue=0; Info=Elongation factor 1-alpha 1 n=1272 Tax=Pterygota RepID=EF1A1_DROME
atttgtccaagtttaatttacagatcacaaataatgcaatgcaagtaataagtccattagttattaaaaatacattgatactccaatattaatatataaaagaaacaaaacatatcaaaattatttaagtagtggagtccaaatagactatttcttcttttgggctttttctgcagcttttgtgacttttccggcgctgggatctttgaaggcaacgctcttgatgactcctactgcaacggtttgcctcatgtcacggacagcaaaacgtccaaggggtgggaattcttggaatgattctacacacatgggcttggtgggtaccaagttgacaatggcggcatcaccagatttgatggctttgggattttcttcagtggtcttaccagaacgacggtcaaccttttctttgatttcagcgaatttgcaggcaatgtgagctgtgtgacagtcgagtacaggggtatatccgtttgagatttgaccagggtggttgagaacaatgacttgggcagtgaagtctgaagctcctctgggtgggttgttcttggtgtctccagctacgtaaccacgacgcaattctttaacagagacattcttgacgttgaaaccaacattgtcaccaggtactgcttcctggagggcttcgtgatgcatttcaacggattttacttcagtcgtcaaattggctggagcgaatactacaaccataccaggtttcaatacaccagtttcaacacgacctacaggtactgttccaataccaccaattttgtagacatcctggagtggaagacggaggggtttctcagttggacgagatgggggaaggatagcatccaaagcctcaatcaagcactttccttcagcttttccttctttacgttcgatttgccatcccttgaaccatggcatcttgtcagatccttctaacatgttgtctccgtgccatcctgaaattggtacgaaagcaacggcagctgggttgtaaccaattttcttgatgtatgaggatacttccttcttgatttcctcgaaacgtgattcactgtatgctggttcagtcgagtccattttgttgacaccaacaataagttgttttacaccaagggtgaaagcaagaagagcatgttcacgtgtttgtccattctttgaaatacctgcttcaaattcaccagtaccagctgcaacaatgagtacagcacagtcagcttgtgatgtaccagtgatcatgttcttaatgaaatctctgtgtccaggggcatcaatgatggttacatagtatttagctgtttcgaatttccacaaagcaatatcaatggtaataccacgttctctctcggccttaagtttgtcgagtacccaggcatatttgaatgaacctttacccatttcttgggcttctttttcgaacttttcgatggtacgtttgtcgataccaccacatttgtaaattaaatgtccagtagtagtagatttaccagaatctacgtgtccaatgacaacgatgttaatatgaatcttttctttacccattttgattgtttggaaataaagtaaatgcaactgttcgaaattaaacttagaataaaaggaacactacttgggatgtaacaccaggcgcgaggtccacaccgtacgacgagcaaattaaaaaggaagataatctcaacttgcgctctgtc

SEQ ID NO: 6026 - DNA, 1643 bp, Diabrotica virgifera
  SmartBlast Evalue=3E-48; Info=Sensory neuron membrane protein 2 n=3 Tax=Ostrinia RepID=E5EZW8_OSTNU
acaagctaactaacttattttctacgtgatatcacctgttttcttataagaataccagccacgaccaacacggataaagaagacactgctattagtccgtatttaacaccatttgctattttcacaactttgaaaaattggttgtttagaatgtttataaggtcgtctgtcaagtcagcacactcttcaatccatatcacaggcaacactgtaggctttaatttttgagtaaactggatgtattcgatatttcttaacaccacgttaagttggaccctcttccttccttgtaagggagtgccagtatttggctcaatcaataaatagatgccatgtttttcggatctggcgaagtcactccttgtactccattaatgtatgactcatcagcgtggaggaaatggggaaaggataatagcagaggagcaccaaaacagtcgtatacatctataactccattcagatagcagtcacgtacaccgttgggattgagagttctccctgtacaaaagcaatcttcctcaacgtttgctaatttcgaatagaacgtatctgattttggctcataacggtatccttctatatccttgtatgttcctgtgctactgtaagaaacttccactctcctgcatatatcagttgaaaatattacaaaacctttgtctttggtagcatgaggcgggtacatagtcgagtctccaccttctactaattgacaggtgtcgttgttaatggattgtgacgtgccccaaaaaggtaggtaatgggaattgttccattgcataattcttcccaatttagagatatcgtcaattcctctatttaaagtgtatattccgtctggactctccgttttaaatcctaaaaatgagaatcttaaagcttccaccattcctggatattctttactgtatatccttcgtatgtttttcatttttttagttttttcgatgatctgctgtctgattacttcacaagcatatccaacatctgatgatgatctggcaaactcaaatccctcgaacatcactgatcttatcgttgtggtcataaaaaggtctctgtaggtaggtgtaaatattttgtccaggcatccgactacgacgagttgttccacgacgctggtaatttgggttagtaccagtaacggagggttaacaatagtaacattatcatctagagtcaactgaccggatcgctcttgttcaaatgactgttctgtaaacttttggtacgttacactatcgtcatctttattagtcgatagtactttcttgctaatgtcttctctaaatacatagggtcctacttcttcaagtttaggaactgccccgttcataacagccggtccatttcttactgtaaacaaatatacccctatgtatatcggtatcggaagcttcagaaatctcccccattgatctgagttttcggtcagcctaactgatgcgtctacttgagagtttactatccgtggtattccatagaaacttaacaccaatattcctgctaacaccactaccaacacggccgtgattaccgccaaaattttaacactacaacaaatacaggggcgcttcatgatagtcctgtcgactaatttacaccgtgtatatagcgaggtgctgtgtccaacagagaga

SEQ ID NO: 6027 - DNA, 1642 bp, Diabrotica virgifera
  SmartBlast Evalue=3E-48; Info=Sensory neuron membrane protein 2 n=3 Tax=Ostrinia RepID=E5EZW8_OSTNU
ctctgttggacacagcacctcgctatatacacggtgtaaattagtcgacaggactatcatgaagcgcccctgtatttgttgtagtgttaaaattttggcggtaatcacggccgtgttggtagtggtgttagcaggaatattggtgttaagtttctatggaataccacggatagtaaactctcaagtagacgcatcagttaggctgaccgaaaactcagatcaatgggggagatttctgaagcttccgataccgatatacataggggtatatttgtttacagtaagaaatggaccggctgttatgaacggggcagttcctaaacttgaagaagtaggaccctatgtatttagagaagacattagcaagaaagtactatcgactaataaagatgacgatagtgtaacgtaccaaaagtttacagaacagtcatttgaacaagagcgatccggtcagttgactctagatgataatgttactattgttaaccctccgttactggtactaacccaaattaccagcgtcgtggaacaactcgtcgtagtcggatgcctggacaaaatatttacacctacctacagagacctttttatgaccacaacgataagatcagtgatgttcgagggatttgagtttgccagatcatcatcagatgttggatatgcttgtgaagtaatcagacagcagatcatcgaaaaaactaaaaaaatgaaaaacatacgaaggatatacagtaaagaatatccaggaatggtggaagctttaagattctcatttttaggatttaaaacggagagtccagacggaatatacactttaaatagaggaattgacgatatctctaaattgggaagaattatgcaatggaacaattcccattacctacctttttggggcacgtcacaatccattaacaacgacacctgtcaattagtagaaggtggagactcgactatgtacccgcctcatgctaccaaagacaaaggttttgtaatattttcaactgatatatgcaggagagtggaagtttcttacagtagcacaggaacatacaaggatatagaaggataccgttatgagccaaaatcagatacgttctattcgaaattagcaaacgttgaggaagattgcttttgtacagggagaactctcaatcccaacggtgtacgtgactgctatctgaatggagttatagatgtatacgactgttttggtgctcctctgctattatcctttccccatttcctccacgctgatgagtcatacattaatggagtacaaggagtgacttcgccagatccgaaaaacatggcatctatttattgattgagccaaatactggcactcccttacaaggaaggaagagggtccaacttaacgtggtgttaagaaatatcgaatacatccagtttactcaaaaattaaagcctacagtgttgcctgtgatatggattgaagagtgtgctgacttgacagacgaccttataaacattctaaacaaccaatttttcaaagttgtgaaaatagcaaatggtgttaaatacggactaatagcagtgtcttctttatccgtgttggtcgtggctggtattcttataagaaaacaggtgatatcacgtagaaaataagttaaagttagcttgt

SEQ ID NO: 6028 - DNA, 1572 bp, Diabrotica virgifera
gatatctcgtgtttttggtgtgactttttttatcacgggttattttttcgtgtgttgcgctcatcgacaaaccacaagaatgaaacttatcgtaggattattattaatagccacagctctggcatacccagtagcggaaaatgaagaaaaactagcccaaccagtaattgcacaagacgcgaagccagcagagcaagaactaccactaccagaccaacttcttcccatatcagaaaaacttccccaaaaacaagaaccgttacctgccagcagcgattcttcatcagaatcttcctctgagagcagcgatgagtctggagaaaagaaatcatcctccgagtcctcctcgagcgagaaagaatccagcgaagtaaaaatccaagaaaagaaacttgccgaacctctcccagctatcaaagagccaattaaggaagaagtgaggccaatcgatccacttctgttttgaaaccatctgaaccagctcaaccagatgttttaccagaagaacctaaactaatagatcccgtagtgccccaaattgctgctaaagcgatcccagccgaaccagaagagaaacctctagctctgccaactctagttgctgaagaaaaaccagctgagcaagctccaaaattggtcgccactgaaataaaagaagacaaaatcttactcagtgaacaaaaagtagaagctagtcctgtagccgaagaaaaactgcccgaattgaagaaagccgaagaacctgctccacaacttgaaggtaaatcagtactcgaactacctgaggaaaaaccacaacctgcacagcctgaaggtaaattggaaccagtacaacctgtccttgcggcagttccagctgtagaattagaagtaaatccagaagaaaaaccagaaggtgaaaagaaagccaaatcagaagagcccaaacccgaagagcagaaggtacaaaaagttgaagaagccaaaccaagcgaaggaaaatctttagagcaacaaccagctgaaattaaacctgtcgaattagtaccagtagcagaagaaaaaccaattgaaggacccaaactaccagaaggtaaattagagaagcttccactgccagaaaaacctctggaagagcccaagccaaccgacgcagcgaaaatcgaagaacccaaatccgcagaagagaaactacccgaaccaagtgcgtccagttcttgaactgtatttccatgatcgtggaaatttcccaagaatgactgatgaggttcgctggcgcttttgttccacaacacacttaatttttttagtgaacaactgggcggaccgaacctcgaatagtagattttatttatgtgtgctcaaaaataaaaaaatcgtgttttgttatagaaacagtgttgtttttattttatagtatttttgttttattatttttttgtttgtttcgatcagaatctcattatttctttttgatttatgttaacgacaagccaggaattcattcgaccttgtgaatctaaccatagtttctcttctaatcgatttagtttaaggttatgtattaaaagcttttaataaacttttatacat

SEQ ID NO: 6029 - DNA, 1569 bp, Diabrotica virgifera
atctcgtgtttttggtgtgactttttttatcacgggttattttttcgtgtgttgcgctcatcgacaaaccacaagaatgaaacttatcgtaggattattattaatagccacagctctggcatacccagtagcggaaaatgaagaaaaactagcccaaccagtaattgcacaagacgcgaagccagcagagcaagaactaccactaccagaccaacttcttcccatatcagaaaaacttccccaaaaacaagaaccgttacctgccagcagcgattcttcatcagaatcttcctctgagagcagcgatgagtctggagaaaagaaatcatcctccgagtcctcctcgagcgagaaagaatccagcgaagtaaaaatccaagaaaagaaacttgccgaacctctcccagctatcaaagagccaattaaggaagaagtgaggccaatcgatccacttctgttttgaaaccatctgaaccagctcaaccagatgttttaccagaagaacctaaactaatagatcccgtagtgccccaaattgctgctaaagcgatcccagccgaaccagaagagaaacctctagctctgccaactctagttgctgaagaaaaaccagctgagcaagctccaaaattggtcgccactgaaataaaagaagacaaaatcttactcagtgaacaaaaagtagaagctagtcctgtagccgaagaaaaactgcccgaattgaagaaagccgaagaacctgctccacaacttgaaggtaaatcagtactcgaactacctgaggaaaaaccacaacctgcacagcctgaaggtaaattggaaccagtacaacctgtccttgcggcagttccagctgtagaattagaagtaaatccagaagaaaaaccagaaggtgaaaagaaagccaaatcagaagagcccaaacccgaagagcagaaggtacaaaaagttgaagaagccaaaccaagcgaaggaaaatctttagagcaacaaccagctgaaattaaacctgtcgaattagtaccagtagcagaagaaaaaccaattgaaggacccaaactaccagaaggtaaattagagaagcttccactgccagaaaaacctctggaagagcccaagccaaccgacgcagcgaaaatcgaagaacccaaatccgcagaagagaaactacccgaaccaagtgcgtccagttcttgaactgtatttccatgatcgtggaaatttcccaagaatgactgatgaggttcgctggcgcttttgttccacaacacacttaatttttttagtgaacaactgggcggaccgaacctcgaatagtagattttatttatgtgtgctcaaaaataaaaaaatcgtgttttgttatagaaacagtgttgtttttattttatagtatttttgttttattatttttttgtttgtttcgatcagaatctcattatttctttttgatttatgttaacgacaagccaggaattcattcgaccttgtgaatctaaccatagtttctcttctaatcgatttagtttaaggttatgtattaaaagcttttaataaacttttatacat

SEQ ID NO: 6030 - DNA, 1505 bp, Diabrotica virgifera
  SmartBlast Evalue=1E-137; Info=Transaldolase n=2 Tax=Aedes aegypti RepID=Q16VW8_AEDAE
tttttcgaaatagataaaactttacttctcaatttaaatttacaaaaaatatatatcaacctcatacaacccatcatttctttgcagcacacaacaacggtttcaacgttccttccaacttgatggaatccgcagcaaacttcctaatgccgtctgaaagtttatcagtagccatttgatcttcgttcaacatccacctaaatgtagactcatccatttctatcttctcgaggtctgtttttagagcagattctacactcaacttgacgggaagtgagtcgtggctggcttccagctcgccgagaagtttgggactgatggtgagcagatcgcaaccagctaatgcctttatttcacctacattacggaatgaggctcccataacaacagtcttatacccgaatttcttgtagtagttgtagatcttagtgactgagacgacgccagggtcctcatcgccagtatagctcttcttatctgtgtttgcgacataccagtcaagaatacggccgacaaaaggtgagatgagagtgacaccagcttcagcacaagctacagcttgggcaaagttgaagagtaatgtcagattgcagtgaatgccgtgtttcttttcgagctctcttgcagcttggattccttcccatgttgatgccaacttgatcaggattctgtctttggaaataccttgttcttcatacaggttaatgattttgcgggctttggcaacactggcttccttgttgaaggacagtcttgcatcgacttcagtggaaactcgtcctggaacaattttcaaaatttccacaccaaacaagacacatagcatatccatggtgttgtccaatttctggctcatgtctccgccgagtttgttgccgtattggatagctttgtcgatgatgggtttgtattgtggtagagccgctgcagccaatatgagggaagggttggtggttgcatcggtaggcttgaaggctttcatagcctcaaagtccccggtgtctgcaaccactgtagtcagggctttaagttgttcgagggtgttggacatctttttggccttcttggagtgcggctctgttatcaccccggcgtgtaaacctacttctgacatgaggaaatgaaatgtcgtcaggaaaaggtcaaaaaaatcaaaatctggatggtcacggtagcgcagatcgtaccaccacctagtacttaaccacagaacgagaacgaaataaccggcacgatgataaggtgattttgtaatcaacttgaaagtacaagtagaggttatcggacttaattatctttacaaggtttgatgatgtaaatacttgaaggggactggaaatttttggtgaaggggatctgctacctgctgggttacaaagtcaaggtctcagcggatgtgatatattttgattttttaaatttaaaacggaaatattgaataatacacaataagttgtctttttttagtataaaaatataaacaattttttcaaaatattctgaag

SEQ ID NO: 6031 - DNA, 1500 bp, Diabrotica virgifera
  SmartBlast Evalue=1E-137; Info=Transaldolase n=2 Tax=Aedes aegypti RepID=Q16VW8_AEDAE
cgaaatagataaaactttacttctcaatttaaatttacaaaaaatatatatcaacctcatacaacccatcatttctttgcagcacacaacaacggtttcaacgttccttccaacttgatggaatccgcagcaaacttcctaatgccgtctgaaagtttatcagtagccatttgatcttcgttcaacatccacctaaatgtagactcatccatttctatcttctcgaggtctgtttttagagcagattctacactcaacttgacgggaagtgagtcgtggctggcttccagctcgccgagaagtttgggactgatggtgagcagatcgcaaccagctaatgcctttatttcacctacattacggaatgaggctcccataacaacagtcttatacccgaatttcttgtagtagttgtagatcttagtgactgagacgacgccagggtcctcatcgccagtatagctcttcttatctgtgtttgcgacataccagtcaagaatacggccgacaaaaggtgagatgagagtgacaccagcttcagcacaagctacagcttgggcaaagttgaagagtaatgtcagattgcagtgaatgccgtgtttcttttcgagctctcttgcagcttggattccttcccatgttgatgccaacttgatcaggattctgtctttggaaataccttgttcttcatacaggttaatgattttgcgggctttggcaacactggcttccttgttgaaggacagtcttgcatcgacttcagtggaaactcgtcctggaacaattttcaaaatttccacaccaaacaagacacatagcatatccatggtgttgtccaatttctggctcatgtctccgccgagtttgttgccgtattggatagctttgtcgatgatgggtttgtattgtggtagagccgctgcagccaatatgagggaagggttggtggttgcatcggtaggcttgaaggctttcatagcctcaaagtccccggtgtctgcaaccactgtagtcagggctttaagttgttcgagggtgttggacatctttttggccttcttggagtgcggctctgttatcaccccggcgtgtaaacctacttctgacatgaggaaatgaaatgtcgtcaggaaaaggtcaaaaaaatcaaaatctggatggtcacggtagcgcagatcgtaccaccacctagtacttaaccacagaacgagaacgaaataaccggcacgatgataaggtgattttgtaatcaacttgaaagtacaagtagaggttatcggacttaattatctttacaaggtttgatgatgtaaatacttgaaggggactggaaatttttggtgaaggggatctgctacctgctgggttacaaagtcaaggtctcagcggatgtgatatattttgattttttaaatttaaaacggaaatattgaataatacacaataagttgtctttttttagtataaaaatataaacaattttttcaaaatattctgaag

SEQ ID NO: 6032 - DNA, 1483 bp, Diabrotica virgifera
  SmartBlast Evalue=2E-73; Info="Translocation-associated membrane protein, putative n=1 Tax=Pediculus humanus corporis RepID=E0VUU4_PEDHC"
ttttgtataacaatttattgaaaatttgataattggagggacttcacaaacttatatttaatgtaatataaaaaaatatatacttaaattaacatgaaaataaatctttaaaaaccaatttaaacgtgaaaatgtgacgtaaaatgtcacgatggtacggatgacaaaaaaaaacgggacaaaatagagagaaattattttactttctgcttcttcaaagtcttgttcgtgttttgatctacttctggtaaatcagattcttcacttttcttagttttcttagatttctctttcttttggggtttggctttcggagctacgctcgctcctttactttcacgagatcttgcaatttcttgactgatgacattgaaagtcaagtacatttgaagtcctaatataccagccaatacagcgatacggacgacgggggtattgtagtatccagttgtcaagtctagctcacgttgttcaccgagagccaaaccataccaaagggtaagaatggacaatatgatgctgccgaggcgggccaccaatttaaagctgttagacactaaagtggtaactttagagaatttttcgtctttgtcaacagtctggatcaattggaaaaagtggtaaaccaattcagaaatgtgatgaaggaccaaaagagagactagtaaacggttgaagttgaggaaataagggataaatatgagtgaaacagctgccaagctttgtgtggctttgccaatatattcttctttcttagccctttggaaatatagttcaggaagctcatggacattataagccaattgtacaataatatacaatttcatcaggaatgtcattggagctgggtaatctacccacaggcgagctatatcaaatacaaagttttctttgatgatgatgtcaagtccccacaaagttgatattaagtagaatatcgtcagttgaccactggtggtgaagactgctaacttggatttggagaggtggagtttcttggagactttgtccaagatgtattcctgaataatggcatggataacaacgcaaatcaaggtgtagaaaaatatacaagcccaatctttcacaccaggactgtaaaggggcacctctcctgcttctgttacattgtgctgcagagttatgaatattgaagcaattggagatgtagcttgtaccataaggccaactacaaacaccatagcaatacatgacacaatatcggcatgattttgaataacaaattcgtggctcaaaataggtggatttttatttgcagattttcttacaggttttaccatttttttgttgatttttatttttttactactaaaaatgttactgctatattaacgtatgttagctaagttacttccgccaccacttgccaccgaaaagtaaggtttccccactaatctacatttacaacaatcaaaatttaccgcaagtgccacgcaaagacacgtcacaagacatggacacc

SEQ ID NO: 6033 - DNA, 1479 bp, Diabrotica virgifera
  SmartBlast Evalue=2E-73; Info="Translocation-associated membrane protein, putative n=1 Tax=Pediculus humanus corporis RepID=E0VUU4_PEDHC"
gtataacaatttattgaaaatttgataattggagggacttcacaaacttatatttaatgtaatataaaaaaatatatacttaaattaacatgaaaataaatctttaaaaaccaatttaaacgtgaaaatgtgacgtaaaatgtcacgatggtacggatgacaaaaaaaaacgggacaaaatagagagaaattattttactttctgcttcttcaaagtcttgttcgtgttttgatctacttctggtaaatcagattcttcacttttcttagttttcttagatttctctttcttttggggtttggctttcggagctacgctcgctcctttactttcacgagatcttgcaatttcttgactgatgacattgaaagtcaagtacatttgaagtcctaatataccagccaatacagcgatacggacgacgggggtattgtagtatccagttgtcaagtctagctcacgttgttcaccgagagccaaaccataccaaagggtaagaatggacaatatgatgctgccgaggcgggccaccaatttaaagctgttagacactaaagtggtaactttagagaatttttcgtctttgtcaacagtctggatcaattggaaaaagtggtaaaccaattcagaaatgtgatgaaggaccaaaagagagactagtaaacggttgaagttgaggaaataagggataaatatgagtgaaacagctgccaagctttgtgtggctttgccaatatattcttctttcttagccctttggaaatatagttcaggaagctcatggacattataagccaattgtacaataatatacaatttcatcaggaatgtcattggagctgggtaatctacccacaggcgagctatatcaaatacaaagttttctttgatgatgatgtcaagtccccacaaagttgatattaagtagaatatcgtcagttgaccactggtggtgaagactgctaacttggatttggagaggtggagtttcttggagactttgtccaagatgtattcctgaataatggcatggataacaacgcaaatcaaggtgtagaaaaatatacaagcccaatctttcacaccaggactgtaaaggggcacctctcctgcttctgttacattgtgctgcagagttatgaatattgaagcaattggagatgtagcttgtaccataaggccaactacaaacaccatagcaatacatgacacaatatcggcatgattttgaataacaaattcgtggctcaaaataggtggatttttatttgcagattttcttacaggttttaccatttttttgttgatttttatttttttactactaaaaatgttactgctatattaacgtatgttagctaagttacttccgccaccacttgccaccgaaaagtaaggtttccccactaatctacatttacaacaatcaaaatttaccgcaagtgccacgcaaagacacgtcacaagacatggacacc

SEQ ID NO: 6034 - DNA, 1475 bp, Diabrotica virgifera
  SmartBlast Evalue=5E-48; Info=Regucalcin n=1 Tax=Camponotus floridanus RepID=E2AGQ0_9HYME
cataaataaccattgtatgcatattagacacttattattcaattgtgacaatttgctataagtgtgttgtttacaatttttttaataaaatatattttgaagtggaatttgaatttgaatttgaaaaaaatttgcaataacgtatctgactttaatgaagggcaaagagtcaattagctcttaaaaaataagtggaacagataagtaaagtgataaaaaagtgtttatagtgccttaacaatggtccaataattatttttatcatacacctccaaccaaaatttttaatatagcgttgtagcaaaacaggaccaaccatcccaacgaccagaccaacattatgcggcttttaaaaataactactattatattatatactttgttttttaactgttgctacacgtatgtcattgaaaaagtaaccacagcagtacagcatgcggaaggacctttttggtgcccagaaactagaaatctactttatgtagattcatttaagttaactttacatcgaattaacatagacaacaaaaaacaaaaggagactgtgctacttaagaaccaccgttcgattggtttcgttattcccataaactgtacacaggaaagatacttggtatttgccgaccacgatgtatatgatttaaggtggtcttcaaatgtgacagtactagaaaaaattctaacaatagaaaagaataaaccaaagaatcaatataacgaaggaaaggctgatagaagaggcagagtttgggcaggaactttaaccagaaaggaggacctgggggtagaatcaggtggcggtagtttatacatgatcgacaataaactaagagtcaatcttgaattaactaatttgagcatcagcaacggcttagtttggaataggaattttaccaagttttattttattgatagcgcgaccaagaacatagacgagtatgattacaaagagaagtcagcaagtataactaacagaaggactgttataaacattaaagatgccggttttcaaggtattccggacggaatgaacatagacctaaagggtaatttatggatagcattatttggaggccatcatgtgctccaggtcaatcccgtaacaggagaaataatccgtaaaataaagatgcccgccacatacattacgtcggttatatggggtggaaataacttcgaaaccttgttcgtgtcgacatcccgtcttagacttaacaagagcaattaaaggaagaaccggatgctggcagtatatttgcagttaagggtttaggagtaaaaggtcttaagttaaatatggctaaaattaaaaaataatatgacagctttaaagttgttttttaatttactaatttataataatatttatttaaaagttagtaatttatacgtttcgtttagaaatatacatatttatatgtatatttctaaacgaaacgtataaattactaacttttaaataaatattatta

SEQ ID NO: 6035 - DNA, 1415 bp, Diabrotica virgifera
  SmartBlast Evalue=5E-48; Info=Regucalcin n=1 Tax=Camponotus floridanus RepID=E2AGQ0_9HYME
tatgtatatttctaaacgaaaagtataaattactaacttttaaataaatattattataaattagtaaattaaaaaacaactttaaagctgccatattattttttaattttagccatatttaacttaagaccttttactcctaaacccttaactgcaaatatactgccagcatccggttcttcctttaattgctcttgttaagtctaagacgggatgtcgacacgaacaaggtttcgaagttatttccaccccatataaccgacgtaatgtatgtggcgggcatctttattttacggattatttctcctgttacgggattgacctggagcacatgatggcctccaaataatgctatccataaattaccctttaggtctatgttcattccgtccggaataccttgaaaaccggcatctttaatgtttataacagtccttctgttagttatacttgctgacttctctttgtaatcatactcgtctatgttcttggtcgcgctatcaataaaataaaacttggtaaaattcctattccaaactaagccgttgctgatgctcaaattagttaattcaagattgactcttagtttattgtcgatcatgtataaactaccgccacctgattctacccccaggtcctcctttctggttaaagttcctgcccaaactctgcctcttctatcagcctttccttcgttatattgattctttggtttattcttttctattgttagaattttttctagtactgtcacatttgaagaccaccttaaatcatatacatcgtggtcggcaaataccaagtatctttcctgtgtacagtttatgggaataacgaaaccaatcgaacggtggttcttaagtagcacagtctccttttgttttttgttgtctatgttaattcgatgtaaagttaacttaaatgaatctacataaagtagatttctagtttctgggcaccaaaaaggtccttccgcatgctgtactgctgtggttactttttcaatgacatacgtgtagcaacagttaaaaaacaaagtatataatataatagtagttatttttaaaagccgcataatgttggtctggtcgttgggatggttggtcctgttttgctacaacgctatattaaaaattttggttggaggtgtatgataaaaataattattggaccattgttaaggcactataaacacttttttatcactttacttatctgttccacttattttttaagagctaattgactctttgcccttcattaaagtcagatacgttattgcaaatttttttcaaattcaaattcaaattccacttcaaaatatattttattaaaaaaattgtaaacaacacacttatagcaaattgtcacaattgaataataagtgtctaatatgcatacaatggttatttatg

SEQ ID NO: 6036 - DNA, 1431 bp, Diabrotica virgifera
  SmartBlast Evalue=6E-29; Info="Juvenile hormone-inducible protein, putative n=1 Tax=Aedes aegypti RepID=Q17DF4_AEDAE"
ccgtattaagggtactgattatatattatcttcagccgacttaaaatatcggccagtgctcttgaagtttctaaaagtgtatcattgtaaaagtgttttatataaagtgaagaatgggcgaggtattgaacaaagatgcactgcattcttggattcagcgtgcgataggtacagaaaacttcaattttactgtggaaaacaccacccaaaaaggagagggttacgtaggggacttatttttcgttaaaattgatttacaacaaccgattaacggactcaacgttctttatctggtcgtaaaaaccaacaagagggatcctggatcgattcgtctcatgcaggatttttgcaagagagaagtattcttttacggcacagtttttaaagaataccaggaatttctaaataacaagaagcttccagttcttttagacatggtacccaaatgttataaaactttttcagaaaatggcaatgaggttattattttagaaaatttaaagaaagggggttttatgctacatgcaagagaagagcccatgaatattgctcatctgaaaatgggcttaaaatcttatgcaaagttacatgccatgtctttagctctgaaagaccaaaagagagaaatttttgaaaatatgtcaaagacctgtacttccttagtgaatcagctgttttcaacgtctaaaaaagtgtttaatacaaagacacccatgttagtagaaactctaaaagaagctggtcgacctgatttgtcgatcttgtttaataagtacatacatgacaaaagtatgtatactagatttatggaaataggtaatactatttctaaagatcaagcaatagtacatggtgattgtcacaacgggaatatgatgtttcaatataaggatgacgataaatctgttccacttcgcatggttttgatagatttccaagcgtcttttattcattcaccagtactcgatctctcctattttctatggatgaatttatcaccaactgaagctccgaaaataaaagattttgtggagtattactatactgagttttgctcatatctaaaacaattaggtagtgacgctgacacagtatttccgagaagcatttttgaagaacatttaaaaaaatatctaccatatggatttcttttgatactagcattattagaaatattttatcttgaaaatgaagatacaccggctttccttgatgaaaccaactctttctttggaggtttgtcgaatgacctaaaattaaaatcacgggaccaatatttgaaacggctggtggcactagtggatacctttttcaatggtccatatgcgtaaacacaaaattatcctggcttttatggtaatgtcgactactaatgtacatatatatttgtaacagtacttttgaataaagtaataatttattgcgaaaaaa

SEQ ID NO: 6037 - DNA, 1389 bp, Diabrotica virgifera
  SmartBlast Evalue=6E-29; Info="Juvenile hormone-inducible protein, putative n=1 Tax=Aedes aegypti RepID=Q17DF4_AEDAE"
aaaatatcggccagtgctcttgaagtttctaaaagtgtatcattgtaaaagtgttttatataaagtgaagaatgggcgaggtattgaacaaagatgcactgcattcttggattcagcgtgcgataggtacagaaaacttcaattttactgtggaaaacaccacccaaaaaggagagggttacgtaggggacttatttttcgttaaaattgatttacaacaaccgattaacggactcaacgttctttatctggtcgtaaaaaccaacaagagggatcctggatcgattcgtctcatgcaggatttttgcaagagagaagtattcttttacggcacagtttttaaagaataccaggaatttctaaataacaagaagcttccagttcttttagacatggtacccaaatgttataaaactttttcagaaaatggcaatgaggttattattttagaaaatttaaagaaagggggttttatgctacatgcaagagaagagcccatgaatattgctcatctgaaaatgggcttaaaatcttatgcaaagttacatgccatgtctttagctctgaaagaccaaaagagagaaatttttgaaaatatgtcaaagacctgtacttccttagtgaatcagctgttttcaacgtctaaaaaagtgtttaatacaaagacacccatgttagtagaaactctaaaagaagctggtcgacctgatttgtcgatcttgtttaataagtacatacatgacaaaagtatgtatactagatttatggaaataggtaatactatttctaaagatcaagcaatagtacatggtgattgtcacaacgggaatatgatgtttcaatataaggatgacgataaatctgttccacttcgcatggttttgatagatttccaagcgtcttttattcattcaccagtactcgatctctcctattttctatggatgaatttatcaccaactgaagctccgaaaataaaagattttgtggagtattactatactgagttttgctcatatctaaaacaattaggtagtgacgctgacacagtatttccgagaagcatttttgaagaacatttaaaaaaatatctaccatatggatttcttttgatactagcattattagaaatattttatcttgaaaatgaagatacaccggctttccttgatgaaaccaactctttctttggaggtttgtcgaatgacctaaaattaaaatcacgggaccaatatttgaaacggctggtggcactagtggatacctttttcaatggtccatatgcgtaaacacaaaattatcctggcttttatggtaatgtcgactactaatgtacatatatatttgtaacagtacttttgaataaagtaataatttattgcgaaaaaa

SEQ ID NO: 6038 - DNA, 1364 bp, Diabrotica virgifera
  SmartBlast Evalue=1E-149; Info=Imaginal disc growth factor 2 n= 1 Tax=Tribolium castaneum RepID=Q0Z936_TRICA
cagttctatcaaagaacttagaggcgatgggttcgttaactttatcagtgatctttttatcgttagcggctttttcggtcgctgaaaatattgttgtgtgtaactacgagtcaaagtcccatttaagagatggagaaggaaaattcgatgtttctaatttaaacgaagctttgcgctattgcacccatttattatatggctacgctgcaattgacgacaacacatacaagttagttccaatgaatgaacaatatgatgtgattaaagaaaattataaacatataaccgatttgaagaagacccaccccaaacttaaggtgttactttctgtgggaggaaacgaagatgtcagtggctcaggtgacgagaaaaatgaaaaatatagaaaaattttggaatctaccgctcaccggttaagctttgtcaactctgcatacactttattaaaagcttatggttttgatggacttgatttggcttgggaattccccgaaaccaaacccaaaaagataaaatctggattgaaaaaactgtggagttccatcaaaacaacagttgccggtgaacatgttgttgacgagaatgctcagcagcatagagaacaattcgtagcattagttaaagaacttaaaaatgctcttaaagcagacaacatgcaactgtctctgacagttttgcccaacattaacagcacagtgtattatgatcccagaaatctggccccttatttggacttcattgttcttcatgcatttgacttctacacacctttacgtaacgaagaactggctgatttccctgcacctttgtacgaattaatcgaccgtagaggtgatgagaacattgatgcttgggtaaaatactggttatcaaacggaacaccagcaaagaaacttcttcttggcattcccacttacggtagaacttggcatctaaaaggcgaggcaaaagtagaccaattcccaataaccgatttgaatggaccaggtgatgcaggaccacttaccaaagaagcaggtcttctcagttatccagaaatctgtaataaagttactccacgaacaagcactccaggaggtttaaccaagattcctgacggaactaagcgcagaggagtttacgcataccgttatcctgacaaggacgacaagggaggaatctgggtaggatatgaagacacagaaacagcatctaccaaagcacagtatgccaaagctaaaggtcttggaggtattgctattgatgatctaacacttgatgacttcaaaggagtctgcggacacagtaataacaagtttgccatattaaaagctgcagtagctgcattgtaataaaattttaatttgtaattaaagttatagttt

SEQ ID NO: 6039 - DNA, 1355 bp, Diabrotica virgifera
  SmartBlast Evalue=1E-149; Info=Imaginal disc growth factor 2 n= 1 Tax=Tribolium castaneum RepID=Q0Z936_TRICA
caaagaacttagaggcgatgggttcgttaactttatcagtgatctttttatcgttagcggctttttcggtcgctgaaaatattgttgtgtgtaactacgagtcaaagtcccatttaagagatggagaaggaaaattcgatgtttctaatttaaacgaagctttgcgctattgcacccatttattatatggctacgctgcaattgacgacaacacatacaagttagttccaatgaatgaacaatatgatgtgattaaagaaaattataaacatataaccgatttgaagaagacccaccccaaacttaaggtgttactttctgtgggaggaaacgaagatgtcagtggctcaggtgacgagaaaaatgaaaaatatagaaaaattttggaatctaccgctcaccggttaagctttgtcaactctgcatacactttattaaaagcttatggttttgatggacttgatttggcttgggaattccccgaaaccaaacccaaaaagataaaatctggattgaaaaaactgtggagttccatcaaaacaacagttgccggtgaacatgttgttgacgagaatgctcagcagcatagagaacaattcgtagcattagttaaagaacttaaaaatgctcttaaagcagacaacatgcaactgtctctgacagttttgcccaacattaacagcacagtgtattatgatcccagaaatctggccccttatttggacttcattgttcttcatgcatttgacttctacacacctttacgtaacgaagaactggctgatttccctgcacctttgtacgaattaatcgaccgtagaggtgatgagaacattgatgcttgggtaaaatactggttatcaaacggaacaccagcaaagaaacttcttcttggcattcccacttacggtagaacttggcatctaaaaggcgaggcaaaagtagaccaattcccaataaccgatttgaatggaccaggtgatgcaggaccacttaccaaagaagcaggtcttctcagttatccagaaatctgtaataaagttactccacgaacaagcactccaggaggtttaaccaagattcctgacggaactaagcgcagaggagtttacgcataccgttatcctgacaaggacgacaagggaggaatctgggtaggatatgaagacacagaaacagcatctaccaaagcacagtatgccaaagctaaaggtcttggaggtattgctattgatgatctaacacttgatgacttcaaaggagtctgcggacacagtaataacaagtttgccatattaaaagctgcagtagctgcattgtaataaaattttaatttgtaattaaagttatagttt

SEQ ID NO: 6040 - DNA, 1481 bp, Diabrotica virgifera
  SmartBlast Evalue=1E-109; Info=Cystinosin-like protein n=1 Tax= Camponotus floridanus RepID=E2AMM9_9HYME
cggcagcacggaagaaggtagtcgtctgtatatcccgcacgtctacgctccacgcgctggcattgaatacaagacgtatttagtggatcggtgtgaatatttttatttcaagcgtgtgatgaatttctaacataacctcaatttctgtatacaaaacgattatttttgtgtgattgattatttagtgtgcagtagttgttttaatataagataatcatggaggtgctgtcgtcgtccaaaattgccttaacaattctttcagtattatttttatgtcaacatactcttagtaaaataactgtatcaacccatgatgcaaggataaaactacatgatacatttttaattgagattacattgccaggtgctgatattaataaagatgacacgatatcattagtatcacaacacgcggatattatcagtcctaatgtctcggaaattattttaaaggacgtaacggacggcgaaaagtttccagttagtataaatacatcacgtgctggacattcggatctatatgctaatgcttcatctaaccagaccgatgtaagcgacgtatacgttcgctttactgtatacaaaaacgatggattagatacattctcagctattataggttggatatacttcgttgcttggtctgtttcgttttatccgcaaatatatatcaactggaaaaggaaaagtgttgttggtttgaacttcgattttattgctttaaacgtggttggattttccttatactctctcttcaatttggggttgtactacattccagaaattagggatgaatatgcgcacaggtatcctcgagggttaaatccagtcaaagtaaatgatattgtttttgctgtccatgcaacactagcaacaatattgacaatcatacagtgttgcctatacgaaaaagaagaacaaagagtgtctacaactgccaggggaattttaggaatatttggagttttcatcttaatcagtattatcctgtcagtttgcaacgtcattcactggttggatctgttgtattattgttcttacgttaagttaacaattactctcattaagtatataccacaggcctacatgaactacaaacgaaaaagtaccattggatggagtataggaaatatattcctagattttactggaggtaccttgagtatgttacaaatgatggtcgatgcctacaattatgatgactgggtttcaatatttggtgatccaaccaaatttggtctaggactattcagcgtagtttttgacatattcttcatcgtccaacattacatactctacagacattcaagatataatgtggacttgccttaatttttagtttaaactagtttaagtatgtacaaaggatattatacttataaatttatttattattgttgtatattgaaaaatgtaacttttttaaaagatttttattactaagacacttgatatctaccgatattgatattaaatctgtg

SEQ ID NO: 6041 - DNA, 1273 bp, Diabrotica virgifera
  SmartBlast Evalue=1E-109; Info=Cystinosin-like protein n=1 Tax= Camponotus floridanus RepID=E2AMM9_9HYME
agataatcatggaggtgctgtcgtcgtccaaaattgccttaacaattctttcagtattatttttatgtcaacatactcttagtaaaataactgtatcaacccatgatgcaaggataaaactacatgatacatttttaattgagattacattgccaggtgctgatattaataaagatgacacgatatcattagtatcacaacacgcggatattatcagtcctaatgtctcggaaattattttaaaggacgtaacggacggcgaaaagtttccagttagtataaatacatcacgtgctggacattcggatctatatgctaatgcttcatctaaccagaccgatgtaagcgacgtatacgttcgctttactgtatacaaaaacgatggattagatacattctcagctattataggttggatatacttcgttgcttggtctgtttcgttttatccgcaaatatatatcaactggaaaaggaaaagtgttgttggtttgaacttcgattttattgctttaaacgtggttggattttccttatactctctcttcaatttggggttgtactacattccagaaattagggatgaatatgcgcacaggtatcctcgagggttaaatccagtcaaagtaaatgatattgtttttgctgtccatgcaacactagcaacaatattgacaatcatacagtgttgcctatacgaaaaagaagaacaaagagtgtctacaactgccaggggaattttaggaatatttggagttttcatcttaatcagtattatcctgtcagtttgcaacgtcattcactggttggatctgttgtattattgttcttacgttaagttaacaattactctcattaagtatataccacaggcctacatgaactacaaacgaaaaagtaccattggatggagtataggaaatatattcctagattttactggaggtaccttgagtatgttacaaatgatggtcgatgcctacaattatgatgactgggtttcaatatttggtgatccaaccaaatttggtctaggactattcagcgtagtttttgacatattcttcatcgtccaacattacatactctacagacattcaagatataatgtggacttgccttaatttttagtttaaactagtttaagtatgtacaaaggatattatacttataaatttatttattattgttgtatattgaaaaatgtaacttttttaaaagatttttattactaagacacttgatatctaccgatattgatattaaatctgtg

SEQ ID NO: 6042 - DNA, 1222 bp, Diabrotica virgifera
  SmartBlast Evalue=2E-98; Info="Cathepsin L-like proteinase"" n= 1 Tax=Diabrotica virgifera virgifera RepID=Q70EX2_DIAVI"
ggagcatagaggaaacagacacctaaagctaatttgttttctaatgaaataagatcaaatttaagtacataccttggacaacataacatgttttttgcttaaagatgagtttaatataaatattatatcttatcgaaataataaattgattgggatctgtgatttatataaaataaaatatcagcattgtacaaaaatctacatttatattttaaagagcagaacgacataatgaagatatttatcctgctttgtgcttgccttttggttgcctcagcacaactttcggctaacaaacaatgggttacgttcaagaaatctttccaaagaagttacaaattaggagaagaaaaacttcgtttccaagtatttcaaaaaaatcttcgcaaaattaatgaacacaattcaaaatacgagaagggagaaacgagttactttcttaaaataaccaaattcgctgactggaccgatgaagaattgaacgctatgttaaacccaaaaatagtagctaaatcacaccataaaaataccaaaacgctcgtacgtgatccaaacttttctcgtccagcaagcatcgactggagagatacagctgttttggctgtcaaagatcaggcagcctgtggttcttgttgggcatttagtactacaggtgcactggaaggtcaacttgctattcacaaaaatcagacaatccccttaagtgaacaagaattaatggactgtgatgatgagaattatgcatgctctggaggttatgctgacgtcgcatttgagtacattgaagcaaatggtattagttcagaaagtcaatacgagtatacacaaaagaaaggagaatgtagaaaagtggaaaataaaccagtctctagcatttcaggatggttgggagtaccttcagatgaagatgcacttatagaagctgttgctcaatatggtccagtatctgtttctgtgttcgctaacaacgattggagtttgtatggaggtggcatctttgatcacgacgactgtagatcaaatcctaatcatgctgtgttagcagttggttatacggaaaacagttggatagttaaaaattcctggggagcctcttggggagaagagggctacattcgtttagcccttggtaaaaatgaatgtcaaattacttctgccagtcaaattcctttactataaattactaaatatatatacttaaataaaatatttttatgctaaa

SEQ ID NO: 6043 - DNA, 1014 bp, Diabrotica virgifera
  SmartBlast Evalue=1E-98; Info="Cathepsin L-like proteinase"" n= 1 Tax=Diabrotica virgifera virgifera RepID=Q70EX2_DIAVI"
attttaaagagcagaacgacataatgaagatatttatcctgctttgtgcttgccttttggttgcctcagcacaactttcggctaacaaacaatgggttacgttcaagaaatctttccaaagaagttacaaattaggagaagaaaaacttcgtttccaagtatttcaaaaaaatcttcgcaaaattaatgaacacaattcaaaatacgagaagggagaaacgagttactttcttaaaataaccaaattcgctgactggaccgatgaagaattgaacgctatgttaaacccaaaaatagtagctaaatcacaccataaaaataccaaaacgctcgtacgtgatccaaacttttctcgtccagcaagcatcgactggagagatacagctgttttggctgtcaaagatcaggcagcctgtggttcttgttgggcatttagtactacaggtgcactggaaggtcaacttgctattcacaaaaatcagacaatccccttaagtgaacaagaattaatggactgtgatgatgagaattatgcatgctctggaggttatgctgacgtcgcatttgagtacattgaagcaaatggtattagttcagaaagtcaatacgagtatacacaaaagaaaggagaatgtagaaaagtggaaaataaaccagtctctagcatttcaggatggttgggagtaccttcagatgaagatgcacttatagaagctgttgctcaatatggtccagtatctgtttctgtgttcgctaacaacgattggagtttgtatggaggtggcatctttgatcacgacgactgtagatcaaatcctaatcatgctgtgttagcagttggttatacggaaaacagttggatagttaaaaattcctggggagcctcttggggagaagagggctacattcgtttagcccttggtaaaaatgaatgtcaaattacttctgccagtcaaattcctttactataaattactaaatatatatacttaaataaaatatttttatgctaaa

SEQ ID NO: 6044 - DNA, 1241 bp, Diabrotica virgifera
  SmartBlast Evalue=1E-111; Info=Chitin deacetylase 1 n=2 Tax= Chrysomela tremulae RepID=C3UTB8_9CUCU
gtaaacgtaaacgatctatatataacggatgccacctaagtaaaatgctagttttaaaaatggcaatgttccagtgcttgattttagttctcgtagctactttagcattcgatagtgcgattgcaaatgatgtagcaaaaccgtgtgagtctgattcttgtacgatcggcaacaattgtagatgttctagtcaagcgtcacctctaggtggaaatctcacagagtatcctcagctgattagtttaacatttgatgaagctgttacacaacacatctacgacaacagttggattacattgctcggaaatatatataatccagatgataagccaattagtggaacattctttgtaccacatgagtatacgagctatcaaagagttaatgatttgtacaactttggatttgaaattggtgtgcactcaattacgaaggattttagacaaaattactggagatatgcaactctagacacactaacaaaagaatttaaaggccaaaagcaaattataagtacttatgccaacataccagctgaagctattattggagtcagaactccccaactacaacttgcaggaaacacttccattgaggcctatatagcatcagaattggcatatgatagttcatggccctctttgccatcaagaagattatttccctatacattggattatcaatcaacagaacaatgtcttttgggcgcagaatgtcctaacgaagctttcccaggttattggattctgccaataaacgatttaacttcaccaaatggtacagaatgcaattcactggctacttgtggaatagaaggtagtgttgatgaaatcgccaaatatttggatgatcaaattgaaggaattagaagtaaatctagaactcccataaatttgatgatcaactcatactggtttgaacaaactgacaccagcttcgatgggcttcgaaaattcttggaaaacacagttgcacgtgaagcaaaagataccttcttcgtctcacaaaaacaggtcctagattttataaaaaatcccgttaaaattagcgattttaaaactgctgacgcgcccgatggagccagttgtgagccttacacctgcagacttaaaaaaggaacagaggatagaaacatggacgcgtgtgttccttgtccagacgaatacccatggattaataacgttaatgtataaataatcgtattttgaatctaaataaataaaagtttgatagatttaaaa

SEQ ID NO: 6045 - DNA, 1237 bp, Diabrotica virgifera
  SmartBlast Evalue=1E-111; Info=Chitin deacetylase 1 n=2 Tax= Chrysomela tremulae RepID=C3UTB8_9CUCU
aaatctatcaaacttttatttatttagattcaaaatacgattatttatacattaacgttattaatccatgggtattcgtctggacaaggaacacacgcgtccatgtttctatcctctgttccttttttaagtctgcaggtgtaaggctcacaactggctccatcgggcgcgtcagcagttttaaaatcgctaattttaacgggattttttataaaatctaggacctgtttttgtgagacgaagaaggtatcttttgcttcacgtgcaactgtgttttccaagaattttcgaagcccatcgaagctggtgtcagtttgttcaaaccagtatgagttgatcatcaaatttatgggagttctagatttacttctaattccttcaatttgatcatccaaatatttggcgatttcatcaacactaccttctattccacaagtagccagtgaattgcattctgtaccatttggtgaagttaaatcgtttattggcagaatccaataacctgggaaagcttcgttaggacattctgcgcccaaaagacattgttctgttgattgataatccaatgtatagggaaataatcttcttgatggcaaagagggccatgaactatcatatgccaattctgatgctatataggcctcaatggaagtgtttcctgcaagttgtagttggggagttctgactccaataatagcttcagctggtatgttggcataagtacttataatttgcttttggcctttaaattcttttgttagtgtgtctagagttgcatatctccagtaattttgtctaaaatccttcgtaattgagtgcacaccaatttcaaatccaaagttgtacaaatcattaactctttgatagctcgtatactcatgtggtacaaagaatgttccactaattggcttatcatctggattatatatatttccgagcaatgtaatccaactgttgtcgtagatgtgttgtgtaacagcttcatcaaatgttaaactaatcagctgaggatactctgtgagatttccacctagaggtgacgcttgactagaacatctacaattgttgccgatcgtacaagaatcagactcacacggttttgctacatcatttgcaatcgcactatcgaatgctaaagtagctacgagaactaaaatcaagcactggaacattgccatttttaaaactagcattttacttaggtggcatccgttatatatagatcgtttacgtttac

SEQ ID NO: 6046 - DNA, 1230 bp, Diabrotica virgifera
  SmartBlast Evalue=1E-121; Info=Aspartic proteinase 1 n=1 Tax= Chrysomela tremulae RepID=C3UTC4_9CUCU
ttttagagcattctatgacttatttattatgtatatttaaactgcttccgctaatcctacacgattattaccaaagtcaaattcggtgtagaactttccaatgaatacatctcctaggatccattccacatgagttctagtgttgaggtctaatcccatgaatccagaaatacatatgtcaataccgccgttagattgctttaaaacataatcatttccggaaagtgtgaattcttttcctccaaaaacaaaactaatttcgggtagttgatcaattttgctgcaatcaattatatattcaccattaaggaatgaaaaagcgcctatttctttatgtaacttttcgacttcagcgctaggtccagcgatcaaactggtaccagtgtctacgataatttgacatccatttgaacatagttttaaggaagatccaacgttaagactgtccataacaacttgccaatagcctttagctgaaacatctacataagtaaagtcacctttgtaatagtttgggtctgatccaccaagcaacaattcaccaccaacttctccatcagggtctctgttcaagtaaaaggagaagactggttcttgcacagcgccttgttcaaccagtgaattaaatactggagtaattccgttaacggaaatttcagggtatcccattcctaaaattccatcgaattttcccacaaggaaagctaaaccgggttcctgggtagcttcagcaaataattgatccttagcttgtaaacccccaaaatcaacaacatcttgggaaataagtcctgcaacttcccctgaaccatatgcaattgcgaatctggtgtcgtttttcacataggtagaagatttatcggcatcgtatttgttatgaagtaagcaagcaacttccaaaaatccacatttactagacggaatccagagattcgatgaaccagtgtcgaaaattacattaaaggtttgagcaggagttccaataccaatttctccataatattgagcatctaaatagttagttaaaacgacggcgctatcgtcattgacatttctattgtatttggctaataatccttcctttagtccatttctgttaagtgcatccctcggcttttcaaacttcttcagtggaattctattgatttcagcactgacaaaaacagcagcaaatacaaatattaacaatttggataacattttgatgctaccctgttcttcaatacaagg

SEQ ID NO: 6047 - DNA, 1226 bp, Diabrotica virgifera
  SmartBlast Evalue=1E-121; Info=Aspartic proteinase 1 n=1 Tax= Chrysomela tremulae RepID=C3UTC4_9CUCU
agagcattctatgacttatttattatgtatatttaaactgcttccgctaatcctacacgattattaccaaagtcaaattcggtgtagaactttccaatgaatacatctcctaggatccattccacatgagttctagtgttgaggtctaatcccatgaatccagaaatacatatgtcaataccgccgttagattgctttaaaacataatcatttccggaaagtgtgaattcttttcctccaaaaacaaaactaatttcgggtagttgatcaattttgctgcaatcaattatatattcaccattaaggaatgaaaaagcgcctatttctttatgtaacttttcgacttcagcgctaggtccagcgatcaaactggtaccagtgtctacgataatttgacatccatttgaacatagttttaaggaagatccaacgttaagactgtccataacaacttgccaatagcctttagctgaaacatctacataagtaaagtcacctttgtaatagtttgggtctgatccaccaagcaacaattcaccaccaacttctccatcagggtctctgttcaagtaaaaggagaagactggttcttgcacagcgccttgttcaaccagtgaattaaatactggagtaattccgttaacggaaatttcagggtatcccattcctaaaattccatcgaattttcccacaaggaaagctaaaccgggttcctgggtagcttcagcaaataattgatccttagcttgtaaacccccaaaatcaacaacatcttgggaaataagtcctgcaacttcccctgaaccatatgcaattgcgaatctggtgtcgtttttcacataggtagaagatttatcggcatcgtatttgttatgaagtaagcaagcaacttccaaaaatccacatttactagacggaatccagagattcgatgaaccagtgtcgaaaattacattaaaggtttgagcaggagttccaataccaatttctccataatattgagcatctaaatagttagttaaaacgacggcgctatcgtcattgacatttctattgtatttggctaataatccttcctttagtccatttctgttaagtgcatccctcggcttttcaaacttcttcagtggaattctattgatttcagcactgacaaaaacagcagcaaatacaaatattaacaatttggataacattttgatgctaccctgttcttcaatacaagg

SEQ ID NO: 6048 - DNA, 1196 bp, Diabrotica virgifera
  SmartBlast Evalue=2E-93; Info=Aldose 1-epimerase n=1 Tax= Harpegnathos saltator RepID=E2BW64_9HYME
caattgcaacatggtactttaattaaaacaataaaatcacatggttagtattttacaactaataaacaagtttataacattttcgtagaaaatctaaatttagttgtggtttcatagacttctccaggatagagtagaggactcggaaatttttcttgattaatggaatcaggataattttgagtctctaaacaaaaagctccgtgttttttaatagatccaccatcctttccaggaatgctgttattttcgggcaaaaagtttcctgtataaaactgtactccgggctgatcactatacacctctatcgatctaccagtagctggatgaacgacgcttgcaacaaaattgtcggcgtctttccgggaattttcgcgattgacacagaaattgtgatcgaagccgggtgatttaggaaccttgttgattacgtcgcccagacgaaccggcttcctcaaatcgaaggcggtaccctcgacctttgcaagttgacctgtaggaatgagattctcatcaacgggcgtgaaatggtcagcattaattctaaccacatggtcgtacagctccttagccccagcatcattaccagccaagttaaagtaggaatggttggttaggtttacaacagttggtttcgtggtcatcgccttgtagtttattataaacatgttactgacggttagttcaaacgttacgtttaccaccaaagaaccaggatagccttcttcaccatctggcgaaagataacttaaagtgactttgtttccattgactgagtagtcccagacgaccttatcgaagcctttgatgcctccgtgtagatgattgagtccattatttgtagctagtttgtactcttggttttctattttcatttttcctttcccaattctgttagcaaaccttccaatggtagcaccgaagtaaggattgtcgggttttagatacccatccaaagtgtcatatcctaccgctatatccctggacttgttgtatttatctggcacacaaatcgaagtaatacaagctccaaaattaataactttaatctcggtcccagctatatttttccacgtaaaacattttatttcgttgaaacctttctcagtatctttaagaatgtcgaaaggttcaacggaaagcgaaacatcggaagaagaaactgatttaactctacgtgccatggttgctcacag

SEQ ID NO: 6049 - DNA, 1193 bp, Diabrotica virgifera
  SmartBlast Evalue=2E-93; Info=Aldose 1-epimerase n=1 Tax= Harpegnathos saltator RepID=E2BW64_9HYME
tgagcaaccatggcacgtagagttaaatcagtttcttcttccgatgtttcgctttccgttgaacctttcgacattcttaaagatactgagaaaggtttcaacgaaataaaatgttttacgtggaaaaatatagctgggaccgagattaaagttattaattttggagcttgtattacttcgatttgtgtgccagataaatacaacaagtccagggatatagcggtaggatatgacactttggatgggtatctaaaacccgacaatccttacttcggtgctaccattggaaggtttgctaacagaattgggaaaggaaaaatgaaaatagaaaaccaagagtacaaactagctacaaataatggactcaatcatctacacggaggcatcaaaggcttcgataaggtcgtctgggactactcagtcaatggaaacaaagtcactttaagttatctttcgccagatggtgaagaaggctatcctggttctttggtggtaaacgtaacgtttgaactaaccgtcagtaacatgtttataataaactacaaggcgatgaccacgaaaccaactgttgtaaacctaaccaaccattcctactttaacttggctggtaatgatgctggggctaaggagctgtacgaccatgtggttagaattaatgctgaccatttcacgcccgttgatgagaatctcattcctacaggtcaacttgcaaaggtcgagggtaccgccttcgatttgaggaagccggttcgtctgggcgacgtaatcaacaaggttcctaaatcacccggcttcgatcacaatttctgtgtcaatcgcgaaaattcccggaaagacgccgacaattttgttgcaagcgtcgttcatccagctactggtagatcgatagaggtgtatagtgatcagcccggagtacagttttatacaggaaactttttgcccgaaaataacagcattcctggaaaggatggtggatctattaaaaaacacggagctttttgtttagagactcaaaattatcctgattccattaatcaagaaaaatttccgagtcctctactctatcctggagaagtctatgaaaccacaactaaatttagattttctacgaaaatgttataaacttgtttattagttgtaaaatactaaccatgtgattttattgttttaattaaagtaccatgttgcaattg

SEQ ID NO: 6050 - DNA, 1184 bp, Diabrotica virgifera
  SmartBlast Evalue=1E-107; Info=Ribosomal protein L5e (Fragment) n=1 Tax=Carabus granulatus RepID=Q4GXN2_CARGR
agggggtgcgattgcggtttatcccaataatagacaaatctatttttatccccttcatatgaggtattgttagtaattaaatgttggttaacctgaaaagttgctgtacctgtatcagagattgcgcttgcgagaagttgacattgacaattctatctttttcttgtgaaccgcggtggaggttgaaccgtaggttacgaataaaatttgtacatacatttaaaacatggctttcgtaaaggttgtgaagaacaaacagtacttcaagaggttccaggttaaattcaagaggcgtaggcaaggaaaaactgattactatgcccgtaaacgattgattgttcaagacaagaacaaatacaacactcccaagtaccgtttgatcgtacgtatctccaacaggaacattacttgtcagattgcttactcccgtattgagggagacaagattgtatgtgctgcttactcccatgaattgcccagatatggaatcaaaactggtcttaccaactatgctgctgcctatgccactggtttacttttggccagaaggctcctcaaaaaattgggacttgacaatttatacagtggcaccactgatgttactggggacgaatacaatgttgaagctgctgaacaaggaccaggagcattcaggtgttacttggacacaggtttaaaccgtaccagtactggcgcccgtgtctttggagccatgaaaggagctgtcgatggaggcttaaacattccccactctacaaaaagattccctggttttgacagcgaatccaaaagcttcaatgctgaagtccacaggaatcacatttttggcatccatgttgctgattatatgaaatcactggaggaggaagacccagaggcattcaagaggcaattcagtcaatacattaagctgggaattaatgctgaccagattgaaaatatgtacaagaatgcccatgctgccattcgtgcaaatcctgaattagaaaagaaggctgaaaaggctccagcacctgcaaagagatggaaccgtaggaagcttactttggctgaacgcaaggaccgtgttgcacagaaaaagaagtcctacttggccaaactccaagatcaagaatcttaaaatgttcttaaatttaatattgtgtagtaaaatacacaaataaattaaaataacactcaaaaaa

SEQ ID NO: 6051 - DNA, 1178 bp, Diabrotica virgifera
  SmartBlast Evalue=1E-107; Info=Ribosomal protein L5e (Fragment) n=1 Tax=Carabus granulatus RepID=Q4GXN2_CARGR
gagtgttattttaatttatttgtgtattttactacacaatattaaatttaagaacattttaagattcttgatcttggagtttggccaagtaggacttctttttctgtgcaacacggtccttgcgttcagccaaagtaagcttcctacggttccatctctttgcaggtgctggagccttttcagccttcttttctaattcaggatttgcacgaatggcagcatgggcattcttgtacatattttcaatctggtcagcattaattcccagcttaatgtattgactgaattgcctcttgaatgcctctgggtcttcctcctccagtgatttcatataatcagcaacatggatgccaaaaatgtgattcctgtggacttcagcattgaagcttttggattcgctgtcaaaaccagggaatctttttgtagagtggggaatgtttaagcctccatcgacagctcctttcatggctccaaagacacgggcgccagtactggtacggtttaaacctgtgtccaagtaacacctgaatgctcctggtccttgttcagcagcttcaacattgtattcgtccccagtaacatcagtggtgccactgtataaattgtcaagtcccaattttttgaggagccttctggccaaaagtaaaccagtggcataggcagcagcatagttggtaagaccagttttgattccatatctgggcaattcatgggagtaagcagcacatacaatcttgtctccctcaatacgggagtaagcaatctgacaagtaatgttcctgttggagatacgtacgatcaaacggtacttgggagtgttgtatttgttcttgtcttgaacaatcaatcgtttacgggcatagtaatcagtttttccttgcctacgcctcttgaatttaacctggaacctcttgaagtactgtttgttcttcacaacctttacgaaagccatgttttaaatgtatgtacaaattttattcgtaacctacggttcaacctccaccgcggttcacaagaaaaagatagaattgtcaatgtcaacttctcgcaagcgcaatctctgatacaggtacagcaacttttcaggttaaccaacatttaattactaacaatacctcatatgaaggggataaaaatagatttgtctattattgggataaaccgcaatcgcaccccct

SEQ ID NO: 6052 - DNA, 1161 bp, Diabrotica virgifera
  SmartBlast Evalue=1E-180; Info=Guanine nucleotide-binding protein subunit beta-like protein n=2 Tax=Neoptera RepID=E1ZX95_ 9HYME
atacaaaacattttattatcacagaatctaaaatctaggtataaataaaataaaaaactaagtatgttttttccagtctttttattgtaaaaaaactgtcgcttatctacaacttaacatcttaatgagcagacacactgacttgccatactctgatcgtgttgtcggaatatccagcgaacagtgtctgtccatctgtggaccaggccaaagaaagacactgaggaggttcagcttttgtgttttgtgaaacgacttctggtttaagttcttcaaccatttccttgctttccaagtcccagattttgattgagggtccaaaggcagcacacagccagtacctgtttggtgagaagcacaaagcggtgatgatgtcattatggtccaaggtatgtaagtgcttgccgtcattaagatcccacagcatggctttgcagtctttacctccgctagcacataagctaccgtcaggagagactgtaactgtgtttaagtaaccagtgtgaccagagtggttgatctttagacggcaattggtcaagttccataccttcaccatacggtcccatccagctgatacgatgattgggttggcgtggttgggggaaaatcttacacaggatacccaatcggaatgtccatcatcttgaattgtgtatttacattcggccaaggtgttccacagtttgatggtcttgtcacgggatccagacacaatttgtctattgtcaacagagaaggctacactcaaaacatccttagtgtgatcttcaaatcttcttgtagtttttcctgcagccaaatcccacagacgaagagtcttgtcccatgaaccagaaagagcataatttccgtcactggagagtactacatctgagataaagtgagagtggccatataaacgtttttggggtacaccatattgggtatcttcacgtgtcaatttccatacaatcaaggttttgtctctggatgaagataaaatcatatcagggtattttgggttggtggcaatttgtgttacccatccattgtgacccaaaagggtgccttttaattgcaaagtttcagtcatcttatttttttcttagcagctacacatacacgactacttctcacagcaaccgcacaaaaaagaaacacgtttatcgaaaatttgac

SEQ ID NO: 6053 - DNA, 1089 bp, Diabrotica virgifera
  SmartBlast Evalue=1E-180; Info=Guanine nucleotide-binding protein subunit beta-like protein n=2 Tax=Neoptera RepID=E1ZX95_ 9HYME
ccagtctttttattgtaaaaaaactgtcgcttatctacaacttaacatcttaatgagcagacacactgacttgccatactctgatcgtgttgtcggaatatccagcgaacagtgtctgtccatctgtggaccaggccaaagaaagacactgaggaggttcagcttttgtgttttgtgaaacgacttctggtttaagttcttcaaccatttccttgctttccaagtcccagattttgattgagggtccaaaggcagcacacagccagtacctgtttggtgagaagcacaaagcggtgatgatgtcattatggtccaaggtatgtaagtgcttgccgtcattaagatcccacagcatggctttgcagtctttacctccgctagcacataagctaccgtcaggagagactgtaactgtgtttaagtaaccagtgtgaccagagtggttgatctttagacggcaattggtcaagttccataccttcaccatacggtcccatccagctgatacgatgattgggttggcgtggttgggggaaaatcttacacaggatacccaatcggaatgtccatcatcttgaattgtgtatttacattcggccaaggtgttccacagtttgatggtcttgtcacgggatccagacacaatttgtctattgtcaacagagaaggctacactcaaaacatccttagtgtgatcttcaaatcttcttgtagtttttcctgcagccaaatcccacagacgaagagtcttgtcccatgaaccagaaagagcataatttccgtcactggagagtactacatctgagataaagtgagagtggccatataaacgtttttggggtacaccatattgggtatcttcacgtgtcaatttccatacaatcaaggttttgtctctggatgaagataaaatcatatcagggtattttgggttggtggcaatttgtgttacccatccattgtgacccaaaagggtgccttttaattgcaaagtttcagtcatcttatttttttcttagcagctacacatacacgactacttctcacagcaaccgcacaaaaaagaaacacgtttatcgaaaatttgac

SEQ ID NO: 6054 - DNA, 1158 bp, Diabrotica virgifera
  SmartBlast Evalue=2E-47; Info=NADH dehydrogenase subunit 2 n= 104 Tax=Chrysolina RepID=B5BRE7_9CUCU
tttcttttaatatcaaaaattaatatacatcttatattaaagtgtaaaaaaggtaagctaattaagctattgggttcataccccactcataaaggttttaatccttttcttttaatttataaattatataaaatttttttattaattttttaattagtggtactttaattacagtttccgcttattcctgattaagaatgtgaatcggtttagaaattaatttattgagatttatccccctaatgaaatctcataataatatttttcccgctgaagccactcttaaatattttattactcaagctttagcttctgctattgtattgttttcaattcttttaactttaaattcttcagattttattttaagaaattgaaatttaacatataatttaatcctaaattcagctttaataacaaaaattggagcagccccctttcatgcttgatttccagaagttgtagaaggattaaattgaataaataatttaatattaataacatgacaaaaaattgctcctataattataatcatatataattataattctttattttttagaattattattgtaatttgctcattaattagaggaattctaggattaaaccaaattaggcttcgaaaattaatagcctattcttctattaatcatattgcctgaatattggctagtatattaacttataaaataatttgatttatttattttataatctattctattattctaatttctattatcttattatttaattatttaaaaattttttatataaaacaattatttataaatttaaattctaataaaatattaaaattattttttatttttaattttttatccttaggtggattacccccgttcttaggatttcttcctaaatgattagtaattaataatttagttgaaaataatttttatgctgtaagattaattttaattattttaactttaattacattatttttttatttacgaattactttttctactataactattataataaatgaaatttatagaaaatctattaaaattaataataattgactaattttttttaatgcatttactttaataagattaattttatgtacagaaattttcagaatactttaaggatttaagttaaattaaacttttaaccttcaaa

SEQ ID NO: 6055 - DNA, 1123 bp, Diabrotica virgifera
  SmartBlast Evalue=2E-46; Info=NADH dehydrogenase subunit 2 n= 104 Tax=Chrysolina RepID=B5BRE7_9CUCU
aaagtattctgaaaatttctgtacataaaattaatcttattaaagtaaatgcattaaaaaaaaattagtcaattattattaattttaatagattttctataaatttcatttattataatagttatagtagaaaaagtaattcgtaaataaaaaaataatgtaattaaagttaaaataattaaaattaatcttacagcataaaaattattttcaactaaattattaattactaatcatttaggaagaaatcctaagaacgggggtaatccacctaaggataaaaaattaaaaataaaaaataattttaatattttattagaatttaaatttataaataattgttttatataaaaaatttttaaataattaaataataagataatagaaattagaataatagaatagattataaaataaataaatcaaattattttataagttaatatactagccaatattcaggcaatatgattaatagaagaataggctattaattttcgaagcctaatttggtttaatcctagaattcctctaattaatgagcaaattacaataataattctaaaaaataaagaattataattatatatgattataattataggagcaattttttgtcatgttattaatattaaattatttattcaatttaatccttctacaacttctggaaatcaagcatgaaagggggctgctccaatttttgttattaaagctgaatttaggattaaattatatgttaaatttcaatttcttaaaataaaatctgaagaatttaaagttaaaagaattgaaaacaatacaatagcagaagctaaagcttgagtaataaaatatttaagagtggcttcagcgggaaaaatattattatgagatttcattagggggataaatctcaataaattaatttctaaaccgattcacattcttaatcaggaataagcggaaactgtaattaaagtaccactaattaaaaaattaataaaaaaattttatataatttataaattaaaagaaaaggattaaaacctttatgagtggggtatgaacccaatagcttaattagcttaccttttttacactttaatataagatgtatattaatttttgatattaaaagaaa

SEQ ID NO: 6056 - DNA, 1145 bp, Diabrotica virgifera
  SmartBlast Evalue=2E-82; Info=Aldo-keto reductase n=1 Tax=Aedes aegypti RepID=Q17G72_AEDAE
tagtaggtattcctagttcaagggcgacgactcactagtatttgacgttctgtacaagtgaaaatattggtgtaccgttatcagcaaaagaagatggcaaaaactgtaccatgtggatcacttaatatgccaacggtgggactaggtacatggcaagctaccgatgaagcagagttggagaaagcattgaacgtggcattggagactggttaccgtcatattgatacagcagctgcatacgaaaacgaacacataatcggtaaagttttaaaccaatggatatccgctggtaaattaaaaagagatgatctttttattgtgaccaaacttccaatccagggaatacatcgtgatcgcgttgaaaaatatttaactgagtctctaaaaaaactggaattagactatgtagatttgtatttgattcactttccagttggtcttgcaggaactgaaggcggtatagtctttgaaaaggaagaccatttgggagtatggaagagtatggaaaaacaagtcgaagctggcagaacaaaaactataggtttatccaatttcacagttagccaaatcgataatattttgaagaactgtaaaattaaaccagcaaacaaccaagtcgaattacatgtttttctacaacaaccagaactggtacagttctgtcagaaaagtggtatttccgtaacagcctattcgccaattggaagtcctggtatgaacatatttttgaagaaaatgggtgtaaaggagaaaactttggtcaatgtattagctaaccctgttgtcttggatatagccaaaaaacacaacaaaaccactgcccaagttgctctacgattcctgttgcagcaaaatatcatcgttattccgaaaagcgtcaatcctgaacgattaaaaagtaattttgacattttcaactttaatttagacgatgaagatatgaaacaacttagagggctagaagttggagaagatgctcgtatggcagattggaaagtactaccagggttaaccgaacagccagcctatccattcagaagaaactaacatttatgatgcccgcagtgataatcttatttagcccatatattattatattttataactcataaatatttgtaatatacaggtattattatactctt

SEQ ID NO: 6057 - DNA, 1121 bp, Diabrotica virgifera
  SmartBlast Evalue=2E-82; Info=Aldo-keto reductase n=1 Tax=Aedes aegypti RepID=Q17G72_AEDAE
cgacgactcactagtatttgacgttctgtacaagtgaaaatattggtgtaccgttatcagcaaaagaagatggcaaaaactgtaccatgtggatcacttaatatgccaacggtgggactaggtacatggcaagctaccgatgaagcagagttggagaaagcattgaacgtggcattggagactggttaccgtcatattgatacagcagctgcatacgaaaacgaacacataatcggtaaagttttaaaccaatggatatccgctggtaaattaaaaagagatgatctttttattgtgaccaaacttccaatccagggaatacatcgtgatcgcgttgaaaaatatttaactgagtctctaaaaaaactggaattagactatgtagatttgtatttgattcactttccagttggtcttgcaggaactgaaggcggtatagtctttgaaaaggaagaccatttgggagtatggaagagtatggaaaaacaagtcgaagctggcagaacaaaaactataggtttatccaatttcacagttagccaaatcgataatattttgaagaactgtaaaattaaaccagcaaacaaccaagtcgaattacatgtttttctacaacaaccagaactggtacagttctgtcagaaaagtggtatttccgtaacagcctattcgccaattggaagtcctggtatgaacatatttttgaagaaaatgggtgtaaaggagaaaactttggtcaatgtattagctaaccctgttgtcttggatatagccaaaaaacacaacaaaaccactgcccaagttgctctacgattcctgttgcagcaaaatatcatcgttattccgaaaagcgtcaatcctgaacgattaaaaagtaattttgacattttcaactttaatttagacgatgaagatatgaaacaacttagagggctagaagttggagaagatgctcgtatggcagattggaaagtactaccagggttaaccgaacagccagcctatccattcagaagaaactaacatttatgatgcccgcagtgataatcttatttagcccatatattattatattttataactcataaatatttgtaatatacaggtattattatactctt

SEQ ID NO: 6058 - DNA, 1093 bp, Diabrotica virgifera
  SmartBlast Evalue=3E-88; Info=CG9119 n=6 Tax=Sophophora RepID= Q9W0J9_DROME
ctcggccccaataatgagtatcaacaggtttatcgattctgtagatttcttcgccaacgttgaaatatcccaagtattctacagtgtctggtgttgtatcatagtggtaatgaccagcctcgttgtgatgactaaaactgtggaaatgttgtacacgcaagtcaaggtccccaccatcgctattcaccaaagtaccaacggcaataaggggggctgacatattatagaatttgagccattggtttagcatctcttcgttttctatgggggtctttgagaagtcgcgcattacgtgctgtttcgctttgccttctttaagcaggaacactccaccaagacccactaattccttatattcttccactatggctttccttatcgatgtaatgaagttatcttcacctgtgcgctttttcacgtgcactttaagaacctttccaggttttccttccgatacaaagaaatttgcaagtaaagctactcgagtctcttcttttgggatggatttttgttcggacttatcgtcatttgcgtcaactttggatattttagtctcttgcctaattacagttccacttttaatcaaaatgtcatagataccctcacagttgccaccaatgtagggatgaggtccagctccaggcccaatgagaaatgcaggatcagctttagcaagcttgacaatatcttttacatcatatactttatctcttttcacactaggcaataggtaaggattgccacctaattctattaatttggggtttccaccaagaccactttctgctaatgtaaagggttctttagttaaatctggacagtccactacttccacagatacttcagcaaagttggtttgtaaagattttttaacaacttcagcaagttctgctaatggtggcacaaacagttttttggattcaacgggcaaagtctgtgcatttaatgccatggttcttttaacagttagataacacaagataagtaaaagagatctcattttatttgaatgttaagtgaaagtatcaaattcacactgactgaccacaaggatatcaaaatcaaaagcagagaagttagagataaatctaaa

SEQ ID NO: 6059 - DNA, 959 bp, Diabrotica virgifera
  SmartBlast Evalue=2E-88; Info=CG9119 n=6 Tax=Sophophora RepID= Q9W0J9_DROME
aagaaccatggcattaaatgcacagactttgcccgttgaatccaaaaaactgtttgtgccaccattagcagaacttgctgaagttgttaaaaaatctttacaaaccaactttgctgaagtatctgtggaagtagtggactgtccagatttaactaaagaaccctttacattagcagaaagtggtcttggtggaaaccccaaattaatagaattaggtggcaatccttacctattgcctagtgtgaaaagagataaagtatatgatgtaaaagatattgtcaagcttgctaaagctgatcctgcatttctcattgggcctggagctggacctcatccctacattggtggcaactgtgagggtatctatgacattttgattaaaagtggaactgtaattaggcaagagactaaaatatccaaagttgacgcaaatgacgataagtccgaacaaaaatccatcccaaaagaagagactcgagtagctttacttgcaaatttctttgtatcggaaggaaaacctggaaaggttcttaaagtgcacgtgaaaaagcgcacaggtgaagataacttcattacatcgataaggaaagccatagtggaagaatataaggaattagtgggtcttggtggagtgttcctgcttaaagaaggcaaagcgaaacagcacgtaatgcgcgacttctcaaagacccccatagaaaacgaagagatgctaaaccaatggctcaaattctataatatgtcagccccccttattgccgttggtactttggtgaatagcgatggtggggaccttgacttgcgtgtacaacatttccacagttttagtcatcacaacgaggctggtcattaccactatgatacaacaccagacactgtagaatacttgggatatttcaacgttggcgaagaaatctacagaatcgataaacctgttgatactcattattggggccgag

SEQ ID NO: 6060 - DNA, 1087 bp, Diabrotica virgifera
gtccagtcgtgaatgtacgtttgtaacacgggaagttccttgcaaggatacggtattagccctgggaggaggagccatgggcatttcttcatcgtctacggcatctaaatctatgtatgtacttggctgaagacgagaagttcttaaagttgcgttgtaagagcggaggggtcctttttcatatattccagtcagcttttgataagcattatgagatgcatatgttggccacccataaattagttcttctcgtaaagcttccctcattgcttgtcttgtcacttctagagaatttatcatctgtgaagctgtatttctcaattctggttttgtccatttgtacagagttggatcatataaccttactggttcccttggctcgtagtcaggttctctcataatagacttgtgtaccctaggtggggatctacttgctctacttgtattcactgcagcattcctctttggagctggcctcttagttggggacctgttgggtggtatcagtccaagctgcttttgtattgctacattcaaatcattccttggcttagatttattagtcgttaagtctgattcttccattacgatctgttttctttaaaatgctatgaccaattactttaacgcttccgctgcttgaaggtgcagtgcttctatcatcacgtatcctattaatctttgtgcgagcatcttgaacttttgatttcgtctttattatgtctctagcatcgacgactggttttcgtttctttccaagaagcgtttgacgagcatcctgtactcttcggccttcactctttcttggttttgttggaaaattgctctttttaatagttctctttttaacgccgtttttcggatttggcctatgcgattttggagacctatatttctggtcccgacttctaacacgctgtttggccattgaatccactaatttctataatttgtaaaataccaaatgctataatcggaatcaaggaattacaaagatatttaaaataacaataattagtaatatgtgttacagaaggtcttaaatttcacatgaaaagttaacagcatacctaacgtctacaaaaat

SEQ ID NO: 6061 - DNA, 1068 bp, Diabrotica virgifera
atgctgttaacttttcatgtgaaatttaagaccttctgtaacacatattactaattattgttattttaaatatctttgtaattccttgattccgattatagcatttggtattttacaaattatagaaattagtggattcaatggccaaacagcgtgttagaagtcgggaccagaaatataggtctccaaaatcgcataggccaaatccgaaaaacggcgttaaaaagagaactattaaaaagagcaattttccaacaaaaccaagaaagagtgaaggccgaagagtacaggatgctcgtcaaacgcttcttggaaagaaacgaaaaccagtcgtcgatgctagagacataataaagacgaaatcaaaagttcaagatgctcgcacaaagattaataggatacgtgatgatagaagcactgcaccttcaagcagcggaagcgttaaagtaattggtcatagcattttaaagaaaacagatcgtaatggaagaatcagacttaacgactaataaatctaagccaaggaatgatttgaatgtagcaatacaaaagcagcttggactgataccacccaacaggtccccaactaagaggccagctccaaagaggaatgctgcagtgaatacaagtagagcaagtagatccccacctagggtacacaagtctattatgagagaacctgactacgagccaagggaaccagtaaggttatatgatccaactctgtacaaatggacaaaaccagaattgagaaatacagcttcacagatgataaattctctagaagtgacaagacaagcaatgagggaagctttacgagaagaactaatttatgggtggccaacatatgcatctcataatgcttatcaaaagctgactggaatatatgaaaaaggacccctccgctcttacaacgcaactttaagaacttctcgtcttcagccaagtacatacatagatttagatgccgtagacgatgaagaaatgcccatggctcctcctcccagggctaataccgtatccttgcaaggaacttcccgtgttacaaacgtacattcacgactggac

SEQ ID NO: 6062 - DNA, 1036 bp, Diabrotica virgifera
  SmartBlast Evalue=8E-54; Info=Cytochrome c-2 n=22 Tax= Endopterygota RepID=CYC2_DROME
ttttgattcataaatagtttaatgaacaaggacaaaaaaataacaagatactgaatgtttcagtcgtactgtacagtttttggtatacttaatacaatggtatgaaataatttaaatatgattaaaataatttaaaaattgcctattttgtacacagtacttcatctgtcatgatacaataacatatgtaatagatgaaaatactactaatacacacgagttaattgtctttgtatgaattatagtgatagatagaaaagacaatatctaacataacaaacagaagattcttacaatttgctatgtacataattgtatttaatatcttgcagtatataattaaagttggcagataaaaactgccaatattattccagaagtaactgaaaactagctggtagtaagaaattatctttcctataccatttgtaatgttcaaaactgtatattgtaaaacgacatgtcttcaaacaaaaaatataggaaagattaaggagcatcttctaattcatccaaaaacaaagttatgatggtgctccagaataatttacttagttgccgatttaaggtaggcaataagatcccctcgttcgttgggcttcttcaaaccagcaaacaccatttttgtgccagggatgtatttcttggggttttcaaggtattcaaataaggtgtcttcgccccatgtgatacctttggctttgttggcatctgtgtaggcgaatccgggtgcttgtcctgtcttccttccaaacaatccatgtaagttagggcctactttatgtttaccgcccgattctacagtatggcattgttcgcacctttgcttaaagatttttttgcctttttctacatctccggctggtacacccattttagttatttaaagtagtttatatatcacaggtaatgaataaaatttggtttaattttgtgcacttgctggaatgatttttcgcgggtaatctattctgtccaccctcctgactactatacgattcgtctatcaatgacaattcaatgactcatgtgctca

SEQ ID NO: 6063 - DNA, 1032 bp, Diabrotica virgifera
  SmartBlast Evalue=7E-54; Info=Cytochrome c-2 n=22 Tax= Endopterygota RepID=CYC2_DROME
gattcataaatagtttaatgaacaaggacaaaaaaataacaagatactgaatgtttcagtcgtactgtacagtttttggtatacttaatacaatggtatgaaataatttaaatatgattaaaataatttaaaaattgcctattttgtacacagtacttcatctgtcatgatacaataacatatgtaatagatgaaaatactactaatacacacgagttaattgtctttgtatgaattatagtgatagatagaaaagacaatatctaacataacaaacagaagattcttacaatttgctatgtacataattgtatttaatatcttgcagtatataattaaagttggcagataaaaactgccaatattattccagaagtaactgaaaactagctggtagtaagaaattatctttcctataccatttgtaatgttcaaaactgtatattgtaaaacgacatgtcttcaaacaaaaaatataggaaagattaaggagcatcttctaattcatccaaaaacaaagttatgatggtgctccagaataatttacttagttgccgatttaaggtaggcaataagatcccctcgttcgttgggcttcttcaaaccagcaaacaccatttttgtgccagggatgtatttcttggggttttcaaggtattcaaataaggtgtcttcgccccatgtgatacctttggctttgttggcatctgtgtaggcgaatccgggtgcttgtcctgtcttccttccaaacaatccatgtaagttagggcctactttatgtttaccgcccgattctacagtatggcattgttcgcacctttgcttaaagatttttttgcctttttctacatctccggctggtacacccattttagttatttaaagtagtttatatatcacaggtaatgaataaaatttggtttaattttgtgcacttgctggaatgatttttcgcgggtaatctattctgtccaccctcctgactactatacgattcgtctatcaatgacaattcaatgactcatgtgctca

SEQ ID NO: 6064 - DNA, 1489 bp, Diabrotica virgifera
  SmartBlast Evalue=2E-31; Info=Endonuclease-reverse transcriptase n=1 Tax=Bombyx mori RepID=D7F161_BOMMO
tatataaaatactttccaatttgtttaatagatgcattcagttgatatgtttaaataaaatttatccctttgccagtaagcgtttacataaatatgaactactgatctttccttccttttctttcttcactaaacagtgaattttgtttgaattgtgtttgaattatagggctagggctaggatatactagcataactatgaccagactctctttctctctcttgtcgtttcccattactgaggatcatgatttcttccaatattcctaacaatgtttctccattggtctctatcttcagctgctctaagagcttcgcagaatgagtttccagctgaatgctttatttggtcagaccatctagttggtgatcgtcctcttgatcttctcccggaacgtttccagaaacaattaatctttccaaagtgacgtcacctctgcgaatcacgtgaccaaagaattgcagaattcgttgcagacatattgtggacagctttttttaatattgagttggtttagaatggaaacgtttgtcctatgagctgtctaaggtatacgaagcattcttatccagcaccacatctcaaaggcatcaattttttgtcgctcgcatgcgcgaagatttcaagtctctgctccatatagaaatattgagaatacaagggcattcaccagtctcatcttgatgttttgagagatagatctgttttccaaactttagttaggcgactcatcgcattttttgccataccaatacgttcccaacttctgcttcacagttaccatcgttagatgaccagactagtacgaccaaattttaacattaattgaaaggaacactctaataacacaagtaaatccatatattctattcttcctagtcggtcatccgattccgacatcgtcccatctggaaaattgtcaatgatttctcttaaaactgtctccatctttctctatcctctgcaactctgaagcaaaggtttagtgcagctccgacctcttttgtaatatggtccacatatattttgtttgtgatcttctccgggctctagctccttgcatcatcccctgcaatgtcagcttcttcagaccatctcttcgcaccacatgaccaaagtaagcagtgatttttttgaggcctacctgtaacgtctataatgcgtttatcaacttcctttaaataccattcagatccaatagaaaatgtagaaggtcattgtttttaccaagccttatatttgtatccatggtgatgttctggcttttccatactttggtgagctttatcattgacggccatgcttccgaactgactcgttctatttgttctaacatatccgtcaattcttccaaggattcgacaataagcgttgtattgtatcatctgcataagttgttgattcttctgccgccaatggatatgccctgttcccagtaacagttccctaaacaaccccagtaacacgatcctgccaggtcaccatatg

SEQ ID NO: 6065 - DNA, 792 bp, Diabrotica virgifera
  SmartBlast Evalue=8E-41; Info=Endonuclease-reverse transcriptase n=1 Tax=Bombyx mori RepID=D7F163_BOMMO
ctaacgatggtaactgtgaagcagaagttgggaacgtattggtatggcaaaaaatgcgatgagtcgcctaactaaagtttggaaaaacagatctatctctcaaaacatcaagatgagactggtgaatgcccttgtattctcaatatttctatatggagcagagacttgaaatcttcgcgcatgcgagcgacaaaaaattgatgcctttgagatgtggtgctggataagaatgcttcgtataccttagacagctcataggacaaacgtttccattctaaaccaactcaatattaaaaaaagctgtccacaatatgtctgcaacgaattctgcaattctttggtcacgtgattcgcagaggtgacgtcactttggaaagattaattgtttctggaaacgttccgggagaagatcaagaggacgatcaccaactagatggtctgaccaaataaagcattcagctggaaactcattctgcgaagctcttagagcagctgaagatagagaccaatggagaaacattgttaggaatattggaagaaatcatgatcctcagtaatgggaaacgacaagagagagaaagagagtctggtcatagttatgctagtatatcctagccctagccctataattcaaacacaattcaaacaaaattcactgtttagtgaagaaagaaaaggaaggaaagatcagtagttcatatttatgtaaacgcttactggcaaagggataaattttatttaaacatatcaactgaatgcatctattaaacaaattggaaagtattttatata

SEQ ID NO: 6066 - DNA, 1060 bp, Diabrotica virgifera
  SmartBlast Evalue=6E-59; Info=Pancreatic triacylglycerol lipase n=1 Tax=Harpegnathos saltator RepID=E2B986_9HYME
tttttacgttagattttattgtttatttaactatgtagtacaataaacatctttatcctttatggaatggagatttgctgtgtgttttaaggtagtaggaaccagaggccattttatcaatatggaacattcccatgctagcttttggtccggtacatttacccttctgatattcctcataactattgcactgctgtccaacaaatcctgtgctagtcaatgattcggcatatatttcgtatgacctagagtgagcacaaccgccacctaaatcaaatccacaacctggttgtgattttcctccatttggatagaagtcagagtctccgcatggagccaaatatcccatctttcctccattcgtgtgaataatttggacattctctgcatcactagcgtcaatacggttgtctgttctctcttctctgaatagaggaccagctggatctaaaccaacaattctgtcgacttgtccatccaaagcagctccagcacatccacagatatgagcacccagggaatgacctacaaatttcaacttattaagttgtaaaccgtattttttattcagagatctggcgaagtctgctatatatcctccaactttttgcatagacccctgtgctgttaagtaaccttttccagcaattggactccagtcgacgacaaagatattaacatcgtggtccctgagtatatattctctgacatgagaattaacatctgccttatggctatccttccatccatgcacgataaaaatagtttctctctttgttgtaaatgatgtcgttttcaatttctctgtgttgttgctgtgaatctccacaccttcttcatctccagggttagacttgctgaagaaaaagtactttacatcggatccagacgacgacaagagttctggtcggctgtttaggagacgctctactttaagattgccgtctttgtcttcgtacaagaagtactctagatcttcggagtgttcattgtcaccagttaacagatggcaagctcctagcagcaataaactgatataaatcttgcaatacttcatttt

SEQ ID NO: 6067 - DNA, 1055 bp, Diabrotica virgifera
  SmartBlast Evalue=6E-59; Info=Pancreatic triacylglycerol lipase n=1 Tax=Harpegnathos saltator RepID=E2B986_9HYME
acgttagattttattgtttatttaactatgtagtacaataaacatctttatcctttatggaatggagatttgctgtgtgttttaaggtagtaggaaccagaggccattttatcaatatggaacattcccatgctagcttttggtccggtacatttacccttctgatattcctcataactattgcactgctgtccaacaaatcctgtgctagtcaatgattcggcatatatttcgtatgacctagagtgagcacaaccgccacctaaatcaaatccacaacctggttgtgattttcctccatttggatagaagtcagagtctccgcatggagccaaatatcccatctttcctccattcgtgtgaataatttggacattctctgcatcactagcgtcaatacggttgtctgttctctcttctctgaatagaggaccagctggatctaaaccaacaattctgtcgacttgtccatccaaagcagctccagcacatccacagatatgagcacccagggaatgacctacaaatttcaacttattaagttgtaaaccgtattttttattcagagatctggcgaagtctgctatatatcctccaactttttgcatagacccctgtgctgttaagtaaccttttccagcaattggactccagtcgacgacaaagatattaacatcgtggtccctgagtatatattctctgacatgagaattaacatctgccttatggctatccttccatccatgcacgataaaaatagtttctctctttgttgtaaatgatgtcgttttcaatttctctgtgttgttgctgtgaatctccacaccttcttcatctccagggttagacttgctgaagaaaaagtactttacatcggatccagacgacgacaagagttctggtcggctgtttaggagacgctctactttaagattgccgtctttgtcttcgtacaagaagtactctagatcttcggagtgttcattgtcaccagttaacagatggcaagctcctagcagcaataaactgatataaatcttgcaatacttcatttt

SEQ ID NO: 6068 - DNA, 1024 bp, Diabrotica virgifera
  SmartBlast Evalue=4E-74; Info=ATP synthase n=1 Tax=Bombyx mori RepID=Q2F5T4_BOMMO
gtcttataataatttattttatttcaacgtataatgtactgtgtaagaataaaaagaaaagaaattaaaaatgttcgtctacactttgggcttacttatagactgtacatacatacttaaacatttattaaatgtaatcttatgctttagccaatcctgctaaatcgctgatacacttgttaatattttgtttttcttgatcagctgtaattgaggatcgtactttagctacaacatagtcaacaagattcttctgggtaattctgcgctcgatgttttgcttctctacttggtagtccaaccgtttcttgacttcagagtatgcactgatgaggcgttctctgtaactggcctctaactgaagagctacattttcacgtttagcttcaaccaataaagtttggccttccatgcttttctgggctttttcttcatcggatatttggtcggtcaaagattgtttttggtttacacgactttcattccatgcgttttcatattcctcaatttccttatcaagatatgcagccaattttggaccaagggtcttgataccatatacccacataatcaatagggagagaccactgtaatattcatgttccaaaacataaatttctttgctaaccaggtatgtagacaaggtgactgcgaaagtgtaaggtcctgtgacaccagtttttttgtagaaaaattggaaccactcatcaggaatgaatcccatgcgtacttttcctggttcttgtcttgcaggtctggcaaaagctacttcaccaggtctttcatcagttttggctacttgggtattggcggtcgaagtgcttgtagctcttaagcaatttgctactagagattttgaggcctgtcctgaaagaattgctgccctggaaagcattttaatatatctttttgatttccttatatattgaatttaactttaactagtcttttaaaaagatggaaaaatgtgaaaattacagcacccactggacctcgcactatcgtgtcgttcacggaaatgtcc

SEQ ID NO: 6069 - DNA, 1019 bp, Diabrotica virgifera
  SmartBlast Evalue=4E-74; Info=ATP synthase n=1 Tax=Bombyx mori RepID=Q2F5T4_BOMMO
ataataatttattttatttcaacgtataatgtactgtgtaagaataaaaagaaaagaaattaaaaatgttcgtctacactttgggcttacttatagactgtacatacatacttaaacatttattaaatgtaatcttatgctttagccaatcctgctaaatcgctgatacacttgttaatattttgtttttcttgatcagctgtaattgaggatcgtactttagctacaacatagtcaacaagattcttctgggtaattctgcgctcgatgttttgcttctctacttggtagtccaaccgtttcttgacttcagagtatgcactgatgaggcgttctctgtaactggcctctaactgaagagctacattttcacgtttagcttcaaccaataaagtttggccttccatgcttttctgggctttttcttcatcggatatttggtcggtcaaagattgtttttggtttacacgactttcattccatgcgttttcatattcctcaatttccttatcaagatatgcagccaattttggaccaagggtcttgataccatatacccacataatcaatagggagagaccactgtaatattcatgttccaaaacataaatttctttgctaaccaggtatgtagacaaggtgactgcgaaagtgtaaggtcctgtgacaccagtttttttgtagaaaaattggaaccactcatcaggaatgaatcccatgcgtacttttcctggttcttgtcttgcaggtctggcaaaagctacttcaccaggtctttcatcagttttggctacttgggtattggcggtcgaagtgcttgtagctcttaagcaatttgctactagagattttgaggcctgtcctgaaagaattgctgccctggaaagcattttaatatatctttttgatttccttatatattgaatttaactttaactagtcttttaaaaagatggaaaaatgtgaaaattacagcacccactggacctcgcactatcgtgtcgttcacggaaatgtcc

SEQ ID NO: 6070 - DNA, 1029 bp, Diabrotica virgifera
  SmartBlast Evalue=6E-30; Info=Grauzone n=1 Tax=Tribolium castaneum RepID=D6WI00_TRICA
accaacctggctcacaccggtttaaactcagatcatgtaaaattttaaaagtcgaacagacttaataatatagctgctacaccaattataaactttaatccaacatcgaggtcgcaatctttattatcgatttgaactctccaataaaattacgctgttatccctaaggtaatttattcttataatcaaaaaaattggatcaagcgttgagcttttgccagtgttgttagtgagctccaatgacttttataaaaaatacaagttaaaatgaatcataataataatatgttacaattgtgtagactgtgtttagttaaggacgaagttaatataccaatttttgaggaacaaggtgatattaggcaaatattcctgaaaattagttcgtgtctaccggtgaaggtttcccgagatgaccaactgcctaaaaaaatatgtgatggatgttcctataagttagatatgttgtatgaattttggaatactagtgcgaatgcagagaaacaattgttaacatggttgggagaggcgggcatgacatctcagatgacagatggaaccatttcagctgtagcacaacaaatcaagccagcagatgcatttgtaaaacaagagacaatagacccgccagatatccttaaggatgacgatgatgaggatgaagaggataaagactatatgaaacaggaagagagctcgaataatgttgaagagcctcctccaaaaagggcgaggcggacagctgcagttaaagctgccatcgccttggaccagaatagtgatgacgatgatgattcaggagagccaatgactaaggttgaagatgacaccgacgatagtgataatgacgatggacctccgttcgttgatgtaccatcaactagtgcagatgatcaacctggaccctcgggcgttggcaaagatggagtagaagcaccgatactaaacactccaacttttttgttcgacacgttatcgtcttccaagagtgccagccttcaaaatgttcaagccttgcctcgatactac

SEQ ID NO: 6071 - DNA, 940 bp, Diabrotica virgifera
  SmartBlast Evalue=5E-30; Info=Grauzone n=1 Tax=Tribolium castaneum RepID=D6WI00_TRICA
tcggtgcttctactccatctttgccaacgcccgagggtccaggttgatcatctgcactagttgatggtacatcaacgaacggaggtccatcgtcattatcactatcgtcggtgtcatcttcaaccttagtcattggctctcctgaatcatcatcgtcatcactattctggtccaaggcgatggcagctttaactgcagctgtccgcctcgccctttttggaggaggctcttcaacattattcgagctctcttcctgtttcatatagtctttatcctcttcatcctcatcatcgtcatccttaaggatatctggcgggtctattgtctcttgttttacaaatgcatctgctggcttgatttgttgtgctacagctgaaatggttccatctgtcatctgagatgtcatgcccgcctctcccaaccatgttaacaattgtttctctgcattcgcactagtattccaaaattcatacaacatatctaacttataggaacatccatcacatatttttttaggcagttggtcatctcgggaaaccttcaccggtagacacgaactaattttcaggaatatttgcctaatatcaccttgttcctcaaaaattggtatattaacttcgtccttaactaaacacagtctacacaattgtaacatattattattatgattcattttaacttgtattttttataaaagtcattggagctcactaacaacactggcaaaagctcaacgcttgatccaatttttttgattataagaataaattaccttagggataacagcgtaattttattggagagttcaaatcgataataaagattgcgacctcgatgttggattaaagtttataattggtgtagcagctatattattaagtctgttcgacttttaaaattttacatgatctgagtttaaaccggtgtgagccaggttggt

SEQ ID NO: 6072 - DNA, 1008 bp, Diabrotica virgifera
  SmartBlast Evalue=1E-134; Info=Ribosomal protein L8 n=11 Tax= Endopterygota RepID=D1M824_9CUCU
ggtaaagttgctgttgtttttctagatctcaaataaatcttaaaaatccgctttaattttaagtcatcgttgttttactttattaaaaaatagtgtttagtgatcttgattaatctacaatgggtcgtgtaattcgtgcacaacgtaaaggtgcgggatctgtattcaaatcccacacaaaaaagaggaaaggagcacccaaactacgttatttagatttctcagaaagacatggttacattaagggtgttgtaaaagatatcatacatgaccctggccgtggtgctccattggcagtagtacatttcagagatccctacaagttccaaactaggaaggaattgtttattgcccccgaaggaatgtacactggacaatttttgtactgtggaaagaaagctaaccttcaaattggaaatgtattgcctgtaggaactatgcctgaaggtaccattgtatgcaacttagaagaaaaaactggtgaccgtggtcggctagctcgtgcatctggaaactatgctaccgtaattgcccataatcacgacacaaagaaaaccagagttaagttaccttctggagccaagaaagttattccatcaaacaacagggccatggtgggtatcgttgctggaggtggtcgtattgacaaaccaatcttgaaagcaggtcgtgcttaccacaaatacaaagttaaacgtaactgctggcctaaggtacgtggtgttgctatgaaccctgttgaacatcctcacggaggtggtaaccatcaacacattggtaaagcatccacagttaagagaggaacatctgctggtcgtaaagtcggtcttatcgctgccaggagaactggtaggattaggggaggcaaagttgatgccaagaaagaggattaggttatacgagttaaaagtttttgtacaatttgtatcagtgtatttcttgtggattatatttatacttagatattgttaattcattgggaatatattggtttcacagttaaaaaaa

SEQ ID NO: 6073 - DNA, 1000 bp, Diabrotica virgifera
  SmartBlast Evalue=1E-130; Info=Ribosomal protein L8 n=11 Tax= Endopterygota RepID=D1M824_9CUCU
aactgtgaaaccaatatattcccaatgaattaacaatatctaagtataaatataatccacaagaaatacactgatacaaattgtacaaaaacttttaactcgtataacctaatcctctttcttggcatcaactttgcctcccctaatcctaccagttctcctggcagcgataagaccgactttacgaccagcagatgttcctctcttaactgtggatgctttaccaatgtgttgatggttaccacctccgtgaggatgttcaacagggttcatagcaacaccacgtaccttaggccagcagttacgtttaactttgtatttgtggtaagcacgacctgctttaagattggtttgtcaatacgaccacctccagcaacgatacccaccatggccctgttgtttgatggaataactttcttggctccagaaggtaacttaactctggttttctttgtgtcgtgattatgggcaattacggtagcatagtttccagatgcacgagctagccgaccacggtcaccagttttttcttctaagttgcatacaatggtaccttcaggcatagttcctacaggcaatacatttccaatttgaaggttagctttctttccacagtacaaaaattgtccagtgtacattccttcgggggcaataaacaattccttcctagtttggaacttgtagggatctctgaaatgtactactgccaatggagcaccacggccagggtcatgtatgatatcttttacaacacccttaatgtaaccatgtctttctgagaaatctaaataacgtagtttgggtgctcctttcctcttttttgtgtgggatttgaatacagatcccgcacctttacgttgtgcacgaattacacgacccattgtagattaatcaagatcactaaacactattttttaataaagtaaaacaacgatgacttaaaattaaagcggatttttaagatttatttgagatctagaaaaacaacagcaactttacc

SEQ ID NO: 6074 - DNA, 968 bp, Diabrotica virgifera
  SmartBlast Evalue=4E-73; Info=Luciferin-regenerating enzyme n=2 Tax=Photinus pyralis RepID=Q86DU5_PHOPY
gttcgctgatgttacatatagttcatcaagattaggtcccccaaatgttacagaagttacctcttttgcaggaataggaattgtggccaaaagagtttcaggttttcttggatcgattttgattactttatatccaccaaaaacagctacccacagattaccatcaacgtctatagtcataccatcaggaaatcctactacgttattcttttcgagactgaatatagatttgccattggaaattgttccattttgaatgtcaaaatcgtattcttctatacatcttttaaacgaatcaatgtagtacatcttttttagctgctcattccatgccaatccattagatattcctaattgtcccaagtgtttaactgctttgccattttggattgaaaatagggaacctcttccaggtgcaacattaccatttgttggttcttctcccatagtacctgcccatattcttccagaaggatcgcatttaccatcattaaatctgttattaactagttcattttcagtttgaacttcgacaattttttctatgttagttactttgtcacttactccatcccatgtcactgcaagtagttctcgatcaagaccaacgacaaatctgtctttctgtcctttaacgggtagaactagcgaaactaaattttttcttttgtaagctgcgtcagatgggacttttgatctttctaaaactactttagtatgttgcctagtagcaggaacgtatcgatgaatcgcctgtccaaagatatccaccaaatataaactttgagtttccgcatcccagtgaggtccttctcccaattctgtcgttgaaatttctttcactctttccaatttgggattcatgttgtcaattcaactgtctgcgataaaaaacatacactatttaacaatcaattaactattaacaatcacagctctgagcttataaatatgtagtgaggttttta

SEQ ID NO: 6075 - DNA, 943 bp, Diabrotica virgifera
  SmartBlast Evalue=4E-73; Info=Luciferin-regenerating enzyme n=2 Tax=Photinus pyralis RepID=Q86DU5_PHOPY
gctcagagctgtgattgttaatagttaattgattgttaaatagtgtatgttttttatcgcagacagttgaattgacaacatgaatcccaaattggaaagagtgaaagaaatttcaacgacagaattgggagaaggacctcactgggatgcggaaactcaaagtttatatttggtggatatctttggacaggcgattcatcgatacgttcctgctactaggcaacatactaaagtagttttagaaagatcaaaagtcccatctgacgcagcttacaaaagaaaaaatttagtttcgctagttctacccgttaaaggacagaaagacagatttgtcgttggtcttgatcgagaactacttgcagtgacatgggatggagtaagtgacaaagtaactaacatagaaaaaattgtcgaagttcaaactgaaaatgaactagttaataacagatttaatgatggtaaatgcgatccttctggaagaatatgggcaggtactatgggagaagaaccaacaaatggtaatgttgcacctggaagaggttccctattttcaatccaaaatggcaaagcagttaaacacttgggacaattaggaatatctaatggattggcatggaatgagcagctaaaaaagatgtactacattgattcgtttaaaagatgtatagaagaatacgattttgacattcaaaatggaacaatttccaatggcaaatctatattcagtctcgaaaagaataacgtagtaggatttcctgatggtatgactatagacgttgatggtaatctgtgggtagctgtttttggtggatataaagtaatcaaaatcgatccaagaaaacctgaaactcttttggccacaattcctattcctgcaaaagaggtaacttctgtaacatttgggggacctaatcttgatgaactatatgtaacatcagcgaac

SEQ ID NO: 6076 - DNA, 964 bp, Diabrotica virgifera
  SmartBlast Evalue=1E-92; Info=Transcription elongation factor S- II n=1 Tax=Bombyx mori RepID=Q1HQ13_BOMMO
atcggcaaaaaaaggcggaagcgtctttcggtataatcggtgatcatctcgacagaaaagaaaaaatacaacaattacaaacatttcttttaaacaacacaatcatacaagatgagcgtcgaggaggatgttatgagaattcagaaaaaattaaataaaatgacttcggaagatggaactgggcaagaacaagcattggaccttctaaaagaactccaaaccttagacgtaaacctggaagttctaacgaaaactcgtataggaatgacagtaaatgctctacgaaagtccagtaaagacgacgaagtgatcagtctgtccaaaacacttataaaaaactggaagaaatttatatccggaaccaattctaatgaaaaatcctctagtagtagttcaaataagccaaaaaaagaaaaggaggagaagccgagccgcgaagagaaagatagggataaagataagggaaaccttcccaaacagtttccagctagttcaaataccacagattctgtaagattgaagtgtagagaaatgttgacggctgctattaggacagattctcaagctgacgatttcgaaggttgtgcctcagctgaagagttagcagaagaactcgaagaagcaatctttctggagttcaagaacacagatatgcgttacaaaaacagagtccgttctagaatatcgaatctgaaagacccgaagaacccaactctaagaacaaactacagaatcggagtaatcacagcaggtcgtttagctgtcatgacagccgaagaaatggccaatgacgaggtgaagaaactcagggagaaattcactaaggaagctatcaatgacgcgcagttggctactgcgcaaggtactaagacggacatgcttaagtgcggcaaatgcaagaagaggaattgtacttacaaccagttgcagactaggtcatctgatgaacctatgactacttttg

SEQ ID NO: 6077 - DNA, 951 bp, Diabrotica virgifera
  SmartBlast Evalue=9E-93; Info=Transcription elongation factor S- II n=1 Tax=Bombyx mori RepID=Q1HQ13_BOMMO
ggcggaagcgtctttcggtataatcggtgatcatctcgacagaaaagaaaaaatacaacaattacaaacatttcttttaaacaacacaatcatacaagatgagcgtcgaggaggatgttatgagaattcagaaaaaattaaataaaatgacttcggaagatggaactgggcaagaacaagcattggaccttctaaaagaactccaaaccttagacgtaaacctggaagttctaacgaaaactcgtataggaatgacagtaaatgctctacgaaagtccagtaaagacgacgaagtgatcagtctgtccaaaacacttataaaaaactggaagaaatttatatccggaaccaattctaatgaaaaatcctctagtagtagttcaaataagccaaaaaaagaaaaggaggagaagccgagccgcgaagagaaagatagggataaagataagggaaaccttcccaaacagtttccagctagttcaaataccacagattctgtaagattgaagtgtagagaaatgttgacggctgctattaggacagattctcaagctgacgatttcgaaggttgtgcctcagctgaagagttagcagaagaactcgaagaagcaatctttctggagttcaagaacacagatatgcgttacaaaaacagagtccgttctagaatatcgaatctgaaagacccgaagaacccaactctaagaacaaactacagaatcggagtaatcacagcaggtcgtttagctgtcatgacagccgaagaaatggccaatgacgaggtgaagaaactcagggagaaattcactaaggaagctatcaatgacgcgcagttggctactgcgcaaggtactaagacggacatgcttaagtgcggcaaatgcaagaagaggaattgtacttacaaccagttgcagactaggtcatctgatgaacctatgactacttttg

SEQ ID NO: 6078 - DNA, 971 bp, Diabrotica virgifera
tttatatcgattggttttattgaaatagttattacaattcataaaaaaattacatttcctcaaaggtctccaccactattttggaaacaattttatacattttattataaactttcttcacgtcgggattttttattagatgatattttatgtaaccgtaatcttctgtctcccaagattcaactagggatggcaagtgaagctttgttaaaaatgataaatcccccaaacattcgcatttaatgaagtcttcgttagtattagctttcagcactaatttatttattacaaactgggcaagtttgctgataacacaatccagacattctcgttcgtagtcgtaccacatacacacaaagggctcaacaatatttataacattcgtgagtaatgcgctaactttcacattgctccaaaagcctgttatttctgagtttgaggagtcacgtagagaaaatctaaaatcgaaatcctctacactcatattttgtacaaatttatcgtacagatttagattaatatccaatcctacttttgtgacttctaacctaaatcttccattcccatacaatggaacggcatctagtaaactcatatccaaaacatactcagtttccaatcctagtttatccagagttgtattaacagaaattctgttccttgtaaatgactttctatctgtgtccaatttgtaaacatcatccttgtatttgaaagtgtctaatccatatacatgaaattgggttaaatttaagtcaccaattataatgtcttgtaaattctttggaatggaaatattagcggacggaattaaaattattttcgaagaaactgaaccaaggattaggtccaaaattcccttcaatagacctggtataagtgctgaactttgtccaactaatagtagaagaataattgaacaggttattaacttcatcgtgtttcacgaaagtatagatgcttgaacgtat

SEQ ID NO: 6079 - DNA, 964 bp, Diabrotica virgifera
caagcatctatactttcgtgaaacacgatgaagttaataacctgttcaattattcttctactattagttggacaaagttcagcacttataccaggtctattgaagggaattttggacctaatccttggttcagtttcttcgaaaataattttaattccgtccgctaatatttccattccaaagaatttacaagacattataattggtgacttaaatttaacccaatttcatgtatatggattagacactttcaaatacaaggatgatgtttacaaattggacacagatagaaagtcatttacaaggaacagaatttctgttaatacaactctggataaactaggattggaaactgagtatgttttggatatgagtttactagatgccgttccattgtatgggaatggaagatttaggttagaagtcacaaaagtaggattggatattaatctaaatctgtacgataaatttgtacaaaatatgagtgtagaggatttcgattttagattttctctacgtgactcctcaaactcagaaataacaggcttttggagcaatgtgaaagttagcgcattactcacgaatgttataaatattgttgagccctttgtgtgtatgtggtacgactacgaacgagaatgtctggattgtgttatcagcaaacttgcccagtttgtaataaataaattagtgctgaaagctaatactaacgaagacttcattaaatgcgaatgtttgggggatttatcatttttaacaaagcttcacttgccatccctagttgaatcttgggagacagaagattacggttacataaaatatcatctaataaaaaatcccgacgtgaagaaagtttataataaaatgtataaaattgtttccaaaatagtggtggagacctttgaggaaatgtaatttttttatgaattgtaataactatttcaataaaaccaatcgatataaa

SEQ ID NO: 6080 - DNA, 1085 bp, Diabrotica virgifera
  SmartBlast Evalue=1E-131; Info=CCR4-NOT transcription complex subunit 7 n=3 Tax=Apocrita RepID=E2AP23_9HYME
agaccagtaagtttcatgaagagtttgtggtatctccgttgtcgttcgagtagttgttggcagttccgttcactgcgaaagaggtgccgagaccgtagagatggcccgagaatttggagtcgtctatggtgtcttcgaagaacatctctttcatcttgaaaaatgccattcctgtcagaagagaatcagaacctgcttgatgttgtggtccaatcctttcaagttctagctgttctgccacttcttgtaatccccctttaagatttttgcatgatttcataaggtactttacatcatatatggtaggaaaatataattttaacaaatcgaagaattctgtttcgtcttgaggtaagttgttgtccgttaacagttttatcaggtagccaaaatcataaccagaatggaaggacagccattttatattttccaccaggacaataccagatgacatcagcaattccgcaaattcaagaggttcaataccttcatcctcatgtttcttaaactgaatgccagaattttgcaggaggtctatactatcctgtgcatacatgtcttcctgaaggttgaatttgaagttgaattgccatgtagtataggcaccccctggagtttttccgttatcatcaagaaatgtgagcccaagctgtattatcctcaataaatcgacattgcacctcagcatttggtattggtaatctgcagaacttctaaattctccaataggcctcgcaactacaccaggaaattctgtgtccatagcaacatactgatatttttgtactatttgtctgatggttctgaattcatcctccaggttatgggcccaaacatccctaatgccacagtcttcattattaggatgtggtatgctacctagagtagctgctggcatatttcttccaattttcttaagttattatcaaatgcgactttagaaaacattcagtactcctctttccacacttcacttattttggtcattctatggtgaaaatggagtaatcttatgttattttttatttgaaaaacatgagaatttctcaattttaataattttgacaactttcaagtgtgtcatc

SEQ ID NO: 6081 - DNA, 834 bp, Diabrotica virgifera
  SmartBlast Evalue=1E-106; Info="CCR4-NOT transcription complex subunit, putative n=1 Tax=Pediculus humanus corporis RepID= E0W425_PEDHC"
ccccctttaagatttttgcatgatttcataaggtactttacatcatatatggtaggaaaatataattttaacaaatcgaagaattctgtttcgtcttgaggtaagttgttgtccgttaacagttttatcaggtagccaaaatcataaccagaatggaaggacagccattttatattttccaccaggacaataccagatgacatcagcaattccgcaaattcaagaggttcaataccttcatcctcatgtttcttaaactgaatgccagaattttgcaggaggtctatactatcctgtgcatacatgtcttcctgaaggttgaatttgaagttgaattgccatgtagtataggcaccccctggagtttttccgttatcatcaagaaatgtgagcccaagctgtattatcctcaataaatcgacattgcacctcagcatttggtattggtaatctgcagaacttctaaattctccaataggcctcgcaactacaccaggaaattctgtgtccatagcaacatactgatatttttgtactatttgtctgatggttctgaattcatcctccaggttatgggcccaaacatccctaatgccacagtcttcattattaggatgtggtatgctacctagagtagctgctggcatatttcttccaattttcttaagttattatcaaatgcgactttagaaaacattcagtactcctctttccacacttcacttattttggtcattctatggtgaaaatggagtaatcttatgttattttttatttgaaaaacatgagaatttctcaattttaataattttgacaactttcaagtgtgtcatc

SEQ ID NO: 6082 - DNA, 941 bp, Diabrotica virgifera
  SmartBlast Evalue=2E-41; Info=Chymotrypsin-like proteinase 6A n= 1 Tax=Tribolium castaneum RepID=D0R8R1_TRICA
cgttaccttacttaacatagtaaattttactcagtttgaactgtatatatataaaaaaaattagtagatatttagagttttatcattagaaatatggtgggacttaaagtttttgttttatttgggctattggcaacaacctatggatttaatcaaataaaatctagaaatacccgcaatggcttagatttggatggtggtacagaggctacagatggacaattcccttgggtagtttcacttcaatcaaattttttgtttgttaatacacatgtttgtggaggtgtcatcttaaatgaaaattgggttcttacatctgccgaatgtgaaggtgctgctaacaaagtagtggccggtgctgttaaactgcaaggagccgatcctaataaacagactgttgatattgaaagatgggtggttcatccagactataactcacaagtagttgggccaaacgatatcgctttagttaaactaaagcaaccattgaaatttaacgatgccattaaagccgctaatttgcccgagcaaggagctgcagttactggattagctgatgttgttggatacggcaacagcttcttgcctgatttcaacactttgagctacatatcagacttgccccttataagctacgacgattgcaatcaagctcttgaagatttaatacaagaaaagagtcctttggacgaaaagagcaacatttgcgcaggtgtattggcaaatggagctaataactgcaatggagataccggtagccctcttacccaagataattttgtcattggtatcactacttggataatcactccttgtcatagcaggggagcccctgatgtattcaccaatgtggccaactttgttgactggatcaatgaaaacatttcacaatagaatggaataattttttaatgaccaaaatatatattaaatttattatt

SEQ ID NO: 6083 - DNA, 938 bp, Diabrotica virgifera
  SmartBlast Evalue=2E-41; Info=Chymotrypsin-like proteinase 6A n= 1 Tax=Tribolium castaneum RepID=D0R8R1_TRICA
aataaatttaatatatattttggtcattaaaaaattattccattctattgtgaaatgttttcattgatccagtcaacaaagttggccacattggtgaatacatcaggggctcccctgctatgacaaggagtgattatccaagtagtgataccaatgacaaaattatcttgggtaagagggctaccggtatctccattgcagttattagctccatttgccaatacacctgcgcaaatgttgctcttttcgtccaaaggactcttttcttgtattaaatcttcaagagcttgattgcaatcgtcgtagcttataaggggcaagtctgatatgtagctcaaagtgttgaaatcaggcaagaagctgttgccgtatccaacaacatcagctaatccagtaactgcagctccttgctcgggcaaattagcggctttaatggcatcgttaaatttcaatggttgctttagtttaactaaagcgatatcgtttggcccaactacttgtgagttatagtctggatgaaccacccatctttcaatatcaacagtctgtttattaggatcggctccttgcagtttaacagcaccggccactactttgttagcagcaccttcacattcggcagatgtaagaacccaattttcatttaagatgacacctccacaaacatgtgtattaacaaacaaaaaatttgattgaagtgaaactacccaagggaattgtccatctgtagcctctgtaccaccatccaaatctaagccattgcgggtatttctagattttatttgattaaatccataggttgttgccaatagcccaaataaaacaaaaactttaagtcccaccatatttctaatgataaaactctaaatatctactaattttttttatatatatacagttcaaactgagtaaaatttactatgttaagtaaggtaacg

SEQ ID NO: 6084 - DNA, 1121 bp, Diabrotica virgifera
  SmartBlast Evalue=6E-51; Info=Monocarboxylate transporter 14 n= 1 Tax=Harpegnathos saltator RepID=E2BIZ7_9HYME
ttactgctggattttttgccaatatgtgtgtttgcggtgcgttaatgagagatccagactggataattgaagaagaaagggaagagaagaagctaaaaaaaagagagaaggaaaaagtcgagtgcttcttcaattgatacagaatgtctcgaagaaatcaaacatgtccttgaagagggaggcgacacgcaatatttgcttcaagacgtcgacgccactttagatttaagcgataaggatagatttaattcagttgttgatttacctacgttcgttagagaaaacgaaaaagttccgttagaagtattaaaacatttaagcgaaaataaacaattatacagtattattgtagacaattacccaaatttattatcaggtcgcagttcgtcagacagagaattaaacatttcttacatggcaaatcgacatacgtctagagttcccgtaagactttccatgaaagtaaaaattcctgaagaacatgaccccaataaacctgaatcgaatacgcctcttttacagcgaccctcaaaaaatttttccgaatactcaaaccctgcaagtgaagctgtcaaatctactgatagtaaaacggaggttggaagaccttcaaaaaatttatctgaagtatccaagtctacagatactaaaatggtgactgagagaccgtcaaaaaatttatctgaatattcaaagcctgcaagtgaggcacccaaatctatggatactaaaactgacgctgtatcacctactgctaacaaggccactcaactccttagaagtttatctgttaaagctaagactcaaatccaaccccaatcttatttgaaaaatgttagatttaggaagaactctatcggttacagaggtgcgatgttgaatatccataaatacaaagctaaagctacgagctgtccagatatatataaaaattccatggcaactttatttagagaagacgagaattggtacgacgagtttttggatattctgaaagatttgaccaatttttccctcttcttggatttgcacttcttcatactgtcattgtctacagtaatagtggatatgtggtacgtggtaccgtattattatttggcagaacatatgacgcgccatgg

SEQ ID NO: 6085 - DNA, 913 bp, Diabrotica virgifera
  SmartBlast Evalue=6E-57; Info=Monocarboxylate transporter 14 n= 1 Tax=Harpegnathos saltator RepID=E2BIZ7_9HYME
cgagcgagtagactcaagcgtggaacgttgttgagttattactaaaaaatagctgttttttgttactcgcgtctacacatgtgctgaattattgtgccggataaataaattaaacaagaatccacaataagaaagtgtggcctcgatgagaacaaccgatttgaagcagtcgtgggtgaataagatatactcgatataaagatgattgaagatccagttgaagatggacaaccacacgcacctttggtcaaaatttcggaagtggcacctagtgtggaaagtctcaaagactctcttccagaaacggataattttaacaattctactcttcgaatagatcatctatatcaacgaagagagtccattctttcttctgagattagtttgttcattgagaagactggtcagaagattcctgatggagggtgggggtggcttgtggtgctggcttcttttgtaattaacatgttatcagatggcgttggattcacgtttggattgttgtataaagagtttttgatcgaatttggtgcttccaagtcagctacctcgtggataggaagtctctttatgtcgctgccattgattgcaggtccaattggcagcgctctcgtcgacaaatacggatgcatgtcaatgacaatcatcggaggaatcatttgcactattggtcttgctctcagctcgtatgcccgcaccataggggtaatgtatttaacctttggagttatcggcggcctaggacttactttatgttttgtaacagcggtagtctcgatagccttttggttcgagaagaagagaactatagctctgggactggctgccagcggaactggattcggtacggcagtttattcccctctggctacctggcttctctttgagtacggctggagaggaacgctgttga

SEQ ID NO: 6086 - DNA, 932 bp, Diabrotica virgifera
  SmartBlast Evalue=1E-109; Info=Ribosomal protein S2 n=2 Tax= Endopterygota RepID=Q56FF2_LYSTE
ctttcgttgacagccgaagaagaaggaactaaacaatggcggacgcagctccagccggtggacgtggtggattccgaggaggttttggaggtggtggccgtggaggcggtagaggtggtcccagaggccgaggtagaggtcgtggcagaggacgtggtcgtggaaaggaagatcaaaaagaatgggtaccagtaaccaagctaggacgtttagtcaaggatggaaagatccgttctcttgaagaaatctacctgttctctttgccaatcaaagaattcgaaatcatcgatcatttcattggatcagacttgaatgatgaggtattgaaaatcatgcctgtccagaagcaaactcgtgctggtcaacgtacacgtttcaaggcgtttgttgccattggagatagcaaaggacacattggattaggtgtaaaatgcagcaaggaagtagcaactgccatcagaggtgctattattttagccaaactgtctgtcgttccagtacgaagaggatactggggtaacaagattggtcaaccccacactgtaccttgcaaggttactggaaaatgtggttctgttactgtgcgtttgatcccagctccccgtggtaccggaatcgtttctgcccctgttcctaagaaacttctgcagatggctggtattgaagattgctacacatccgctagaggttccactggtactttaggtaactttgccaaagctacatacgcagccatcgcaaagacctatgcttacttgacacctgatttgtggaaggatatggctttggctaagacaccataccaagagtttgctgactacttggctaagaatcaccgtcctgtcactggcccagctcgtgcggaaactgcttaagttcacgtgttttgtgatcttttgtatgtaaaataaataataacagctttaaacatt

SEQ ID NO: 6087 - DNA, 925 bp, Diabrotica virgifera
  SmartBlast Evalue=1E-109; Info=Ribosomal protein S2 n=2 Tax= Endopterygota RepID=Q56FF2_LYSTE
aaagctgttattatttattttacatacaaaagatcacaaaacacgtgaacttaagcagtttccgcacgagctgggccagtgacaggacggtgattcttagccaagtagtcagcaaactcttggtatggtgtcttagccaaagccatatccttccacaaatcaggtgtcaagtaagcataggtctttgcgatggctgcgtatgtagctttggcaaagttacctaaagtaccagtggaacctctagcggatgtgtagcaatcttcaataccagccatctgcagaagtttcttaggaacaggggcagaaacgattccggtaccacggggagctgggatcaaacgcacagtaacagaaccacattttccagtaaccttgcaaggtacagtgtggggttgaccaatcttgttaccccagtatcctcttcgtactggaacgacagacagtttggctaaaataatagcacctctgatggcagttgctacttccttgctgcattttacacctaatccaatgtgtcctttgctatctccaatggcaacaaacgccttgaaacgtgtacgttgaccagcacgagtttgcttctggacaggcatgattttcaatacctcatcattcaagtctgatccaatgaaatgatcgatgatttcgaattctttgattggcaaagagaacaggtagatttcttcaagagaacggatctttccatccttgactaaacgtcctagcttggttactggtacccattctttttgatcttcctttccacgaccacgtcctctgccacgacctctacctcggcctctgggaccacctctaccgcctccacggccaccacctccaaaacctcctcggaatccaccacgtccaccggctggagctgcgtccgccattgtttagttccttcttcttcggctgtcaacgaaag

SEQ ID NO: 6088 - DNA, 883 bp, Diabrotica virgifera
  SmartBlast Evalue=6E-24; Info=Peritrophic matrix protein 5-B n= 1 Tax=Tribolium castaneum RepID=D1MAJ6_TRICA
atcttaaaaaaggtatattatttattaaagctaacaaaaacattaaatacaataaatacaattgatagattaagattattaatactttttcaatttgcggattatggccaatcgcaaataccttctttgacattaaaaattagcccatcggggcatttcataacatgctgaactccccctccacagacacagaagttgttggaattggatgatgcaagtggagttccatcagtttctggacagtccccttgacaagtaatattattttcatcatttgcctcttccttagattcattttcttcgtctgaattattggggcgatcatcagtttcgttttctggatagtcacatacttctagatcagcgttgtagaccaatccgtctttacaggcaagtaagtacgggatgccatgggaacacttgcagaactgcgatggactagggccaggtttttgaactaccacatccggatcttctgctggacactcaacattttcacatatttgaacctccttgatttcaccaccattgtttccattaccattttgattgtcattgtcattgtcactctcctctttctcttcaggtattttgttatttctgtcgtcgtcgttggcacatctagcattactaggccaatcacaaatattcaactctgtattaaattgaaggccttgtgggcagttttgaattattggttttccttctgtgcactgccagaattgggagcaatcttcggcggggaaataagcaacggaatcatcggatgggcatatttgtgagtcatctgcaacaacaactccgacacaaaatacaacaaaaactactgtaaaaccattcattttgttctatagaataagcttttagtaataattatatattt

SEQ ID NO: 6089 - DNA, 858 bp, Diabrotica virgifera
  SmartBlast Evalue=2E-19; Info=Peritrophic matrix protein 5-B n= 1 Tax=Tribolium castaneum RepID=D1MAJ6_TRICA
attctatagaacaaaatgaatggttttacagtagtttttgttgtattttgtgtcggagttgttgttgcagatgactcacaaatatgcccatccgatgattccgttgcttatttccccgccgaagattgctcccaattctggcagtgcacagaaggaaaaccaataattccaaaactgcccacaaggccttcaatttaatacagagttgaatatttgtgattggcctagtaatgctagatgtgccaacgacgacgacagaaataacaaaatacctgaagagaaagaggagagtgacaatgacaatgacaatcaaaatggtaatggaaacaatggtggtgaaatcaaggaggttcaaatatgtgaaaatgttgagtgtccagcagaagatccggatgtggtagttcaaaaacctggccctagtccatcgcagttctgcaagtgttcccatggcatcccgtacttacttgcctgtaaagacggattggtctacaacgctgatctagaagtatgtgactatccagaaaacgaaactgatgatcgccccaataattcagacgaagaaaatgaatctaaggaagaggcaaatgatgaaaataatattacttgtcaaggggactgtccagaaactgatggaactccacttgcatcatccaattccaacaacttctgtgtctgtggagggggagttcagcatgttatgaaatgccccgatgggctaatttttaatgtcaaagaaggtatttgcgattggccataatccgcaaattgaaaaagtattaataatcttaatctatcaattgtatttattgtatttaatgtttttgttagctttaataaataatataccttttttaagat

SEQ ID NO: 6090 - DNA, 854 bp, Diabrotica virgifera
  SmartBlast Evalue=6E-21; Info=Gamma-interferon-inducible lysosomal thiol reductase n=2 Tax=Lepeophtheirus salmonis RepID= C1BU29_9MAXI
taatttggaataatatgtttatatcaaaacataaataaaaataattaacaactgttaatgtagcaatatttaatgtattatacttctaaaagtttgcccgataagcatacgaatgaatacaaattattcacgtgctaaaattttataactgtgaataaaatctttctataattttatatttttttgacacactgtaggtttttcaccttctataaaactacaggtgtgctgaataaaagcttctacggtaaatatatcttgattactttcaaatatatcaaaaaatctgaaatcaggactgtagtatggattaggtatagccttagcttgttcgtctgcaaatgacaataatacctcgtccccaagtgagccattgacacattgttcaatatcatcgtaaggtaaattgctgtcatcggcacattcttttgcgaattctaaaagttcatcatttgtattgaacattgattttctgaggtcacactcaatgaattttaatagctgtgcttgtggtggagataaattgatagcacaagcatgaattcggtttacaaagcattcatagtggccatggctgcatttgaattcgattgacccattcgaatgtatcatgtacattgctcctccataagagactaagtttaatttaagaatatctcccagcttggcatatgcaggtatcaggatatcttctatcatttgtcgacttgggccacagtaagtttcataataaattgttaaatttacttcaggtgatgtttgggtactcaaaccagcgcaggcgagaaaagtgcaaatcaataacaatttggagacgtccatactgtttgtttagttgttcacttctctcaaat

SEQ ID NO: 6091 - DNA, 805 bp, Diabrotica virgifera
  SmartBlast Evalue=5E-21; Info=Gamma-interferon-inducible lysosomal thiol reductase n=2 Tax=Lepeophtheirus salmonis RepID= C1BU29_9MAXI
aactgttaatgtagcaatatttaatgtattatacttctaaaagtttgcccgataagcatacgaatgaatacaaattattcacgtgctaaaattttataactgtgaataaaatctttctataattttatatttttttgacacactgtaggtttttcaccttctataaaactacaggtgtgctgaataaaagcttctacggtaaatatatcttgattactttcaaatatatcaaaaaatctgaaatcaggactgtagtatggattaggtatagccttagcttgttcgtctgcaaatgacaataatacctcgtccccaagtgagccattgacacattgttcaatatcatcgtaaggtaaattgctgtcatcggcacattcttttgcgaattctaaaagttcatcatttgtattgaacattgattttctgaggtcacactcaatgaattttaatagctgtgcttgtggtggagataaattgatagcacaagcatgaattcggtttacaaagcattcatagtggccatggctgcatttgaattcgattgacccattcgaatgtatcatgtacattgctcctccataagagactaagtttaatttaagaatatctcccagcttggcatatgcaggtatcaggatatcttctatcatttgtcgacttgggccacagtaagtttcataataaattgttaaatttacttcaggtgatgtttgggtactcaaaccagcgcaggcgagaaaagtgcaaatcaataacaatttggagacgtccatactgtttgtttagttgttcacttctctcaaat

SEQ ID NO: 6092 - DNA, 851 bp, Diabrotica virgifera
ggtgtgcaaaagtaaatcagtgtttaaacaatggaacttcttcaattctttactgtggtatttttcgtcgtctttgtgaaggcaagcgacttggacgatgctcgtaaaatcctggattgtgcccaaaaagctttgaaagttggagttcctgatttggatttaccaagttacaatcccctagactacgataaagatataccatattttaaggacctggcgggagagctatactttttataccacaacacccaagtttatggaattcccgattggcaagtaaaagaaataaatcagataaatcaagatagtgatgcattcgctgtgtttaattttagtttaacctttcaacaactgaatgcgtccagcaacttcgatcttaatatgacagatttctttttccaaactgagtataatggaacacaaacgcttaaactatttaacaatgaatggacaggttctattaatgttaccaaaccgaatcaagacagtgttgaacaaataaatgatcttcaaatcagttggcgcgcccaacgtctattgcctgtggtacacacaaatccatcaggctatgagtctctgttcgcatccgtatataactacactattatgacagctcttagcaaaccaaatacatttgttggagattttcttcaagaaaaacttaatacagattggtggctcaacggaaaaatatggaaactagtacaatggtgtgaggataacgagtacatataataaatattgattgattttactaacagtaatatatatatttttgtgtacaatgtacaaattaatgatctatgttataatttataatgtttacattcaataaattatgtatcaatatc

SEQ ID NO: 6093 - DNA, 844 bp, Diabrotica virgifera
aaaagtaaatcagtgtttaaacaatggaacttcttcaattctttactgtggtatttttcgtcgtctttgtgaaggcaagcgacttggacgatgctcgtaaaatcctggattgtgcccaaaaagctttgaaagttggagttcctgatttggatttaccaagttacaatcccctagactacgataaagatataccatattttaaggacctggcgggagagctatactttttataccacaacacccaagtttatggaattcccgattggcaagtaaaagaaataaatcagataaatcaagatagtgatgcattcgctgtgtttaattttagtttaacctttcaacaactgaatgcgtccagcaacttcgatcttaatatgacagatttctttttccaaactgagtataatggaacacaaacgcttaaactatttaacaatgaatggacaggttctattaatgttaccaaaccgaatcaagacagtgttgaacaaataaatgatcttcaaatcagttggcgcgcccaacgtctattgcctgtggtacacacaaatccatcaggctatgagtctctgttcgcatccgtatataactacactattatgacagctcttagcaaaccaaatacatttgttggagattttcttcaagaaaaacttaatacagattggtggctcaacggaaaaatatggaaactagtacaatggtgtgaggataacgagtacatataataaatattgattgattttactaacagtaatatatatatttttgtgtacaatgtacaaattaatgatctatgttataatttataatgtttacattcaataaattatgtatcaatatc

SEQ ID NO: 6094 - DNA, 828 bp, Diabrotica virgifera
  SmartBlast Evalue=8E-39; Info=Glutathione S-transferase n=1 Tax= Camponotus floridanus RepID=E2AX16_9HYME
gatttcgacctcgacacaaacaaagtgtttccacgaagttgtataaaaacactttatttatataccggtgcgcggtgtttcgtttaattcgtatcgtatcagatcagcggtagttctctctactctaagtggacaaatttagttttctaaaatggcacatacatataaacttacatattttgacttccccggaaagggtgaagcaattagaatgatcttaagctatggagaaataccattcgaggacaaacgtatccagatgggggattggccaaaaattaagccaactactcctcttggacaacttcccatattagaggtcgatggtaaagaaatcccccaaagcactgcaatcagcaggtacttggcatctaaattaaacctcgatggcaaagatctgaaggaaaatcttgcactagatgttgcagtagaaactctcttggatttacaaaaagttggcgtcggaataaagtatgaacaggacgctgctaagagagcagagaacgttgaaaaatcgaaacaagttctacctgtttattttggaaaactagaagaacatgctaagaaacacaatggttacatagtttttgacaggatgtcatgggctgatattttattcgtttgcgtgtatgaatttttagtcccttgtgtaggtaaagaagcagtatctgcttaccccagtttacaacaagttttgaagaatgttctagcagcaaaaggtattaataaatatattaaaaataggccagcagtagagggttatgatttaaaacaagatctttaagaattttttatatattttttatttaataaagtaataataataat

SEQ ID NO: 6095 - DNA, 825 bp, Diabrotica virgifera
  SmartBlast Evalue=8E-39; Info=Glutathione S-transferase n=1 Tax= Camponotus floridanus RepID=E2AX16_9HYME
attattattactttattaaataaaaaatatataaaaaattcttaaagatcttgttttaaatcataaccctctactgctggcctatttttaatatatttattaataccttttgctgctagaacattcttcaaaacttgttgtaaactggggtaagcagatactgcttctttacctacacaagggactaaaaattcatacacgcaaacgaataaaatatcagcccatgacatcctgtcaaaaactatgtaaccattgtgtttcttagcatgttcttctagttttccaaaataaacaggtagaacttgtttcgatttttcaacgttctctgctctcttagcagcgtcctgttcatactttattccgacgccaactttttgtaaatccaagagagtttctactgcaacatctagtgcaagattttccttcagatctttgccatcgaggtttaatttagatgccaagtacctgctgattgcagtgctttgggggatttctttaccatcgacctctaatatgggaagttgtccaagaggagtagttggcttaatttttggccaatcccccatctggatacgtttgtcctcgaatggtatttctccatagcttaagatcattctaattgcttcaccctttccggggaagtcaaaatatgtaagtttatatgtatgtgccattttagaaaactaaatttgtccacttagagtagagagaactaccgctgatctgatacgatacgaattaaacgaaacaccgcgcaccggtatataaataaagtgtttttatacaacttcgtggaaacactttgtttgtgtcgaggtcgaaatc

SEQ ID NO: 6096 - DNA, 830 bp, Diabrotica virgifera
  SmartBlast Evalue=2E-63; Info=Glutathione S-transferase n=1 Tax= Camponotus floridanus RepID=E2AX18_9HYME
gcatttattagtttctccttggccttggcagagtgcagagcagaacggtagttagagtgttttaaattgtttttgacaaactctccttttattaatttgtgaacgaaatggcacccaaatataaggtcacctacttcgatattactgctctcggtgaaccaattaggttcctcttaagctatggacaacttgatttcgaagacagacgtcttggtgtagacggcatcgagtggtcttctgttaaaccgaccactcccttcggccaagcaccacttttggaacatgatggaaaagtggcccatcagtcaattgccatcagccgttatctcgctaagcaagtaaaactggtaggaaccaacgattgggaagacttggaaatcgatgctgctgttgataccatcaatgacttacgcgcaaagatcgctgcttaccactatgaaaacgaccctgcagttaaagagacaaagaaaaaaccattgtttgaggacgttctcccattctatcttgaaaagttggaagcacaagtacagaaaaataatggttatttggctactggaaaattgacctgggctgatttgttcttcgtcgctctcttgcaatacttccagtttatgcttggaaaggatttagtggaaaactcaccaaatttgcaaaaacttaaagagaaagtactcgcattacccaacatcaaagcctgggtagaaaaacgtcccgaaactaaattctaaatcgaatttactcgttccttgtgaatttactcgttatggataaaatcaaaagtatttttaaatttgttctaaattatataataaataaatcaaagtgaaaaa

SEQ ID NO: 6097 - DNA, 804 bp, Diabrotica virgifera
  SmartBlast Evalue=2E-63; Info=Glutathione S-transferase n=1 Tax= Camponotus floridanus RepID=E2AX18_9HYME
ggcagagtgcagagcagaacggtagttagagtgttttaaattgtttttgacaaactctccttttattaatttgtgaacgaaatggcacccaaatataaggtcacctacttcgatattactgctctcggtgaaccaattaggttcctcttaagctatggacaacttgatttcgaagacagacgtcttggtgtagacggcatcgagtggtcttctgttaaaccgaccactcccttcggccaagcaccacttttggaacatgatggaaaagtggcccatcagtcaattgccatcagccgttatctcgctaagcaagtaaaactggtaggaaccaacgattgggaagacttggaaatcgatgctgctgttgataccatcaatgacttacgcgcaaagatcgctgcttaccactatgaaaacgaccctgcagttaaagagacaaagaaaaaaccattgtttgaggacgttctcccattctatcttgaaaagttggaagcacaagtacagaaaaataatggttatttggctactggaaaattgacctgggctgatttgttcttcgtcgctctcttgcaatacttccagtttatgcttggaaaggatttagtggaaaactcaccaaatttgcaaaaacttaaagagaaagtactcgcattacccaacatcaaagcctgggtagaaaaacgtcccgaaactaaattctaaatcgaatttactcgttccttgtgaatttactcgttatggataaaatcaaaagtatttttaaatttgttctaaattatataataaataaatcaaagtgaaaaa

SEQ ID NO: 6098 - DNA, 1555 bp, Diabrotica virgifera
  SmartBlast Evalue=1E-75; Info="Nuclear and cytoplasmic polyadenylated RNA-binding protein PUB1, putative n=1 Tax= Pediculus humanus corporis RepID=E0VRJ5_PEDHC"
ggaaccgccattttggtgtgtggtgacgacgcgaatagacgccggtgactcgtttgttcccaattttcaatttatccaaagattttagaatgactgatacggaatctaacaacgaccgcggaaggcgcgataataaaagaccacgggaagatagcttcagggaccgcagccgagaccggggtaacgccagtacaacacaaaggagcactaaaccctcccaaactagagtgtttgtatcaaacattccctacgaatatcgttggcaagatgtgaaagacatcttcaggaatgaggtgggtgatgtttccttcgtggagctattttacgatgaatcaaacaaatccaaaggaaccggtatcgttgaattcgctgataaaggttctgttgacaaatgtatggagaagatgcagcgatatgaagttaatggtagaaagttagttgttagggatgactcaggcgttactagggacagaactggagctatactatctggaacttccagaagacctccagcagagaggaacttcggtggtggcggaggcggaaatagcttcaacaacagcatctccttcagcagtaataatgatggaaactggggcaacacctatggtttgagtcctcagttcttggaatcgttgaaaattgaccctccactcgttaacagagttttcattgctaatcttgaatacaatgttgacgagaaaaagttgcgagatgcctttaaattggcaggtagaatagtaaatattgatcttcctcttgacaaagatggtcgtattagaggttttgctgtcattgagtatgatcaccctgtcgaggctgtacaggccatttcgatgttcaatcatcaatctttctttgatcgtacattggcagtgagaatggatagggcaaatgataatatcaagttgcccgagggtttaaggtcgatcggaatgggtctagggcccaatggagagcctttgaagtgtgtcgctcataatcttaataatcagtctaattcgtcaactaatggacttttgggagcagttccgaataatactttgcaacaattgagtagtttgacaggtttgagcgctcttaatgctctgcagtctgccaaccttggcagtctattgggaaacaacttaggatctaacgatctcagctcattggtttcaaactcacttggtggtggtggaggtggtaacccacaaccatttggtaacaattcaagttcaaattacaactcacagacttccaactataactcgcagtcgtcgaacttgggatctggaaattcctatcacagaggtggcggtggaggtgatgattaccaaagtggaggaggaaatagctttggtggaggcggaaattacggaaatggaaataacgatggatataacagttcaaatagtctatcgggaagaggtttccaaaattccggcaacatttccacatacaccagcgacaggctatcatttgttgataatacaaacaaaactttctccaaaaaagttttaatctcaaatctgccctctacattgagttacaacctgctgaatgaaaatgtcaa

SEQ ID NO: 6099 - DNA, 808 bp, Diabrotica virgifera
  SmartBlast Evalue=3E-63; Info=Glutathione S-transferase n=1 Tax= Camponotus floridanus RepID=E2AX18_9HYME
gttctccttggcagagcaaagtaggtacttgtattgagtgttttaaattgtttttggcaaacttgccttttatcaatttgtgaacgaaatggcacccaaatataagctcacctacttcgatattactgctttcgctgaaccaattaggttcctcctaagctatggccaacttgatttcgaagacagacgttttgctgtagacggtatcgagtggccttctattaaaccgaccactcctttcggccaagtaccacttttggaatatgatggaaaagtggctcatcagtcaattgccatcagccgttatctcgctaagcaagtaaaactggtaggaagcaacgattgggaagacttggaaatcgatgctgctgttgataccatcattgacttacgcacaaagatcgttgcttacggctatgaaaacgacgctgcagtcaaagagtcaaagaaaaaaccattgtttgaggaaattcttccattctatcttgaaaagttagaagcacaagtacagaaaaataatggctatttggctactggaaaattgacctgggctgatttgtacttcgtcgctctcttgcaatacttccagtttatgcttggaaaggatttagtggaaaactcaccaaatttgcaaaaacttaaagagaaagtactcgcattacccaacatcaaagcctgggtagaaaaacgtcccaaaactaaattctgaattgaatttactcgttccttgtgaatttactccttatggaaaaaatcaaaagtatttttaaatttgttctacattttataataaataaattaaagtgaa

SEQ ID NO: 6100 - DNA, 797 bp, Diabrotica virgifera
  SmartBlast Evalue=3E-63; Info=Glutathione S-transferase n=1 Tax= Camponotus floridanus RepID=E2AX18_9HYME
cagagcaaagtaggtacttgtattgagtgttttaaattgtttttggcaaacttgccttttatcaatttgtgaacgaaatggcacccaaatataagctcacctacttcgatattactgctttcgctgaaccaattaggttcctcctaagctatggccaacttgatttcgaagacagacgttttgctgtagacggtatcgagtggccttctattaaaccgaccactcctttcggccaagtaccacttttggaatatgatggaaaagtggctcatcagtcaattgccatcagccgttatctcgctaagcaagtaaaactggtaggaagcaacgattgggaagacttggaaatcgatgctgctgttgataccatcattgacttacgcacaaagatcgttgcttacggctatgaaaacgacgctgcagtcaaagagtcaaagaaaaaaccattgtttgaggaaattcttccattctatcttgaaaagttagaagcacaagtacagaaaaataatggctatttggctactggaaaattgacctgggctgatttgtacttcgtcgctctcttgcaatacttccagtttatgcttggaaaggatttagtggaaaactcaccaaatttgcaaaaacttaaagagaaagtactcgcattacccaacatcaaagcctgggtagaaaaacgtcccaaaactaaattctgaattgaatttactcgttccttgtgaatttactccttatggaaaaaatcaaaagtatttttaaatttgttctacattttataataaataaattaaagtgaa

SEQ ID NO: 6101 - DNA, 1153 bp, Diabrotica virgifera
tactaggtacacttcccgtcacaaaaaactggtacacttttttttccctgtaaacctgtgttcagactggatacaatggacatcctaagtcttgacgtcacaaaattgggacgtcagacttaggctgtccatagttcgtgaatcacttcgttgttgccataacagataacggaattgcactaaatctaaatacaaaaataataaatctaaatacgtttaaaaatgtataaaggttttagataggtattatttttatcactaccaattgaccatcattgaagaaacctgggaaagcttggacgaagatgaaaatctataactaaatttatttctcagtgcccagaagattacaagaagtgattaataataatggagctgaccaaaatattaatatttcagcagtttcgaattgtaatacatatacagtcggtaaaatgaaagagtacccatgaacgagcatatgaagcacgctgtgttttcctgtcaccgtgtcacagagaaaattgcccagtgcaagtacatgtaacagtagttattacatgtacttgcgctggccaattttttgtgtgacacggtgacaggaaggtgcagcgtgttttatatgttcgttcatgggtgttctttcatttttcctactgtacttgattgataatttagatgaatggatttggttgtaatactatttaataaacgcatgcagcaactctgtaaaaatacgttattattggtatataaaatagtctaatatggttagtttggcgcctcaaaatacagtcatgggaagtccagaagtagtgtgacaaagtagttttttacgctaaaaatgacaaaaaaataaataagtattaggtacagttaatcaaacaatgagggggcttagcagaacatatttctttgtaaaagttatcgtttttttttactacagaaacacccttatcatttaagatttctgatctcagaaccccacagcgttgccaaaaccttttccaaatattaactatttaagaatacactagtcagttggatttttaaaatgaaaataatcagattttcaaaatttctttttttacttttgagtaatgcgtaaaacgtgatacatttaatctgtaaaatggaaacaaacacacacaatgtttactatacattagcagct

SEQ ID NO: 6102 - DNA, 641 bp, Diabrotica virgifera
tacagtaggaaaaatgaaagaacacccatgaacgaacatataaaacacgctgcaccttcctgtcaccgtgtcacacaaaaaattggccagcgcaagtacatgtaataactactgttacatgtacttgcactgggcaattttctctgtgacacggtgacaggaaaacacagcgtgcttcatatgctcgttcatgggtactctttcattttaccgactgtatatgtattacaattcgaaactgctgaaatattaatattttggtcagctccattattattaatcacttcttgtaatcttctgggcactgagaaataaatttagttatagattttcatcttcgtccaagctttcccaggtttcttcaatgatggtcaattggtagtgataaaaataatacctatctaaaaccttttatacatttttaaacgtatttagatttattatttttgtatttagatttagtgcaattccgttatctgttatggcaacaacgaagtgattcacgaactatggacagcctaagtctgacgtcccaattttgtgacgtcaagacttaggatgtccattgtatccagtctgaacacaggtttacagggaaaaaaaagtgtaccagttttttgtgacgggaagtgtacctagta

SEQ ID NO: 6103 - DNA, 779 bp, Diabrotica virgifera
  SmartBlast Evalue=5E-35; Info=Glutathione S-transferase n=1 Tax= Harpegnathos saltator RepID=E2C1V1_9HYME
attttttattattttatataaatataaatttaaaattaactaaaattaattataaaatcctaacgcatataaacaaattctaaagatcttgtttcaaatcatatccttgtgatgttggtctatttttgatccacttgttgataccttttgctgctaaaacgttcttctttactctctgtaaattaggatacgcagatactgcttctttacctgcaacgttgactagtaattcatagacgcaaacgaataaaatatcagcccatgatagtctgtcaaaagctatatatccattgtgttttttggcatagtcttctaactgtccaaaataagtgggtatactttttttcaaattttcaagtgcttcctttttctttgcatcacttccaaacatagattcaaagccaagtttttgtaaatctaatagagtttccactgcaacatctagtgctagattttccttagcgtctttcccatctagtttcactagggatgctacgtgtctgcagattgcaatagtttgagggattgctttgccatcaatctccaatactggaagttgtccaagaggagtagtagatttaatttttggccaatccccaaactggatacgtttatcctcaaatggaatttctccatagttaaatagcatcctaatcggttcagcccttgcggtgaggtcaaaataggtaagtttatacgtatgtgccatttttgtttaattaaatttctcaacaacaattaccaactttacgatataaatatgtagaaggagacaccag

SEQ ID NO: 6104 - DNA, 769 bp, Diabrotica virgifera
  SmartBlast Evalue=5E-35; Info=Glutathione S-transferase n=1 Tax= Harpegnathos saltator RepID=E2C1V1_9HYME
cttctacatatttatatcgtaaagttggtaattgttgttgagaaatttaattaaacaaaaatggcacatacgtataaacttacctattttgacctcaccgcaagggctgaaccgattaggatgctatttaactatggagaaattccatttgaggataaacgtatccagtttggggattggccaaaaattaaatctactactcctcttggacaacttccagtattggagattgatggcaaagcaatccctcaaactattgcaatctgcagacacgtagcatccctagtgaaactagatgggaaagacgctaaggaaaatctagcactagatgttgcagtggaaactctattagatttacaaaaacttggctttgaatctatgtttggaagtgatgcaaagaaaaaggaagcacttgaaaatttgaaaaaaagtatacccacttattttggacagttagaagactatgccaaaaaacacaatggatatatagcttttgacagactatcatgggctgatattttattcgtttgcgtctatgaattactagtcaacgttgcaggtaaagaagcagtatctgcgtatcctaatttacagagagtaaagaagaacgttttagcagcaaaaggtatcaacaagtggatcaaaaatagaccaacatcacaaggatatgatttgaaacaagatctttagaatttgtttatatgcgttaggattttataattaattttagttaattttaaatttatatttatataaaataataaaaaat

SEQ ID NO: 6105 - DNA, 782 bp, Diabrotica virgifera
  SmartBlast Evalue=1E-112; Info=S5e ribosomal protein n=1 Tax= Timarcha balearica RepID=Q6EV02_TIMBA
ttttaagttttatccatatttattattggaaataaaatataaaatgagaaataaatttaacggttggatttggctacacgttcaagttcatccttctttttgatagcatatgaatttgatgatcccttggcagcattgattaattcatcagccaaacattcagcaatagttttaatattacggaatgctgcttccctagcacctgtgcagagcaaccaaattgcttggttaacccttctcaagggtgacacatcaacagcttgtcttcttacagtaccagctctaccaatacgagtagaatcttctctaggtcctgaattgataatagcagaaactaaaatctgtaatggattttctccagttagtaaatggataatttcaaaagcatgtttaacaattctgacagccatcaattttttaccattgttacgtccatgcatcattagagagtttgttaacctctcaacgattgggcattgtgctttacggaacctttttgcagcatatctaccagctgaatggggtaaatactttgcatttttttctttcactgcaatgtagtcctgaagggacatgtctgaaacttggacatcatcgcagttccatctagcgaacaacttaatttcaggtagttctgcaatttttggggcgacaactccaccactctgattatccacagcccaatcgtcttccatactgtccttaaatattagagaatactctctatttttcaaaaataaaaatcgcaagctcttgctgaacgacggcgtgaaccggaaaag

SEQ ID NO: 6106 - DNA, 778 bp, Diabrotica virgifera
  SmartBlast Evalue=1E-112; Info=S5e ribosomal protein n=1 Tax= Timarcha balearica RepID=Q6EV02_TIMBA
aagttttatccatatttattattggaaataaaatataaaatgagaaataaatttaacggttggatttggctacacgttcaagttcatccttctttttgatagcatatgaatttgatgatcccttggcagcattgattaattcatcagccaaacattcagcaatagttttaatattacggaatgctgcttccctagcacctgtgcagagcaaccaaattgcttggttaacccttctcaagggtgacacatcaacagcttgtcttcttacagtaccagctctaccaatacgagtagaatcttctctaggtcctgaattgataatagcagaaactaaaatctgtaatggattttctccagttagtaaatggataatttcaaaagcatgtttaacaattctgacagccatcaattttttaccattgttacgtccatgcatcattagagagtttgttaacctctcaacgattgggcattgtgctttacggaacctttttgcagcatatctaccagctgaatggggtaaatactttgcatttttttctttcactgcaatgtagtcctgaagggacatgtctgaaacttggacatcatcgcagttccatctagcgaacaacttaatttcaggtagttctgcaatttttggggcgacaactccaccactctgattatccacagcccaatcgtcttccatactgtccttaaatattagagaatactctctatttttcaaaaataaaaatcgcaagctcttgctgaacgacggcgtgaaccggaaaag

SEQ ID NO: 6107 - DNA, 768 bp, Diabrotica virgifera
acatcagcttaggatataaacaatggatatttgttatacttgaacactttatctgtggcattttattaaggtttagccgtttcagtaatctttacagtgatttagatctaatttaaggcgtaataaggaaaccgaccttgtatataaaaaaagaaaaaatgccacaccaccacgatcaccaccaccatcaccaccaccaccacaatcgtggaataattggtgagatcatccacgacgtgctacatcccaatcaccatcatcaccaccctccaccaccaccgccaataattccagtaccagttccagttccgacaaactacgggccacctcctccttactacggaccaccaatgccaccgccaccacaaacctggtatggaccatacggactaccaccttgcggtcattcgggatatagccacgggtgccatcactgccaccaccatcaccgtcgtcattattgctaaaaagacttggtttaaacaattgtcagttgtacattgtacaataatagtacttataagattttaataaagtactatttactggactaggtgtcgaaatttatactttgttgtacagtagtgcacgtattggatcttgtattcgagtttccttagacagtattagacactatgattttagcatagcaattttattagaaagattatatttttgcacttctataaataagaaaaaataatttcaaacatatttttatttgaacttaattttaccttgtaataaattcatcttgtgaacaaaaaa

SEQ ID NO: 6108 - DNA, 762 bp, Diabrotica virgifera
gttcacaagatgaatttattacaaggtaaaattaagttcaaataaaaatatgtttgaaattattttttcttatttatagaagtgcaaaaatataatctttctaataaaattgctatgctaaaatcatagtgtctaatactgtctaaggaaactcgaatacaagatccaatacgtgcactactgtacaacaaagtataaatttcgacacctagtccagtaaatagtactttattaaaatcttataagtactattattgtacaatgtacaactgacaattgtttaaaccaagtctttttagcaataatgacgacggtgatggtggtggcagtgatggcacccgtggctatatcccgaatgaccgcaaggtggtagtccgtatggtccataccaggtttgtggtggcggtggcattggtggtccgtagtaaggaggaggtggcccgtagtttgtcggaactggaactggtactggaattattggcggtggtggtggagggtggtgatgatggtgattgggatgtagcacgtcgtggatgatctcaccaattattccacgattgtggtggtggtggtgatggtggtggtgatcgtggtggtgtggcattttttctttttttatatacaaggtcggtttccttattacgccttaaattagatctaaatcactgtaaagattactgaaacggctaaaccttaataaaatgccacagataaagtgttcaagtataacaaatatccattgtttatatcctaagctgatgt

SEQ ID NO: 6109 - DNA, 752 bp, Diabrotica virgifera
  SmartBlast Evalue=3E-86; Info=Ribosomal protein L9 n=3 Tax= Coleoptera RepID=D1M7X2_9CUCU
ttttaaatataaacttaaatttatttcaaaaatacaagttattcttcttgtacaacagttgttttttcagatacataaagcccatctaagaatttacggatatccttatttttaactgttgtagattgttgaataagggcagctgactttgaaacatcctccaatgagtttccttcaatgataagttcatccttttgtttggtggagtttactactgtaacacctggggccatctttactcttctgatgtatttttctcccaagaaatttctaatttcgataactgtgtttccttcagtggtgacacagttaatgggaaagtgagcatatgctgctctcatcttgtattggtatccttttgtaacaccctttaacatgttttcaacatgagagcatactgttctgacagcagctaattccttcttggtaccgaaccatttctctactttcagtaacctggggttgatcattcgaatgtccagggtaagatgtttgaaggatctcttcagattacctcggggtccttttacagttactacccttgacttagtggttactgtaattccctcaggaatttttaccgtttggtttgttacaatttgcttcattttagccctacttgtttaaaattctaggatgattatagaattttattcagaaaaatttgatttacgttcccacaccagcaatttatttacttctctttttcttagtgtccatgtttcgcttccatacgcgactgctggtcgtat

SEQ ID NO: 6110 - DNA, 748 bp, Diabrotica virgifera
  SmartBlast Evalue=2E-86; Info=Ribosomal protein L9 n=3 Tax= Coleoptera RepID=D1M7X2_9CUCU
aaatataaacttaaatttatttcaaaaatacaagttattcttcttgtacaacagttgttttttcagatacataaagcccatctaagaatttacggatatccttatttttaactgttgtagattgttgaataagggcagctgactttgaaacatcctccaatgagtttccttcaatgataagttcatccttttgtttggtggagtttactactgtaacacctggggccatctttactcttctgatgtatttttctcccaagaaatttctaatttcgataactgtgtttccttcagtggtgacacagttaatgggaaagtgagcatatgctgctctcatcttgtattggtatccttttgtaacaccctttaacatgttttcaacatgagagcatactgttctgacagcagctaattccttcttggtaccgaaccatttctctactttcagtaacctggggttgatcattcgaatgtccagggtaagatgtttgaaggatctcttcagattacctcggggtccttttacagttactacccttgacttagtggttactgtaattccctcaggaatttttaccgtttggtttgttacaatttgcttcattttagccctacttgtttaaaattctaggatgattatagaattttattcagaaaaatttgatttacgttcccacaccagcaatttatttacttctctttttcttagtgtccatgtttcgcttccatacgcgactgctggtcgtat

SEQ ID NO: 6111 - DNA, 1007 bp, Diabrotica virgifera
taatagatcaacagtaaaagtatttacaaaaaatggaagatgactatatctaccgtcaatttaggcacggcgtagatacagatatttgagctggcagtgtactaccttttaatataaatactacgtatatattgtttaccttaaaggtagatatatctaaaaactacataatttacctacgtcacaatttaaaaactactataggccacattgcgttgccatcttcttgtaaagatagctctactaaaagaaaagtcaaacaataaggaatgcacgtaatgtttcccttgatgccatattctaaatttgaaaaaatatatagggaataattagatatttttacatggcatattcctattgcagcgagcatttcattggctagaattagtgacgagtttatatgacgtcattattatatttggtgagatcgtaaatggtaacagccgtccgtcatacctaatattggaattgaatgttaaatataatgtcaaattattgttttcaaattatattttatttacttagtttatattttaaccaacttcactttcactggtagtttaggcgttaatttaagaaatgttgctggctaaatggacactgctcccaaaggccataaaagaagaaaaaataaacaaacaaagatcttatataaccttctataggacaatgtcagtttgatatttatagtatacgctctgagcttcgctggtgtcgctcctagcggattactaatgcaactttcaccggtaatttttaaatttattatttaattgttatcgcttaatatttacaacgctaaaaagtaattaaattgtaatagatttttaaaagattttgctaatcattttgacgttctattgatgaaatattaatttcttacttcggatactttcacaattatcgtgtagatggcgctaagtattaatttataattacatattacggaacatcaaaaaacgtaaattcagtatttaaaacgtagagtatatattagcatagagaga

SEQ ID NO: 6112 - DNA, 298 bp, Diabrotica virgifera
tggtgtcgctcctagcggattactaatgcaactttcaccggtaatttttaaatttattatttaattgttatcgcttaatatttacaacgctaaaaagtaattaaattgtaatagatttttaaaagattttgctaatcattttgacgttctattgatgaaatattaatttcttacttcggatactttcacaattatcgtgtagatggcgctaagtattaatttataattacatattacggaacatcaaaaaacgtaaattcagtatttaaaacgtagagtatatattagcatagagaga

SEQ ID NO: 6113 - DNA, 756 bp, Diabrotica virgifera
  SmartBlast Evalue=3E-80; Info=Putative translationally controlled tumor protein n=1 Tax=Graphocephala atropunctata RepID=Q1W2B7_9HEMI
tttttcatagcaaaatcactttattcttaagagatataaacactctcacaacatacattttatcactttattaaataattgttggaaaacactgttaaagtattgtagacgatcggtatatattaaataacaatgttaataatttaaaatgcctaaaacttctcctcgtccagtccatgtttgaagaacatcattacgggcacggattgtccgtcgatttctctatattccattaatcctaccataccgtctatttccatcgattctcctgtgaagaattggagttctttaaaccttcctaggatgtctttcattactttgttcatgttggatttgaaaacgtctacttggtcgggtgatctctcttgtaatttttctactagttttttcatatattccttgagatatgcggtgtaagatttcttgtctccaaaggcgtatgtttcacataatctgtgattgagtactatatcaacaccagattctacaccagcttcagtaccttcatcggcttcttcggcagaagggttagctccatcgagttggatgtctccttgtttacgttggatgagctttccatagacttcgtagattacttcatccactaacttcattttgtaggtatcggaaaacatctcgtcccctgtgaaaatgtctttgtagattctcatttttgtggattattcggattttggtgtcaataagaccttctgccttgagagcgcagaaaaaaagaacctttcaacttcaactcat

SEQ ID NO: 6114 - DNA, 718 bp, Diabrotica virgifera
  SmartBlast Evalue=2E-80; Info=Putative translationally controlled tumor protein n=1 Tax=Graphocephala atropunctata RepID=Q1W2B7_9HEMI
caaggcagaaggtcttattgacaccaaaatccgaataatccacaaaaatgagaatctacaaagacattttcacaggggacgagatgttttccgatacctacaaaatgaagttagtggatgaagtaatctacgaagtctatggaaagctcatccaacgtaaacaaggagacatccaactcgatggagctaacccttctgccgaagaagccgatgaaggtactgaagctggtgtagaatctggtgttgatatagtactcaatcacagattatgtgaaacatacgcctttggagacaagaaatcttacaccgcatatctcaaggaatatatgaaaaaactagtagaaaaattacaagagagatcacccgaccaagtagacgttttcaaatccaacatgaacaaagtaatgaaagacatcctaggaaggtttaaagaactccaattcttcacaggagaatcgatggaaatagacggtatggtaggattaatggaatatagagaaatcgacggacaatccgtgcccgtaatgatgttcttcaaacatggactggacgaggagaagttttaggcattttaaattattaacattgttatttaatatataccgatcgtctacaatactttaacagtgttttccaacaattatttaataaagtgataaaatgtatgttgtgagagtgtttatatctcttaagaataaagtgattttgctatgaaaaa

SEQ ID NO: 6115 - DNA, 739 bp, Diabrotica virgifera
  SmartBlast Evalue=5E-73; Info=Ribosomal protein S10 n=1 Tax= Chrysomela tremulae RepID=D1M831_9CUCU
tcatccatataaattttcacgtaatatttcttttttctactaaaattaatgtgttataatgttctatttgtgatattgatgtgattttttcaaaattagtgttcaagaataataacccttaacctgaaaatatagtggacttgttttttactatttgctattatttagtgtattcggttgaataataataatttttcttttaggatgttgatgccaaaaaagaatagagtatgtatttacgaatacctcttcaaagagggagtcatggtagctaaaaaagattaccatgccccaaaacaccccgaactagaaactatccctaaccttcaagtaattaaggctttacaatcacttaaatcaaaaggttacgtaaaggaacaattcgcctggaggcattattattggtatttgactaactctggcatcgaatacctccgcacattcttacacttacctggagaaattgtcccatctaccttgaaacgcccagcaaggacagaaaccacccgtcctagaccagctgctctcagatctgagacatctaaaccttcagaagaccgtgcaggatacagaaggactcctggaggccctggagctgacaagaaagctgatgttggtccaggaactggagatgttgagttcaggcaaggattcggacgtggacgggcaccacaataaatttattgataagttaatttttataaattgatcagccaataaaaagtttggttacaaaaaa

SEQ ID NO: 6116 - DNA, 731 bp, Diabrotica virgifera
  SmartBlast Evalue=5E-73; Info=Ribosomal protein S10 n=1 Tax= Chrysomela tremulae RepID=D1M831_9CUCU
aaccaaactttttattggctgatcaatttataaaaattaacttatcaataaatttattgtggtgcccgtccacgtccgaatccttgcctgaactcaacatctccagttcctggaccaacatcagctttcttgtcagctccagggcctccaggagtccttctgtatcctgcacggtcttctgaaggtttagatgtctcagatctgagagcagctggtctaggacgggtggtttctgtccttgctgggcgtttcaaggtagatgggacaatttctccaggtaagtgtaagaatgtgcggaggtattcgatgccagagttagtcaaataccaataataatgcctccaggcgaattgttcctttacgtaaccttttgatttaagtgattgtaaagccttaattacttgaaggttagggatagtttctagttcggggtgttttggggcatggtaatcttttttagctaccatgactccctctttgaagaggtattcgtaaatacatactctattcttttttggcatcaacatcctaaaagaaaaattattattattcaaccgaatacactaaataatagcaaatagtaaaaaacaagtccactatattttcaggttaagggttattattcttgaacactaattttgaaaaaatcacatcaatatcacaaatagaacattataacacattaattttagtagaaaaaagaaatattacgtgaaaatttatatggatga

SEQ ID NO: 6117 - DNA, 730 bp, Diabrotica virgifera
tcaatcctctgttacaaaatgaataagttagcagtgttcactttattgtttgctattggtttccaatcatcagccggattccgggcggggttcagatacaatagagatgtgcaagtaatggtgcctgctggaccagtaactctagaagctcaacctgcagttcaaactctagaagctaaactaccagcagttcaaactttagaagcccgaccactatcaattcaaactctagaagcccacctaccagaaattcaaactttagaagcaagacctgaagttcaaactctagaagccagaccagcaattgcaacacttgaagctagacccgaagtttcaactcttgaattgagaccagaagtttcaacccttgaattaagtccagaagtttcaacacctgaacataaactaaccgtaaatgacaagttggctatgatcaaacaatgggttgaagaacaagctaacaagccaatctcccgtctaagactaaaagaaaatttggctattattagaggatggctggatgatagagcaaacaaagtacgtcaaagtgttgttgacttagagaacaaggtcctcccagccatccaaaagttgaaggctgatgcatcccatgctattgacaccatcaaacaaaaagttaaaggtcaagaagcacaggctgaaagaacaaaaagagcgatgaagcagttaaatagacaaacaagagcgatcaaaaaacattgatgatgtc

SEQ ID NO: 6118 - DNA, 715 bp, Diabrotica virgifera
aaaatgaataagttagcagtgttcactttattgtttgctattggtttccaatcatcagccggattccgggcggggttcagatacaatagagatgtgcaagtaatggtgcctgctggaccagtaactctagaagctcaacctgcagttcaaactctagaagctaaactaccagcagttcaaactttagaagcccgaccactatcaattcaaactctagaagcccacctaccagaaattcaaactttagaagcaagacctgaagttcaaactctagaagccagaccagcaattgcaacacttgaagctagacccgaagtttcaactcttgaattgagaccagaagtttcaacccttgaattaagtccagaagtttcaacacctgaacataaactaaccgtaaatgacaagttggctatgatcaaacaatgggttgaagaacaagctaacaagccaatctcccgtctaagactaaaagaaaatttggctattattagaggatggctggatgatagagcaaacaaagtacgtcaaagtgttgttgacttagagaacaaggtcctcccagccatccaaaagttgaaggctgatgcatcccatgctattgacaccatcaaacaaaaagttaaaggtcaagaagcacaggctgaaagaacaaaaagagcgatgaagcagttaaatagacaaacaagagcgatcaaaaaacattgatgatgtc

SEQ ID NO: 6119 - DNA, 743 bp, Diabrotica virgifera
  SmartBlast Evalue=2E-89; Info=40S ribosomal protein S9 n=10 Tax= Neoptera RepID=RS9_DROME
gtcatttgtcaatgtttctctttgacttttctttaatctagaaatcagtctttttatgttcagaggttgaaaataaaacctcaaaatggtaaacggtaggataccgtcggttcattctaaaacctatgtaacgcctaggcgtccatatgagaaggcccgtttagatcaagaattgaaaatcatcggagcctttggtctccgaaacaaacgtgaagtatggagagtaaaatacactctagccaaaatccgtaaggccgccagagaactgcttactctagaagagaaagaacccaaaaggttgtttgaaggtaatgcactcctacgtcgtttggttcgtattggagtactagacgagaacagaatgaagctcgattacgtattgggtctcaagattgaagatttcttggaaagacgtctgcaaacacaagtcttcaaatctggtctagctaagtcaatccatcatgctagggtattgatcagacaacgacacattcgggtccgcaaacaagttgtgaacattccctccttcatcgtccgtttggattcacaaaaacacatcgacttctctctgaaatcacctttgggaggcggtcgtccaggacgtgttaagaggaagaacctcaccaagaagagcggtggtggaggtgcagctgaagaagaggaagactaagctgtatgtcgtgctagttgtactagtacttacatattaatatacttatgtattaagaaaaaaacccaacaca

SEQ ID NO: 6120 - DNA, 724 bp, Diabrotica virgifera
  SmartBlast Evalue=2E-89; Info=40S ribosomal protein S9 n=10 Tax= Neoptera RepID=RS9_DROME
aatacataagtatattaatatgtaagtactagtacaactagcacgacatacagcttagtcttcctcttcttcagctgcacctccaccaccgctcttcttggtgaggttcttcctcttaacacgtcctggacgaccgcctcccaaaggtgatttcagagagaagtcgatgtgtttttgtgaatccaaacggacgatgaaggagggaatgttcacaacttgtttgcggacccgaatgtgtcgttgtctgatcaataccctagcatgatggattgacttagctagaccagatttgaagacttgtgtttgcagacgtctttccaagaaatcttcaatcttgagacccaatacgtaatcgagcttcattctgttctcgtctagtactccaatacgaaccaaacgacgtaggagtgcattaccttcaaacaaccttttgggttctttctcttctagagtaagcagttctctggcggccttacggattttggctagagtgtattttactctccatacttcacgtttgtttcggagaccaaaggctccgatgattttcaattcttgatctaaacgggccttctcatatggacgcctaggcgttacataggttttagaatgaaccgacggtatcctaccgtttaccattttgaggttttattttcaacctctgaacataaaaagactgatttctagattaaagaaaagtcaaagagaaacattgacaaatgac

SEQ ID NO: 6121 - DNA, 733 bp, Diabrotica virgifera
tccagtactaattcatacgttgtttgattaggaaagtaagatccgttttactaattaacaatgaaaaattttctagttctggcagcagtttttgcagttgcttatgcaaaccaagatgattatctccgttgggtaagctacgatggaacaataccagacaacgctgtaccagctggagaggatgctaacaataacactatatatattggacgtgtctacttaaacaccaatacaaaccagtccagttggaactataccacagatgcaaaaggatacgttcccgggaatcttagagaaggagttgtgtctttagatactgtgctattccaaaaggttcatacagctacagaaggaattgagattttaacagtagtaaacggtgcaagaatagaatggaaattcgttaaaaactatcagttcccacaactttttgacacagaagcttatcatgttgctagggtcggttgggaatatgaaggaatggaatttaattcgactacatatcttggaactgtcaattttaacgatcaaccaaatataggaaaaatttttaatgctgcagttctttgggcagaaaaccacgttttatatttcccttcacagggaacagttttgagcggatactcatattatgctttggtttattattattaagtgtattttaagtaaaatgaaatatttagtgtattataaatgcataatttaatatacaataaaaaatataccataaaaa

SEQ ID NO: 6122 - DNA, 729 bp, Diabrotica virgifera
atggtatatttttttattgtatattaaattatgcatttataatacactaaatatttcattttacttaaaatacacttaataataataaaccaaagcataatatgagtatccgctcaaaactgttccctgtgaagggaaatataaaacgtggttttctgcccaaagaactgcagcattaaaaatttttcctatatttggttgatcgttaaaattgacagttccaagatatgtagtcgaattaaattccattccttcatattcccaaccgaccctagcaacatgataagcttctgtgtcaaaaagttgtgggaactgatagtttttaacgaatttccattctattcttgcaccgtttactactgttaaaatctcaattccttctgtagctgtatgaaccttttggaatagcacagtatctaaagacacaactccttctctaagattcccgggaacgtatccttttgcatctgtggtatagttccaactggactggtttgtattggtgtttaagtagacacgtccaatatatatagtgttattgttagcatcctctccagctggtacagcgttgtctggtattgttccatcgtagcttacccaacggagataatcatcttggtttgcataagcaactgcaaaaactgctgccagaactagaaaatttttcattgttaattagtaaaacggatcttactttcctaatcaaacaacgtatgaattagtactgga

SEQ ID NO: 6123 - DNA, 713 bp, Diabrotica virgifera
  SmartBlast Evalue=1E-103; Info=Ribosomal protein S8 n=5 Tax= Polyphaga RepID=D1M805_9CUCU
ctgttgataacttccttctagtcttttagtttattcgttcagaatgggtattagtagagaccattggcataaacgaaggtccacaggaggcaagaggaagcctctccgtaagaagaggaagttcgaattaggacgtccagccgcaaataccaaacttggagcacgtagaattcactatgtccgtacacgaggaggtaacttgaagtaccgtgcattgaggattgaaaaaggaaatttcgcatggggcagcgaaggtactgctcgtaaaacacgtattattgatgtcgtttacaatgccagtaataacgaattggtacgtaccaaaacattggtaaagaatgccatcgttgttattgacgcaacccctttcagacaatggtacgaaagccactatattttacctttaggacgcaagaagggggcaaaattgacagcggaagatgaagaaatgttcaataagaaacgtagcaaaaaagtacagaaaaaatatgaaactaggcaaaaaacagctaaagtagaacctgcattagaagaacaattctcaactggaaggttattagcttgcttagcgtcaaggccaggacaatgtggtagagctgatggttacgtcttagagggtaaagaactggaattctacattcgtaagattaagtctaagaaagctaaataaatgtttttataggtgtaaacaataaaagttaacactaaaaaaa

SEQ ID NO: 6124 - DNA, 706 bp, Diabrotica virgifera
  SmartBlast Evalue=1E-103; Info=Ribosomal protein S8 n=5 Tax= Polyphaga RepID=D1M805_9CUCU
agtgttaacttttattgtttacacctataaaaacatttatttagctttcttagacttaatcttacgaatgtagaattccagttctttaccctctaagacgtaaccatcagctctaccacattgtcctggccttgacgctaagcaagctaataaccttccagttgagaattgttcttctaatgcaggttctactttagctgttttttgcctagtttcatattttttctgtacttttttgctacgtttcttattgaacatttcttcatcttccgctgtcaattttgcccccttcttgcgtcctaaaggtaaaatatagtggctttcgtaccattgtctgaaaggggttgcgtcaataacaacgatggcattctttaccaatgttttggtacgtaccaattcgttattactggcattgtaaacgacatcaataatacgtgttttacgagcagtaccttcgctgccccatgcgaaatttcctttttcaatcctcaatgcacggtacttcaagttacctcctcgtgtacggacatagtgaattctacgtgctccaagtttggtatttgcggctggacgtcctaattcgaacttcctcttcttacggagaggcttcctcttgcctcctgtggaccttcgtttatgccaatggtctctactaatacccattctgaacgaataaactaaaagactagaaggaagttatcaacag

SEQ ID NO: 6125 - DNA, 717 bp, Diabrotica virgifera
  SmartBlast Evalue=6E-18; Info=Vacuolar ATP synthase subunit g n= 2 Tax=Aedes aegypti RepID=Q16JK6_AEDAE
tttaaaacacaatacttttaatatatcacttagtacattttaacattatataagtatcttcatgtagtaactcaaaagttttgctgtaaatagtctaaaacggctacaaaaagaaaggaagtacaataaaatggaatgaaacatctataaacagttaagtgattttagtccctattaactacatattgcacctgtcaactattgacggtagttcttgtggacttctggtttgatgtcataaaccaactttaagatctcttgaatgacgggttccttttggttgataatagctttattcatctcttcaatcctcctcttggtgtctacctcgattttcgctgctacatcttctctagagcccatatgcttggcctcaaattcacggaactggcgttctcgttctttacggtacttttcgatttcatcttgagctcttccttagcctgctttagcctccttgctttgcgttttcgggcctctgtaactttgtctgctgcacgcttctcagctgctaacaattgttgaacaccctggctttgatgactagccatcctgtgagttatttaataatataataagtttaaacacccgttacgaatgatatgaacagggactgaaaattaagacgaacctgcaatcagtcatatgatcttaaagttggtttatgacatcaaaccagaagtccctattaactacatattgcacctgtcaactatt

SEQ ID NO: 6126 - DNA, 714 bp, Diabrotica virgifera
  SmartBlast Evalue=6E-18; Info=Vacuolar ATP synthase subunit g n= 2 Tax=Aedes aegypti RepID=Q16JK6_AEDAE
aaaacacaatacttttaatatatcacttagtacattttaacattatataagtatcttcatgtagtaactcaaaagttttgctgtaaatagtctaaaacggctacaaaaagaaaggaagtacaataaaatggaatgaaacatctataaacagttaagtgattttagtccctattaactacatattgcacctgtcaactattgacggtagttcttgtggacttctggtttgatgtcataaaccaactttaagatctcttgaatgacgggttccttttggttgataatagctttattcatctcttcaatcctcctcttggtgtctacctcgattttcgctgctacatcttctctagagcccatatgcttggcctcaaattcacggaactggcgttctcgttctttacggtacttttcgatttcatcttgagctcttccttagcctgctttagcctccttgctttgcgttttcgggcctctgtaactttgtctgctgcacgcttctcagctgctaacaattgttgaacaccctggctttgatgactagccatcctgtgagttatttaataatataataagtttaaacacccgttacgaatgatatgaacagggactgaaaattaagacgaacctgcaatcagtcatatgatcttaaagttggtttatgacatcaaaccagaagtccctattaactacatattgcacctgtcaactatt

SEQ ID NO: 6127 - DNA, 711 bp, Diabrotica virgifera
gatgtcttgtatctcctaaacctgttatccgttttaagtaattttttcaacactttattctttaacgatatcgctgtaataatattgttgctagacaggtaaattttcgttgtatagcgggtgtaccaatcaaactgtttttttttttctcaattttcgcaacaccctgtggaatattctagtctttataaaatattaaaattaaaacccaattatagccccgactgtgactgtaggttttcttaacgttttgtttttttacttattcgcttatgttagataataaaaaagtcagggactttaacaactagccaggttctttatcaatacagggtatttctaaataagtgcgacaaactttaaggggtaattctgcatgaaaaaataatgaccgtttgctttataaactatgtccgcaaatgcttcgtttccgagatacgggatgttgaattttttcttacaaactgacgatttatttattgctctaaaaccggttgagatatgcaaatgaaatttggtaggttttaagaggtagttattgcgcattttttgacatacaattaagaattttatattcaccattggcgtgtatgtgggtataaatattttagatatattttttagatatatattttgtatgtcaaaaaatgcgcagtaaccacctcccaaaacctaccaaactccatctgcacatctcaaccggtttcagag

SEQ ID NO: 6128 - DNA, 587 bp, Diabrotica virgifera
cgccaatggtgaatataaaattcttaattgtatgtcaaaaaatgcgcaataactacctcttaaaacctaccaaatttcatttgcatatctcaaccggttttagagcaataaataaatcgtcagtttgtaagaaaaaattcaacatcccgtatctcggaaacgaagcatttgcggacatagtttataaagcaaacggtcattattttttcatgcagaattaccccttaaagtttgtcgcacttatttagaaataccctgtattgataaagaacctggctagttgttaaagtccctgacttttttattatctaacataagcgaataagtaaaaaaacaaaacgttaagaaaacctacagtcacagtcggggctataattgggttttaattttaatattttataaagactagaatattccacagggtgttgcgaaaattgagaaaaaaaaaaacagtttgattggtacacccgctatacaacgaaaatttacctgtctagcaacaatattattacagcgatatcgttaaagaataaagtgttgaaaaaattacttaaaacggataacaggtttaggagatacaagacatc

SEQ ID NO: 6129 - DNA, 720 bp, Diabrotica virgifera
  SmartBlast Evalue=5E-76; Info="Nucleoside-diphosphate kinase NBR-A, putative n=2 Tax=Aedes aegypti RepID=Q16MB4_AEDAE"
gttcattggttgtgtttatggttgtgttcgatgcttgtgttcggtcaacggaaataactttttacgtgacgaataaaatttcgttcactttttgtccgaccgtcgggttgtttgtatgatttgtactctattagcgatattctattattttcttagagcaatggccgccaaccaagaaagaacttttataatgatcaaacccgacggtgtccaaaggggccttgttggaaaaattatcaaaaggttcgaacagaaaggattccgtctagtagcaatgaaattcatgtggccttctgaagaacttttgaagaaacactacgctgacttagctggcaaacctttcttcgcaggtctagtaaagtacatgagctctggcccagtagtgccaatggtatgggaaggtttaggcgtagtaaaaaccggtcgtgttctcctaggtgctaccaatcctgctgacagtgcccctggcaccatcagaggagacctctgcatccaagtaggacgtaacatctgccacggttcagacgctgttgaatcagcaaacaaggaaatcgacttgtggtttactgaaaaggaattagtaccctggacaccagctgccaaaacttgggtctacgaagactagataaaatactcttactatcttttgtatttaataagtaaccaataacaaaaataaaataaagtcgctaaataaaaacatttgatacagtcaaaaaa

SEQ ID NO: 6130 - DNA, 714 bp, Diabrotica virgifera
  SmartBlast Evalue=5E-76; Info="Nucleoside-diphosphate kinase NBR-A, putative n=2 Tax=Aedes aegypti RepID=Q16MB4_AEDAE"
gactgtatcaaatgtttttatttagcgactttattttatttttgttattggttacttattaaatacaaaagatagtaagagtattttatctagtcttcgtagacccaagttttggcagctggtgtccagggtactaattccttttcagtaaaccacaagtcgatttccttgtttgctgattcaacagcgtctgaaccgtggcagatgttacgtcctacttggatgcagaggtctcctctgatggtgccaggggcactgtcagcaggattggtagcacctaggagaacacgaccggtttttactacgcctaaaccttcccataccattggcactactgggccagagctcatgtactttactagacctgcgaagaaaggtttgccagctaagtcagcgtagtgtttcttcaaaagttcttcagaaggccacatgaatttcattgctactagacggaatcctttctgttcgaaccttttgataatttttccaacaaggcccctttggacaccgtcgggtttgatcattataaaagttctttcttggttggcggccattgctctaagaaaataatagaatatcgctaatagagtacaaatcatacaaacaacccgacggtcggacaaaaagtgaacgaaattttattcgtcacgtaaaaagttatttccgttgaccgaacacaagcatcgaacacaaccataaacacaaccaatgaac

SEQ ID NO: 6131 - DNA, 706 bp, Diabrotica virgifera
  SmartBlast Evalue=1E-100; Info=Ribosomal protein L19e n=3 Tax= Neoptera RepID=Q4GXG0_CICCA
gttagccacaaaaattcttttacggaagacacgttgagaggtgcatttgcaggatgagttccttaaaacttcagaagaggctagcagcctctgttatgcgatgtggtaaaaagaaagtatggttggaccctaatgaaatcaacgaaattgccaacactaactcaagacagaacatccgtaagttgataaaggatggtcttattattaagaagcccgtagctgtacattcccgtgcccgtgttcgcaaaaacactgaagcccgcaggaaaggaaggcactgcggttttggtaaaaggaagggtactgctaatgcccgtaccccacaaaaggaattatggattcaacgcatgagagttttgcgtcgtctccttaaaaaatacagggaagctaaaaaaattgacagacatctataccactcactctacatgaaggccaagggtaacgtattcaagaacaagcgtgtccttatggaatacatccacaagaagaaggcagagaaagcccgtgccaagatgttggcagaccaggccaatgccagaaggatgaaggtaaaacaggctagagaaagacgtgaggaacgtatcgccacaaagaaacaagaagttttgcagaactacatgagggaggatgaagctgcggccactaagaaataagttaattgttttataagatgactatattaaaaatttaaaaaataaaaaaaaaa

SEQ ID NO: 6132 - DNA, 681 bp, Diabrotica virgifera
  SmartBlast Evalue=1E-100; Info=Ribosomal protein L19e n=3 Tax= Neoptera RepID=Q4GXG0_CICCA
aatatagtcatcttataaaacaattaacttatttcttagtggccgcagcttcatcctccctcatgtagttctgcaaaacttcttgtttctttgtggcgatacgttcctcacgtctttctctagcctgttttaccttcatccttctggcattggcctggtctgccaacatcttggcacgggctttctctgccttcttcttgtggatgtattccataaggacacgcttgttcttgaatacgttacccttggccttcatgtagagtgagtggtatagatgtctgtcaatttttttagcttccctgtattttttaaggagacgacgcaaaactctcatgcgttgaatccataattccttttgtggggtacgggcattagcagtacccttccttttaccaaaaccgcagtgccttcctttcctgcgggcttcagtgtttttgcgaacacgggcacgggaatgtacagctacgggcttcttaataataagaccatcctttatcaacttacggatgttctgtcttgagttagtgttggcaatttcgttgatttcattagggtccaaccatactttctttttaccacatcgcataacagaggctgctagcctcttctgaagttttaaggaactcatcctgcaaatgcacctctcaacgtgtcttccgtaaaagaatttttgtggctaac

SEQ ID NO: 6133 - DNA, 670 bp, Diabrotica virgifera
  SmartBlast Evalue=4E-89; Info=Signal peptidase 18 kDa subunit n= 2 Tax=Endopterygota RepID=Q2F5L1_BOMMO
ttattaattttaagtaacaaaaattaaattaagatgttaaaaatgtaatctcactccctgtgtaccaacacatacagtcctaaacaggccaataccgcatacttaaacttggggtattcattcattaatatagtaaccatgcctacataaggcaaaaatcctcttgccctgcctaccacatcatctttggttaaccacaactgtcctggagcatacagacctctatcatccacactattattgtctcctttcgtcaggaactttacagtaccatttttcttttcatggagctttagcacgcgatgtacaatgggaatatctctaccttctactttgaagactacgatttctcctactctaacaggttcttctggataattcgttaagaataatagatctcctctgtggaatgccggctccatactgccagataatactacaactatggggctttcgctaccagttaccaccatgagtcctttccatatcattaaagccgaggagactatcataccgaaactgagaacttggtaaatgaactggcgtttgttcatccgccttaaatcttcgaaaacgtttaaagactccataattgttactaaatttgtagtaaatactttgcagatggtaatccacgtcagaaaacaaaaccaagtaatcagtgatcagt

SEQ ID NO: 6134 - DNA, 641 bp, Diabrotica virgifera
  SmartBlast Evalue=4E-89; Info=Signal peptidase 18 kDa subunit n= 2 Tax=Endopterygota RepID=Q2F5L1_BOMMO
ctgacgtggattaccatctgcaaagtatttactacaaatttagtaacaattatggagtctttaaacgttttcgaagatttaaggcggatgaacaaacgccagttcatttaccaagttctcagtttcggtatgatagtctcctcggctttaatgatatggaaaggactcatggtggtaactggtagcgaaagccccatagttgtagtattatctggcagtatggagccggcattccacagaggagatctattattcttaacgaattatccagaagaacctgttagagtaggagaaatcgtagtcttcaaagtagaaggtagagatattcccattgtacatcgcgtgctaaagctccatgaaaagaaaaatggtactgtaaagttcctgacgaaaggagacaataatagtgtggatgatagaggtctgtatgctccaggacagttgtggttaaccaaagatgatgtggtaggcagggcaagaggatttttgccttatgtaggcatggttactatattaatgaatgaataccccaagtttaagtatgcggtattggcctgtttaggactgtatgtgttggtacacagggagtgagattacatttttaacatcttaatttaatttttgttacttaaaattaataa

SEQ ID NO: 6135 - DNA, 686 bp, Diabrotica virgifera
ttacaatcgaatgtaacagtctcaatataaatactgttgaggcaaaacagtatgtatcagttcattttcttcccgaaatctgagtaggtaccaactataacaatgaaacaagttattgtctccttgtgttgtttgattatagcaactgcagctataccaattgaaagttttgtagatgaagatggccaacaatatgttttagttcctttgcagaggcagagaagggatctaacatggggagcaaaccaaaatggttactctcttggccaaaaaggtactatctacagcagtggtaatcaccaatttgacggctcgtacggtgcatcaaaagcttggggatcacatggtattaaacccgattcatttggcggccgtgtagattatactcacagtactagtggttcaaacgcctttgttggagcaaacagaactccaggttggggtactgatgtggctgccggtggaaggtacaatatagttcaaggaaagaactggaatgttggtgcaacaggacagtacggaaggcatttcggtgggcctattgggactggaaaaccaggatatagtgctttcttaaatgtaaacggacggttctaaataacaaattagcagtatttattttacattagtttatttttattgcctgcctatttatttttttttgaataaaaacatttttatgaata

SEQ ID NO: 6136 - DNA, 615 bp, Diabrotica virgifera
cccgaaatctgagtaggtaccaactataacaatgaaacaagttattgtctccttgtgttgtttgattatagcaactgcagctataccaattgaaagttttgtagatgaagatggccaacaatatgttttagttcctttgcagaggcagagaagggatctaacatggggagcaaaccaaaatggttactctcttggccaaaaaggtactatctacagcagtggtaatcaccaatttgacggctcgtacggtgcatcaaaagcttggggatcacatggtattaaacccgattcatttggcggccgtgtagattatactcacagtactagtggttcaaacgcctttgttggagcaaacagaactccaggttggggtactgatgtggctgccggtggaaggtacaatatagttcaaggaaagaactggaatgttggtgcaacaggacagtacggaaggcatttcggtgggcctattgggactggaaaaccaggatatagtgctttcttaaatgtaaacggacggttctaaataacaaattagcagtatttattttacattagtttatttttattgcctgcctatttatttttttttgaataaaaacatttttatgaata

SEQ ID NO: 6137 - DNA, 666 bp, Diabrotica virgifera
  SmartBlast Evalue=2E-20; Info=Apolipoprotein D n=1 Tax= Camponotus floridanus RepID=E2ABN0_9HYME
gatatgtcagtatgaaatatatataaaagcccttatttgactgaaggtttatactattaatcatatataacaggtataactcagttaaataagaaaatgagtattttattagcagttatttgtttgctggtaacagctgcacacggtaaacttcatggtgcttcttgtccagatctgaaaggagtggcaaacttcgatgctacaaaatttgttggtctctggtatgagcaacaaagatatccaaccatcctagaaaagaacggtaaatgtgttttcacaaaatattcattaaatgacgacaaatcaattggaattaacaccacataccttaatggagagtcaaatgaatggacaatcctcgaaagagttgcaatctcagactcagcaacgggaaaagccaagtttacagtcgaattcaaagaacctgctttgacagcacctttttggattcttgatatagattacgaccaattctttgtaccttactcatgtcttgtacaggatggggaagttatagagaacctttttatatatacaaaaagtttaaatccatcgaatgatgcgataaatgctgcagtcaaagttattaccgacaacaatcttgatgccactaaattattacataccgatcaaacatgtgattactaatgagaatacatttaaagt

SEQ ID NO: 6138 - DNA, 598 bp, Diabrotica virgifera
  SmartBlast Evalue=1E-20; Info=Apolipoprotein D n=1 Tax= Camponotus floridanus RepID=E2ABN0_9HYME
aacaggtataactcagttaaataagaaaatgagtattttattagcagttatttgtttgctggtaacagctgcacacggtaaacttcatggtgcttcttgtccagatctgaaaggagtggcaaacttcgatgctacaaaatttgttggtctctggtatgagcaacaaagatatccaaccatcctagaaaagaacggtaaatgtgttttcacaaaatattcattaaatgacgacaaatcaattggaattaacaccacataccttaatggagagtcaaatgaatggacaatcctcgaaagagttgcaatctcagactcagcaacgggaaaagccaagtttacagtcgaattcaaagaacctgctttgacagcacctttttggattcttgatatagattacgaccaattctttgtaccttactcatgtcttgtacaggatggggaagttatagagaacctttttatatatacaaaaagtttaaatccatcgaatgatgcgataaatgctgcagtcaaagttattaccgacaacaatcttgatgccactaaattattacataccgatcaaacatgtgattactaatgagaatacatttaaagt

SEQ ID NO: 6139 - DNA, 669 bp, Diabrotica virgifera
  SmartBlast Evalue=3E-47; Info=Lethal 35Di n=2 Tax=Culex RepID= B0W0C0_CULQU
atttaactcccaacataacctgtaacctgtgtaagatcttgattgaccaaaaaaatacaaaaatggtcaaggcttccgagacagggggcgtgaagcccatgtcgatagcaggtcgctttataaacgaacgagaacgtttactaggaatgacagctgcagaacgagactttcgcaaacagtggctaaaagaccaagaattgtcccattctgagccgaaaaatgtccctgaaatgtataaagctacccataatccaatcaggaggctctacagatttcctctggataccttaggtaaaatgttggagcctgttttgggattacagagtgcttctagagtgagatacttcaccggaaaatttcttttggctgttgcaggtgcttacgccttgacctactatgttaaatacaataccaatgactggacacgtaagaacggaatgagaatactcaagtctaacatatcagtacatgaaggtgacccaggctatcctagagtatctcaaaggagtaaaccatcagattatggtgatcgaggattcaatgataacaaattaaacttgtaatatatttatatgaaaatatttagtgttcgttttaggatcatttatttgttgcttgcaaattttaaccataacatctttgtataataaagtgcaagaactattgtat

SEQ ID NO: 6140 - DNA, 614 bp, Diabrotica virgifera
  SmartBlast Evalue=3E-47; Info=Lethal 35Di n=2 Tax=Culex RepID= B0W0C0_CULQU
tacaaaaatggtcaaggcttccgagacagggggcgtgaagcccatgtcgatagcaggtcgctttataaacgaacgagaacgtttactaggaatgacagctgcagaacgagactttcgcaaacagtggctaaaagaccaagaattgtcccattctgagccgaaaaatgtccctgaaatgtataaagctacccataatccaatcaggaggctctacagatttcctctggataccttaggtaaaatgttggagcctgttttgggattacagagtgcttctagagtgagatacttcaccggaaaatttcttttggctgttgcaggtgcttacgccttgacctactatgttaaatacaataccaatgactggacacgtaagaacggaatgagaatactcaagtctaacatatcagtacatgaaggtgacccaggctatcctagagtatctcaaaggagtaaaccatcagattatggtgatcgaggattcaatgataacaaattaaacttgtaatatatttatatgaaaatatttagtgttcgttttaggatcatttatttgttgcttgcaaattttaaccataacatctttgtataataaagtgcaagaactattgtat

SEQ ID NO: 6141 - DNA, 1244 bp, Diabrotica virgifera
  SmartBlast Evalue=3E-72; Info=Alcohol dehydrogenase n=1 Tax= Aedes aegypti RepID=Q16Q92_AEDAE
gcaaaatagtaccagatttgtaagggactcataaatattcagctcagaggtgtgctattgatagaggtatgaaattccataaacaagagcctacatgttttacgaaatgatcccttgtttatataatttcacacctcgagcagtagcatatcgttgagctgaatattattgtctgagtctcttagatggctggtacgagtatagttaatttgtctaagctctaatgacagcttttccggttgttttccccgtcaacatatcgacaaagaggtcgaacatgttttcgataccatcgactatggtttctctatacttgatttttccttcgtttacccacgtgtgcagttggtttattcccgtcatccagtcctttgatcgacaatagactcccagggttttggctgacaagtttttctcttgtattgctttttgaactgacgaggagagagaataatcaggtttttccttattgtagttggagatgctgccatttattgctactcttccattgttattcatatgactgtagattatttcagctgtctttcctccgacactatcgaaaaagcagtctacaccttgcggagcaattttcttcaatttagcatcgatatcatcaaccttatagttaataaaatgatcgaatcccaattccttaaccaaccattcgcctttttcattagatccagctattccaatgacgttgcaaccgtatattttccctatctgtcctacaatacttccaattgctccagctgctgcagtcaccacaaccgtgtcaccttctttgggttggcagagctccaagaacaagaagtatgctgtgtttcctgtcataccaagtactcctagagcaacagaaggggagagatctccaatatctggaagtagatagggttctggaagagttggtggttcttttttaccattggagatgctgtaagtcctccaacccgctcttagaacaactaattttccaactggaaattcttcatttttactttcaacaatcctggctacttgagttccccaaattggttctccgattgtgaatttttctgataaacctcgcatgaatggatccacgctgaggaagacggcttttgcaagaaattccccgtcttcaatgggccgcatttcttcttccactagttcgacatcggtctttttaggccacccttcgaagtgtttcatgtaattccacttttttgctttcaccattttgcaatatgaacttgaactgt

SEQ ID NO: 6142 - DNA, 667 bp, Diabrotica virgifera
aaagtttcattctcttatattcgataataaacgagatattatgtacttttatattacagatgaggtattctatttggtcttgagcaatatcattccaactctcgttagctactgtttctacctcttgtaaggctctagattctaggaggtggcaaacgctgtcgtagtcttctgccaattatgtcccacaaatgttcgatcggttaagatctggactatgcgatggccaattcaaagtccgaagatttacctgttgtaaatattcggttacagtttgtgaacgtgaggtcttgcattatcgtgcattagcaaaaaattgttaccaatataaggagccgatagcatggtagctaagtccttcgctatgtaagatcactgacttgaacacactcatcgcgggtcaaattccttatagcgcgttccatttccaccaaataacaaaaacaaactacgcacttaattgaaactttaaataataaatctactcaatttcacagcaaatcagacactttttgactgtcaaccattttacatccattaaattgttaatttctcatagcctactataaataggcttgtttataaaataagcagaaaatgaggatttattgatgaaaaacatcgctagttgttaacgtgcctaacttttttattatccaacataagc

SEQ ID NO: 6143 - DNA, 520 bp, Diabrotica virgifera
ggtggcaaacgctgtcgtagtcttctgccaattatgtcccacaaatgttcgatcggttaagatctggactatgcgatggccaattcaaagtccgaagatttacctgttgtaaatattcggttacagtttgtgaacgtgaggtcttgcattatcgtgcattagcaaaaaattgttaccaatataaggagccgatagcatggtagctaagtccttcgctatgtaagatcactgacttgaacacactcatcgcgggtcaaattccttatagcgcgttccatttccaccaaataacaaaaacaaactacgcacttaattgaaactttaaataataaatctactcaatttcacagcaaatcagacactttttgactgtcaaccattttacatccattaaattgttaatttctcatagcctactataaataggcttgtttataaaataagcagaaaatgaggatttattgatgaaaaacatcgctagttgttaacgtgcctaacttttttattatccaacataagc

SEQ ID NO: 6144 - DNA, 657 bp, Diabrotica virgifera
  SmartBlast Evalue=2E-26; Info="Diazepam binding inhibitor, putative n=1 Tax=Aedes aegypti RepID=Q16I06_AEDAE"
atgcttttaatcttcaaattctcttaatttttcgtgaatttatacttagtccggccctgtcctcctgctgaaatttatcctgccaagcgtgactgctacgactctgtcccaccaataaaacgccggtcccgttcaaattcctgcgttgagcgttggttttaatttattggatccgttctccatctccattcggcagcgctggtttgacacgaactcacctcacctcacttcattcaagtcccagtagccaaatcgttagtttatcagatccttccctgttctttatcaaaaaccgaaaatgtctttagacgagagattccaaaaggctgctgccgatatcaagaacttgaaaagcaagcccactgacaatgatctattagaaatttacggattgttcaaacaagctaccgaaggagactgcaccacagcccgacctggactgttggaccttaaaggaaaagccaaatgggactcgtggaacggcaggaaaggatccagtcaagacaaagctaaggaagaatacatcgcaaaagtacagtcgttgatcgatagcttaggactcgcataaggcatttttatcatcactttttttaagggaaaactattttgttatcattatactctatggttctaataaaaacaattttcttgtaaaaa

SEQ ID NO: 6145 - DNA, 652 bp, Diabrotica virgifera
  SmartBlast Evalue=2E-26; Info="Diazepam binding inhibitor, putative n=1 Tax=Aedes aegypti RepID=Q16I06_AEDAE"
acaagaaaattgtttttattagaaccatagagtataatgataacaaaatagttttcccttaaaaaaagtgatgataaaaatgccttatgcgagtcctaagctatcgatcaacgactgtacttttgcgatgtattcttccttagctttgtcttgactggatcctttcctgccgttccacgagtcccatttggcttttcctttaaggtccaacagtccaggtcgggctgtggtgcagtctccttcggtagcttgtttgaacaatccgtaaatttctaatagatcattgtcagtgggcttgcttttcaagttcttgatatcggcagcagccttttggaatctctcgtctaaagacattttcggtttttgataaagaacagggaaggatctgataaactaacgatttggctactgggacttgaatgaagtgaggtgaggtgagttcgtgtcaaaccagcgctgccgaatggagatggagaacggatccaataaattaaaaccaacgctcaacgcaggaatttgaacgggaccggcgttttattggtgggacagagtcgtagcagtcacgcttggcaggataaatttcagcaggaggacagggccggactaagtataaattcacgaaaaattaagagaatttgaagattaaaagcat

SEQ ID NO: 6146 - DNA, 639 bp, Diabrotica virgifera
  SmartBlast Evalue=1E-41; Info=Glutathione S-transferase n=1 Tax= Harpegnathos saltator RepID=E2C1V1_9HYME
atcagattatttttaaaagatccttacgaaaaaatggcgccttcctacaaagttcgttactttaatacgcctggtagggctgaaactattcgaatgatccttagttatggacaaataccttttgaagatgaccgtgttgccagggaggactggccaaaaataaaacctacaacgcctttaggacaacttccaattctagaagttgatggaaaaccaattcctcaaagcactgctatctgcaggtatctggctaacgttacaaatcttgctggtaaagacgcaaaggaaaatcttgctatagatattgctgttgaaacgtttgaagatatgaagaaacctatgggcgaatacatgagagaaagggatgaaagcaaaaaacaagaaaagcttcaaaaattaaaggagacgaatgctttctatctaggaaaactggaggaatacgcaaataaaaacggaggctatattgccttacccaggataacagtggctgacatcatctttattaatatttatgaaaacttggtagatggactaggaaaggattatatgaatccctatccgggattacagaaagttaagcaaaatgttctatcccaacctggaatcagagattggattaaaaatcgaccaaaaacggac

SEQ ID NO: 6147 - DNA, 634 bp, Diabrotica virgifera
  SmartBlast Evalue=1E-41; Info=Glutathione S-transferase n=1 Tax= Harpegnathos saltator RepID=E2C1V1_9HYME
gttatttttaaaagatccttacgaaaaaatggcgccttcctacaaagttcgttactttaatacgcctggtagggctgaaactattcgaatgatccttagttatggacaaataccttttgaagatgaccgtgttgccagggaggactggccaaaaataaaacctacaacgcctttaggacaacttccaattctagaagttgatggaaaaccaattcctcaaagcactgctatctgcaggtatctggctaacgttacaaatcttgctggtaaagacgcaaaggaaaatcttgctatagatattgctgttgaaacgtttgaagatatgaagaaacctatgggcgaatacatgagagaaagggatgaaagcaaaaaacaagaaaagcttcaaaaattaaaggagacgaatgctttctatctaggaaaactggaggaatacgcaaataaaaacggaggctatattgccttacccaggataacagtggctgacatcatctttattaatatttatgaaaacttggtagatggactaggaaaggattatatgaatccctatccgggattacagaaagttaagcaaaatgttctatcccaacctggaatcagagattggattaaaaatcgaccaaaaacggac

SEQ ID NO: 6148 - DNA, 746 bp, Diabrotica virgifera
  SmartBlast Evalue=6E-11; Info=Protein tyrosine kinase (Fragment) n=1 Tax=Codonosiga gracilis RepID=B3XVY4_9EUKA
tggaaattttccggttcatataatagatatgagacattataatattattaagattttaaagtatcttaaagaaaaaggggcaaatctaagcgtttccaacaatcaaaaacagacacttgttcataaagctgctcaatctggtaatttgaaagccctcaatatctagtagaagattgtaaactggatattaacgtttctgatgttgatggaaattttccggttcatatggtacatataagttattatactattaagattttaaagtatcttaaagaaaacggggcaaatctaagcatatcgaatagcgaaaaacagacacttgttcataaagctgctcaatctggtgatttggaagccctagaatatctagtagaagattgtaaaatggatgttaacgttctgatgttcatggaaatttaccggttcatatgatagatatgagatatcatagtatttccattttaaagtatcttaaagaaaaaggggcaaatctaagcatttccaacaaatcataaacatacacttattcataaagctgcgcaatctggtgatttggaagtcctacaatatctagtagaaaattgtaaaatggatgtcaacgtttctgatgttgatgggaatgtaccggctcatttcgcagctaaaagtaataaagttgagattttaaggtatcttaaaacaattggaagtgatttaagtcaacgtaaccatcaaagagcgactttggtggacatggcagctgcgga

SEQ ID NO: 6149 - DNA, 423 bp, Diabrotica virgifera
ccggtaaatttccatgaacatcagaacgttaacatccattttacaatcttctactagatattctagggcttccaaatcaccagattgagcagctttatgaacaagtgtctgtttttcgctattcgatatgcttagatttgccccgttttctttaagatactttaaaatcttaatagtataataacttatatgtaccatatgaaccggaaaatttccatcaacatcagaaacgttaatatccagtttacaatcttctactagatattgagggctttcaaattaccagattgagcagctttatgaacaagtgtctgattttgattgttggaaacgcttagatttgcccctttttctttaagatactttaaaatcttaataatattataatgtctcatatctattatatgaaccggaaaatttcca

SEQ ID NO: 6150 - DNA, 602 bp, Diabrotica virgifera
gatacaaaatcactgcaattttaagacgaattattaatgtaaattttattgtactcgagggacattctttttccataagatgtgtacggtgtcctttttcacatatactttaggcacagtataaagagggacagtagaaccactctccgaaaaattggaagtaaaatctgtagtcgcgcatggcgaccgcgcaatgttcagtcgcttttgccccactctcgcattgctattcgcatagaaacgtacggcttttaacagggaaaacccgcatccaccactggtgaattaccaattgcgtactgccggtattacttcctgagatcaaagcgccgacagaagagtgattttactgtggaacctctatatactgtgctttagcagaaattcagtttaaagtctttcctctaaaatgcctctaatatttctattagcatactggatcagtttctacaattaaactataaaagaatcgttatttttgtttaaaatcgtataaaataaaagagcttttaataatttcagctgaggtttttaatgtaaagaaatctactgtataaaagtatatactgtataaaagtaacttttcatgtgtgtgatatatt

SEQ ID NO: 6151 - DNA, 488 bp, Diabrotica virgifera
cacagtataaagagggacagtagaaccactctccgaaaaattggaagtaaaatctgtagtcgcgcatggcgaccgcgcaatgttcagtcgcttttgccccactctcgcattgctattcgcatagaaacgtacggcttttaacagggaaaacccgcatccaccactggtgaattaccaattgcgtactgccggtattacttcctgagatcaaagcgccgacagaagagtgattttactgtggaacctctatatactgtgctttagcagaaattcagtttaaagtctttcctctaaaatgcctctaatatttctattagcatactggatcagtttctacaattaaactataaaagaatcgttatttttgtttaaaatcgtataaaataaaagagcttttaataatttcagctgaggtttttaatgtaaagaaatctactgtataaaagtatatactgtataaaagtaacttttcatgtgtgtgatatatt

SEQ ID NO: 6152 - DNA, 601 bp, Diabrotica virgifera
  SmartBlast Evalue=1E-77; Info=40S ribosomal protein S23 n=14 Tax=Coelomata RepID=RS23_PAPDA
tttttacaggtataaaattgtttattgaaataaaacactgtacaaaattatatgcttaacactttatttaaaaattaaaagtgccaagcaaataaataaaaaaataacattttaattatgatcttggcctttccttcttttctttgtataaagctaatagggacacattagcgaccttaacaaccttaaatctaactccgggaatatctcctacagcatgacctttacgtccaaaacctgcaactagaacttcatcgttttcttctatatggtttaagcaaccatctctaggtacgaaggctgtgatttttttaccatttttaattaactgtaccctaacgcacttgcgaatagcagagttaggttgttttgcttcaactcccactttttccaatacaattcctttagcatgagaagcacctccaaaaggattagccttccatctagttcctaaatgtgcctttttgtaatctttatcagcccatctttgttcacgacggtgattcacatgtttcctagcggttctcaatccacggggcttacccatgttgacggctcaaaaactttgaccggaaagaaataataactgctaccaacaaaa

SEQ ID NO: 6153 - DNA, 595 bp, Diabrotica virgifera
  SmartBlast Evalue=1E-77; Info=40S ribosomal protein S23 n=14 Tax=Coelomata RepID=RS23_PAPDA
caggtataaaattgtttattgaaataaaacactgtacaaaattatatgcttaacactttatttaaaaattaaaagtgccaagcaaataaataaaaaaataacattttaattatgatcttggcctttccttcttttctttgtataaagctaatagggacacattagcgaccttaacaaccttaaatctaactccgggaatatctcctacagcatgacctttacgtccaaaacctgcaactagaacttcatcgttttcttctatatggtttaagcaaccatctctaggtacgaaggctgtgatttttttaccatttttaattaactgtaccctaacgcacttgcgaatagcagagttaggttgttttgcttcaactcccactttttccaatacaattcctttagcatgagaagcacctccaaaaggattagccttccatctagttcctaaatgtgcctttttgtaatctttatcagcccatctttgttcacgacggtgattcacatgtttcctagcggttctcaatccacggggcttacccatgttgacggctcaaaaactttgaccggaaagaaataataactgctaccaacaaaa

SEQ ID NO: 6154 - DNA, 602 bp, Diabrotica virgifera
  SmartBlast Evalue=5E-87; Info=Ribosomal protein L18Ae n=2 Tax= Polyphaga RepID=Q4GXG4_9COLE
ccgtaaaaaccgcagccatgaaagccaaaggagagttgaaggagtatgaagttatcgggcgtaaattgcctaccgagaaggagaagaccactcctttgtataaaatgagaatcttctctccagacaaaatcgtagcgaagtcccgcttttggtatttcttgaggcaacttaggaagttcaagaaaactactggagaaatcgtgtcagttagacaaattccagaaagatctcccgttaaaattaagaactttggtatttggttgaggtatgactcccgttctggtacacacaacatgtacagggaataccgtgaccttagtgtatcaggtgcagtaacagcctgttacagggatatgggggcccgccacagagctagagctcattctattcaggttattaaagttgaagaagtaaaggctagcaacaccagaaggccacaagttaaacaattccacgattcaaagatcagtttcccattacctaaacgtatccaacacaaatcaatgaaccgtttctcagtccgcaaacccagaacatactttttgtaatatgttattatggttagttgtggataaataaattcgtttatatatatttaagat

SEQ ID NO: 6155 - DNA, 597 bp, Diabrotica virgifera
  SmartBlast Evalue=5E-87; Info=Ribosomal protein L18Ae n=2 Tax= Polyphaga RepID=Q4GXG4_9COLE
aaatatatataaacgaatttatttatccacaactaaccataataacatattacaaaaagtatgttctgggtttgcggactgagaaacggttcattgatttgtgttggatacgtttaggtaatgggaaactgatctttgaatcgtggaattgtttaacttgtggccttctggtgttgctagcctttacttcttcaactttaataacctgaatagaatgagctctagctctgtggcgggcccccatatccctgtaacaggctgttactgcacctgatacactaaggtcacggtattccctgtacatgttgtgtgtaccagaacgggagtcatacctcaaccaaataccaaagttcttaattttaacgggagatctttctggaatttgtctaactgacacgatttctccagtagttttcttgaacttcctaagttgcctcaagaaataccaaaagcgggacttcgctacgattttgtctggagagaagattctcattttatacaaaggagtggtcttctccttctcggtaggcaatttacgcccgataacttcatactccttcaactctcctttggctttcatggctgcggtttttacgg

SEQ ID NO: 6156 - DNA, 592 bp, Diabrotica virgifera
  SmartBlast Evalue=2E-49; Info=40S ribosomal protein S24 n=5 Tax= Neoptera RepID=E2C1X5_9HYME
gagcgctctttttgtgaagtggtctcggtatatgatagccaaaatgacggaaggtacagctactattcgaaccagaaagttcatgaccaacagacttttggctagaaaacaaatggttgttgatgttttacatcctggtcaaccatcagttaagaaaactgaaataagggaaaagttagccaaaatttataaagtactcccagatgtagtattcgtctttggctttaggacaaacttcggaggtggtaaatccactggatttgctttaatttatgatacattagatttcgccaaaaaattcgaacctaaacataggttagcaaggcatggtctctatgagaagaaacaacaaacaagaaaacaacgtaaagaacgtaaaaacagaatgaagaaagttaggggcaccaaaaaaagtaaagttggtgcttctgctaaaaagtaatctgttaatggacgcgcatcattgtgtggcacttatctacagtacatttcaagttctatatgtgttattcaacaaacagacgatgtgcaggtttgatttttatgttaaacaagatcatttcaacaaatatatttaagtttctaagtaaat

SEQ ID NO: 6157 - DNA, 588 bp, Diabrotica virgifera
  SmartBlast Evalue=2E-49; Info=40S ribosomal protein S24 n=5 Tax= Neoptera RepID=E2C1X5_9HYME
acttagaaacttaaatatatttgttgaaatgatcttgtttaacataaaaatcaaacctgcacatcgtctgtttgttgaataacacatatagaacttgaaatgtactgtagataagtgccacacaatgatgcgcgtccattaacagattactttttagcagaagcaccaactttactttttttggtgcccctaactttcttcattctgtttttacgttctttacgttgttttcttgtttgttgtttcttctcatagagaccatgccttgctaacctatgtttaggttcgaattttttggcgaaatctaatgtatcataaattaaagcaaatccagtggatttaccacctccgaagtttgtcctaaagccaaagacgaatactacatctgggagtactttataaattttggctaacttttcccttatttcagttttcttaactgatggttgaccaggatgtaaaacatcaacaaccatttgttttctagccaaaagtctgttggtcatgaactttctggttcgaatagtagctgtaccttccgtcattttggctatcatataccgagaccacttcacaaaaagagcgctc

SEQ ID NO: 6158 - DNA, 574 bp, Diabrotica virgifera
  SmartBlast Evalue=2E-45; Info=Ribosomal protein L26 n=2 Tax= Chrysomelinae RepID=D1M842_9CUCU
acttttgttttgcaaacttggtaacacttcttttacatcaaaaatttctttagctgttgtcggttaaggaacagcttacaaaatgaaattcaacaaattagtaaccgcttcaagaagcaaaaataggaaaaggcatttcacagccccatcccacatcagaagaacccttatgtccgcacccttgtctaaagaacttagacaaaagtacaatgttagcactatgccaatccgcaaggacgatgaagtacaagttgtaagggggcactacaaaggccagcaagtaggtaaagttgtacaagtatacaggaagaaattcgttatctacattgaaaggatccagagagaaaaagccaatggagctagtgtatatgtaggaatccacccttcaaaagttgttattgttaaacttaaaatggacaaggacaggaagaagatcattgacagaagagccaaaggacgtttggctgctttgggcaaagacaaaggaaaatacactgaagaatccgctgcctcagctgtagaaacatcttaggtgtataagtaatttttaataataaaataatataaagttagt

SEQ ID NO: 6159 - DNA, 571 bp, Diabrotica virgifera
  SmartBlast Evalue=2E-45; Info=Ribosomal protein L26 n=2 Tax= Chrysomelinae RepID=D1M842_9CUCU
aactttatattattttattattaaaaattacttatacacctaagatgtttctacagctgaggcagcggattcttcagtgtattttcctttgtctttgcccaaagcagccaaacgtcctttggctcttctgtcaatgatcttcttcctgtccttgtccattttaagtttaacaataacaacttttgaagggtggattcctacatatacactagctccattggctttttctctctggatcctttcaatgtagataacgaatttcttcctgtatacttgtacaactttacctacttgctggcctttgtagtgcccccttacaacttgtacttcatcgtccttgcggattggcatagtgctaacattgtacttttgtctaagttctttagacaagggtgcggacataagggttcttctgatgtgggatggggctgtgaaatgccttttcctatttttgcttcttgaagcggttactaatttgttgaatttcattttgtaagctgttccttaaccgacaacagctaaagaaatttttgatgtaaaagaagtgttaccaagtttgcaaaacaaaagt

SEQ ID NO: 6160 - DNA, 567 bp, Diabrotica virgifera
  SmartBlast Evalue=4E-75; Info=S13e ribosomal protein n=1 Tax= Timarcha balearica RepID=Q6EUZ0_TIMBA
tttctcagtgaagccatcttggcaaacgttagtaacgtgaaataaaacttaaattttttcaaaatgggtcgtatgcacgcaccaggaaaaggtattgcccagtcggcattgccatacagaaggagtgtaccaacatggttgaaagtcacaccagaagaagtaaaagaccatatttttaaacttggcaagaaaggcttgactccatcacaaattggtgttatcctcagggattcatatggtgttgcccaagtaaggtttgtttctggaaacaaaatcttgcgtatcatgaaagctatgggtcttgcccctgatctaccagaagatttgtactaccttatcaagaaggcagtagctatccgcaaacatttagaacgtaacagaaaagacaaggacagcaaattccgtttgattttggtagaatcacgtatccaccgtttggctaggtactacaaaaccaagagcgtattggcacccaactggaagtacgaatcaagcacagcatctgctttggtcgcttaaattgtgcttttatgttaagtttataaaataaaaatttctactaaaaaa

SEQ ID NO: 6161 - DNA, 561 bp, Diabrotica virgifera
  SmartBlast Evalue=4E-75; Info=S13e ribosomal protein n=1 Tax= Timarcha balearica RepID=Q6EUZ0_TIMBA
agtagaaatttttattttataaacttaacataaaagcacaatttaagcgaccaaagcagatgctgtgcttgattcgtacttccagttgggtgccaatacgctcttggttttgtagtacctagccaaacggtggatacgtgattctaccaaaatcaaacggaatttgctgtccttgtcttttctgttacgttctaaatgtttgcggatagctactgccttcttgataaggtagtacaaatcttctggtagatcaggggcaagacccatagctttcatgatacgcaagattttgtttccagaaacaaaccttacttgggcaacaccatatgaatccctgaggataacaccaatttgtgatggagtcaagcctttcttgccaagtttaaaaatatggtcttttacttcttctggtgtgactttcaaccatgttggtacactccttctgtatggcaatgccgactgggcaataccttttcctggtgcgtgcatacgacccattttgaaaaaatttaagttttatttcacgttactaacgtttgccaagatggcttcactgagaaa

SEQ ID NO: 6162 - DNA, 566 bp, Diabrotica virgifera
  SmartBlast Evalue=2E-75; Info=Ribosomal protein S16 n=3 Tax= Polyphaga RepID=D1M7Z9_9CUCU
aaaccgaacttcctttcttagtcttttcacaatgcaggcaccaacgacaaagccaaaaagagatccaatccactctgtccaagtttttggcagaaagaaatcagctacagccgtagcttattgcaaaagaggtagaggagtcttgagggtaaatggcagacctctcagccaagtggagcctaaaatgctccaagacaaacttcaagaacccattcttcttcttggaaaggacaaattctctgctgttgacatcagagttagagtaaatggtggtggacatgtttcccaaatttatgctattagacaagctatctcaaaggctttggtagcttattaccaaaaatatgttgatgaagcatcaaagaaggaattgaaggatatccttatccaatatgaccgtaccttgttggtagccgatcccagacgctgcgaacccaagaaattcggtggtccaggtgctcgtgcccgctaccaaaaatcttaccgttaagttcttttttagatttaatgttgtgtttcttgtatgtattaagatatcaacaataaacacaattttttcctacaaa

SEQ ID NO: 6163 - DNA, 560 bp, Diabrotica virgifera
  SmartBlast Evalue=2E-75; Info=Ribosomal protein S16 n=3 Tax= Polyphaga RepID=D1M7Z9_9CUCU
aggaaaaaattgtgtttattgttgatatcttaatacatacaagaaacacaacattaaatctaaaaaagaacttaacggtaagatttttggtagcgggcacgagcacctggaccaccgaatttcttgggttcgcagcgtctgggatcggctaccaacaaggtacggtcatattggataaggatatccttcaattccttctttgatgcttcatcaacatatttttggtaataagctaccaaagcctttgagatagcttgtctaatagcataaatttgggaaacatgtccaccaccatttactctaactctgatgtcaacagcagagaatttgtcctttccaagaagaagaatgggttcttgaagtttgtcttggagcattttaggctccacttggctgagaggtctgccatttaccctcaagactcctctacctcttttgcaataagctacggctgtagctgatttctttctgccaaaaacttggacagagtggattggatctctttttggctttgtcgttggtgcctgcattgtgaaaagactaagaaaggaagttggttt

SEQ ID NO: 6164 - DNA, 715 bp, Diabrotica virgifera
ctaatatgcagatctttttcatgtataaaaggaagctcaaatctgataagaatattgttaatattgtttaagcattagtaacaaacaaaaacgaattgtccaaaatgctgcttaaaattgtcgtcgtttgctgctgcatttcaattgcactcagtcaagctgttggaaaatgtcccagtgtagatggtagatatccagtataccttcctgatgcaacatcctgctcaacattttatgaatgttctaatggaacaccataccaattcaaatgtgcgtatggaacatatttcgacagccagagcagaatatgcagacataaacgagacgtcaattgtggcagtagaaggagagattagtactctagttaaaaaaatgtaaatttgttttaattctcgtagtacctgtgatacacatattttttatattgtgttaaaaattaaaaaataataaaaaagtgattacatctaaaataggatagtattatattatattttaatttccaatgtacctcccgttaagataggcaaaatgtattcattcccagatttcaattttttcattttttatgttctatgtgataaaaaaataagactcagcccaattttacccctccgcccttcttcctcctccccccaccaacataaacgtcaatttttcgttattatttattatttcaaaagattcacacagtagtcctgtcgccagtgggggtaca

SEQ ID NO: 6165 - DNA, 339 bp, Diabrotica virgifera
tgccacaattgacgtctcgtttatgtctgcatattctgctctggctgtcgaaatatgttccatacgcacatttgaattggtatggtgttccattagaacattcataaaatgttgagcaggatgttgcatcaggaaggtatactggatatctaccatctacactgggacattttccaacagcttgactgagtgcaattgaaatgcagcagcaaacgacgacaattttaagcagcattttggacaattcgtttttgtttgttactaatgcttaaacaatattaacaatattcttatcagatttgagcttccttttatacatgaaaaagatctgcatattag

SEQ ID NO: 6166 - DNA, 560 bp, Diabrotica virgifera
  SmartBlast Evalue=8E-57; Info=Ribosomal protein S20 n=2 Tax= Cucujiformia RepID=D1M7Z6_9CUCU
cacatacgtcaaacttcaaaaaattttctttttgactttgttgttgaaagaagtgtgtgcttctggttcagcgctggtcaattatccaatactgaattgattacctcgaccagaaatattttaaaatggcatctgttgagaaagctaatcctgaaaagcccggacaggaatctgccccaatccatcacattaggattacattgacttctcgcaatgtccgctcattggagaaagtatgttcagacctaattgatgctgccaagaggcaaaaacttaaagtgaagggaccagtacgtatgccaaccaagatcttaagaattaccactcgtaagacaccttgtggagaaggttccaaaacttgggatagattccagatgagaattcacaagagagttattgacttacattccccatctgaaattgtcaaacaaatcacttccatcaacattgaacctggtgtagaagttgaagttaccatcgcagatgcttaaatatatttttctaagatacaaaatgttacttcgtaagtaataaaagtgttcttaaaaaaaaaaaaaaaa

SEQ ID NO: 6167 - DNA, 544 bp, Diabrotica virgifera
  SmartBlast Evalue=7E-57; Info=Ribosomal protein S20 n=2 Tax= Cucujiformia RepID=D1M7Z6_9CUCU
aagaacacatttattacttacgaagtaacattttgtatcttagaaaaatatatttaagcatctgcgatggtaacttcaacttctacaccaggttcaatgttgatggaagtgatttgtttgacaatttcagatggggaatgtaagtcaataactctcttgtgaattctcatctggaatctatcccaagttttggaaccttctccacaaggtgtcttacgagtggtaattcttaagatcttggttggcatacgtactggtcccttcactttaagtttttgcctcttggcagcatcaattaggtctgaacatactttctccaatgagcggacattgcgagaagtcaatgtaatcctaatgtgatggattggggcagattcctgtccgggcttttcaggattagctttctcaacagatgccattttaaaatatttctggtcgaggtaatcaattcagtattggataattgaccagcgctgaaccagaagcacacacttctttcaacaacaaagtcaaaaagaaaattttttgaagtttgacgtatgtg

SEQ ID NO: 6168 - DNA, 545 bp, Diabrotica virgifera
ttttactacataagtgatttattttcttaagaaaaacgagaacgatagaaaaaattaaacaataaatttactaattacctaaaccatacacaaaactgtacaaatttatagtaaaaataaatttaaagtagtatcgtttatacgctagtatcggaatctgtataaatttaaccattttcaactttgataaaaagactagccacacatcattgagaacgtactcactacatgtaacaaaaaattatgataacattgtcacaaaactgacaagtcaatgtttaagagaggttcatagcaattttggacgtttggactgaagcatctgcttgaggctgaaggatgacactcctactcctaaacctgctaacaagatggcggatgggggcactagtttacctccgcttctgtttatgggtacattctgatgtggcactggcactgtgagacgtaaagcgaggcaacgggcttgagacaagaacatcctcaactcttaagcctggtgcttggctctcggaactcgggtcacaagttaaagtgaaagaggt

SEQ ID NO: 6169 - DNA, 541 bp, Diabrotica virgifera
actacataagtgatttattttcttaagaaaaacgagaacgatagaaaaaattaaacaataaatttactaattacctaaaccatacacaaaactgtacaaatttatagtaaaaataaatttaaagtagtatcgtttatacgctagtatcggaatctgtataaatttaaccattttcaactttgataaaaagactagccacacatcattgagaacgtactcactacatgtaacaaaaaattatgataacattgtcacaaaactgacaagtcaatgtttaagagaggttcatagcaattttggacgtttggactgaagcatctgcttgaggctgaaggatgacactcctactcctaaacctgctaacaagatggcggatgggggcactagtttacctccgcttctgtttatgggtacattctgatgtggcactggcactgtgagacgtaaagcgaggcaacgggcttgagacaagaacatcctcaactcttaagcctggtgcttggctctcggaactcgggtcacaagttaaagtgaaagaggt

SEQ ID NO: 6170 - DNA, 533 bp, Diabrotica virgifera
tttggcagaatatcatttattacaaacaaactaatttaacattaattaataaaatatacatttgatgcaattcttaatattaataataattggtggttgtggctttgatgttgtaggagtcgcaggagttgttgtagatgaaggtgtaggaggctcagaggttgttgtagatgtagtcataggtggtgaaggaggatgtgaaggtgtttctgtaggtaaaattgagacttctgtaattggaggaggtggtggaacctttaatttacttaaaacatcatcctcaaagtggtgtaatatattgacattgctttcgtcctcggaagaatttatgttaatcgcaattgctgattgtgaatcgttaggctggctgtcatccaacaaataataggaccgacctaaaactccactactacaaaacgatagtatcaagacaaaaactaaaatgaacatgattctgtattttactcaatactgcacgaataaatggttctaaaagactaaattataatagtaggtaggtactgcgatgtaac

SEQ ID NO: 6171 - DNA, 530 bp, Diabrotica virgifera
ggcagaatatcatttattacaaacaaactaatttaacattaattaataaaatatacatttgatgcaattcttaatattaataataattggtggttgtggctttgatgttgtaggagtcgcaggagttgttgtagatgaaggtgtaggaggctcagaggttgttgtagatgtagtcataggtggtgaaggaggatgtgaaggtgtttctgtaggtaaaattgagacttctgtaattggaggaggtggtggaacctttaatttacttaaaacatcatcctcaaagtggtgtaatatattgacattgctttcgtcctcggaagaatttatgttaatcgcaattgctgattgtgaatcgttaggctggctgtcatccaacaaataataggaccgacctaaaactccactactacaaaacgatagtatcaagacaaaaactaaaatgaacatgattctgtattttactcaatactgcacgaataaatggttctaaaagactaaattataatagtaggtaggtactgcgatgtaac

SEQ ID NO: 6172 - DNA, 543 bp, Diabrotica virgifera
  SmartBlast Evalue=8E-70; Info=Ribosomal protein S12 n=1 Tax= Chrysomela tremulae RepID=D1M803_9CUCU
ttttgaattttaaattttattaaataaaaaatgtgtaacattacttagcattcttaagataatccctaagaacatctagggctggggattcttctccatagtccctaatgactacacaggaacagccaacgacctttcgtgctttaccagtgttatcaattttgcataaccctgaccactcgcctaattttttgttattgtctaccttaataagaggaatttgatgttctgagcataaagctgagactagtttcttatacataggctcgtcacagttttcagcgagcacacaaagtacggcttgtcttttatccaaagctttagcagcctcatgcaaaccatgaacgactccatcgtgaataagggctgttttcaagacctcttggagtgcttgatttacgtccatgggcccaccagattgtacttgtggggctgggggtgcatcatcaacttcgttatcagacattttggttgtttggcttcctactgaagttttcaaagaaaagaattggcgtttgacagtgttgatgacattcggtagat

SEQ ID NO: 6173 - DNA, 539 bp, Diabrotica virgifera
  SmartBlast Evalue=8E-70; Info=Ribosomal protein S12 n=1 Tax= Chrysomela tremulae RepID=D1M803_9CUCU
gaattttaaattttattaaataaaaaatgtgtaacattacttagcattcttaagataatccctaagaacatctagggctggggattcttctccatagtccctaatgactacacaggaacagccaacgacctttcgtgctttaccagtgttatcaattttgcataaccctgaccactcgcctaattttttgttattgtctaccttaataagaggaatttgatgttctgagcataaagctgagactagtttcttatacataggctcgtcacagttttcagcgagcacacaaagtacggcttgtcttttatccaaagctttagcagcctcatgcaaaccatgaacgactccatcgtgaataagggctgttttcaagacctcttggagtgcttgatttacgtccatgggcccaccagattgtacttgtggggctgggggtgcatcatcaacttcgttatcagacattttggttgtttggcttcctactgaagttttcaaagaaaagaattggcgtttgacagtgttgatgacattcggtagat

SEQ ID NO: 6174 - DNA, 536 bp, Diabrotica virgifera
  SmartBlast Evalue=7E-68; Info=Ribosomal protein S15Ae n=5 Tax= Protostomia RepID=Q4GXQ5_CURGL
aaaatagcatctagcggtcgtttttgaaattacgccttttttgatcgtgtttaatgaaggtgtagtgttcatcggtaaacacgaaataattcctagccatggtgcgtatgaatgtattgagcgatgctctaaaatccataaacaatgctgaaaagcgcggtaaaaggcaggtccttatcaggccttcatcaaaagtagttgttaagtttttaactgtaatgatgaagcatggttacattggcgaatttgaaattgtagacgatcacagaagtggaaagatagtagtaaatttgacaggaaggttaaacaaatgtggagtaatttcccctaggtttgatgtaccaattacacatattgaaaaatggacaaataatcttttaccttcccgtcagtttggatatgttgtgcttaccacaagtggaggtatcatggatcacgaagaagctagaaggaaacacctgggaggaaaaattttgggatttttcttctaagatagatttataatttaataaaaattgtttgtaaaaaaaaaaaaa

SEQ ID NO: 6175 - DNA, 523 bp, Diabrotica virgifera
  SmartBlast Evalue=6E-68; Info=Ribosomal protein S15Ae n=5 Tax= Protostomia RepID=Q4GXQ5_CURGL
acaaacaatttttattaaattataaatctatcttagaagaaaaatcccaaaatttttcctcccaggtgtttccttctagcttcttcgtgatccatgatacctccacttgtggtaagcacaacatatccaaactgacgggaaggtaaaagattatttgtccatttttcaatatgtgtaattggtacatcaaacctaggggaaattactccacatttgtttaaccttcctgtcaaatttactactatctttccacttctgtgatcgtctacaatttcaaattcgccaatgtaaccatgcttcatcattacagttaaaaacttaacaactacttttgatgaaggcctgataaggacctgccttttaccgcgcttttcagcattgtttatggattttagagcatcgctcaatacattcatacgcaccatggctaggaattatttcgtgtttaccgatgaacactacaccttcattaaacacgatcaaaaaaggcgtaatttcaaaaacgaccgctagatgctatttt

SEQ ID NO: 6176 - DNA, 531 bp, Diabrotica virgifera
  SmartBlast Evalue=2E-31; Info=Levy n=12 Tax=Drosophila RepID= Q9W1N3_DROME
tagttgtaactatatttattttacaaagacatcttttatttaaataatacactttctattggaaaattcttttaatggtgttcatacccatcgggtaaagcattgcagtgtggattgtggaacaaggatttgttgccatcgccccatgggaatctcttggtgcgaactctcatgtgatcatacttgtggaactctgggggttcgtggtgaccgctttggtgagaaagatagcagttaactgcacacagtataattgatgggaaagctacgaaaatggtgaggtttttccaaatcttataaccaccttcatgtccaccagatacggctgaggggccttcaatttgggctgctctttttgcagacgtttgcatgaatctacgaacgccctggttaagcaagtatgccattttcacggttttttaggacagcctaaaaattacaattatataatattcactgcacaatacctccaaactcaaagatcaatgtgacagtggcaagcagggttgccagatgaagtgaagccaaaat

SEQ ID NO: 6177 - DNA, 530 bp, Diabrotica virgifera
  SmartBlast Evalue=2E-31; Info=Levy n=12 Tax=Drosophila RepID= Q9W1N3_DROME
agttgtaactatatttattttacaaagacatcttttatttaaataatacactttctattggaaaattcttttaatggtgttcatacccatcgggtaaagcattgcagtgtggattgtggaacaaggatttgttgccatcgccccatgggaatctcttggtgcgaactctcatgtgatcatacttgtggaactctgggggttcgtggtgaccgctttggtgagaaagatagcagttaactgcacacagtataattgatgggaaagctacgaaaatggtgaggtttttccaaatcttataaccaccttcatgtccaccagatacggctgaggggccttcaatttgggctgctctttttgcagacgtttgcatgaatctacgaacgccctggttaagcaagtatgccattttcacggttttttaggacagcctaaaaattacaattatataatattcactgcacaatacctccaaactcaaagatcaatgtgacagtggcaagcagggttgccagatgaagtgaagccaaaat

SEQ ID NO: 6178 - DNA, 533 bp, Diabrotica virgifera
  SmartBlast Evalue=4E-77; Info=Ribosomal protein S19 n=1 Tax= Chrysomela tremulae RepID=D1M7Z7_9CUCU
cttttccgccgacgtgtgacagctacagaaaatgccgtctgtaaccttaaaagacgttgatcaacataaatttgtgaaggctttctcctccttcttgaaaaaaactggaaaactacgtgttccagaatgggttgatctcgtcaaaacatccagagctaaggaattagctccctacgatcccgactggtactatgtcagatgtgctgctattgctaggcacatttacatcaggtctcctgtaggtgtaggatcagtcacaaaaatcttcggttcccgcaaacgcaatggaacgaaaccctcccatttctgcagatcagcaggaagcattgcccgtaaagctcttcaaagtttagaaacagttaagttgattgaaaaatctgctgatggtggtaggaaaatcacccaacaaggtaggagagatcttgatcgtattgctgcacaggttaaagctaaggaacgtaaagctcttaaggcttccggtgtgcttactttgtaaatgattaagttttaataaaataattatttgataaaaa

SEQ ID NO: 6179 - DNA, 526 bp, Diabrotica virgifera
  SmartBlast Evalue=3E-77; Info=Ribosomal protein S19 n=1 Tax= Chrysomela tremulae RepID=D1M7Z7_9CUCU
caaataattattttattaaaacttaatcatttacaaagtaagcacaccggaagccttaagagctttacgttccttagctttaacctgtgcagcaatacgatcaagatctctcctaccttgttgggtgattttcctaccaccatcagcagatttttcaatcaacttaactgtttctaaactttggagagctttacgggcaatgcttcctgctgatctgcagaaatgggagggtttcgttccattgcgtttgcgggaaccgaagatttttgtgactgatcctacacctacaggagacctgatgtaaatgtgcctagcaatagcagcacatctgacatagtaccagtcgggatcgtagggagctaattccttagctctggatgttttgacgagatcaacccattctggaacacgtagttttccagtttttttcaagaaggaggagaaagccttcacaaatttatgttgatcaacgtcttttaaggttacagacggcattttctgtagctgtcacacgtcggcggaaaag

SEQ ID NO: 6180 - DNA, 523 bp, Diabrotica virgifera
  SmartBlast Evalue=6E-63; Info=Ribosomal protein S17 n=8 Tax= Neoptera RepID=D1M830_9CUCU
cttccgttctctttgaaagaattttgcttctttgaccacgtttttctgaaccaagtttttcgcttttgaaaacatgggtcgcgtacgtaccaagactgtgaagaaagcctccaaagtcatcattgaaaagtactacacacgtttaactttagatttccacacaaacaagcgtatctgcgaagaaatcgcaattattccaacaaaacctctacgcaacaaaattgccggatttgtcacacatttgatgaaacgtctcaggcactcacaagtgcgtggaatctccatcaaattgcaagaagaagaacgtgaaagacgtgataactacgtaccagaagtctctgctcttgaacatgatatcattgaggttgatccagagaccaaagaaatgttgaaaatgctcgatttcaacaacatcagtggattgcagttaacgcaaccagctacaaacacattcaacagacgttcttaatttttttttataatgtaattgacatttaaaataaatacaaagtatttgtacagt

SEQ ID NO: 6181 - DNA, 518 bp, Diabrotica virgifera
  SmartBlast Evalue=6E-63; Info=Ribosomal protein S17 n=8 Tax= Neoptera RepID=D1M830_9CUCU
acaaatactttgtatttattttaaatgtcaattacattataaaaaaaaattaagaacgtctgttgaatgtgtttgtagctggttgcgttaactgcaatccactgatgttgttgaaatcgagcattttcaacatttctttggtctctggatcaacctcaatgatatcatgttcaagagcagagacttctggtacgtagttatcacgtctttcacgttcttcttcttgcaatttgatggagattccacgcacttgtgagtgcctgagacgtttcatcaaatgtgtgacaaatccggcaattttgttgcgtagaggttttgttggaataattgcgatttcttcgcagatacgcttgtttgtgtggaaatctaaagttaaacgtgtgtagtacttttcaatgatgactttggaggctttcttcacagtcttggtacgtacgcgacccatgttttcaaaagcgaaaaacttggttcagaaaaacgtggtcaaagaagcaaaattctttcaaagagaacggaag

SEQ ID NO: 6182 - DNA, 532 bp, Diabrotica virgifera
  SmartBlast Evalue=1E-56; Info=Ribosomal protein L30 n=2 Tax= Cucujiformia RepID=D1M816_9CUCU
gttaacctgccacaacgtggttactctctttccttcaactcattgaaaagtgtggttcgaagttttttctcattaaagatttgctgtattttcagcactttgcaatttataaatcagtaaaatggttgcccaaaagaaacagaagaaggcgattgaaagtatcaacagccgtttggctttggtaatgaaatctggcaaatattgtctgggatacaagcagaccttaaaaacattgagacaaggtaaatcaaaacttattatcatttctaacaacactcctcccctaaggaaatccgaaattgaatactacgctatgttggctaaaactggagtccaccattattctggaaataatgtagagctaggcacagcatgcggaaaatacttcagggtgtgcgctatgtccattacagatcccggagatagtgatatcattagatccatgcctgcatctgaaggtggtgaaaaataaatcaagtagcttatcttttataatttaattcttttttcaataaaatattgaaccattaaa

SEQ ID NO: 6183 - DNA, 529 bp, Diabrotica virgifera
  SmartBlast Evalue=1E-56; Info=Ribosomal protein L30 n=2 Tax= Cucujiformia RepID=D1M816_9CUCU
aatggttcaatattttattgaaaaaagaattaaattataaaagataagctacttgatttatttttcaccaccttcagatgcaggcatggatctaatgatatcactatctccgggatctgtaatggacatagcgcacaccctgaagtattttccgcatgctgtgcctagctctacattatttccagaataatggtggactccagttttagccaacatagcgtagtattcaatttcggatttccttaggggaggagtgttgttagaaatgataataagttttgatttaccttgtctcaatgtttttaaggtctgcttgtatcccagacaatatttgccagatttcattaccaaagccaaacggctgttgatactttcaatcgccttcttctgtttcttttgggcaaccattttactgatttataaattgcaaagtgctgaaaatacagcaaatctttaatgagaaaaaacttcgaaccacacttttcaatgagttgaaggaaagagagtaaccacgttgtggcaggttaac

SEQ ID NO: 6184 - DNA, 535 bp, Diabrotica virgifera
  SmartBlast Evalue=6E-69; Info=Ribosomal protein L27 n=2 Tax= Chrysomelinae RepID=D1M818_9CUCU
tttttttaacatttatccacattttattctcaaaataaaaagtgtacaattataaaattaaatctacagcctagaacctcaatttttggaagaaccatttgttctttccttgcttatacctttcctcaaatttgacacgggtctggaatctagccttcttcctcttcatggcatctttgaggtccttgggtacaactttcaagtctgatgccaaatctacagagtatctagtgggcatgagatggttgtagttcaatactttgataaaaggcttgatcttggacctcttgtgcattttgcctttgcccatgcgtttgtggattttccttgggtacctatcaattccagctactaaggcatgtccgtattgtttatctgatgtaccttcatcgtaggttttgacgactacggcttttctgccggcgtatcggcccccgaggaccaatacgacttttcctgatttcattattttacccattgtggcagtgctttgacaactgctgaaaaagacttatggaaggtaatttgacagctg

SEQ ID NO: 6185 - DNA, 528 bp, Diabrotica virgifera
  SmartBlast Evalue=6E-69; Info=Ribosomal protein L27 n=2 Tax= Chrysomelinae RepID=D1M818_9CUCU
aacatttatccacattttattctcaaaataaaaagtgtacaattataaaattaaatctacagcctagaacctcaatttttggaagaaccatttgttctttccttgcttatacctttcctcaaatttgacacgggtctggaatctagccttcttcctcttcatggcatctttgaggtccttgggtacaactttcaagtctgatgccaaatctacagagtatctagtgggcatgagatggttgtagttcaatactttgataaaaggcttgatcttggacctcttgtgcattttgcctttgcccatgcgtttgtggattttccttgggtacctatcaattccagctactaaggcatgtccgtattgtttatctgatgtaccttcatcgtaggttttgacgactacggcttttctgccggcgtatcggcccccgaggaccaatacgacttttcctgatttcattattttacccattgtggcagtgctttgacaactgctgaaaaagacttatggaaggtaatttgacagctg

SEQ ID NO: 6186 - DNA, 517 bp, Diabrotica virgifera
  SmartBlast Evalue=5E-35; Info=Ribosomal protein L22 n=1 Tax= Chrysomela tremulae RepID=D1M843_9CUCU
tgcagtcgggaggttaacttcatcgtgtgcaaaaatgcctacaaaaacagccgttccagttaccaaaccacaggggaagaaaccccaaattagaggaaaaggtctaaagaaaaagaaggttgctttgaaatttgtgattgactgtacccatcctagtgaagacaatcttctagatgttgcaaactttgaaaattatttgaaagagaggattaagatcaatggcaaaacaggaaactttggtgctggaaaaagtggtcaacattcagttaccgtaagcagagacaaaaatgttaaaattgccctgtccgctgaaattccattttcaaaaaggtaccttaaataccttacgaaaaagtatttaaagaagaacaatcttcgtgattggttaagagtagtagcttctggaaaggactcttacgaactcagatacttccagattgacagtcaagaagacgatgatgaagaagataatgaataatttattcagttatttttttattaaatagattataaaaaa

SEQ ID NO: 6187 - DNA, 508 bp, Diabrotica virgifera
  SmartBlast Evalue=5E-35; Info=Ribosomal protein L22 n=1 Tax= Chrysomela tremulae RepID=D1M843_9CUCU
aatctatttaataaaaaaataactgaataaattattcattatcttcttcatcatcgtcttcttgactgtcaatctggaagtatctgagttcgtaagagtcctttccagaagctactactcttaaccaatcacgaagattgttcttctttaaatactttttcgtaaggtatttaaggtacctttttgaaaatggaatttcagcggacagggcaattttaacatttttgtctctgcttacggtaactgaatgttgaccactttttccagcaccaaagtttcctgttttgccattgatcttaatcctctctttcaaataattttcaaagtttgcaacatctagaagattgtcttcactaggatgggtacagtcaatcacaaatttcaaagcaaccttctttttctttagaccttttcctctaatttggggtttcttcccctgtggtttggtaactggaacggctgtttttgtaggcatttttgcacacgatgaagttaacctccgactgca

SEQ ID NO: 6188 - DNA, 519 bp, Diabrotica virgifera
  SmartBlast Evalue=6E-23; Info=ATPase coupling factor 6 n=1 Tax= Simulium nigrimanum RepID=D1FQ50_9DIPT
tcgcgcatgcgcagtggtagttcgtgcattcagtaaattttaaggatctgctgtaggcctttcgactttatatttaaaatctactcgatctactcaatatactaatacagtaaagatgctgttcacaaaagttttgggaactgtaaggaattccgtaaagaacgaggtctgcagtcgaaatattggaattctagctccttgtcttcaaaaggcttcagatcccattcaacaattatttgttgataaaattagagaatacagacaaaaaagtaacagtggaaaaagccttgtagaacctactgccgaattagaaaaagaactaaaaactgaactcgataaagtcgcaaaacaatatggaggtggccaaggagtagatatgaccaaattcccatctttcaaatttcaagatcctgtcattgaccctattaacttagaaaagtaaattattccttatattttgttattgtgaaatagtcattaataaaacatttctgttcatgaaataaatactagataatt

SEQ ID NO: 6189 - DNA, 497 bp, Diabrotica virgifera
  SmartBlast Evalue=5E-23; Info=ATPase coupling factor 6 n=1 Tax= Simulium nigrimanum RepID=D1FQ50_9DIPT
cgtgcattcagtaaattttaaggatctgctgtaggcctttcgactttatatttaaaatctactcgatctactcaatatactaatacagtaaagatgctgttcacaaaagttttgggaactgtaaggaattccgtaaagaacgaggtctgcagtcgaaatattggaattctagctccttgtcttcaaaaggcttcagatcccattcaacaattatttgttgataaaattagagaatacagacaaaaaagtaacagtggaaaaagccttgtagaacctactgccgaattagaaaaagaactaaaaactgaactcgataaagtcgcaaaacaatatggaggtggccaaggagtagatatgaccaaattcccatctttcaaatttcaagatcctgtcattgaccctattaacttagaaaagtaaattattccttatattttgttattgtgaaatagtcattaataaaacatttctgttcatgaaataaatactagataatt

SEQ ID NO: 6190 - DNA, 531 bp, Diabrotica virgifera
  SmartBlast Evalue=1E-43; Info=Farnesoic acid O-methyl transferase-like protein n=1 Tax=Aedes aegypti RepID=Q1HQX5_ AEDAE
ttttgatgtgtgtaaatgttttatttaaaaataaataacttaaaaaataaatatttaatgcctgagaaccaagatttcatagttggaatggctgtgttcgcctccgttgaatggtacgtagcaacaaccgtgacttgggtgaacctttcctactgtttgggaaccttcgtggtaagctctgccaatgtataaaggttctccatcggacgttctacctccttccactgcgtctggtggaatgttaccgccgtgacatggtacccagtcgaattgttgttcgcacagaacctggaagcggtgaactccaatctcggatccattgtaagatacgtaggcgatatctttgcctggaattacttttgctggaagccagtctccttcatagtgagctctgccaacatagatttcgtagccgtcgacgtcagtgcctccacggagagctgaagatggtactccaccgcgagcagttgtgtcaacccaatagtatgctgccattttttaaattgtttgttgtcaacgataacggaaaat

SEQ ID NO: 6191 - DNA, 527 bp, Diabrotica virgifera
  SmartBlast Evalue=1E-43; Info=Farnesoic acid O-methyl transferase-like protein n=1 Tax=Aedes aegypti RepID=Q1HQX5_ AEDAE
gatgtgtgtaaatgttttatttaaaaataaataacttaaaaaataaatatttaatgcctgagaaccaagatttcatagttggaatggctgtgttcgcctccgttgaatggtacgtagcaacaaccgtgacttgggtgaacctttcctactgtttgggaaccttcgtggtaagctctgccaatgtataaaggttctccatcggacgttctacctccttccactgcgtctggtggaatgttaccgccgtgacatggtacccagtcgaattgttgttcgcagagaacctggaagcggtgaactccaatctcggatccattgtaagatacgtaggcgatatctttgcctggaattacttttgctggaagccagtctccttcatagtgagctctgccaacatagatttcgtagccgtcgacgtcagtgcctccacggagagctgaagatggtactccaccgcgagcagttgtgtcaacccaatagtatgctgccattttttaaattgtttgttgtcaacgataacggaaaat

SEQ ID NO: 6192 - DNA, 528 bp, Diabrotica virgifera
caactttatgaaaatgttaatcctttaaaatatccccccttataaaaattaagtatatatacaacatacaacaactgccataatatattgtgatgacagaaatatatttgttctctaaagcaattttcttcttcaaaaccaaaatgttttcaactgttttcaaaatgtttttgttggttgcagtattaatattggttaccctttcaccatccagtgcagataattataacaaatgtccagaaaccagccatgaacgatacctaatttaccagaatactttaaaggggagagttatccatgtacgcattccaggaacgggtttctttcacgctccaatcacttgtcttcaggtaaccgacataaatgagagttttagtacaccagttatagaagaaggtggatatggaaaggagtatgtagttttacgaattgacccagttcaatcaggagaacaactgcagtacgatgttcagatttatgttgaccaataatcaagttatctttaaataaattttttggtctgtaaaa

SEQ ID NO: 6193 - DNA, 368 bp, Diabrotica virgifera
ctcatttatgtcggttacctgaagacaagtgattggagcgtgaaagaaacccgttcctggaatgcgtacatggataactctcccctttaaagtattctggtaaattaggtatcgttcatggctggtttctggacatttgttataattatctgcactggatggtgaaagggtaaccaatattaatactgcaaccaacaaaaacattttgaaaacagttgaaaacattttggttttgaagaagaaaattgctttagagaacaaatatatttctgtcatcacaatatattatggcagttgttgtatgttgtatatatacttaatttttataaggggggatattttaaaggattaacattttcataaagttg

SEQ ID NO: 6194 - DNA, 506 bp, Diabrotica virgifera
atttgtaatgaaaaaacgtagaaatatatactacaatgaagtttttaagatcgacagtgtgctacattgccatcttggcaattctctttaccctctgtgccgatgaggttgaaggaaggagaaaaattttgatggggcgaaaaagcattaccaggacatatcttcgtggaaatgctgttcctgcgtatgtgataataatccttgtaggaattggtcaaatcatcctgggagggatattgtacgttgcattgaggaagaagatcattgctgcacctgtaacggcatcatatgcagtggctagacaagaaccataaattttatttgtctagaatattattttctaaatatgcatcttttttaaattattgtctacgtaaataataagtctagaaatatataaaaattgtataaaatcatgtacctatatttttcaatttttataaaaaacaacccgaaatttaatattttactgaattaacattatcatttctatctacactcaccgg

SEQ ID NO: 6195 - DNA, 485 bp, Diabrotica virgifera
aaatatatactacaatgaagtttttaagatcgacagtgtgctacattgccatcttggcaattctctttaccctctgtgccgatgaggttgaaggaaggagaaaaattttgatggggcgaaaaagcattaccaggacatatcttcgtggaaatgctgttcctgcgtatgtgataataatccttgtaggaattggtcaaatcatcctgggagggatattgtacgttgcattgaggaagaagatcattgctgcacctgtaacggcatcatatgcagtggctagacaagaaccataaattttatttgtctagaatattattttctaaatatgcatcttttttaaattattgtctacgtaaataataagtctagaaatatataaaaattgtataaaatcatgtacctatatttttcaatttttataaaaaacaacccgaaatttaatattttactgaattaacattatcatttctatctacactcaccgg

SEQ ID NO: 6196 - DNA, 759 bp, Diabrotica virgifera
  SmartBlast Evalue=5E-11; Info=Cytochrome B561 n=1 Tax=Aedes aegypti RepID=Q16KY0_AEDAE
aagaattctgttttttactggctagtttattaactttttcgatttccttatgctctttcaaatattttcttagagcatcttcgtccccgataaattctaccggagaaatatcacggaaagaagatttatttagggatgcctgaaaaataggagaagacgtaggtgagaaatgaccagagcttcggtctggtgttcctttaaaataaatccacgaaggagaggacgtagagtagtttaaactgtcaggctcaaattgagatatacttgatttcttaaaggtgatatttataggtgttgatgtgctactatcttgaggagttggactcttacttggtgtttttactactctgtaattaggatctgagtctttaacacctaggagcttcttctgttcttcattgattatgagaggttcacggaaaggcagggaagttcttaacatttttataaaataataaaataaatttaaactcaaaactgttgccaacaagcattcggcaaaatagatgtaatttgaatacgtataacatgctgtgtgcaaatcatataaaatagcagacagaaatgcaatgttaatagtgaaccacaagaagtcttgtttgactgaatgtttcgttttatttatgactatacttctttccaaaattgatgaattgttacaaggcaaaattctatgtactggtgatgatatattcattgtatctttttggaattgttggaactaaaaacattcatctattaaaaaaccagcaaattgag

SEQ ID NO: 6197 - DNA, 493 bp, Diabrotica virgifera
  SmartBlast Evalue=5E-49; Info=Ribosomal protein L34 n=3 Tax= Cucujiformia RepID=D1M814_9CUCU
tatttatttatttaaagtccgacattgttaaattaaatataaagtagtaatactttatgctattgaccttatttatttaggattaaagaatattttaattgttttagggcaaaatggtccaacgattagtctttagaagacggttgtcttacaacacaaaatccaacaggaggcgaattgtccgcactcctggtggtaaactcgtatatcaatacctgaaaaaacccaagaagatccccagatgcggtcaatgcaaagacaaacttagaggtattctccctgccaggccccaagaaaggtcacgattgtgcagaaggaagaagactgttaagagggcatacggtggtgtcctatgccacaagtgtgttaaagaaaagattgttcgagctttcttgattgaagaacagaagatcgtagtgaaagttcttaaagcccaacaagctgtagttaaaccatctaagaaatagagcttaataaatgtttaatttttaaa

SEQ ID NO: 6198 - DNA, 388 bp, Diabrotica virgifera
  SmartBlast Evalue=5E-49; Info=Ribosomal protein L34 n=3 Tax= Cucujiformia RepID=D1M814_9CUCU
agggcaaaatggtccaacgattagtctttagaagacggttgtcttacaacacaaaatccaacaggaggcgaattgtccgcactcctggtggtaaactcgtatatcaatacctgaaaaaacccaagaagatccccagatgcggtcaatgcaaagacaaacttagaggtattctccctgccaggccccaagaaaggtcacgattgtgcagaaggaagaagactgttaagagggcatacggtggtgtcctatgccacaagtgtgttaaagaaaagattgttcgagctttcttgattgaagaacagaagatcgtagtgaaagttcttaaagcccaacaagctgtagttaaaccatctaagaaatagagcttaataaatgtttaatttttaaa

SEQ ID NO: 6199 - DNA, 994 bp, Diabrotica virgifera
aaacggctcgaagggcggatggcgcgccgctagtaaggttattcccccttttaagtgacgggattgaaacaaattttcgatggaaatcaaataattagaaggaaatcaagcgtcagctaatcccatctacaaaactagataaccaaagttaaacatctctttggacttcttcacataacagaagtggatattccggcgtgcctgccttgtttcaatcccgtaacttagttatttagtcacacaacgtgactctatcacgttgattatgtactacctagttagattgctagccactctgtgatggtttatccctagagtgggctgtttttgttggataatacaccataccggattttattacaaccagcatcttcacccaggaccttgcagtaggacttactcaccacagcagccaaccgttttatcgtgccaaaagggaatttcctacggaattcatctctatggacttgcaaccctacttttaaccgactgttgtgtaaaagctaagtttatttactttttctgtatttacttttgggtaagatatatttgctacattgtaaacttttcgtatgcatacgattaggaagagtacatatattttcgtgatagatagggttttaggttgttgtttttttttctttttgattcagtataagtaggagttagttaaaataaataaaatcaggtcttgtttaataatcataaataattgtatcttaaaatttaatagggaatcgggttgtaaaattttgtcgcggattttaaatagggaatacgtctcgtaggttttttttgtaaaatatataaagagtcactgaccaactcatttatatagacctttttgctattccaacggacttttgatttggattttgattttaatacttttgcttggccagtgatagtggataattgcttgttgagtggcctttgcggtcctattttatcttttccccatccactatcactgttattacgttgcgttatatgt

SEQ ID NO: 6200 - DNA, 499 bp, Diabrotica virgifera
  SmartBlast Evalue=1E-28; Info=Cytochrome c oxidase subunit VIb COX12 n=1 Tax=Glossina morsitans morsitans RepID=D3TRS8_GLOMM
ttactaactcatcttatttatttacatatttgttccaatatatcattatcaactgcataaagtaacaaaaacccgcagggtattatatttattaacacaaaaatttatatgacagcataatgtccttacgaataaactatttattaactagtgtgtatgtaatacaggaataatttaaatgtttccagcgaaatttccctcctctctttggccgtcccatttctcgatccaggcatttgggcacacggaatggaacactttggagaaatattcgcagggcttgtaatcgcttcccctcactttctgacaacggtggaagtcaaggtagctctggtagcagtaacgagtttggttggtgtttggaaaacggggatcgaagggggcagttttgaaaatttcatcttctttaatagctggagccatggctgatttaaatgctggattatattttcctcaaaattctttccaaaatatgtctgccactttatctgaacaaaag

SEQ ID NO: 6201 - DNA, 497 bp, Diabrotica virgifera
  SmartBlast Evalue=1E-28; Info=Cytochrome c oxidase subunit VIb COX12 n=1 Tax=Glossina morsitans morsitans RepID=D3TRS8_GLOMM
actaactcatcttatttatttacatatttgttccaatatatcattatcaactgcataaagtaacaaaaacccgcagggtattatatttattaacacaaaaatttatatgacagcataatgtccttacgaataaactatttattaactagtgtgtatgtaatacaggaataatttaaatgtttccagcgaaatttccctcctctctttggccgtcccatttctcgatccaggcatttgggcacacggaatggaacactttggagaaatattcgcagggcttgtaatcgcttcccctcactttctgacaacggtggaagtcaaggtagctctggtagcagtaacgagtttggttggtgtttggaaaacggggatcgaagggggcagttttgaaaatttcatcttctttaatagctggagccatggctgatttaaatgctggattatattttcctcaaaattctttccaaaatatgtctgccactttatctgaacaaaag

SEQ ID NO: 6202 - DNA, 884 bp, Diabrotica virgifera
gcagcaatctcactgtacgaatgtgtaaaaattcgctgagtgatgaccgttccgccaggcgatagaaaaaatagcaaattaccgtagtcacgatgttgcagatcccacagtacgtactcgaaaacctacgatgttctatttgtggcagctacctcagttcgaaacctctcatgatacgcgcagaaaaccaacaagtgtgtggaaagtgttacaagctgcttcctgcgtatgaaaaagaaaagtgcgtgagacattggactggaaagtgtcgcggaagtgctcatttttccgtgtaggtacaatacccagggttgcgcgtacaaatttaagtggtgtgatgataaagaacatgaagctacgtgtccctacagaagtttaatgtcactttctagtgattcttcaaggtattgcaacattgatgatatctacaacgattcccagagcagctgtggatccgagcttcattgtgaaacaccacaggtaaaagccacgttctcgtataaaataaaagacaaagccagtgagattaaaaacttatcttacaccctagatattaaaggcaactgtgacaatactttagtcattaaaaacaccaacacagaagaggctgaagaagtcgagttgaagatggatgggactgtttttttggaagtaaaccagaattgcttttttctgatatcacggccactccagtatctagccacaacatctatgaaaccttacgagcctacgacacaaaagaagacgtgtgtttacagtgcggtaaagtccctaataacactaactatcctgtaataggtcaaaatgagtgcataaaatataggtcaaatttgtgtgtccattgtgtaaaacaattagaaaaagaatctaaaacgttgtgtaag

SEQ ID NO: 6203 - DNA, 497 bp, Diabrotica virgifera
  SmartBlast Evalue=9E-69; Info=60S ribosomal protein L23 n=32 Tax=Bilateria RepID=RL23_DROME
aaataagttctttcaataatacaaaatgtccaagagaggacgtggtggttccgcgggagcgaagtttaggatctcccttgctcttcctgtaggagcagtaattaattgtgcagataatacaggagcaaagaacttatatgttatcgctgtacaaggtattggtggacgacttaaccgtctgccagctgcaggatctggtgacatgattgtagccacagtcaaaaagggtaaaccagaactcaggaaaaaagtcatgcctgcagtagttatcaggcagcggaaaccatttagaaggaaggatggtgtcttcatttactttgaagataatgctggggttatagtcaataacaaaggtgaaatgaaaggatcagccatcactggtccagttgcaaaagaatgtgcagatttatggcccagaattgcatcaaatgcaagcagtattgcttgatgtgtatatgtttaagaaaaataaaataggatattgttcttaaaaaaaa

SEQ ID NO: 6204 - DNA, 489 bp, Diabrotica virgifera
  SmartBlast Evalue=8E-69; Info=60S ribosomal protein L23 n=32 Tax=Bilateria RepID=RL23_DROME
aagaacaatatcctattttatttttcttaaacatatacacatcaagcaatactgcttgcatttgatgcaattctgggccataaatctgcacattcttttgcaactggaccagtgatggctgatcctttcatttcacctttgttattgactataaccccagcattatcttcaaagtaaatgaagacaccatccttccttctaaatggtttccgctgcctgataactactgcaggcatgacttttttcctgagttctggtttaccctttttgactgtggctacaatcatgtcaccagatcctgcagctggcagacggttaagtcgtccaccaataccttgtacagcgataacatataagttctttgctcctgtattatctgcacaattaattactgctcctacaggaagagcaagggagatcctaaacttcgctcccgcggaaccaccacgtcctctcttggacattttgtattattgaaagaacttattt

SEQ ID NO: 6205 - DNA, 496 bp, Diabrotica virgifera
ataaataggtatattattgttgtgatactataccaacaaccacacttgacttcatatttgtaaacatatagcttaaaatgggttccaaagcttcttttgtttgcgtattgatgttgttggttgttgtagccaatgcgtatgatgcaacaaattgtccttcaaatacaggtcgccaaaaaaatcttgtttacgacagtcttttgacaggagtgtctatcaatgttcgtattccacaggcaggatattttaatagacccataacctgccttcaactaattgatcgacagggaacctctgtttctccaaggatagtggaaggcggatatctcgatacatacatggtagtcaatattacatcattaaatggccaagtactttactactatgcacaaatatatattgattaatttaatttttttagttgaataatatttatgtcaaacttagttttaacaaaataaaagcatatcctttaggataactaaaagttaaaaaa

SEQ ID NO: 6206 - DNA, 490 bp, Diabrotica virgifera
aacttttagttatcctaaaggatatgcttttattttgttaaaactaagtttgacataaatattattcaactaaaaaaattaaattaatcaatatatatttgtgcatagtagtaaagtacttggccatttaatgatgtaatattgactaccatgtatgtatcgagatatccgccttccactatccttggagaaacagaggttccctgtcgatcaattagttgaaggcaggttatgggtctattaaaatatcctgcctgtggaatacgaacattgatagacactcctgtcaaaagactgtcgtaaacaagatttttttggcgacctgtatttgaaggacaatttgttgcatcatacgcattggctacaacaaccaacaacatcaatacgcaaacaaaagaagctttggaacccattttaagctatatgtttacaaatatgaagtcaagtgtggttgttggtatagtatcacaacaataatatacctatttat

SEQ ID NO: 6207 - DNA, 478 bp, Diabrotica virgifera
  SmartBlast Evalue=1E-13; Info=Odorant binding protein C03 (Fragment) n=1 Tax=Tribolium castaneum RepID=D6WS44_TRICA
caaagatcatgaagtgtctaattattgttacggtgttctgcattttggctgtggtcaatgcaggccctacccctaccagcgaacaaaaggaagctgtcaaaaaggcccatgaccattgccaaaccaacgaggaaactagaattgacgacgatgtgtttgaaaaagttaagaaaggcgaaaaggtagacaacgcaaaactgtcaaaacatactctatgtatgaacgtacaaactgggcttcaaacgcaaagtggtgatataaatgtagacaaattgaggaaggctctgactgaagctataagcgacccaaatcttgtaaatacaatcgtagagaaatgcggcaaacgcgtagcaggtgaaaccgctgaagaatctgctgttacttttttcaaatgtcttcattcgcaaggtccaccacatggtcatggacaccattaaataagttttagcctagaattagcgtaaataaaagattatat

SEQ ID NO: 6208 - DNA, 473 bp, Diabrotica virgifera
  SmartBlast Evalue=1E-13; Info=Odorant binding protein C03 (Fragment) n=1 Tax=Tribolium castaneum RepID=D6WS44_TRICA
atcatgaagtgtctaattattgttacggtgttctgcattttggctgtggtcaatgcaggccctacccctaccagcgaacaaaaggaagctgtcaaaaaggcccatgaccattgccaaaccaacgaggaaactagaattgacgacgatgtgtttgaaaaagttaagaaaggcgaaaaggtagacaacgcaaaactgtcaaaacatactctatgtatgaacgtacaaactgggcttcaaacgcaaagtggtgatataaatgtagacaaattgaggaaggctctgactgaagctataagcgacccaaatcttgtaaatacaatcgtagagaaatgcggcaaacgcgtagcaggtgaaaccgctgaagaatctgctgttacttttttcaaatgtcttcattcgcaaggtccaccacatggtcatggacaccattaaataagttttagcctagaattagcgtaaataaaagattatat

SEQ ID NO: 6209 - DNA, 476 bp, Diabrotica virgifera
tggatttattgttttatttattggaaataaaataatttatacaaatatataatgaataataaattatatttttacattgtgtatacttgaattctaaaactaaggagttcagtcagactgggctctacggaaataagggcataattttcattgagtcctccttcctcaatgttaggtacatcttgtgaatctaggttgtccaatattatgatacaggtaattttgttttggaagaaaaggctgtctggaatgcgcaccctgatggaacttccaacaacagttgttgccacttctttatcgtacacttgagtttttgccagtgaagtatctggacagactaccaaatctctagcattagatacagaaatcgactggcagataagtactaccagaagtgcagaaacaaccgtcattttaagagacatgatttcaaataactctaatctgaggcagattctacagatccttcgttgact

SEQ ID NO: 6210 - DNA, 460 bp, Diabrotica virgifera
gtagaatctgcctcagattagagttatttgaaatcatgtctcttaaaatgacggttgtttctgcacttctggtagtacttatctgccagtcgatttctgtatctaatgctagagatttggtagtctgtccagatacttcactggcaaaaactcaagtgtacgataaagaagtggcaacaactgttgttggaagttccatcagggtgcgcattccagacagccttttcttccaaaacaaaattacctgtatcataatattggacaacctagattcacaagatgtacctaacattgaggaaggaggactcaatgaaaattatgcccttatttccgtagagcccagtctgactgaactccttagttttagaattcaagtatacacaatgtaaaaatataatttattattcattatatatttgtataaattattttatttccaataaataaaacaataaatcca

SEQ ID NO: 6211 - DNA, 499 bp, Diabrotica virgifera
tgttgtgatactacatcaatagccacacttgacttcatatttttaaacatataacataagcataaaatggcttctaaagcttcttttgtctccgtattgatgttgttggttgctgtagccaatgcttatgatgtaacaaattgtccttcaaataccggtcgccagagaaatcttgtttacgacaatcttttatcgggagtgtctatcaatgttcgtatgccaccggcaggatattttaatagacccataacgtgccttcaactaattgatcgacagggaacctctgtttctccaaagatagtggaaggcggatatctcgatacatacatggtagtcaatattacatcattaaatggtcaagtactttattaccaggcacaaatatatattgattaattaaatttctttaattgaattatatcgttattatatatgtatgtcttagttttaaaacttagtttctataaaataaaatcatatccttcaggataaccaaaaa

SEQ ID NO: 6212 - DNA, 489 bp, Diabrotica virgifera
ctacatcaatagccacacttgacttcatatttttaaacatataacataagcataaaatggcttctaaagcttcttttgtctccgtattgatgttgttggttgctgtagccaatgcttatgatgtaacaaattgtccttcaaataccggtcgccagagaaatcttgtttacgacaatcttttatcgggagtgtctatcaatgttcgtatgccaccggcaggatattttaatagacccataacgtgccttcaactaattgatcgacagggaacctctgtttctccaaagatagtggaaggcggatatctcgatacatacatggtagtcaatattacatcattaaatggtcaagtactttattaccaggcacaaatatatattgattaattaaatttctttaattgaattatatcgttattatatatgtatgtcttagttttaaaacttagtttctataaaataaaatcatatccttcaggataaccaaaaa

SEQ ID NO: 6213 - DNA, 483 bp, Diabrotica virgifera
tttcattcaagtggtccaatattttattatataaagccacactgccagtccgcatcacttcagaatttaatttagaaacatgaagactacctttgttttggccattttagtttgcgtcggtcttaccgtcagcgcccaaaagaatgactttttgtgcgatacctgcgtaggaatagtaaaagtagtccaggactacgtacgaaaagaaattccattggaagaagttgaaaaagaagtgaaagaattgtgccaagttttaccaggagatttgaaaaaattgtgcgaggacaagttaattccagcaatcgaccaaatgtacaaccaggtggaagacactcctcctagagatttatgcgtagagttggaattctgtaattaatttgtttgttagaatattataataaaaactcaaaattaaatttggaagagcgtcgttttgttatgaagaaaatcaataaaaattgtgcttcctatatacgatcc

SEQ ID NO: 6214 - DNA, 424 bp, Diabrotica virgifera
ccaaatttaattttgagtttttattataatattctaacaaacaaattaattacagaattccaactctacgcataaatctctaggaggagtgtcttccacctggttgtacatttggtcgattgctggaattaacttgtcctcgcacaattttttcaaatctcctggtaaaacttggcacaattctttcacttctttttcaacttcttccaatggaatttcttttcgtacgtagtcctggactacttttactattcctacgcaggtatcgcacaaaaagtcattcttttgggcgctgacggtaagaccgacgcaaactaaaatggccaaaacaaaggtagtcttcatgtttctaaattaaattctgaagtgatgcggactggcagtgtggctttatataataaaatattggaccacttgaatgaaa

SEQ ID NO: 6215 - DNA, 478 bp, Diabrotica virgifera
  SmartBlast Evalue=5E-52; Info=Ribosomal protein L36 n=3 Tax= Endopterygota RepID=D1M812_9CUCU
ttcatgttctgtcactccatgttttctctcttttggtgaattcttggcaacacgagaatcacgttgtgaatttttatagtaaagccagcatggcaccaaggtacgagatcgcagtcggcctccaaaggggtcacaaaaccaccaaaatctcagacaaatccaaactgaataaagttcgtcccgctaggttgaaggggatccaaaccaaacacaccaaatttgtcagagacatcatccgtgaagtcgtaggacatgctccatatgaaaagagagccatggaattgttaaaggtgtcaaaggataagagggccctgaaattcctgaagcgtcgtcttggcacacacatcagagccaagaggaagcgtgaagaactatccaacatccttacccaaatgcgtaaacaacaagctacacataaatagattgtattttgtttaattaatagataaaaaaaaaaaaaaaaaaaaaaaaaaaaaaa

SEQ ID NO: 6216 - DNA, 447 bp, Diabrotica virgifera
  SmartBlast Evalue=5E-52; Info=Ribosomal protein L36 n=3 Tax= Endopterygota RepID=D1M812_9CUCU
atctattaattaaacaaaatacaatctatttatgtgtagcttgttgtttacgcatttgggtaaggatgttggatagttcttcacgcttcctcttggctctgatgtgtgtgccaagacgacgcttcaggaatttcagggccctcttatcctttgacacctttaacaattccatggctctcttttcatatggagcatgtcctacgacttcacggatgatgtctctgacaaatttggtgtgtttggtttggatccccttcaacctagcgggacgaactttattcagtttggatttgtctgagattttggtggttttgtgacccctttggaggccgactgcgatctcgtaccttggtgccatgctggctttactataaaaattcacaacgtgattctcgtgttgccaagaattcaccaaaagagagaaaacatggagtgacagaacatgaa

SEQ ID NO: 6217 - DNA, 535 bp, Diabrotica virgifera
  SmartBlast Evalue=3E-47; Info=Endopolygalacturonase n=1 Tax= Sitophilus oryzae RepID=Q9GQQ9_SITOR
actacagtaaggaaccaagatgattgtatttgtgtaaatcaaggtcagcatttggttttccaaaacatgcactgcattgggggccatggtttaagtcttgcatcaggattgtgggatacctatgagctaaacaccatctacaacgtaacttttcaaaattccatagtagaaaattcacgtaacgctattcatattaaaactataccagtaaataataagaagggcgaaattaccagcatcacttatgataacattaagctaataggaatttcatattatgcaattaacgtacaagaagactacaccaacgatggacccaccggacaccctctaggaaatatccctgttaaagacttaaaaattcataacgtgtatggaacaatgacaggttcaaactcagttaaagcttatattctttgtggaagtggaggctgcacgaattggaactggtctgaaatcaatgtctctggagctgctaagccaaattcttgtaattttacaccaaatggatttagttgttaataaatgttttaaa

SEQ ID NO: 6218 - DNA, 579 bp, Diabrotica virgifera
  SmartBlast Evalue=1E-41; Info=Endopolygalacturonase n=1 Tax= Sitophilus oryzae RepID=Q9GQQ9_SITOR
ccccttattatgagaactatacaattatttgaatatttttttctctgtagcattgcatatgcttcaaacttaacagctagctgcacaattagtaggtttgaccatgttgacaccgtcgttagccaatgcaaatctataaccgttgaaagttttgcagtacctgccggccaaaccttaaaactacatttacaatatggtactaccctgacttttaatggaaacattgcttttggttacagtgagtgggatggtcctcttatgtggattaaaggagacggaatcacgattcaaggaacagaaagtcatttgctaaatggtcgtggtgaactatggtgggacggacatggtgaccacagcaataaaaagaaacctcaattcatgttaattcaggcaacaggaaattcacttttaaaagacattaaagtaaagaattgtcctcacacatgcattggtatatcggattcccatgatattactcttcaacactggactattgattgccaagatggagatacaaaaggaggagctaataccgatggatttgatattgcaaaatcgtacaaagtaacaataaaagat

SEQ ID NO: 6219 - DNA, 466 bp, Diabrotica virgifera
  SmartBlast Evalue=4E-40; Info=S25e ribosomal protein n=2 Tax= Cucujiformia RepID=Q6EUX5_PLAAL
ttttaggtataaattttaaaatttatttttttataaagatatatgtgtatcttattatctatgccgctggatcatctccctttgtggtcctagtgtaaataagttgtgctctgtgttgtacaacttgtttaataagacctttctgttgtaattcaataagtgccctccttgcgagggatccacggaccttcaaacgttcagagactactgatggggtaatcaatttgtaggagggtacttccttgtacagtttatcatatgtagctttgtcaaaaagaacttggttgttcaacttgtcacggacttttccttttgaccacttcttctttttggctttgccacctccagacccctctttcttcttctgggtcttttggggttgcttcgccgatgacttagagtccttcttgggaggcatgttgtcttctgtaagaaaggagacggaaacggatattagacgttgacg

SEQ ID NO: 6220 - DNA, 440 bp, Diabrotica virgifera
  SmartBlast Evalue=3E-40; Info=S25e ribosomal protein n=2 Tax= Cucujiformia RepID=Q6EUX5_PLAAL
ttttttataaagatatatgtgtatcttattatctatgccgctggatcatctccctttgtggtcctagtgtaaataagttgtgctctgtgttgtacaacttgtttaataagacctttctgttgtaattcaataagtgccctccttgcgagggatccacggaccttcaaacgttcagagactactgatggggtaatcaatttgtaggagggtacttccttgtacagtttatcatatgtagctttgtcaaaaagaacttggttgttcaacttgtcacggacttttccttttgaccacttcttctttttggctttgccacctccagacccctctttcttcttctgggtcttttggggttgcttcgccgatgacttagagtccttcttgggaggcatgttgtcttctgtaagaaaggagacggaaacggatattagacgttgacg

SEQ ID NO: 6221 - DNA, 994 bp, Diabrotica virgifera
tacagtatgctgcaaaataaacagtacctactgcaatgaatattgaaatgtttattattatttatatatttattatacatgatacagccttgcaaacattattcacgacgacgttccggataaaacaaatgtttaagatgccctcctttcagtttcaagcatttttcgtagcgttcatgaagattctcagtcatgtttgtgaacaaaaactgcctccttcagcattcctcataggtacgcattaggtggcgttagatctggcgagtgcgatggctatctaaaatcactaccacacgaaataaggccccaaaatgatttcgcaacaattaaagagttaattaaacaattaaagccgtgtgacaggttggcgcgtcctgctgaaaccattgttgattaagtggtaggtttctggcacgtcaaaaatgctgaaggtcgtgtagaaatgacgtgataatctgttctctgtagcgcttcggattaacaattaacggcgttccatcatttgcttcaataaaataagggcccatttgaaaataaatgaatgccacgggcggatacaacacaccaaatggtaatactgtcactgtgaagggggtactccacgattacgtcggggcattcgaatccaagaaaccgtgttgctcgaccttttccgtgtgaccgaaaatagttctccacgataaaaactttttctgtaacactgacaacgatcctgaagcacctaacattaacacgacattcacatactacgttataacgacgcgtcattgggaaactcagtaagtttcggcgcaagacacatctgcatttcagtactgtttatattaccgcataccgtactctgatatcaaataaaaatattgatactttgttgaatattttcacgtgtaaataagccatttgtttttatagacatattaagaccagtttcgttaaaaaaaatagtattttatcgtttcctttattactgttagcaaatgctatgtaattatat

SEQ ID NO: 6222 - DNA, 440 bp, Diabrotica virgifera
  SmartBlast Evalue=8E-10; Info=Cathepsin L protease inhibitor 2 n=1 Tax=Diaprepes abbreviatus RepID=A7LFV3_DIAAB
atttgagctcgaatagtactcgtatccccatcgataaccattatctggtgttttacatagataataacaaataacaatcatgatttttaaagtatttttgtttgcgttgttcgtagcagtggtaatggcggaacaaactgcagaagaggcatggccacaatataagaaagatttcaacaggtcgtacgacgccgctgaagatgccgaaaggttcgccatattcaaggaaaagtacaaccaaatacaagaacaaaacaggcaatacgcagctggtaaatcaacatggacagcaggagtgaacgactttactgacagaaaacccgaagaacttaaacacctccatggtatcagggttcctgagggaaacgccgctggactccattaacctattactacctgaatgttttatacctgaaataaagtgatcaatttcgaaaaaa

SEQ ID NO: 6223 - DNA, 434 bp, Diabrotica virgifera
  SmartBlast Evalue=8E-10; Info=Cathepsin L protease inhibitor 2 n=1 Tax=Diaprepes abbreviatus RepID=A7LFV3_DIAAB
cgaaattgatcactttatttcaggtataaaacattcaggtagtaataggttaatggagtccagcggcgtttccctcaggaaccctgataccatggaggtgtttaagttcttcgggttttctgtcagtaaagtcgttcactcctgctgtccatgttgatttaccagctgcgtattgcctgttttgttcttgtatttggttgtacttttccttgaatatggcgaacctttcggcatcttcagcggcgtcgtacgacctgttgaaatctttcttatattgtggccatgcctcttctgcagtttgttccgccattaccactgctacgaacaacgcaaacaaaaatactttaaaaatcatgattgttatttgttattatctatgtaaaacaccagataatggttatcgatggggatacgagtactattcgagctcaaat

SEQ ID NO: 6224 - DNA, 456 bp, Diabrotica virgifera
aatttttgaattcaagtggtctgatttctttattatataaagtcacaccaccagttcatatcactttacaatataatttacaaacatgaagacttccattgttttagctattttagcttgcgtcggtttaaccgtcagcgctcccccaaagaacgacgtcctgtgtgatggctgcgtagcattgacacaagtgatccaggaccacttagaacaagacttgccattggacgaacttgaagaaatagtaagggaagggtgcagtgcattaccagatccacttgcagatatatgcaagaataaactgattccagcagtctacaacatataccaccgatttgaggacgcctcgcctgtagaaatatgcacagttttagacttatgtgagacaaattaatatgaaagtcagaataaactcaaaagtttaaaataaatttttgaacaaaaatactgctagtc

SEQ ID NO: 6225 - DNA, 445 bp, Diabrotica virgifera
tttttgttcaaaaatttattttaaacttttgagtttattctgactttcatattaatttgtctcacataagtctaaaactgtgcatatttctacaggcgaggcgtcctcaaatcggtggtatatgttgtagactgctggaatcagtttattcttgcatatatctgcaagtggatctggtaatgcactgcacccttcccttactatttcttcaagttcgtccaatggcaagtcttgttctaagtggtcctggatcacttgtgtcaatgctacgcagccatcacacaggacgtcgttctttgggggagcgctgacggttaaaccgacgcaagctaaaatagctaaaacaatggaagtcttcatgtttgtaaattatattgtaaagtgatatgaactggtggtgtgactttatataataaagaaatcagaccacttgaattcaaaaatt

SEQ ID NO: 6226 - DNA, 434 bp, Diabrotica virgifera
  SmartBlast Evalue=6E-58; Info=Ribosomal protein S26 n=3 Tax= Polyphaga RepID=D1M7Z1_9CUCU
ccatatattttcgcttgatagtcaagaaaaggtgtcaagatgacatgtaaaaggcgcaatggagggcgctccaagcacggccgtggtcacgtaaagccagttcgatgcaccaactgtgctagatgcgttcccaaggataaggcaatcaagaagttcgtcatcagaaacattgttgaagccgccgctgtgagagatattactgaggcatcagtatatcaagcttacgttctccccaagctctatgcgaagctccactactgtgtatcctgcgctatccacagcaaagttgtgcgtaatagaagcaaaaaggataggagagtcagaactcctccacagagaaacttccctggtagggacaatgctagagttcagcaacaacaacctaggaagtaaactgtttctttagttttacaataaaatttaagaaaaaataa

SEQ ID NO: 6227 - DNA, 425 bp, Diabrotica virgifera
  SmartBlast Evalue=6E-58; Info=Ribosomal protein S26 n=3 Tax= Polyphaga RepID=D1M7Z1_9CUCU
cttaaattttattgtaaaactaaagaaacagtttacttcctaggttgttgttgctgaactctagcattgtccctaccagggaagtttctctgtggaggagttctgactctcctatcctttttgcttctattacgcacaactttgctgtggatagcgcaggatacacagtagtggagcttcgcatagagcttggggagaacgtaagcttgatatactgatgcctcagtaatatctctcacagcggcggcttcaacaatgtttctgatgacgaacttcttgattgccttatccttgggaacgcatctagcacagttggtgcatcgaactggctttacgtgaccacggccgtgcttggagcgccctccattgcgccttttacatgtcatcttgacaccttttcttgactatcaagcgaaaatatatgg

SEQ ID NO: 6228 - DNA, 397 bp, Diabrotica virgifera
attatattgttttcaagacacaggtatatattttactgagatcatgaataaagtacttttggtatttgttttgacgattgtcctaagtcaagtacttgctcaaagttctgatcgcgttggatttggattcattaaatgcggagaacattctgtagaaagttgtgctccctgttgtccagaagcagaagcaacttgctccaacaaagttcctcaaccatgtactggtatttgtactcgtaattgtttaatccagtgtcgttgtgttgaaggatatttgaaagacatagcaaccggaaagtgcgtaaaagaatgttaattttttagtcctaaatatcgtaataaaacctatcaaataagtatgcaatgtaaaacaaaaatgtagcaaataaatgtttag

SEQ ID NO: 6229 - DNA, 392 bp, Diabrotica virgifera
attgttttcaagacacaggtatatattttactgagatcatgaataaagtacttttggtatttgttttgacgattgtcctaagtcaagtacttgctcaaagttctgatcgcgttggatttggattcattaaatgcggagaacattctgtagaaagttgtgctccctgttgtccagaagcagaagcaacttgctccaacaaagttcctcaaccatgtactggtatttgtactcgtaattgtttaatccagtgtcgttgtgttgaaggatatttgaaagacatagcaaccggaaagtgcgtaaaagaatgttaattttttagtcctaaatatcgtaataaaacctatcaaataagtatgcaatgtaaaacaaaaatgtagcaaataaatgtttag

SEQ ID NO: 6230 - DNA, 388 bp, Diabrotica virgifera
cgaagaagtcttttgacaaacgaaaaattaccgacatttgaaacgatgaaattcgcagttgcatttttggttttggctcttgctgcctgcgcctactcacaggaagagaagccagtattaacaccagaacaagtaattgacctcatcaagcaaaaccaacccgccgtaggttgtatcaatctgcaatgcagactttcatgtagaggccaaggacacagagctggatattgcgctcctgatggaacctgcacatgtatacctgtcattgctgtctaaattcgtttatagttttttaaatacgacaattgttttttatctctaggcctacggtaaagactgtctaatttgtacatagttggtaatatagaataaaatgtaaaatcaataa

SEQ ID NO: 6231 - DNA, 379 bp, Diabrotica virgifera
cttttgacaaacgaaaaattaccgacatttgaaacgatgaaattcgcagttgcatttttggttttggctcttgctgcctgcgcctactcacaggaagagaagccagtattaacaccagaacaagtaattgacctcatcaagcaaaaccaacccgccgtaggttgtatcaatctgcaatgcagactttcatgtagaggccaaggacacagagctggatattgcgctcctgatggaacctgcacatgtatacctgtcattgctgtctaaattcgtttatagttttttaaatacgacaattgttttttatctctaggcctacggtaaagactgtctaatttgtacatagttggtaatatagaataaaatgtaaaatcaataa

SEQ ID NO: 6232 - DNA, 777 bp, Diabrotica virgifera
  SmartBlast Evalue=5E-25; Info=Diapause-associated transcript-2 n=1 Tax=Leptinotarsa decemlineata RepID=Q8IT92_LEPDE
caaaatgaacacacgcacttttttatttttagtggtttttcttattgtggcacaaagcgctttttgtgccccaaaagataaaaaacacaaaagcaaaggcaaatataaaacttgggttgatcaaaaccaagtagaacttgagggcgccaaaaacagagtcatcaaatacatacagaaaaatgaccccgataccacaagggcaattaacgaactactagaaccagtgaaagacaaatgtccacaggtcgacaaggtaccgaaactcttggatgacgtatacggttgtgtgaaaaatactacagtaggttcaggcactgtgtgttcaacaattcagaaaactatcgaaaaatgctacggacctttaatcgatcttgtcggaagctgtttgcccaaagaatccaacgaattgcctttattagctcagaagataatcattggcggtttaaaacaagtctgtacttttaccgtagaagaatttttggaattgtttgctccatgtcagtctgaaacaaactgggcagatgttagttcgtgtaatgacgtcagagctgccgtagaagagttcgagaaaaagttgccttctactcaaattatttgctcattgctgcccaaactgaaaacgtgtgccaacgatgtccacagtagctcctgcaaaaatcccataactctcagatctttcactagagttgaagagagtgtgctgaaagaaagtgaacctgtttgtcggggcaaaaattaaatattttatagttcctcaacaataattttaaataaaac

SEQ ID NO: 6233 - DNA, 382 bp, Diabrotica virgifera
aaaaaagttaaatttatttaattggggtgattaaataaatttattatataaataaatttaatactaaaaaacttattaataattttataaaactctatgggagccaattcggactctaccttttttagttcaggtaaaattcttaccattgggagcgaactcgaccccgtccgtgaaaacacctctattataattataaataacacaattttttttatttcaccaacttttcaatagtatgcataacgttgcatactactttagacggctaaagtatgcatcaaagatggaatacagtgatttaaaacagtgacaaaaaaataaccaatcaataatgctagttctgaagtcgatacaacagtagtagacagtaagtacaaaa

SEQ ID NO: 6234 - DNA, 354 bp, Diabrotica virgifera
aattaaataaatttattatataaataaatttaatactaaaaaacttattaataattttataaaactctatgggagccaattcggactctaccttttttagttcaggtaaaattcttaccattgggagcgaactcgaccccgtccgtgaaaacacctctattataattataaataacacaattttttttatttcaccaacttttcaatagtatgcataacgttgcatactactttagacggctaaagtatgcatcaaagatggaatacagtgatttaaaacagtgacaaaaaaataaccaatcaataatgctagttctgaagtcgatacaacagtagtagacagtaagtacaaaa

SEQ ID NO: 6235 - DNA, 534 bp, Diabrotica virgifera
gtatccagtatctgctgcctctcattatatgccccagattttcaagttttcataggcgtaaccaggatagggggggttacaactactggaaggtctccgaggggtatggtgttaagtgtatagagctcaaagtacatcccaatgggggggttataacccccaaaacccccctggttacgcctatgcaagttttctcttttttatcatcttcatcaagtcaccttcgccttgacctattctgtttaagacttctatgtttgaaatgcgttgaacccaagatattttgagcattctacgatattaccacatctcgaatgcttctaattcatcataataaccttcatgatacaagtttaacatccatataataatacaggattacacatataacattttagaaacttgaccattagaatccttctaactgtaagttcagtttacaatttctcagtatagatctaagtttcataaatagtaactttgtcttatgttttatatctctaaatgttttgccagtaattacctaatcgcagg

SEQ ID NO: 6236 - DNA, 301 bp, Diabrotica virgifera
atatcgtagaatgctcaaaatatcatgggttcaacgcatttcaaacatagaagtcttaaacagaataggtcaaggcgaaggtgacttgatgaagatgataaaaaagagaaaacttgcataggcgtaaccaggggggttttgggggttataacccccccattgggatgtactttgagctctatacacttaacaccatacccctcggagaccttccagtagttgtaaccccccctatcctggttacgcctatgaaaacttgaaaatctggggcatataatgagaggcagcagatactggatac

SEQ ID NO: 6237 - DNA, 570 bp, Diabrotica virgifera
agcgtttctaaagaaggtgatttggttcttaacgcaagtgcaggcactgtgcagtctctgaaacttgtaacagattttacagatcttcaaaagcgaccaagaattgaatataacctcactgttgtaacagaagtcaatatgacatggattaccaaatctggcccattaaagaataaagtaactaatctaccctcacatataagtgatccacagccatataccactccaaatttcactgctttggttccgttggtcaatggaacattcaatgatgaatcttcctgtcgaaacgaaatatgtaaatctacttcgaaatcaagctacaacacaggctcatactacgtatttgatgatattactgtaacatttgaaagatacatcagtaaaccaaatataaccagtactagatttgaaaatggaagtaacacgacatatgcagtcatttctactacggatgttaaaactgtcattgtggtaggcccgcatagatgttaaatgaaataatataaactcttatgatatacctctttatatgtaatataaataataaattatattgaaacattaaaa

SEQ ID NO: 6238 - DNA, 388 bp, Diabrotica virgifera
cgcattatatacaaagtagtactatcactatgtatagttgaagtgtttttctatcgtatatataaaccggaccattgcaagtaattttataattgaaaaacgttcaaaatggcaaaacttacactcgttctcttggcagccgtctttgtagccgttttggctacccaagaagtcagcgccggtgctgtcaaaggtgcagaagctcctcgtgctgctggacttggagcagactgcgaatgtaacgcatgcagtaaagaatgcatatccgagagctccgactacattggaggtatttgttaccaaggccaatgtgtttgtgcctcccttggctaaactaaataatgtgataaagtttaattaataaagtgttaaattgaaaaaaaaaaaa

SEQ ID NO: 6239 - DNA, 376 bp, Diabrotica virgifera
caatttaacactttattaattaaactttatcacattatttagtttagccaagggaggcacaaacacattggccttggtaacaaatacctccaatgtagtcggagctctcggatatgcattctttactgcatgcgttacattcgcagtctgctccaagtccagcagcacgaggagcttctgcacctttgacagcaccggcgctgacttcttgggtagccaaaacggctacaaagacggctgccaagagaacgagtgtaagttttgccattttgaacgtttttcaattataaaattacttgcaatggtccggtttatatatacgatagaaaaacacttcaactatacatagtgatagtactactttgtatataatgcg

SEQ ID NO: 6240 - DNA, 730 bp, Diabrotica virgifera
  SmartBlast Evalue=4E-71; Info=Endoglucanase n=1 Tax=Phaedon cochleariae RepID=GUN_PHACE
tttacaatacacaaccacttctttcaacaagttcccttggacattgtacttgataaaatgtcacttcggggttagaaacgccttccataaatgtaaacctccatttgcatcctggttgtaaaacttcaggaagctcgttacactcttcttcagtatggactcctccgtataagtcaccccaaccagtactgggagcgttccactgagcagtacaccctttggggaataaacctactccacctccagggataccgagatcaaattggttggtctgatactcttcaccagagttagtgagttgaaccaagaattgctttcctttcagctgaccctcaaaatttagtaacatgcaggaacaacacatgctagtatcaataccaccggaaaaggaagcagaagcaaaaccataggataaagtggagttaaccacatacggttggttgttgttacatacaaacgaagaaccatttatatcacatccagacggatcattaggtggggctacagcttctccatcaactctgcacgacttaagaggttgtttatcaggcgtgttgacattgtctgcccaagcacatgatggtttgcagcaatcccagtatctagtggtaattccctttccacttaaaccattgggaactgctataatatccggagagacttcagccttgatggatgttgcgacagctaacactaaaagtataggtagaggaatcatcttgaattgtat

SEQ ID NO: 6241 - DNA, 351 bp, Diabrotica virgifera
gccattttagttttgtgtcgtacccgtatagcacgtacaaattcgtttttattaaaagaatcatctagctttttgaagctagacctcttttaatagaaccaaaatgcgagcgaagtggcgtaagaagcgtatgcgaaggctaaagcgtaagcgcaggaagatgcgtgcaagatctaagtaaatcattggaacttcatctctactagtattttctttgaagatttagaagatgtgaagttgcattctattgaaaaaacggaaaattggatcatcaatcgcatttttttttataaattgacctgttggtgtgaaaaaaccaaaaaatatataaaatattaatataaaaaaaaa

SEQ ID NO: 6242 - DNA, 342 bp, Diabrotica virgifera
atattaatattttatatattttttggttttttcacaccaacaggtcaatttataaaaaaaaatgcgattgatgatccaattttccgttttttcaatagaatgcaacttcacatcttctaaatcttcaaagaaaatactagtagagatgaagttccaatgatttacttagatcttgcacgcatcttcctgcgcttacgctttagccttcgcatacgcttcttacgccacttcgctcgcattttggttctattaaaagaggtctagcttcaaaaagctagatgattcttttaataaaaacgaatttgtacgtgctatacgggtacgacacaaaactaaaatggc

SEQ ID NO: 6243 - DNA, 703 bp, Diabrotica virgifera
attatatcctattgtcgatcataaacagatttatcaatagcgaaaatgtttaaagttacgtcacttgtactgatcatctcaattcttgctccttttgcaattgcaggacaggattcagctgttgaatggagaccttataatggagtaccagatgaccatgcaataataattcaagttcaaactgaatatagcccagctgtttatattggcctagcacacgtgattgataatgcagcgcagtctgaagcttatcttcctgtaaatatagttgaaggcttcaactatgcaaacgtaactttaaatgataaaaactatatggctgacaatcttcagattctatgtttcaaaaaccctgatgcattgggatggcaatatacaaaagcagcaaactttgatgacttattgaatgattctaaaattgctcccatagtagctggttgggaggcacattcagtagtatacaatgcaacggtatatatgggagtgggttacattccagctttgggaggcaacaatgtaggaaaagtatatcacgggcttccacaaacacaaaacagaagggatggtagtttatacatagataggtcaggtgtgtctgctgaatattatcttgctggtggtagtttcaatgtgccagtttattataaataaatgcaatgtaaagcaattctgaattaaattactttataggtagtctaaaaaa

SEQ ID NO: 6244 - DNA, 415 bp, Diabrotica virgifera
  SmartBlast Evalue=1E-11; Info=Zinc finger protein 257 n=1 Tax= Pyrenophora tritici-repentis Pt-1C-BFP RepID=B2WGZ6_PYRTR
aatttaaacacagctttcaatttcctattttattttatatagaaatcatttaaaatgtattcttgtgcacattgtgacagggtttttagggcaaatgagcatatggagcagcatattgacgacaaacattattttgaatgcaattactgtgatgattccttcatatctgctgaggaaagaaacatccacgatagacaggtacatctaacatttgagtgtccacattgtgatagacttttcagggcaaatgaacatatggagcagcatattgatgacaaacattattttgaatgtgattactgtgatgattacttcatatctgccgaagaaagagatgatcatgatagacaggtccatctaacattcgagtgtccacattgtgatagactttttagggcagaagaggatatggagc

SEQ ID NO: 6245 - DNA, 157 bp, Diabrotica virgifera
aatcatcacagtaattgcattcaaaataatgtttgtcgtcaatatgctgctccatatgctcatttgccctaaaaaccctgtcacaatgtgcacaagaatacattttaaatgatttctatataaaataaaataggaaattgaaagctgtgtttaaatt

SEQ ID NO: 6246 - DNA, 587 bp, Diabrotica virgifera
  SmartBlast Evalue=5E-13; Info=CG6426 n=5 Tax=melanogaster group RepID=Q7JYZ0_DROME
aaataaatcatatatttactcaaacattatattacacttttagaatactgtaggtactgtacacttatcatttccttcttgggacaacatgttcttagtaccaaccatgtttgaacattcgttgaatcgccgggcaaaagtaccaccaaatttaggattttcgcaactggctcccataagatgaatggctgctctatctttgcaatcgaaaactccatcgcagttgcaatccatatcttctccgaagcgacctgtatactgaatgatagtaccgacaatacagttttcatccttcatacaattgctatacgctgatggatctgttgatttttcatttggagacacagtgagggaacctcctttcttccagtaatcctctgaaattgagtacctggcacaattttgtctgatccagcatccacttctagcatgacacaagcacctgacgcagtcataaaggtcgtgtttgagccaattggtttgctgcccctctactgcagttagagccataaaggccaaacaaaatgctaaaactacaaatttcattgcactcattttttaatgtactcttcgacaccttggaccac

SEQ ID NO: 6247 - DNA, 663 bp, Diabrotica virgifera
ttttttacaataaattaagctatattttattagatacaaacgtttaaaacatcaagtaattcgatcaatattctatggcttctatggttgtatgtctgatgtttattttttgagcaaattgatatttttttcgaaaataataatttaagtgagtgtattaaagtgaacagtgactagacaaaagcgtcctttctgcttttagtggagacacagtaaagcggttcccaatacaagtcctattgcgggaatggccgtagatgcaccacccttggtgctgctctcaggtgctgaggttgttgatgattgttccgcattcgaactggtggtggtaggtggagcttcgctggtggtgaccgcgatggtggtgctggaggaaccagtatcatcaccatcacatatcacttggcacaccactacggccaaaactagagcgaccaatacgaacttcatgtttatcaatttgatattctaactagcaaaaagacttgcttcagacttgttcactaacagatgtggatagtaatgattttctctcgtatatttataccttacccgtaatcagtaacggattatgaaaattgatatcatcgtctgcttatcagcccagtccatcagtctaaatttattgatttccacttcgatgataacaatacgagaaacatc

SEQ ID NO: 6248 - DNA, 295 bp, Diabrotica virgifera
aaacctaaaactttatttattaactaataaaacattattaatgataaacacataaacaatcacctaagtggcaaataccaccaacgttatgatctttatccactgctatacaagaatcggagcatttggcacatgtacaggtatcatcatcactaagcttgaaaccaagtgctttggacgctttgagggtacctggttcttggaccaatgagttgacttcagtggttgataagacaacgatggctactagggccagaagaacaaacgtaagttttgccattatgttatttgatta

SEQ ID NO: 6249 - DNA, 289 bp, Diabrotica virgifera
ataacataatggcaaaacttacgtttgttcttctggccctagtagccatcgttgtcttatcaaccactgaagtcaactcattggtccaagaaccaggtaccctcaaagcgtccaaagcacttggtttcaagcttagtgatgatgatacctgtacatgtgccaaatgctccgattcttgtatagcagtggataaagatcataacgttggtggtatttgccacttaggtgattgtttatgtgtttatcattaataatgttttattagttaataaataaagttttaggtttt

SEQ ID NO: 6250 - DNA, 262 bp, Diabrotica virgifera
ttattttaaaataataaaatattttttagtaaaagtaaagaaaattttatttaatgatagttaattagtattgtgagagaatattttatttttataaagaaaatttatttttgtaccttgtgtatcagggattattaattaataattatatatttattttttagctcttttaaattcgaaaataataaatatataattattattttcgaatttaaaagagctaaaaaattaaaatttttattgtaaaataaatattttaaat

SEQ ID NO: 6251 - DNA, 132 bp, Diabrotica virgifera
attattaattaataattatatatttattttttagctcttttaaattcgaaaataataaatatataattattattttcgaatttaaaagagctaaaaaattaaaatttttattgtaaaataaatattttaaat

SEQ ID NO: 6252 - DNA, 261 bp, Diabrotica virgifera
  SmartBlast Evalue=1E-22; Info=60S ribosomal protein L39 n=22 Tax=Coelomata RepID=RL39_PLUXY
attttgacagtgaagtttctcttttggaagttcattcaagaagcagagatgtctgctcacaaaacttttatcatcaagcgaaagcttgccaaaaaacttaaacaaaacagacctattccccaatgggtccgtatgaggacaggaaacacaatcagatacaatgccaagaggcgtcactggcgtagaaccaagctaaagttgtaaattgtttttatattcaattgacctttatttactttagttaataaacattactccaat

SEQ ID NO: 6253 - DNA, 258 bp, Diabrotica virgifera
  SmartBlast Evalue=1E-22; Info=60S ribosomal protein L39 n=22 Tax=Coelomata RepID=RL39_PLUXY
ggagtaatgtttattaactaaagtaaataaaggtcaattgaatataaaaacaatttacaactttagcttggttctacgccagtgacgcctcttggcattgtatctgattgtgtttcctgtcctcatacggacccattggggaataggtctgttttgtttaagttttttggcaagctttcgcttgatgataaaagttttgtgagcagacatctctgcttcttgaatgaacttccaaaagagaaacttcactgtcaaaat

SEQ ID NO: 6254 - DNA, 311 bp, Diabrotica virgifera
tttttacatgttaaaaaactatatattattaaaatgctggtgcaatttcaacatatttaattaatgtatgcacaataacagtcgtcttggtaacaaatgcctccaacataatctgagccaatgctttcacattcttgtgagcaggtatcgcaatcacatgatgctccaacttttccaagagccactgctttaaagacacttactccatgagctgccttggggctggcctcagctgttgccaagaccacaactgctactacagccaaaagaacgaaggtgatttttgccattttgttgcttgattattatat

SEQ ID NO: 6255 - DNA, 306 bp, Diabrotica virgifera
acatgttaaaaaactatatattattaaaatgctggtgcaatttcaacatatttaattaatgtatgcacaataacagtcgtcttggtaacaaatgcctccaacataatctgagccaatgctttcacattcttgtgagcaggtatcgcaatcacatgatgctccaacttttccaagagccactgctttaaagacacttactccatgagctgccttggggctggcctcagctgttgccaagaccacaactgctactacagccaaaagaacgaaggtgatttttgccattttgttgcttgattattatat

SEQ ID NO: 6256 - DNA, 319 bp, Diabrotica virgifera
agtaaaagtaaagaaaaattttatttaatgatagttaattagtattgtgagagaatattttatttttataaaagaaataaatattctctcacaatactatttaatgatagttaattagtattgtgagagaatattttatttttataaaagaaaaatttattttttgtaccttgtgtatcagggattattaattaataattatatatttattattttcgaatttaaaagagctaaaaaattaaaatttttattgtaaaataaatattttaaataattttttttgtaatgaaatgttattcgttttttaaaatatatctaa

SEQ ID NO: 6257 - DNA, 138 bp, Diabrotica virgifera
aaaatattctctcacaatactaattaactatcattaaatagtattgtgagagaatattttatttcttttataaaaataaaatattctctcacaatactaattaactatcattaaataaaatttttctttacttttact

SEQ ID NO: 6258 - DNA, 601 bp, Diabrotica virgifera
ccttaccaagaataacatctaaaatgaaatacatctactttttgttcatttatttcttggttgccttagcaaaggcagaagaaactgttagcttagaaggaaaactcccaaaatgtgagtgtagggatataatcgatgagatcttgtgcaagctaacagaaaactcagaaaaggtcctcaagattcaagccaaactagccaaagtagtgaaagaaaccaatgaaattctaacagaagctaaagaaaactcagcccaagtgaaagaaatcgtcgctgttagcaccttgcttaaatctcaagtcaactctacggtcacagtcgttactgccaataccgcagctatcattaaaattaaaaatcaagtccacgaccatgtccttgacaatggtggcgacttggaacagaccttgattggaagcagctgtaaattgaatcagatcaagagggtattgatcggtcttggaaactgccagtgtagaaaaccagatactgacgaagcaaacacagaaggttattagagtttttaaatatgatacaatacacctgtaaatataaatggactattccttaatgcgaccttttcaataaataccaaccacat

SEQ ID NO: 6259 - DNA, 399 bp, Diabrotica virgifera
taacgatcaagtcaacttttgactaaacgaaaataactataattcgaaaaatgaaattcacgattgcatttttggttttggcagtcgctttctgcgcttacgcccaagaagaacaagcaccattgagcccagaacaagttgttgaccttatcaaagagaacaatcccgtagtagcatgtattaacctggaatgtcgactttcttgcaggaatcaaggcttcaaatcgggttactgcagtgctggaaccagctgtgcgtgtgtgggacctttgacacctttattgttttagaatatttcaattggtttttatctctagatctgataaacaaacttgtgtaccttaaaacaatgtaacttagcaattattttataaaataaaatgataaagtaataaaaaa

SEQ ID NO: 6260 - DNA, 1670 bp, Diabrotica virgifera
ggttaatttctacgctagtctaaaattcgtgacaatcttactcatgtttcatatcttacaaaagtgttcaatttaattaacgcaatattgatcttgaaatgtcaagtaacgtgcatgttttaaattggattttgtttaagctctcttaatattattgacttaagtttgttcaagcatcatttataattaatattaatattgttaaccctctaatgcatttacgcactttatgtcggaatttttaaaactacaggaaatctgtgtttccacctactcgtaacttatgactcacaaacatggtaatttacagaatgtaacgttcaataaataataacagcatacagaatgatgaaaaaacataacatgatgtatattaacccttaactggagagacttcattttagcacacaaacggagacatttcgtctgaaaaactaccgttttttaaggagataatcatgcaaatcaattttttaaatttatttaataatatagtaccgtatacatatgtgattataaggtacagtaaatatatttaaaaaatatttagaagtggaaagattattgacagtaacccatataagcgcttaaaatgcgtcgcgtttcatttattgttacagaaaaaaaaagcaaatcaagtgactgctaagcagccaatagtattaggaatatataaagcgtggtgccggtggatggagttgttcgaaataatctttagaatatgtttatgctacagtctcagtctacagacggcaggtctccggttaagggtcgaataagaggttaacggacgtgggaataaatatctggatatcctaaagtaaaacatgtttcaactggtaaaacttaaatgtacattacctgctcgaattccaaaacaaaaaacgacaggacaaaataaccacagaaaaatggcgagttatttttaaattgctcaaaataggaaaaaggaaactgtccaaaaccggacgattatctgaggtttaaaatatctgcattcttagggattgctcgattatttaaaatattttaatcgaaagtatgaaaacgaaaacataatagaaacattgttaggtccagacattgttaaatgtgcgggaatctaatctgtagaattaacaaagcactaatacatataactcgaaccaaataaaggtgtttggtaataatgtaatctttctcctatcttacagtacctggccaaattatcaggccaagcaaggaaaaacttactatatgaagttatttctctcatgattatgaacatatctgaaaaaatattgttttattccttttttgtggatattaactcttgacgtgcgtatcctttaggttcgttgctccgcgctccctgtaactttaaggtgcattccttttttgtgcatattaactttaaggtgcgtatccattaggtctgctgctccgcgctcccggcaactgctccaatcgatacgacatgcgatcatttacagataaaggtgcgtatccattaggttcgcgctctgctcggcgcttcaatcggtggcgatttatatgtagaggagcgcatgccgtatcaattggagcagttgcagggagcgaggagcagcaaacctaatggatccgcaccttaaagttaatatccacaaaaaaaggaacaacagtaccttttccaaccatgttcataatca

SEQ ID NO: 6261 - DNA, 1505 bp, Diabrotica virgifera
ggatttgtcggaactgcggatgaggatacaattttaggtgctgacttctttccaacttccttcgttttttctggctttttcagtctttgatgcggcttttctagccttagtcactttctttacagattttgccttttcaccggtagcagaacgtctggtagcgatggcagttttcttcggtttagctgctcttccagctttctttttgtccggaaaacgacgaggaggtcgatgctaacttgaaagatcctgacgcttcttttccctttgtctgctccaatgacccagtagcaactgcagcttttaaatatttactttctaatttgccacctctttcctcgagacgtttgatagtattgttcaccatttcagatgttggcggatgggaaggttttgcccgtggattttttgccttcttttccttttggatgccgaagatttttgtggcgttccagatgccgatgtagccaaagcagctgatgattggttttctgtatctgccattgcgttgggatataaaaaatcgtaagttaatatgcagtatgtgtcgattcactgaccgaagagcgaaaactaaaagtaagacagagccacaacgaacaacgaaaaaaataatggtgcggtaagtttgctctgtagattgctcagtctatagtgacaaatcgtgtatttgcaggtacttgtttttaataattcgaagatatttatatacttctttttcttaggagcagcctttctagcttttgatgaacttgcagcagccttggcgttttgtcggaacagcggatgaggatacagttttaggtgctgacttctttccaactttcttcgctttggctggctttttctgtctttgatgcggctcttctagccttagtcactttctttgcagattttgccttttcaccggtagcaccacgtctggtagcgatggcagttttcttcggtttagctgctcttatagctttctttttgtctcctgaactaagcttggcagatccggaagaagacgaggaggtcgacgctaacttgaaagatcctgacacttctttgtctacaccaacgacccagtaggaactgcagcttttaaatatttacctactttgtaatttgcagtgatattttttgatggcttgaagagaagaaccaccactttccttgattgagacctttgatagcattaaaactttaaaaagggggtaagctctgtagttggctgtataccttcgatataacaatgtggaatgaagtaaacacctccgttgcatgtaggcacatgaatctatcaaaattcttaaaattcatccacaagggagtggaagtacaaaacgttttcggtcaaactgaccatcatcagtgtaaacgttcagaagtacttgtaactagccacgtcaataggtgcaaaaacctctaaatcccatactgttacattccacaccaaaaagtagtcggcatcaagtcgatgtctcaagattttaaagatcacatgtgaatgtatttcatcc

SEQ ID NO: 6262 - DNA, 1477 bp, Diabrotica virgifera
gctcagtttctataaaatggtggcctcctgatgtcctgatgatttgtattcaccagaggaacacattcatgttcaagatagctgtattcttcagttgtttcaatgaccttcgagcccaatatacgctagttagtaaacttctttatctactggtcctgtattatcaatattagcagaaatggtactactcatacatatttcaaagattgtagccttacttcaaaccgtcaaatcatctagttaatcctgctagttctcaaccacgacttttcttcctttcagtttattattgttgacataggggatgacccccttatgtattgatactgtattattgatattagtaacaaataggtataactattacagttttacagtattagagtacagttttaaaccattgcagcattcttacaagctggcaaatcatgtatacagaaaaaggattggactgtaatcattctcttactttttagcccggccgcacatcaaagaaacatgaaacgtaaattacgtttcatggaaataaaccactgctaaacaaatatatatccggccatttatgagactctccgaaaataaaaatgtgtcatgagcatgaatcacactcgtttcattagtaggcgcactttgagatgtttttagcagtgttttcttttcatgaaacatgtttttcgtttcatgtttcatgtttttcgtttcatgtttctttggtgtgcggcttggcttactgatttttcatcacggaattatggcataaaatctaaaatggatgaattgcttatggaatttactagctataaggctaaaatgcacatgtcgccgttcaagggctacacactgtcctcacttaatttttaaaggctcagaaagaaattatcagatgttgaaaaatcagccacgatttttcttcttacaatttatatctttccaccagatgctttcaatttattacattttatacaacctgcatcaaacctggtgattttctgattacttgttgtcatatcttgacatttcacatcttcaagagagccgcattctttgagctgaatagctgcaaagtttcgtctactaatcattttcatggtccttcgcaccggatacactctaatagactgtttatgaattatcattattacaatggaccaatttccttcattatcgatattagtagcacgcagtatacatattagtatagttttaaaccattgtagcattgttccaaaccggcaaactaaacttgcttgcatagaaatcggcccactcaaaaatttggtcatttttgagtctcgaacttcccaaaccggttgtacgatccaagtgattttttaaatacgttatagcctgattattcggcaatatcgctgtaataatattgctgctacacaggtaaactttataccgggtgtacgaatcaaactgtgtaccttctcaaagttcgcatcaccctgtggaacattccagcattcataaa

SEQ ID NO: 6263 - DNA, 894 bp, Diabrotica virgifera
catacagtaacatttttattgttgaaatgtttgtttgatgaaaatcggtccgggttagccggacttccgggttattggaggccgacttatcggggttccactgtatttattttgcaccaagaatagagtattgtttataaaaaagcattacattgatgcaaatttttgtcatacattattttttagattttctgttaatttacttagtgaactttgagatatcattatttaattcacaataacaccggtacaaagttcgtcgggtcagtaattaaaataaaattaaaattatatacaattttgtttactttgctggtgcagaatttagacacacaaccctatgacgtcacgacacgttttaggctagctgcaataatttgaatttagaattgtctttaggggccaaacggaacacaaaaacaactttttatctttgatacatgttttaaattattttatgttgcgatttataacattcttttcgaatttcaaatttatgcaagttccttattgacctagaatcaaaattataacacattatctaattatgacccactatctaaggtgcaacgaagttcaccgggtcatctagtctatatatataaaattctaattcgcaggctttgttaccgtactcctccgaaaccgcttgaccgattttcatgaaatttggcaggtggactcgaccggacagggagtaggttgttatctatatttcatagccgtacgtcataagggggctttgccccccctaaatttttttttatttttcgacaaaccgatttttcttaattgtatatgattcagaagcaaaagatacatacaatcctaaattttcacttttctatctttaaccgttattttttaaaaaaatttcgtggtttaacatctata

SEQ ID NO: 6264 - DNA, 769 bp, Diabrotica virgifera
ggtgctgaaggacaggggcagctgtagtctacatcgcaaagctgtttcgccggattaaagtttgagtttgaaggacaggtatattttgtttggattactcttccactgcttaaaatattgcagagataataagttctacaggttctatcatttgcattcctgaatctacctttaactgtacaggtaaagtaatcaggattgtcattataggaacactcgtcaatgggggttgtttgttctcgttcggttgtagtaacttctggtgtagtcgatattgttgtatcggattcactacttgatgagtctgtagtggatactatggaggacgtggttagttcaggttctgtgttggtacttacatcattgtctgatgtagttgttacattttcagtagtctcgttgtttgatgtactactatcggtaacattttgattggtatttctttcggtggtcactgcagtagtggattttatctcctccgtagaagcttcagtcgttatattgttattggtggtgacggtagaagatgaagttgtagtagtgtctggtgctgaaggacaggggcagctgtagtctacatcgcaaagctgtttcgccggattaaagtttgagtttgaaggacagtatattttgtttggattactcttccactgcttaaaacattgcagagataataggttctacaggttctatcatttgcatttctgaatctgcctttcactgtacaagtaaagtaatcaggatttcattgtaggaacactcgtcaatg

SEQ ID NO: 6265 - DNA, 638 bp, Diabrotica virgifera
tatctttctcttcgaacgtttttgtctttcttaacctttttaatcactttcttgcctgtagtgacatccacaacctcttctttgtcttcagtaacatcctttataatagtttcttcttctacgtgttgtttcttatgcggttttaattcaacagtttctatctcatccttaacttgttctttcttttctttttttgttctttttagtgtaatctgttgcttattccaaggaatgacttcttctttggacttttcgaagacggtctcttcttccgttacctcataaacttcctttggttgttcggtagtgccactttcaggtttttgttcttcaacttctggttgaattggtttctttggttttcgccaagatctagtatcagtttgtttcacttcttcaactttttcgattgttgagtcttcaggtttaacatctatttctttcgccacatattgcggtttttcttcttcttctatttttacatctctctcttcaaccttcttgtcctttttaacctttttaattacttgtttttgtgtaattatttctatattttcttctgcttttccggagtatcttttacaattgattcttcttctacatgttcttatgtggtttaattctacttgttctatttc

SEQ ID NO: 6266 - DNA, 569 bp, Diabrotica virgifera
  SmartBlast Evalue=9E-35; Info=Retinol dehydrogenase 12 n=1 Tax= Salmo salar RepID=B5XB52_SALSA
taaatcacaatgtggaagtatatcgcagggtctgttgtggccggctcagttgcttatggtttagttaaatactttgccggaggggtttgccactgtacagcgagattggatggtcaagttgttgtaataactggtgcaaattcaggcattggcaaagctttagggctggaattagctcagcgaggtgctactctggttcttgcttgcagaaatattaataaaggattggaggccaagaagtacattcttaaatattcaaacagtaaaaatatcaaaatatttgtcaaggaattagatctctgtaaaatctcgagtattgttaagtttgcagaaactttgaaaacagaatttactgagatctatgctttagtaaataacgcaggagttttttatcaccctcaagatttgacagaagatggatttgaaattactcttcaaaccaactatttaggtccatttatcttgacgcatcatctgttggacttgctcaaaagatcagtacatgcgaggatagtgaatatttcttcagaagcacatcgactcgtcaatgtgtatgatttaaatgcagt

SEQ ID NO: 6267 - DNA, 533 bp, Diabrotica virgifera
  SmartBlast Evalue=3E-54; Info=210kDa protein (Fragment) n=1 Tax= Sarcophaga peregrina RepID=Q9GV23_SARPE
ggcttctcgggacgatcaaaatcaccttcagggtgtaagttatcatcgtgcttaattggagtcctacgttcagcaggtccgactttagttggtgtaggtctttcaaactcaccttctggacgaagattatcttctgggcgttttgcagtaggcctttcagcaggtctatatttggatttttctggacgctcaaagtcgccttcaggacgtaagttatcatcatgtttgataggtgttctacgttctgccggacccactttagttggacttggacgttcaaattctccttcaggcctaaggttatcttcaggtcttttttgttgaggtctctcagctggaacatagcctggtttatcaggacgttcaaagtcgccttcaggacgaagattatcttcaggtcttctttgtgttggacgttctgcaggtttgtatttgggtttttctgggcgttcaaaatctccttctgggtgcaaattatcgtcatgtttaataggagtcctacgttcggctggccctactttagtaggagtggg

SEQ ID NO: 6268 - DNA, 464 bp, Diabrotica virgifera
ttggtaacaaagaaatagaggtaaaagcaaacttttcgagaaaatttggtgtcaggagtatgtttcaatgactaaatgttattaagagtacctaacatcacaaattattctagtacttatcagaataacatcgaaaggcatcagtcaataagcgaagatgaactaggagaaagatactgaatatctagaggtttaaacaaagttagtacaacagcaaactctctttataaagcatatcaatataataaatattagataatagtggtctacttcgtagataaactcaaatcatgtgtaaaataaacttcttcgtactctaacgtgcgcagtcgacacagctgaaccttattaaaggctttcgtctcgtccctaaacgtcttttaaacttctttagcttacaatgtcctggactctcaaatacacaatcgcctttaacctcccttaaggtcctttgaagctcatca

SEQ ID NO: 6269 - DNA, 455 bp, Diabrotica virgifera
  SmartBlast Evalue=0.000000007; Info=Transposable element Tc3 transposase (Fragment) n=1 Tax=Camponotus floridanus RepID= E1ZZC4_9HYME
gtccctattttttaattcctaaatattggcaagttttgtgttttataaacgatgttttttaagtgaccccatatgaaatagtctaactgattcatgtcgggtgatcgagggggccattcgataaaaccacgccctacgatactgtttgtgttattcacacatccaacgaggattgttacgtgaccagtattttacaattatgatgatttacgttctcattaattaaaaaagttgcctcaagacaaaactttacttaaaaaatgtccatataatatgattgtctatcattatgtctacaaactcttcacatctatcgaaatcatcatcatttcgatagaagtgaaactttttttatcatcatttcgatagacgatgacgtgaaatcatcataatttcatgtctatcgaaatccttgatctaacactaatttactgacagcaaatgttatagaattt

SEQ ID NO: 6270 - DNA, 428 bp, Diabrotica virgifera
attctgtagtttcattgccgttatcaccagtggtggtattatcgtcagcagtctcactggaaccacctgttgagcttgcttgtgtactactggtttcagtcgacggttctggatcttggctagtggtagtattatcatctactgtagtttcattgccgctatcatcagtggtggtattatcgtcggttgtcttactggcaccagcagttgaacttgcttcagtactagtcgtttcagatgatggttccggttgttggctagtagtattaatatcatctactgtagtttcattgccgttatcatcagtggtggtattatcgtcggtagtctcactggaaccagcagttgaacttgcttgagtactagtggtttcagccgacggttctggatcttggctagtggtagttctatcatctactgtagtttca

SEQ ID NO: 6271 - DNA, 417 bp, Diabrotica virgifera
attggaacttttgacggatatattgtggaagagtccagtagcattgataaatataataccaacttatgtttttttataagggacaccctatatattttgacatttttcgtgtaccttttccttacataatatatccgtcaaaagttccaatgtagtttttaaaaaatgtttcataataaagatctataactgtcgttttcgacgttttactataatcgcccgctctgttatcttgctgatgtgaggaggtattgatggtttgatcgggcaatggttactttaacgaaaaaaagaagacatgccatcttaactattttttttctatctcttctacttttcggtataccttcaaagaacatgccaattgggataccctgtacactgaaacagacttttaaaatataccattagatttgt

SEQ ID NO: 6272 - DNA, 410 bp, Diabrotica virgifera
cgacacattcttgaaagatgaagtagagagataccatgatgtgagacctattataacgacaactgttgaacctcaagtagttcaaatagaaactactacactgcaacaaacaaacgaaaagtcaccgaagaaatcaaaacaaaaatcagaaaaggaaggtggaagtctctttggaatatttaaaaagaaagaaggatctcttgaaagagaaagtaaacttaaacctgttgacaaaagtggaaaaccaattttatctgagactgttgttaaagatatgaaagatagtgacacattcttgaaagatgaagtagatagataccatgatgtgagacctattatcacgacaactattgaaccacaagtggttcaaatagaaaccactacagtgcaacagacaaccgaaaagcacc

SEQ ID NO: 6273 - DNA, 411 bp, Diabrotica virgifera
gaaaaattaaagaaagaaaaagaagaattggacagaccaaagaaagaacaagaggaaaaggaactggaagaaaagaagatgaatgaaaaagagaagacagtaaaagaggaagaattgcaaaggcttaaaaaacaggaggagaatatgaaactggaggaggagagattggcaaaagaagaagaagaagagcttaataaaaagaagaaagtaaagaagctagaggagaaaaaactaaagaaggaaaaagaagaattggatagaaaaaagaaagaacaagagaaaaaggtactagaagataaggaagataaagaaaaagtatctaaaaagaacagattgcaacaaaaagaactaaaggatagggaagaaaaagaagtaatagaaaatgagctagaggtgcttagactcaaaaac

SEQ ID NO: 6274 - DNA, 401 bp, Diabrotica virgifera
gaccgtcatcgcttcgatgaaataaatatttgaagtgaaaacttcttagggacgttgtgcactttttggatggggaaaaagtattaaattagcgaccgtcatcgcttcgacgaaataaatttttgaattgaaaatttctttagggacgttgtgcacttcttggatggggaaaaagtattgaatttgcgaccgtcatcacttcgctgaaataaattttgtacgtatataaattatgtgtatgtatacataaatagcatagggcatacgcatcgcgtatatgatatatggtataggtatagcacttcttttaggatggggtaaaagcattgagctcgtaatttatatactataagaagttttcacttctgtcggcactcccacgagtgcctttaatttttttt

SEQ ID NO: 6275 - DNA, 392 bp, Diabrotica virgifera
  SmartBlast Evalue=0.000000003; Info=Endonuclease-reverse transcriptase n=1 Tax=Bombyx mori RepID=D7F159_BOMMO
tttattatataaataaatttaatactaaaaaaacttattaataattttataaaactcattatttcggcgttttcccacagattagggtattcttttctctattagacacctattcagcaagacttccacaacctctacaacggtgttgccacccatttttaacatttcagacgttatatgatcctcgccaggagcttttttattcttcatttgctgtaaggcatatctaatttccgaagaagttattttagggagagtttccgagccgatcgtttagaattgttctatggtctgatccggggttctgtatagtggatgtataaagattcttgtagaaagtttgtatttccttgattatttgagtttttccgtcaccgtattcccctgttggc

SEQ ID NO: 6276 - DNA, 272 bp, Diabrotica virgifera
ataaaaacttctaaaatgtctctataaaacttctaataactcttttgtacctataataaagatttaatctctgttgctgaatgtctaaaaatttcactttctgtgtccctttgcttactatctactaacacttattgtaagatattgtctatccttaattcaaatacttccattttccgcgaaaatttaacctgaattcattatatacatttaaaaataagttatttataattacattactttagagaaaaaaatttacagctttaattctt

SEQ ID NO: 6277 - DNA, 237 bp, Diabrotica virgifera
gagatttaagctaggttatggtaatttattagtgtacattatagcggggtaatgtgctgagattttgctgagatttaagctaggttatggtaatttattagtgtacattatagcggggataatgtgctgagatttaagctaggttacggtaatttattagtgtatattatagcgggggtaatgtatgttgagattttgctgagatttaagctaggttatggtaatttattagtgtac

SEQ ID NO: 6278 - DNA, 10421 bp, Diabrotica virgifera
  SmartBlast Evalue=0; Info=Apolipoprotein LI-II n=2 Tax= Tribolium castaneum RepID=D2A691_TRICA
cgacaatgggtcgaagaggtccgttgcgtttgggcctagcccttgcatttgttttagtggctcaacagacattagccgatcaagtttgcagaacaggatgccggaaaagtaatactcaattattcaaatacgtacccggcacaacatacaaatacaactatgaaggaaaaatcgacattagcttatcgtctgctgaaggacaagtagcaagtactgatgtaaaagctgtagtattattaacacaattaggagactgtaaccaacttcttaggcttcaaaacgttcaagttttgacaggaaattcaaagaaacatggtcatattccagatgtggaaaaggctattcaacttaatttccacgatggacacatcgaagacagtatatgtgccgaacctactgatacccagaactcactaaatcttaaacgtgccatcgcatctcttttccaagtcaacttaaagacgggacacgaaactgacatttttggtttatgtcctactgaatacgcacaacataaagaaggagctgatttggttgtaataaaaggccgtaacttaaacaaatgtgcctacagagaacatctcagacaagactttttcgcaaccactttcaatcttaatagtgaaatcaaatctagtcctatccttaacggagactacagtgctaaactgaggatcaaaaatggcatattaaatcaagcaaatgtcattgaaaactacctatatcttccattctccgtaggtaaaagcggtgccaaagctgaaattaacagcaaactacacttagtaggtacttccaaagataatccaaaagctgctcccagcgtccctaaatccattattttcgacaatccccatccagttattgctcctaatagtggcgtcaacgtaatcttgaacgctgttaaggaagtagtaaaaactattgatattgttgttggagacaaaaccgccaaaaaattcgtcgatttgattaaaaccgtcaaagcagctaagaaagacgaccttttggccgtttacaaccaagtcaggtctggtgtaggtattggtgataaagtagctgccaagaaaattttcttggacgctctcttacaagcaggaactggtgatgcgattgaagtagccattactttattaaagagcaatgaattgagcgatcaagaaaaacaactggtctatattggactgtccttagtcaaacacgcaactgagaactccattaaaaccgcaagtcaattactagcaattccaaatcttcctgatcaagcatacctaggtattggaaacttagtaggacggtattgccaacaacatccatgtgacaaagttgatgctctcaaccaaattactcaaaagcttattcaaaaattaggcaacggacatccaaaagacaagaaagctgaaaacgaaattattcttgtgttgaaaactcttggcaatttcggacatttgaatgacaatgtagtaaccaaaattgtttccattgctgaaaacagacaagctgctgaaagattaagagctttcgcattggaagcctacctctcagatccttgcaaggataaggttagaaacagcgctattcaaattttgcaaaacattcaaaatgactctgaactcagaattaaggcatatcttgttttggcaaaatgtcccaacgctaaagttggtaatgtagtaaaggctttattggaaaaggaacaaagctatcaagttggaggatttattgcttcacacattcgaaacttaaaagcatctgctaacccagacaaacaagtagccaaacaattcttgggcctcaacgttcctaagagattccccgttgatcctagaaaatggtcatacaacggtgaagtgtcctacgctgtcgacacacttggtgcagccgcctctagcgaagctaacgtaatctactctccaaatgctttcttacccagatcaaccaatctgaacgttacagctgaactcttcggacactctttcaactttttagagcttagtcttagacaacaaaatttagaccgccttgttgaacactactttggaccaaaaggtgttattaataccgcatctctcagtgagatatggaaaaacaaaaaccagcaaggcaacaaattatggagggaatttaacgaaaaacttaaatcaagcttaagagcgagacgtgatgtatccagaaaagaaattgaaaatattggtaaacttgtacaattaaaagaaaatcccttagataaagatttggacattgatctcagtcttaaagcttttggttcagaaatcttccaccagaacttaaatgcttatcaagacggtctttcacctgacgttatcattgataaacttattagccgtttcaacgaaggcttggacaaactaaagaactttgaggaaactgttcgcacaaacatccaattccttgatgctgaattagactacccaacatctcttggattccctcttcgtctagcagtggaaggaacttcaaacactcaagttaaagctgaaggaagtatcgacgtcagagcattattaaataacagagataacaacctacatattaaattgatcccaagtgctagtattgaactcagcggaagacttactttagacgcccttgtcgtagaaaatggtcttaaagtagtatctaacttatatactgccaccggaggagatgttagggttaacttttacaatggcggaaagggagttgatgttaaatttggtttaccagtacaaatccagaaacttatctcagctaatcaccaaattgtatttgaaagtagagaacatgccggacaagttgctgttactcctcttaaatttgctcaagctaaagatttctccatctgctttgatcaactaagcgaattcattggactagcattatgcgctgaacttaacggtcctaatttagctggcaaacaagtaccagtcttgcctttcccattctcaggagacgctaaagtttcagtgagcattgaaaacgaggacttaaaagaattccactttaaaaatgttgtaaataaggactacacttctggagaagttttacttgaatctatcggtaacaatggacagaagaaacttagcattcaagttcaaagtgaaatctatcctcagaaattcattaaagctgtactttcttcacctgttaagtcagcctttgctgaaggaagaattacaaatacaaaccaagaaaaatcgttgctccttaaagctggccaagacaacgttgaaacttaccttaagttcggtgttgccatctcaggttcccaagataaagcagtttatagtccaattcttgaatataaaactccagatggtaaccaacaattaccagttcaagttgaaggaagaattattgctgaacaaaatggacctaacaggaaatatatatttgataacgtacgagttcacttacccaaccaaaaagtcttgggaattaatggaaacatcggaaatgaagctggaaatcaaggcgaagatttcttcagcgacttaaccgtctctgaaggacaacaatcaggttctttggcaggtcgtttacacttggacgcacatcaattgaacttaaatgccgaagtgaagaatagcataaacccaggttttaactttaaacttcaaggaggcctgaaaagatcaagtgacctgtctcaacttgacagcaactggcagttaattcacggtcaagatctagcttccaagacaaatattattagcctggcaactggtgttacaagaagatacaaaacacaaaatgatttccattttggatttaagaataaggtcagctatccattgatcggattggttgtcaatatcgaagcagaccagaaaccaaaaagtgttgattatgattttgacttccaatataatgacattaaatttggttcagagttggatttcaacgtcgataaaaaatcaagaggagactttgaacttgtatttggagttcatggtctggaaaacaaagttgattttaaagcaagccgagaactggtaggagctgataagagccaaattaacaacgagttagatatcaatggactgaaactagcagttaagggacttattacacacaatatcaaaccatctagcgtagatatcggcgctgatctaactgttgtccttcctacccacccaactccattcaaagtagacagtggtttacaatataatccaacagactttgctgctcacaacaaaattctcagcggcaatgtagtggttgtagacgcctttttgaatgctaacaaaaacggcaatgctaacggtagcgttaaagtaaacattaaaaacgttctggtagttaatggacagctcaaatcagtcaaaggtgttggtaacggccacattaagatcgacgcacaatctcttaaaaaagtagtaaaagctgagagtgactttgaaatacagccaccaactttgtacaaaattgtagtaacattatatccaagctttgacaaagaccccaatcaaaaaattattttgtccacaaacagcaaattatctccaacaagtgtagacaccaagaatagtgttaatcttttgggaaaagtattggaagtcaatttgaacgttgcaaaatccggtgacgctgaaaacaagaggtataacggagaagtcgaagtgattcttccaaatgatcaatacttgcaaggaaaagttaatggagcctacaacactaggaatgatattcttaacggacaaggtcaagccagtgtagaatataggaaaaacaagaacactcccggtcgtaaactcagtttgtctggtaaatataataacgtaaacatcaaggaaggagtctatgatgttagctacaacttggctgctgacgacgctagcggaagaaacgtcaatgccgatttaaatgttaaagtttctaaagaaggcgagagaagagtactagatacctcaaccaaaatctacggatctatattgaaacaagccctcaaatcaggattagtcttcaagtacacagtcgataatggtgaattcgaaattacttcatcatatggtcctgaagttaatggtaaacttggcggaaaatacgatgttagagatgaaggtaaacctgtttctggagaacttgacatcgaacttttgttgcctagccaaaacttgaaaactttgagatctaaattgtctggatctgttctcctaccaagtgaaaaatctactgaaattacattaagcggagctgctagtatctacgctgacaacagagtttcttcggtcccattggtcgattttagcacagacggtcaagttagagcaagtgataaagatggagatcttaaagcaaatcttaaaacaaacaaacttgaccccatttctgtggttgccggatatagctgtaaagatctagggcaagaaaaacatcaagtaactggtaacgtagccttgcagtacagtaaaggcaaaaacttgaaattagatggaactcttacaaaactcgccaaacatcaatacaaattggaagcagaacttgacactccattcgaagccttgaaaaagaatcatttattggttgaaactaaaggctctgaggactatcagcaagtcacaagtaaagtagtattgaccaacgacggtaagaaatggcaactcgatagtgacttaaaatcatcagaaatctcaccattgattcatttgaagttaagatgtcccgaaggaaaacttactgaagttttgctaaaaggaaacaaagtcagcgataaagaacttgcttttgaatacagattgttatgtcaaaagaaagacttcttacttgaaggaaagttagatgctaatgtagcagacattgacaacttctatgttaaaggtagtatcaattctccaaaactcgaattaaacaagatcactttcgaggcaactaacaaaggtaataaagcagctaaaaaggttcaaattcacgtaaaatccgccgacaaaaacctcgttagtggaagtacaacctaccaggccagagaagaacacggaaaatacattattgaaggctcaggaacactaaaaattaaagaagaaaataaagctgccaacttcaaatttatttctcaagatttgacacaggagaagaatggagaacaaggattccaaatttcatttgttgcaggagtaggaaacaacgcttttgactccgaactaaaaatcaccaacaaacaatttagaattcttgactcttactgtgagaaaaacaaggaatgtgcccactttgagctcgattctaaagtcaacgaaaatgatgccgaaagatttagccacgtcttggaaataacccttgacctcaaaaaacttggccttccaaacgaatttggtcttaaagcagtcaccacaaggaaaggttacgttctggaccacacagttgatattcatttccaaagcccacaaaacagcaagtatcaatacagtgtatacctccaccctgacgaagctggagtctctttgactactccaaacagaatagtggctttagaaagtcaaatcagaggacccagaaatgttagactagctggaggtaaagttactgctgaagtatcattctacctcgacaaaaagaatcaacccaatcagaaagctagtctaagtggatggataaacgttgacgataaaggcaaaggagttaaatcagcagtttcattgtcacatcctggacttcaaagaccattatcaattactttcgaatctacgcgaggaggtcaaactcgtcttcccgaaatttatacgtccaccgtttttgatattttcgatcagccaagtcagaagatagtagttgattacaaattcacaccagaagtcgccaatgacaattcccacgccgtggtttacaattatctattgtgtaagagcgttggtctaggtattaatatcgaagctactgaagaaataagagtcgacagaaaagcaatttctggagtctattggtcaagaataaaatacgtggttggaagttccaactacgacaatctgatctccgttaaaggcaatagacaaggatcagaagttatcctcagattattaaatattgacttcctgaagatcgaaaacaaatatcaactgtctaatgatgatataactgttgacactgaactcacctcttacgataaccgacctctggttagccacttggaagttaagaaattcaaaactatcttgtttactctcggtcacaaaaatacaccaaaacaaaaactccaaatcaacagcggtttcatccctggtcaagtcgctgatgttcgtgctgactacgttaccggcggaggaactttgaatctattccacgccaccctaaaactcgacgaagccaatttccttaaaccagactacaacgtaaatgcaaagggaattgaaaaagtatttacccaaggcaaagaaggagtatctcgtttcgttaacggtctcgaaaaaatcgaagacgaaatcgaaaaagacatccgcaaagaagctagtcaactctctgaattggcaaagaaagcagctcccaatcttcaagctgtaagacaatactattctaccgaactgcaaagaatcaaaaacgaaattgtgcaggataaatctttacaagaatttggagaactcataaaaacaatattcttctctgttagcgaacttgtagaaacaatcttcgttagagtttttgaagtactagaagctgtaactcatgccgtccaaagcgttgtagtggccttcgttgaatcattcgagaaacatatcgtaccagctcttaaggatctcgtcgaaaaactctccggtattgctggtgaaatccttaatacgttggtggaaattacttcaagttatttggccacagtcagcgaaattatcgagaaataccaaccagaaatcaaacaattgactgctacattcggtgaattgggacaagatgttgctaggtttattcagaaatcatacgaacaagttagacgaatcttcattaacttgtacagaagactcgttgaagaacttagagctcttccaatatttgaagagctacgcgcacaatgggatgattttgtcaagaacggattaccaaatgctgatggaatcgtaggtgcactaaaggaagtagctgctaccattaaagatttggtacctggtgatctctttgtttctaaggaagtctatgagttcgttgatattcttactgattatttggaaaagaaaatcaaacaacaacccgtagatgacatcgcagttttgaacagacttttcacagttagcgccaatcttgttcaaaagattttgaccttgataacatcttctactgctgatattcaacaaccccaagtatcaatttctctcgacttctttaagaagctgccaaaattggttgctgttaagttatcaccaataaattacatcctacttgaagatccttccaaggaaatccttgatctaggcttgtccttagtcacgaaaccaaaagaatggttggctccattccaattattcggaatgattctccaggctcagcacgtctatacattcgacggaaaataccttaacttccaaggaacttgcaaatatcttttggcaagagacgctgtcaacggcaactttactgtcattggaaacagcgcaaacggacgtcttaacaccatttctttgagcgacaaagaagatattatcactgttaatgaacacggacaagtcattcttaacggagctcacgctgaattccctgttcgcaaagcagaacttgcagcttacagaagctacgaaaacatccatctaaaatccactgccggcgttcatattgtttgcacaccaacattgcaagcatgtggagtttacgtctcaggcttctaccacggccaagttaaaggtcttcttggtaaaggcaacaacgaacctttcgatgacctcactgttgccaacggtaaaattgtcacatcagatgtcgagtttgtcaactcctacaaaatcggtaactgccaaccagccgttgtacctccttctgcaccatccaatccagcttgtgaaaaactcttcggatgggaatctcctctaagactgtgctattcatttgttgacacagaaatttacaagagagcctgtaactacggttttgcaaacaatgtaaaagatactgaaatatccgctgcctccgcttatgtaggacgttgccacgaacacaacattccagttagtgttccatctagattagctcaatgcctgaacggacctgaacctcacaacgtcggagaccaatttagcgtaaaagtaccaaagaatgcagctgatattgttgttctggtcgacactatcaaatctaatgagccagtttacaatgaactagtaaaaccccttattcaagagcttaccaagggattagctgccaaaggattaacagatgttgaaacccaccttattacctacggaggtgagaaccaatggcccagccatgtcaccgttggtggaaagcttgttttcaaaggaaaagctcccgaaattaaattctccgaaaatccccaggaaccaccagttgttggagaactatccaaatctgtagaggccctccgtagtattcttagagacatcaagctggcccttggtcaagatcttcaagctaaaacctacactgaaggatacgagtatccattccgtgctcacgccgttaaaattatcctggccgttactagcaaaccatgcgaagtaggcaagctgtatccattacagaaattgagaactcttctcttcaaaaacaaccaaatctcccttcaactgataactccattcgaaggtcttcaagttaaagatgtcaaaaagaccaaggacgtgattggattcaacgatgaacacgtcttcaccttctcacaatccaagaagaagcccgaaggtaccgctgaattgtacaaagaattacaatatgatgactactgcgtagactttacagttaagaaccgcggaaatgtcttcgtaacagacaatttcctcgatgccaaaccagatggtaaaaaacaattccttcataccgctgcccataacatcattgaagaagccgtcaacctcgagcaaggtttggactgcgaatgcagaccatcgtcagcttacggaggtaaaaatatatgcagggagtcctattccaaagaaaaatcagcaccaaaaagactttcaaataaagcgtgaagtaatccacaggcagtgagttaattttaagttacatataagactatatagataagttatgtatagttatttacggtatgttttttacgtcacggtattgaaatttgtataaatcatatttatgcacctacatctaacagaataaatatatgaaagtttacaaaatatgtttttttatgtataatttatcgataatgtatgtttatcggtaatgttcaaatttttataacattgttaatataatcatccaattcaaatttatttattactttacacaaattaaagaagttttgc

SEQ ID NO: 6279 - DNA, 9597 bp, Diabrotica virgifera
  SmartBlast Evalue=1E-97; Info="Viral A-type inclusion protein, putative n=1 Tax=Trichomonas vaginalis RepID=A2DLG0_TRIVA"
gattttcaatcaaaaatatcaacaaataatcttataaggaacaaattttgggttaaaattttttttgtacggatacatctaatctcacaagttagcccccttagtaccttacacaaatatttaggcacatatttattaaaaagtcagtttcatgcagtgcaaatgttatgtttcattcactcttggtgtacttctaccccataaccagtttaggagaaccttggaaggactttggacatcacgagaaagtgtatagctagcatcgactaatttggcagctgcttctggtggtaacttggaagcttccttaatgtgctgttgcattatggacatctgttgaagccgacgaagctcttgttcatctacaaaggtcttgtctttcctatagccaacctgcttcagttctgacaacttgctagcaagatcttgtttggcagttaaatgttctgctggttcactagttagttcagtaccggatgctgcgaggaagatttctgatgttctgcttcttggagatacagattcgtcactggtagaagtagtcggttctgcagtagctccaccagctacattcttcctcctcatatcctccttttctcgaatggcagtagacagtctcagttgtaacgtatccctctcttctaacagatgcgtcagttctacagtaagctcttcgcagcgcacatctactttggtgcaacatataaagagctatatccagctcggcacgattaactagctcaggttcttcttctggaaggggcggtctctgcgacgacgaatgagacggtacttcaatcgaagtggaagcaactggttgttgagttattgcgctcctgctgatatccatttgagctatgagactgtcgtaatcattactcttctggaacagttccttcttcaggtcttctatctttacaacttgctcttctatgataccccgcatttcggacaattgcttagtttcttcttcggataaagaagtctgctcagaaagcttttcttccaattcttttattttagattgctgctctccagtgatagtagtcagttctactatctgctcctctaatttctttacttgattttctaattcagccttgagagtagattgctcgcttgcattatacacagattcagcaacttgtgcccttaaagtttgtatatccaatctttggcagccataagttcttcgtaatgcgtttcgatttctttgtaccgactcttgttcaagttttccaaggacaccaaatactcttgctccttttggtgcagcgttccgttcagatcatttatttgtccttgaaggaagtcagcattttgttgggagtaagccaactgttggctaacagtttggtattcgtgagttttggtagcaagatcttgagtgatgttgaaaagttgttgctgacactcatctagataatgttgaagtttcaaacactcatctttgtagcgagtgagctcattttcaagcttctcagcttctttgttgttctgagtgacttgtaattgttggtttaacgtcgatatttgctgatttctttcgtcaaacgtgctctgaagggcattatacatttggctaaagtcttgtagttgttgtttctggttttcaactactagattggtatcagttaattgttgttgtaagttttgaagtgctctttcgttgttggtaagtgtttccttgtattcgttcataactgcttgcagtcgaacaatttctgcttccttctgatccaattgcttcaattgatcattcaagttttgaacattttgagtgagatttacaatctcttgatctttgtctgtgatctgattcgtttgtatttgcaaatcgctgacaagattatgcaacctcagaatttccaggtctttatcttgaatagtgttgtagtatgtctgtaactgagcagtttcttccttcaatctcaatatttccgtttctttttcttgggcagctgtttggtaactttgcaactgagccagatcctcctttaacttcaagatttctgcgtctctttcttgaagaacgctgtaataactatgtagttgtgaattcagattttcgaattgtgaatttatctcttggctggtgttactcgagagattcaactgcctacgtaattcgtccaggatctcgttttcgacagaaggtagagggaatgaggtattttcttcgagaattgctatcacttgtttgaagaatttgtgttgctcgtctaattcctgttgaattgcttctgacttagagtttagtcttatgaattcgacttctttatcagccaatagttgttgtgttttctccagttccaaaacctgctgggccaatgcagctttttccatttgctcggtggacaaaagtttatttaagtcattaatcgaatgctgcctgtcagtgatctgttgttgaagagcagaaatacgatcgacctcatttttaatatcgacgtcagcatttttccttagctcattgttttcgttcacgagaaggttgcacttttcttcgagctcgttgatttcgttcttaagtttctcttggactgcggcaaagtcagattccacgatgctcagatggtacttccagctttcggcgactgtatttcctctttcatcaacttgcgccgcccatttctcttccaaccgagcaatgctctcaaccatctcattttcgattctatccagctcgatttgcttttcgttcagactgtccttcatttctttcatctccccttctaaaccagctttctgattctgcagttcttcgatcaacgtcttcaactctttaatgctcgtatccttttcaatcaaagaactttgcaaccgcgccatttcttgcaatttttcatcgacgtcttgcgtttgggaaaccttgatatcctgttcgaattggagctctgcgcaccgtcgcttcgactcttccagttcctggacgacttcgtttaatttagaactattttcaatctgtatttggtccagcttttgtttgctttcttccagctctgactgaagctctaggataatcttagaagtggctatttgaagattgtgatactgttcttgttggttcttcagttctttttctaattcactagatgcctgcacgttatcctggcacaacttaccagcttcttcatactccaacttttctctatgatacctatattgctcttccttaaataattgtattagttctcgcacgtcactagctctctgttgtgttgcatcttgaatagataggtccacttcgttttgttgctctagttgagctttcaaatctttaataatttgcgtactattcgcttctaaactgccaaactcgttctttaggtgttccaactcaaaacttagagtttgaatttgctggtgaagggtgtcattggacgacttgaattcttcagctaaggccgttttttctattaagagcgctttgacttcttcgagttgtgcgttattttctaattctttagtctttcccgctagagcagtcttcagttcttcattttggtgatgaattagtctcaaattttcctctgaatgttcgagtaattcaattttttgcctaatttcatcctctaatttagtcttttcttccgtgatgtgtactaatttatcttctaattctttgatattattatcaagttcttttttatcttcactttgcgacttgtgcatctgttcttctaattcttgaattctacttgttttttcgtcaatttcttttttaatttcactgagtattcggtccctttcctcttctattttccgaataagcgcctccttattttgcaactcttcttccaagttgctcaatctagtttcgttggtcagactcttgctcctttctaattgcactctctggttcttttggtcatcgagcaaggcttgtaattcttcgttgtcagcggtcaggtctttaatgagtctcttaagctcttctacatcttccctttcctcttcttgttgcactcgaggttcttttttctttatttcggtatcttgaagctcgtcgccccaaccgaaggaactttgcgtttcttcgagcttccgtttgtacttcaaaatttccgactcttggatctctttcatctccagcatcttttcattggcagctgtaaggacgtcaacgcgttttagaatattagacttctctaacttctctttctctaattctgcgctagtttccttgatcttcttttccaattgttgtatctgcgacttcaattcttcctgaatcgtctgatccagatcaaaaaagtcgtcgcctttgtcggatttcttcaacaactgctcgttttgtgccttgaggtctttgcatttcttcattattctaccgcatttgacctgcagctgcttcatttcctcgcaatgagcgtccttttcttctaaaagagtctccactttctgtcttaattgttctatatctgacttcaaagcttgcacctgcggcgtattttcagacttatattgatgttcctcttctaatctagcttcttcgggaccccaaccccaaccgtcgtcattctctcccactgcctcgcccacttgataagttaggtacgctttcgtcggttgcgccagtctttctacaactgggaatctctgttggcctaaatctggatcagtcctttcgaattctagttgttggagcgctgcaggatctttaaacgcatctatcgaatccggagacatgatttgggattcgacgtcggacaatatgggctcaggttcgtacgttaaataagctgtggtcggagaaccgacgacttcttcgactggctctaaactagggcctacagaagcgtcagtcgtttcaaactcaagttcttgtagtgcacgtttatcatgtgcagccttaacttgctctagtgacattatttgtgactctaagtctccaggaggctgtggaacggtgcttggtgtttgagcactaactttctcgtagaccaatcgagtcaactcgttgagcatttcggaacattccttaataaccgcttccttttctttatctacattatacagcaacacttctaaagcttttatcttactttctaaatcttcttttgtaactacaactttttggggagcagattgtactggtgcagtttgtactggtacaggttgtataggtgcagaagcagtttgtactggtgcagtagtaactggttggaaattgttatcatcaaaccagctgctggcctgctgagagtcttgtccccattggaaggactgatcggattcgtcgccccaattaaacgcaggaatatctagttgagcgtttctctcttgggattgagaaacaagtgggacttctgtactaattggtggaacttttgtcacaaatggcgagatttctgtagcatcagtttgagtatcttttgtattgaactcaacaaccttttccttagcttcagttatcacttcttctattgtttctttggctgtatccactataatttgtttttgtaaagtatcaacagctgtttccaatgtagcaactttttgaagggattcttcccaattagtcgaaacgtgatttagattttcctttagcttgactatttggttgttataatcagtttgaagttcgtctattttctgtttaaactcgttattttcgaggatcaactcttcctctctatcttttagagacttaactgcttcttctagcttttcacactcgaaggttaattcattccggctctttatcaatccttccagctgaagttggtaatcagtctcgatcttttcgtagtctctttgcatttgcttctgcagttcgtcgttttccatttgagaatgcttctgcgtggtctccagatgcgccagttgtttctttagatcagcgtttagattttcctgttcttccaaactagattgtaatgttttaagctgacttatcttctcctgcgtcttcttaattttaactttaaacttcattatcaattcttcctgctctctatttttatccgtcagttctttattctcagttttgatttcttcgagttgtctagtgagcacttcgtcattcgttgtaatttcttgtagttgttgacccatttggtcttctagcctactcttttcttcaatatgtttcgacattaagcccaattgctgatgcaaatcttgacactttactaacaagccgtctttttcttctagtaaaacagccaagtcttcctccaatttttggctcctttctttgaagtgagtcaactctgactcgttcatttcgattattaattgcaactctttaactttatcttcgttggttgactcgttatttccgtgtagattgtcgaattcttcatgtagacttgtagataactcttgcttgaggtttacttcggctactttttcttgtttatggcgcgcctctagcagcatattctgcaaatctacgttttgttgctgtaacgtctggataacgtccttaagctcctttatctgaatgtctgagttttccaacgctttcgatttcacttgtaactcttgatttaaagcttccagttgagtctgtagagcaaccacttctccagagctggattctttcttatttatttctgtttcccacttctctttctcatcgttgtacctcgattccaactcctgaagtgcgtgagtctttttctttaagttggcagcgactttcttcaatttttcagtgagttcccggttcttcttagtcagatcgtcctgtttattcaaagtaactgagttactatcgagctgttcttgtaaacctaaatacttttgtttcatttcgtcgataattttgtgcacgtgtacatctttttctctaagttggtccttaagattttcgattactgaatctttgtgtagcaactcctcagttaacttttctttttctctctgcttttcttctacttgcttctccatttcttgtttattccaggctatttcttctttaaagtcttcagcttgtgactgcgccagttcaatttgttcattcagcgacttctttaattcatcaacttgcttctccatgatctcaaagtcgcctaatttgttattttcgttttgtaagtcgttcacgacggcgttcaaatcacttatcagaacgttaagttctttcttgtcgttttcggtctccgaaagctgtatttgcagttggttaatgatattagacgaattgataaattctgttttgttttcttcgataattgtttggtagttattgatttcttcgaggttttctttaagtttagtttctaattcggtaatcttttctttcgcgttcgataattcggattctaagttatctttttcgtgaacgtttttgtcaaaatctttgagcgtctgttttaagtctgcgttttcactcaatatattttcgaattctctctgaagatctgctagttggaccgatacttgcatatcttcaacctcttcattttggccaacctttccatccttcaattccttcaactttttggcaagttcgtcgttctctttctgcaaatcttccttctccgtctgaacctgctcgtacgtttcagctaaaatgtctctattgttctctatttcgtttaacttcaaggacaactggttgttttcttccctcagtgcgtccaacttcatcataacctctttcctttcgatattgaacatttcaattttactcaaaagttccgccgagtcttcggttaattgtagcacactttcgttcagttccgcgggtggttcttcttctgataccttgatgggttcctccaaattcgtttccatctgtttctggtacgctgccaactccagtttttcttgttgcgttaatccttcgactatttcaatgctttcggccgatgagaccttctctgcacttagtttttctaatttatcgagcagttccatgttttcctgaatataactctctaatttcgacgtcaaatccactttttctttgttaaattcctcgattctttcaagaagttcatttttctgtttattaatattatcaatttcttcttttaatttactattttcgctctgtaaggcttcaaactgctcttcgatttggatggattgaatttcagatgttacttgctcattctgtatgtcagtcagactggaatttttctcggctaagtttgttatctctgttttcagagaaataatgtcggtctccaataaacttatgattttgtctttttcatccagctcttcagaatttcttgccaatttgtcttgcaattctttgacatcatcagcttgggaagatcctttaagtgattcaatcgattccaccatcttcaactgcatattacctttctcctcttccagttcagcaattttctcattcaattttgttacatcgttctgtaattgtataattgtggcgttagcatcgctcatcttcttaaaggaatccaattttttgttcaggtctttaatcttgctcttattctgtgccttcactttaatcatatttttattgctctcgtccaattgcttcttcagtttttctatttcggaatttgatgattgtccacttgtatattgagtattttgaagttgtgattctaaatcatttattttagaagcattttcttcgttcagcttcttggcatctgccaatttttgttgtagatctttaataataagttcatggttctcctcttcaggtttctctacattactcttagacatttcattcttttctttcctaacctgttcgatttcttcttgtagttctgttatttcgatgtttttgttttttaagtcgttcaacaacatcatttgtcgagctttcatttcactttctaacgttataaagttttcctgcatctttctcatctgttctttggtttcgtccaaagcatctaatgtattttttccctttttactcaaattatcagtcatcagagttatggcttttgtcctggcatctattacttggtctttctctttcagattttcttgcaaatccaaaatagtaccttcctgtttgtgtgttttttcaaataactcagtgatcttcctttctttaaccaacaatatgttgtacagctcttcgggactcgtgtttttgttgtattctagatttttctctattgagatctgaccggctggtgtagcattaataatctgttgagtatcgttcaattgggtttttatggctgtgaccatttcctggagatctttctgacgcatacccctttcagcaagctttgccttgttttcctctaattgttgctttaacaaattaactttctcatgtttcttactatccatagaagtactactcttctcagtactaccagaatcatctctctttagtcttgatttcttagctttggctttgcttaaggtgtttatatacttctcaactttttcttggggtactgtagtctgctctttcctcagcatctccttaagttgagctatcagtacttgctgctgttcgttctcctcttgcaagtccttgatttctctggaggtttgggggccagaggcctcacctccgggggtcggggtcaggctctttcaacatattaagttacctcattgatacactagcatttaaaaagaaaagaaatgtagatatttaataacataatttctattttgacacaaaaa

SEQ ID NO: 6280 - DNA, 8639 bp, Diabrotica virgifera
  SmartBlast Evalue=2E-83; Info=Acheron (Fragment) n=1 Tax= Manduca sexta RepID=Q8I9V8_MANSE
ttcgaacagttccagaatttgagacaataaatattgatcaaaatacattttataatgtagctgaaaaataaagaaaacctaattctcacaattacaaaatatttcagaaacattaaagaatttttcaacttacaaactaaaattggtaataaattaagttatatacaatatttaaaattaggaagactttctaccaatataaaaacgttttatacataagggtagattatcgtttaaatcatttttaaaacaaaatgaattcaagcacacctatctgtagaaaatataaatagacgtaactataaagaaagtattagtcataaaacataaatctgatgttaaatagaaagctaccttcattatgcatattcattttaatataaacattcctaattgagtctgagtttcgagcataaatgcaaattttttcttgagatacgagggaattgcaaatttatctcagttttggaccgactcatgatactttgcaccaatcagtttcatatcggcactttttattctttcaatggattattattgttgtgtaatgttaattatataaccaatattcataaataaatctagaaaatatgaattgttgaatcatcagtataaagtttattttactgtcctataaataggtcactagtttttactgataacaaaatatgttacatttcagtatagagttctatataactaagtgcagaaatctttggagtttttaaaatgtcacattagtttattacgatttcttaaaaagttttatatttaatcatatttgggagaaattatttcacagtaattaactaatattttaacaaatattattttggataataaatgtaaaaataaaagaatgaaatatttttgctattagtctacatatttatgttctttgcagatgtgtcaaaaagcattatctgtacaagaattagaagatatgtgtaataaatgatcctaattttatgaatgctgaagagcttgatgtaataatgcgaccgccggaacctgatcatgtaacaggtgaagatgaatctgatgattatttactagaaacataggagccatggatcaacacgactggtttgttggaaaatatgccactaaaatcagagccaagaagtgttattggctaatattcacacgatttattgatatggcattagtaaattcatggcttctctacaaacgagtcaataagtcaaatattactttattagactttcgtcgatctgtagcagtttcatatctacaattgactcttagtacaagaagtatagtaggaagatctagtacatcattatcaaaagtttttatggacgtaagattagatggccatgtacagaggatgccagatgacaggatccaaaacagattttggcgtggacaccacaaaggagaaggaaaagaggactgcctagaagaaactggagagagggaattgaaaaagaactagaggaaagagaaatccctccaggtctgtgattaaacagagaaaaatggcggtttggtcttggaagccatcggagaacgctgtaaaccgatagtagtagtagtaagattagatggaaaaggacacttcatggaaaatttcaaggcagagacgatgtcaaggaacaaattgtaaagccagacaccaacatattgtgtaaaatgtactgtattgtactgtacaaacattgtgtaatattgttttatatattatcataaaaaataagtttgtttttattacatgcaaataaaaaatttaattctcataactgttttgaactctacataattgcaattatgataaccctaacgtagagtgtcttatttatagatcgggtcgtaattcaaaaataaaaagttgtaaattaatttcatgaatatttccttattaagcacaggattacaaatgtataagtaaaattttgaaatttgaaaaaaaaaattaaaaattagcatattattgagttaaattgaagtattgtttatttagtcgaatgtataattcttgacgaggcgccactggttgaacgtgaatgcattcagtacacggcctacttttctaacgcttcaactttctccgaaagttttacatcgtcgtcggatatcaatattaaaaaaagttaaatttctccgttagaacggtagagagagagagagagattaattctattctagtcgaatccgttacgctttttaaatccgaaaattgtagaaaaaccttctgaaatgctaaattgctttattagtagcggtcaatttcgtacggatttcacaattgcaaacggcgtcgtcattaaaattgttgcagctataatatacaaaatattgtatgaaatagtccaattttaaaagcaattagaaaatttgtttgcgcaacaccttaagcgctttaacattagtatcagcacaataaaccaggaagtgcgtcggttggttggtactttgcgaataaaaagaaaaaaaactgaaaaagtaaagtacctaccgataataggcactgatgaccccgaatcttgtaaagacatttgaaaagtcgacgatacttcactaacaacagaagtgatatggtgtaaatacaaaggaataaacaagaaatagaaaagaagcattaaaagataaagcagaagaagacaacaaaacgatagcaactaaagtaaagattaaagcaaattgaaaggcagaaaagaacgtaatgtacaattgccatcttcccagatagccaggcagcgcttcagacactctagtctgcagaggtcaattataagttagtatgagattgcctagtaaggcacgagggtcataaaggcaatgaaaaagcagttgaaatggccaaacaaggctcattatactattcattggaccggaaccgttctgcagcgttgcaaaggcagtaacaagaaagtgagtagctcacaaatcactggaatggtaaaggaattcaccaggacaaagacaggcgaattagttcattatagaacattcgccaaaaattacagcagacctaataagcaggcaggaaaacagtcaaagccatagtaggtctgctaacaggccactgcaatctgaatagacagttgaagctgataagattggcagatgatgacctatgcagaatctgtctcccagagaaagaaacagtgcacattttgcgtgggtgcgactgcctggcaaatgtgtggttctttacatcaggcgaaggatctttacatggaaggttcagtctcgaagctagtagaatttttaaagaaagtaaggctagataatatagtctagaattagaggatctaatgtaaagattaataaaatctacaaaacaatgcggtagaaatatcaatataaaacaatttagagtgttaaacacgtattcgaaatttcgtgcacgataaaacattcagttcaattattgcagcttccataaaattagtcgatttcattaatacatattcgaaaggctaactttaaatatagaaccttatacagtgcaactaattacataaaatcaatgttacgaattgattcaaggtagtgttcaagaatttttaccatatattacactagaagttggctttttgtgaatggtaattacagcaccgtattcagggaaacaaaaatatatttttttatgatcaaacatagaatttcactagtttccctactgtataaatgtcttcttaatatcagaaatcgacaacttatgaggttcttcttctttttctgttgaggtgactggttttcaatgtgctttcagtaagttgtcgtcccatcgttttcgtggtctaccccctgatcgtctttctattgggaaattttctatttgttgtcattcagcttatgtgatcgtttcattctagtcctctatttcttacccagtcttttatgctctccaccttgcatatccgtcgtatatttatacttctagctctgtttcatagtgtcttaacatcgatttttcgatgggttttgatctctgctctttctaacattctttttaatattgtgttaggtcatgtttctgccgcgtatgtcattattaatctgttaactgttttgtaaattctgcctttcattttcaataagagttgtattcattagtatggtcagttttgtgggccattttttcaataggatcaactaaacaggtttcggctcaagaataaagtatctataccgttagttctacaacatatcctcgaacaatattaaagtgaaagccggttctgtaagtagttcgtaccttacttctcacttacaatccatgtatgatcaaggccggcttatttctcgtagtagtaggtatattacattaagtgaatcatcttttttttactccatttttattttctgcaggtaagttaaccttgcgttaacagttcaatgtttttgtatcgcccgttaagtaaataattcagataaattcgggcgtgcgaggtggggtatttaaattttaaaatgcgtaagtatataaggataatgagaataatattctcattatccttatatacgcatatgcatattatatattatgcatattatgctaaatacataaattatgattataagtattaacatatatatctatgaattgttatcgatttttgttaaataagtctgcataatataatcgatagataatgatatccttgtaagcagtaacttttatttgatttctatatttttctttcatctagtggtctaatgtcgggtactgtcttctcgatctgaatagacacgttcaagattttctctggtaacctttcgatttgaatgtacttcaatgacagtactatcattttcattattttctgtatttttgtttaagtgttctatgttctgtcacatgtcaattttcattgacatttcatttggcctgtgagacaatctctgaagctctaagcattttatggaataaagtaaatattaaattaaatgtcacacttaaaaattgtaatcctaaagaaaccttattttctgttcgcgtggaagaaggattatagcatttaaatggatgcaagttcttagtcctactaacaggtcgatagctcatttaattctaatccattaaagcgtttctttggctttattgccaataaaagtgttttcatagataaaagtgaaattatattcttttcccagtaaatttataatgcaagacatcgtgaaagtcaaactatatatgggtgacagctagatatctctagttcagtcgctaagaatgggaaatgtttcggccattggcgtacgatagttttatagaagttataatagcaagccaacttttttttttggttgactctgatctttttttacctgtttaaaagttaatctagactttgtattacttttgaagtctttcatatcgttttaccatcatagaagacaataaagtgtctttaatataggttccgggttatgaaggggtgcatgggaataaacagaagtactcgagagaaacaaggcccagaacctttctgtggcatcgctaaagttgctacggaaaatgaggttcagaaatggctgataaagaatcatcaaaagaaatggagaaccacgcaagggcaaatcaagactaaaaaataatcaagaatattggtaaaaaactctaacaatttgatccacctcaataaacgagagattaaatcggccactaaaatggtgactgaacattgccgtttaagaaaccacctatacaatctaggtaaggtgaatgaaccattgcccaaaaagtgcgaaatgaaagtagagatgccattccaatgtgctaattgacgtgaggcagaaattcactggtcaactgaggtttgaaccagaagagatccgaaaactaccaataagaaaactgttggtcttcgttgaggtcacaggactgattagagtttaaggaaaaaacagagtatagtaaaaaggtcttacgacctgtttctaactctctcctgatttaagaagaagaaaagaagaagaccgttaagtttctttctaattttctactggagtggtatgaccagttctgacatttattgttaattgctgttgcggaggcacttgttaaatattgataataaaaagtttactgaacatttaattcaaacacgaacagaatttatttatattggatccgattaccataccgatcaaattgtcgttagttacctatatataataaaaaagtaattttttcaataaagacaataaagaaattatcaatattaatagataattaatattagtatgtaaaagagttatggacagttgttctccccaaggctatgacttctaccgactaccataaatataaatcacgaatgccttgatatttataggttacatattcttcttcctgtaaaactgaccttatatgtgtatttccggtttcatgtcaggttaaccttctttttttaattaaatacctagtaaatgtgctattcttgttgctgccaggcatttaaatacgaaattattttacagtgaggtaggcatttatttaatttaataacaacaattactaatttgattaataggttctatttttatctgattgagttacctaggcgcagatgttttttattaggtacttacttgtaccaatatacaacaattatcgaaagtatattgttaaatttttgtctttctttacccattagacatattaatatggaatttactttcttgtggttttttactgctttacgacgtgtgttcacccaagcatgtcatacgttttcttaaacttgggtgaaagttgttcgagattaatttgttgattgtaattataaaatattttttatgtgataggaaacataaatctacctcgtagtagtttgataattggatattcagtttaagtattttatatacaaatgagtatgcataataaaaatctcacgtctgaatcaaagtagaaactaacgaatcgtcaagaaaatttaagtgggaaatgaagattaaagagaaactaacactcccagatacaatattgagaataattactttaaggcagaaagaaatgatttctcagtagtaaacaattgcagatggaataactgtctttcaatattatacctctctatcatgcttcttcactcttgcaaattattagaaccgccagggttcctaatttattgtgctactgtaggtagtctttgtctaaacccacgacttccatcgggtccttttggcatccttagtacgttttcaccattctggaatgctgaactattactcctggaacgcggattgctgtattctgatgacgaagacattcttctaacaaaattatcgttattgctggacatactgcatgcgctcatccttcttggcacgaacaacgacgattcgctagagtctctactgctgtttgataatcttcttggcatgtacaagaagtttgcttctgtactggaagcgctaagtcgtctttggagccatgcagctggttcgatgtatcttgagggatagttggaagaggaaccacggcgcattttacctctgggatcaaatttctttagatcttcagcttccgaactgctctgacatgatgaggagatataatcagaatctgagataattttgttgttgctactattaatattgttattcgagttagtgctctttttgctagcaggcttctttttcctttcaggatggggcacgttgttcagttcgtaaactttaagtggttctccaagggtagcttgcatttgtatagcatttctagctgattcggaatgaacaaactctactaaagcacataccatgccggatagagaaggatttttgttgatgaattgtctaacatctgcgggtattggattgcctggtcttagaattctgattaaagcaatttctccacaagatctgaataattccgcaacgttctcgattgttggtttttctatgggcatgtgaacagctactacggttctggatggggtagtttcgtcgtatttaggcaatgcttctaatcgtctaagctttgtgccagcttcattaatttctaacttcgaggatctagccaacgcgtgcgctactaccctccagtctttagtcagatgtttaacccttttaaaactagaaattagtttgagagaaacatacccttctttatttcttttgacatgtttgagcaaaaaggcatctttagtaatgttggcatctgagaagtaaaactcgacttgttgaacaattttatccgataattcctcagagggggctgtaaatgggggttcagtgacttcaggagtaacctcacatccggaatccttaccccctccatgcgagccagtatcagaagaactgtcacttaaatcggccatatgagcaccttcatcttccgtgcaattttcaacttgttttttgtcgaaggataaggagacgtcgctgtctatagaagaaatactgtctctagtttccattaattttgacgaagatattaattctccaacttcctgcagttcagaagcgatttcctgatgtggggacggcatcttttcgattaaatttcccgaaataaaaacttagaactagtatcacaaatatatatcacttaaaaacgaagtcagtcttgggcacgagaaacgacgtgtgaaaataggtcacacgaagtgtttttgttgctactgccagacactttcacgtggtttgacctagct

SEQ ID NO: 6281 - DNA, 8084 bp, Diabrotica virgifera
  SmartBlast Evalue=0; Info="Myosin-9, putative n=1 Tax=Pediculus humanus corporis RepID=E0VNT1_PEDHC"
ctgtcattcgcagacggtgagagatcggtgtccaacttaagtaaagaaacaaaaccggtccttatagtaaaagaaaaaccgtatttcgttgtaaattgcattatttttccatacgagcgcgaacccgagaattttcttacatcgtagaccgacagtagatgtgatttcctttgtgatcgacacttgttttttctgtgtgagtgcggttttttgttgtttccctagtcatggctgacgcggaaacgaaagatcgttttgatccagaactgaaatttctttgcgtggacaggaatcattacaatgacccggccacccaggcggaatggacgcagaaaaggttagtttgggtgccccacgaatcgcagggcttcgtcgcggccagcatcaaaggagaacggggcgatgaagtcgaagtggagctccaggagaccggcaagaggaccaacgtgcccaaggacgacatccaaaagatgaatccgccgaaattcgacaaggtcgaggacatggccgaactcacctgtctgaacgaagcttgcgttctgcacaacctcaaagaccgatactattctggtctcatttacacctactccggcttgttctgtgtggtcgtgaatccgtacagaaagcttcccatatacacagataaaatcatggagaggtataaaggaatcaagagacatgaagttcctcctcacgtgttcgccattacagacactgcctatcgatctatgctacaagaacgagaagaccagtctattctctgtacgggagaatcaggtgcaggtaaaacagagaacacaaagaaggtaatccaatatttggcctacgtagcggcctctaaatcacccaaaggagcaggagcgcagaaagatcttatcggtggcctagagcagcaattgcttcaagcgaatccaattttagaagccttcggtaacgccaaaactatcaagaatgacaactcttcgcgtttcggaaaattcatcaggatcaatttcgatgcctctggtttcattgctggagccaacatagaaacctacctattagaaaaatcccgtgccattagacaagcgaaacaggagagaaccttccatattttctaccaacttctttcaggagcttccgatgcccagagaaaggaatttattttggaagacccacgatcgtacggctttctccgagaagacaatcatatcgttccaggagtggatgattcactcgaattcaatgaaactgtcaagagtatgaatatcatgggaatgactagcgaagacttcagtgccattttcagagtcgtatcagcggtgatgttatttagcaaaatggagttcaaacaagaccgcagttctgatcaagccactcttccagataacactgttgctcagaagatcgcccatttgctaggattgtctgttacggacatgaccagggcattcttgaaaccgagaatcaaagttggcagagatttcgtcaccaagagccaaaccaaagagcaagttgagtttgctgtagaagctgtttccaaggcgtgttacgaacgtatgttcaagtggttggttacccgcatcaacagatctctaggaagaacaaagaggcaaggagctagcttcatcggtattctcgatattgcaggttttgaaattttcgaactcaattctttcgaacaattatgcatcaactacaccaacgagaagctccagcaacttttcaatcacactatgttcattttagaacaggaagaatatcaaagagaaggcattgaatggaaatttattgattttggcttagatttacaacctaccattgacttgattgacaaaccaatgggtatcatggctctgttagatgaagaatgtttattccctaaagctaccgacaaaacatttgttgacaagctagttgcatctcattctgcgcatcctaaattcaaaaagagtgacttccgtggcgttgctgacttttccataattcattacgcaggaaaagtagattattgtgccaatcaatggctgatgaagaacatggatccacaaaacgaaaatgtggtatctttgttacaaacgtctcaagatccattcgttgtacacatctggaaagatgctgagaccataggaagagctaaaggaatgtttagaactgtttcttacttatacaaagaacaactggccaacttgatggttaccttacgcaatactaaccccaactttgttcggtgtattattccaaaccacgataagaaggctggaaaaatcgatgctccattagttctggaccaattgagatgtaacggtgttttggaaggaattcgtatttgcaggcaaggttttccaaacagaataccattccaagaattcaggcaacggtatgaactacttactccaaatgttattaacaaaggcttcatggacggtaagaaggcttgcgaggctatgattaagtcactcgaattagacaaaaacctatatagagtaggacagtcgaaaatattcttcagagctggagtcctagctcatctcgaagaagaaagagattacaaaatcaccgatcttatcgttaacttccaagctttctgtagaggtttcttgtctagaagaaactaccaaaagagggtacaacaacttaatgctattcgcatcattcaaagaaactgttctgcttacttaaaacttagaaactggcagtggtggagactatacacgaaagttaaacctcttcttgaggtcactaaacaggaagaaaaactcatgcaaaaagaagacgaacttaaacaggtcaaagataaattagaacatcatgctaaaacagcacaggaattcgagaagaagtatcagcaagcccaagaagaaaaggtcattcttcaagaacagctccaagctgaagttgagctgtgtgccgaagccgaagaaatgagggcaagattaacagcccgcaaacaagaattagaagaaattttacacgatcttgaagctcgaattgaagaagaagaagagcgagctactagtttgaataatgataaaaagaaattacagctgactattcaagacttggaagaacagctagaagaagaagaagctgccagacagaagatacagttggaaaaagttcaatgtgataacaaattaaagaaattagaagaggatttggctctgagcgacgatacaaatcaaaaattaataaaggaaaagaaagtattagaagaaaggagcaatgatttaagccaggcattggccgaggaagaagagaaagctaaacatctgtccaaacttaaagctaaacacgagtctacaattgctgaactagaagaaaggttattaaaagatcaccaacaaagacaagaaactgatagatcaaaaagaaaagtagaaacagaagtgaatgatttgaaggagcaagtcaacgaaaaacgtctacaaattgaagaactccaactacaattgggcaaaagagaggaagaattggctcaagcgatggttaaagttgacgaagaaagtgctcaaaaagctgtatcacaaaaagctttacgagaactagaaagtcaacttaccgagctacaggaagacttagaggctgaaaaagcagccagaagcaaagctgaaaaattgaaacgtgatttgaatgaagaattagaagcactgaaaaacgaacttttggattctttagatacaacggctgctcaacaagagctcagatcgaagagagaacaagaattggcaggactgaagaagactttggaagaagaggctcaacagcacgaagtatctgtaactgatatgcgtcacaagcattcacaagagctgggtagcttaaatgaacagttagagaacctgaagaaactaaaagccaacttggagaagaccaaacagagccttgaagccgaaaatgcagatcttacaagcgagctgagaaatgttggagcgagcagacaagaaggtgaaagacgtcgtaaacaagctgagggtcaattagcggaactttccgcaaaactaacagaagtagaaagatctaaggtcgaattacaagagaagacaatcaaattacagcaagaattagaaaacgtcgcccaacaacttgaaggagctgagttaaaggcatctgctgctgttaagagtcaaacaacgatagaatcacaattcagtgaagcacaggctgctcttgaggaagaaaccaagcaaaaactggctctaagttctaaactgcgacaactagagtcagaaaaagaagctcttcaagaacagatggaggaagaagaggaggctaagagaaacatagaaaaacaggttgctgtattgagtgttcaactggccgaagccaagaaaaaggcagaagacgaagccgaacaggccgccatactcgaagaaagcaagaagaaattggccaaagaccttgaagctctccagagtaaagtcgaagagttgacaacaataaacgataaactggaaagaagtaaaaagaagattgctgctgaattagaagacgccaatatcgatctagaaactcaaagacagaaagtatctgaattagaaaagaaacagaaaaatttcgataaagtgttggcagaagagaaagctgttagtgaacaattggctacagaaaaggacattgttgaaagagaagcacgagacaaggaaaccttagtactctccttgaaacgggaactggacgactctaacgttaaaatcgaagagctagaaagaattcgcagacagctacaaggcgaactcgatgaacttgtcaacaaccaaggaacggctgacaaaaatgtacatgaattggaaaaggccaagagatcgctcgaaagtcaattggccgaacttaaagctcagaatgaagagcttgaagatgaactacagttgactgaagacgccaaacttcgattagaggtcaacatgcaggcacttagagcacagttcgaacgagacatacaagctaaagaagagcaggctgaagaaaaacgccggggcattgtcaaacagctcagagaccttgaagccgaactagacgaagagagaaaacaaagaacagcagctgttagttcaagaaagaagctcgagggcgatattaaagagttagagggacagatcgaacttcactgtaaggtaaaggaagatgctctcaagcaattgaagaagtcacaacaacagtgcaaagaagctatcagggatgccgaagaatgcagagctgccagagatgagtatgcagcggcaagtaaagaggctgaaaggaaagtcaagactttggaagcggaagtacttcaattaacggacgatctcacgaattccgataaactcagaagggcagccgaggccgagagggacgaattactggaagaaattagcaatagcaataataagggtacactacttatcgatgaaaaacgcagattagaagcaagaatagcaacgttagaggaagaactcgaagaggaacaaagtactaacgaaattctacaagatagaactaggaaagctcaattgaatattgaacagttaactgctgaacttactagtgaaagatcaacggcgcaaaaacaggaatcccaaagagttttactcgagaggcagaacaaggagctcaaggctaaactggccgaactcgaaacggctcaacgaaccaagactaaggcaaccattgctgcgttggagagtaaaattgccaatcttgaagaacaacttgaggttgaagcgaaagagcgcctggcccaacaaaaaaccaatagaaaactggacaagaaaacaaaggaattggttatgcagctggaagacgaacgacgacatgcagaccaatacaaagagcaggtagaaaagggcaacgcccgagtcaaggcattaaagcggcagttagacgaagccgaagaagaagttacgagagaaaaagcacagaaacgaaaggcgcaaagggaatgcgaagatatgcttgagtcacacgagtctatgaccagggaaattaataaccttaagagcaaactgaggcgaggcactatgggcatttcatcgtcacgactgagctccacgaaacggggctccatccagaccagtggaaacggttccggtgacgattccaccacgcaggacgaggccatggatggggatgatgcccccaactaaattatttatattaaaatattgcccatttaatttttatccattaataacaacagataattagataggagtggaaataaacatttcgatgagtattaaggttagagtgacaaaatgctgaggtacacgtcatatgtcatacttcgtgtacatatacttcttaccaaactagtattgttctttattaagaccaataatatagaattattacactctatgcaattttcagattgtattgtataagaccaaagcagttttctgatttaaatgcttgcaataattgcttttctttcgtaaaatgacccatacatttatgtatactgtaaattctttatttctggatgcttttgtgacactaataatgtaacatattactgccgtgtgaattttcaatccatatggagcataattgcagagaaaccattcacttatatgtgcattcttaccttaacactactctcaacacatatttggccaaaaaattttcatttctatctaaaatcgacgtattataaaatatcattcacctagcgaaaaagtttgcttctttgtaaatacatttatgtttttctagtacttagcaagatatttataaactttcagttggatcaagacgtattttcagttgatagtatcttaaagctggtaaaaaaattattatctggctaaaaacttgttctaaaacgtaattttttcgtacttaaaaagaatttacttcaaaggtttgatgtacatatgtagtacatatatcaaaaataggtatactgatagtgggtgtgttatatatccttgaggatacttctatttatagttctgatgattaatagcttgtttgattggtgaaaaatgaaatttaatgctaatttacaagtttctactataatactaaaacatcgtaacattgcagaatataattatactacagtcacaataaagatacactggaaataaccaaaccacgttgaatgttcgaggagcactcccaaatcataatttataatgtatatacatacattgtaaatcccaaatcatgatttataatgtatatacattgtaaatcatgattcgggagtgctcctcgtaacgttcaacgtgttttggtttgtttatttctggtgtatctttattgtgattttagtataactattggtttattcggtattaccatgattcgattatatttctttcggattgttggcatttaggaaacgtaagaatattctgattacttttttcatgtttcgtcatcctaattatttattcccctttattcgccaattattttatgtaattatatattctagttactgtaatcagttacagtttttatttactgaagtcttgataaaccttcgataaaacgtggattataattgcttcccagcatcaagccagtcgtgaaataaagccatcttgatccaactttacttacagaaaattggccagaagcatttatttactataaggggcctaccatttaatggatttattggtaaagctggttctttcaatctaaaacgaatgggctagcgtacattatttttttacatattgaatttttatgttttaagatttttatttatataaacttcatcttgatacttattttgatttaattatctacgtactttttagtctgatgacgagtatttttcttaattgggtaaagttatctttatcgcgtaccaataccaattattcttttaatatatttcatctttacatacttcgaaagtatagtcaatgctaatgtaataatatataatgaaaaatagtatagacattaacattttgatacacaagtatatttgtagagtatatattttgtaaagacatctatattttagtcgaaacatgattttgatatgcatgtttttgtataaacaacttcttgcattttgtaaatatctttaagcgtaattatgggggttcagggctcattttcattattctttgatgagttgaataaaactatatctacatcat

SEQ ID NO: 6282 - DNA, 8032 bp, Diabrotica virgifera
  SmartBlast Evalue=1E-130; Info=Malate dehydrogenase n=1 Tax= Culex quinquefasciatus RepID=B0W5T5_CULQU
aggacgtcctttgacgacttatcaggtttaacgtgaaacgtgattttattaatttcatcatttaccatttaaaagtggaagtgatatccccggcgaggactatttcttaaattatattaatttacctcaatttatatctataaacatgccgcaagaaccaattcacgtagtcgtaactggagccgccggtcagatcgcatactccctactgtacatgatcgccaagggagatgtcttcggccccaaccaaaccttagtcctccgccttttggatatcccacccatgatgggcgtgttagagggagtcgtaatggaactcgccgattgcgcccttccacttttaagagaagtcattccaactgctgatccagctgtagcatttaaggacgtttcagctgccttccttgtaggagccatgcccaggaaagaaggcatggaacgtaaagatttactcgctgccaacgtcaaaatcttcaaagtacaaggtgaagctttagacaaacacgccaaaaaagatgtcaaagtattagtcgttggtaatcctgccaacaccaatgctctaatttgctcaaaatacgctccctccattccaaaagaaaatttcacagctatgaccagattggaccaaaacagagcacaagcgcagattgcagccaaagttggtgtaccaatcgaaaacgtaagcaatgtaatcatttggggaaaccactcatccacccaattccctgatgcttcccatgctgtcgttgttgttgacaacaaatcggtacccgctgtagaagctgtcaaggatggtgaatggctcagaaatgtattcgtttccaccgtacaaaagagaggtgctgccgtcattgctgcaagaaaaatgtcttccgctatgtctgctgccaaagcagcagctgaccatatgcgcgattggttcttaggcacacctgacaacaaattcgtgtctatgggagtattaagtgacggtagctatggcgcaccaaaggacgtcgtcttctccttccctgttaatattaaaaatggcaaatggcaaattgtccaaggtctccaaaacgacgacttcgccaaaggactgttggccgtcactggaaaggaactggaagaggagaaaaccgaagcgatcaccatcatcggagcatgactagctaacaaactttagaacgttaaacaaaaagaaataagtaattttgcctgaagtatacttgtatgcttgcaagtagtgagcacagaagtagataagcattatagataaaattcaattgaacatcaggcggggtcaatcgatcaacattacatatatacatattgtaaaaaaggtactattttaactattttattaaagaattctttttgtagttccttgtattcattcagatgtataattgaagtagttgtcggcggttgaagaatatgtgccaatgatatttgctactaccaaaagtatcaatctttctttccaaaactggttaaagatcctatttaagtaaaaggaataaagtaaaggacttacaatcaatttattctacctacgacgaccggtttcgcatactacaactagctatgccgtcctcaactaaaacgcggtatctgcaaaaaaattgaaaattgctatatgtggtttccttgtgaccttatttatgcttctgcaatgtctgaaagccgtataattttatttaatatcaaaataaacaaattggaatatgccgtatgtgctaaatttcaatagctgcttaattaaaatgcggtatctacagagtactcaactaaaaagcggtatgtactagcgtgtatcatgtacttgccgcgtttttttatactacggcgttggccttttattaatttcatgacctagttgaggctcgaaccagcgatcgcaaatcgtaaatccactaaatttgtcgatcgactgcgcctcagctaactagaccgtgtagaccgaccgtggtaactattcttccttgtaaaaaatcctatttttaaataaaatccagatacgacactatttctgatccagtaatatgcccgctgctcaattaaaacgcggtatatgactttttatttacagctttgataaaacgtgatttttttaagaatatatttttaaataatgttcaactatcattagaacatgttttgcgttaaaaagttctcaaaacatagaatcctgtcaaaactcggttgttgtcatacagtaatgtacaataatataaattatgcctatattataagtgttaagttacactattttaagattgtatgaatgttacttacatcccgatacaaggagtgttgtttttttggaaacttacttaaatacggcaaataagcaaaaggaaagaagaggcatatagtccattgaatataaaacgtgagaaaacttatctcatgcttgattgcatattttatctatgaggagtattaacttctgccgaacgtaatcattgcgataatgttaagtttgaaaatatttttatttgtaaaatcaaggtttttaagagtttgacatcttttttatttcttatcattctattctttacaaatacaggccttagtttttcctttgtatattattatattatgaaacattgaattagtcagagcactacgaagagctttgaccatgagaattgtaactgagagaacaatattgaatctgatcaccaacaaaatcggtccagatccagtgaagacagagattcaagagaaattgcaaagattatgttatttagtggttgggttaggtcgcagatctggagtgtgaattaatcacaccagggggcatcactgtacattacaagacattgcgtcacactaacagtaagattgacaatccaggcagctaattttggggaactacacagacacttaacaaataatggttgtttcctcgtatctcattaaaattgatgtcattttcgcacagtgtggccaaatagtagagaatatacaccattgtgaaataacgacatcgtaagtttattattgttttgttcagaacaacgtaatgaaaaattgtatcaaaaagaataattatgtaatgtcatgaaaaaatttcgttattaaatctaaatacaaaacaaactgctgctaaaaatactataaaaagtattcatataactaatattttgatatctcttataatgtggatttagagtttacaagcagttgactgtactgtgacgtctgtatatataaaatgtcattcatgacgttcaactaaggacacaatgtattgatcatcgttaagctatcttacggctctcacgttgttgccggaaaatattactcacatcgttttctgttctttctatcaggttatgagggatcaattctcaaaaattccgtttaaaacaattttgagagcctttgtaagtccgtttaaaatatttctttctgcaagctggatcagatcttgtccatactgaagaaggtaatggaagttcataaaaataactcaaactaataatcatccttggatcatttttaatctaaaagttggatatcaataaagattttaataacaaatattgtatttttattgaaagatcattaaatcaagaaatgtcgaagaaaagactcatgatcatttttcttcttcttcaggtgccgtcctcgttccgaagtttggctatcatcaaggctatgcgtatttttgataccgtagatctaaataattggcagctgctgcacttgtaccaatctcttaaattcttcaaccatgaatgttttcttctgccaatggatcttttacctattatttttccctggataattaattgtagtagctggtacttttgtcccctcattatatgtcccaagtattgcagtttgcgctttttaatagtaagcgcaagttctttttctttctgcatccttcgcaacacttccatgtttgtcactctctctgtccacgatattctcagtatcctgcggtacatccacatctcgaatgcttctattttccttgtatcaatcttttttagtgtccaagcttccattccatagaaaagaactgacagcacgtaacatctcatgaggcgaattttaagatttaaacttagctctcttccgcataaaaatgatccgatcatgatcattatgatttcctaatttctcaagaccactgttccataacttcttatcaaagtccttgtaattacctattatcaaagaagatgtaggttatctgatgttcatgaacattgtaattgaatgattttaacgatgatctttaaaccctaaactactcggttcaacattttttgttttactgtttttttttttcttgggactcagtagggttaaggtcaaagagtaaataacatccgctatgcagataacactgttttgatgactgattcggaccatagtctccagatactgttaaataggcctactgagagttgtgaaaaaatggggatgaagaccaatactgcgaaaatcaaagttatgaaaatatgaagggtacacgggaaaaaccggctaaattccagtttgcatcttctgaaacctttaaacaaggcaataacaagacaagtcaggagaaaaagcccataaatatatgcccatacacgagaaaaataagctaagttcacgcggtacaggataataacaagctaagtccaaaatatcgagacgcgacggcttcctcatttcggtatcaatcagacggtcagtcgtgacaaggccacataaacagaatgttattttattttcttaatacggagaattaacaaattactataaatcagttgtttttttatttaacaggggaaaaagcggctaagtcactaccctttaagatacaatgctcgattcccagggctaaaattattatagcacagttaaactattcgcagaatctgaaaagtataccttcttttatagtttttttattagaaatccaagactcaagctagcgacaaacacacaacggactaaaagttaaaaaattcaataactcaaaattgttaatctgtgacaaccggttttttccgtgtacccttcatatcacttaacaaaaatttaccccttccaatatatgtatgtgaaccaccaatagcttgaatatgtagactaatacagatatcgctgctggttcaacaatcaacttgattataaacaagaagtaagagcgagaatacaggtagcccgacaaggctttatcaaaatgaaaagcctattttgtaacagtagcattaatatcagccttagatgtcatttttgtatggaacggaggtctggacacttagcataacgctgatgaataagttagaagcctttgacctctggctttataggagaatcttgaaaataccttggacaacccacaccaccaacaaaaatgttctgaggcctggacgcccaacataacgctgatgaataagttagaagcctttgaactctggttttataggagaatcttgaaaataccttggacaacccacaccaccaacgaaaatgttctgagaagaatcggtacagataggcagctgctgaagatcatcaaagttagaaaagttagttacctgggacacataatgagaaacgaaaagtaccgcctcccgcaactgatcatccagggtatgattgaaggaaaacggggtcccggcagacgccagatttcatggcttagaaacatcaaagactggaccggcctttgaataaacatctttgtttaatcaaagactgattaaacatctttgtttagagccacattggacagagacagatttgccagtgtaatcgctaacctccattataggagacagcaccacaagaagatgactcggtagcccagataccagggcttggtttaaaaagaaactcgaaagtcctagttgcagttgttacgaatatcaatgctatttatttcttggttatttccaaaaatcatttctgccagactgtattttttaaaggttttcagtattatctattagaaaaatccacaataaacgtttggtagttacgtactatattatttactggatgcaagccgcacaaaagagacacatatggaaagcgctgagagagacctatgtccagcagtggacgcgtacagattgatgatgatgatattattttactctcaattcttaataaaattgagccattccacagtatttaattattaggattttggaattgtttaagtaattcgtatccaactctatttacagtttctccccaatgattatcagtttctgtttttacgtactattacgtattattattttacgtacattagaaaataataaagttctacggaagaaagataatcactgaatgaaaaatgaaaagggacctattttcactgtggaaaccgaatatcgaagaaaaagaaagtacttagtccataacttccatgagcgaggaaaagacagcacatttctacaatctcagacattcctaaaacagaaccgttttgcgaacgaaccaactatcttatagcaactagcataggcgtaaccaggggggttttgtaatatttaaatgatttgtgaaggttgcataaaaaaccgtaacacatcagccaataatgcgaacaaagtgtacaaatggaagcgatcagtcaaaatttgatctatgaacggttcattttgcgtgtctcgcaaattttcacttgcttggaggaaatttggtccagttttgcaagaagagagaacaaacaatcacaatctgcaagcactcagtgaccagtataatctcaaatgacttttcaaaaagtttaatctcggtcaccacattaaatcaatatctagacatagaacattcttatgactcaatttgtgacacatttgatgataaaatactatttctacaagttctaaaaacgagaatggttcccttctggatatgagatcaaatgaaaaggctgactaataatgaggtagtaacacaatctaaagtaaattaaagactatagaccaaccataaatccactaactgtactggatccaattatggcaatttttaagcgcgaatcactcaatgtacataatatacacattacagggaaattgaaggcggaaaactgtttaattttctctgtaaaaatgttttctggttctaaaattaaaggaaatttgcaagtaattgtatttttgttactaaaatcaattttaaactcggctaagatatttctaatttggttgtaagaactatgctattagttgttcctacaaaatactgtggaaatatatagaagactagaaaaatgtcaaactctatctactacaaaattttaattttttgtttaacgttttaaagtttggtttacttatattttaaattaatttcccaacatttgtattcattattataccactcattgttgcgaatatacagtaaccgccacgctactagacacacgggtacattgagctaatacagtcctggatccttcacttgtttcactttttacttttatatctagtgacgtctagaacgtcagaaaatgtttagaaaccaatataaacatagaaagttgacagtttatactatatagagcagttgtatttgaagtttatagttgtcactattatgttaaagttttaaattttataaagtattgtaataatgttggtgtttgaataaagttttattaaagtatagagtaacactactattaattaatgtatttttgtatggaaaaacaattattttggatagtttcatgacagtcacatgacatgacagacgtgaaagtcatagatgagaacgggcgtgattagctcaaacctatcaattaggtatccgtgtgtctactagcgtggcgcttaatgtatattaaattttatttattaataattttccgaaaaattgtaacttttaaaatgtatttttattagatgcaattctaacaaacatataagtaattggatacaaatgtttggaattttgattattttgtatatatttacatttatgcagcatttatgtgtttgggtaaggaatttttgttcggtttaggttttattatagttttccattttatattttaaaatgttctcttcaagcaaat

SEQ ID NO: 6283 - DNA, 7703 bp, Diabrotica virgifera
  SmartBlast Evalue=0; Info="Fatty acid synthase, putative n=1 Tax=Pediculus humanus corporis RepID=E0W0Z3_PEDHC"
aaacaaaatattttaatgatctaagtaaatttcttaatttcttatcacatgtaacagaaaactaactgtgacgatgaagcaagaggtcaagcaacaaaccctgcgccatcaccagagttccatcaatgtcctgaatcaaattctttggttataaacagacatacaaaaataaactcactctccaacgtaacttttcaacgtttaaacaataaattaactacaaaatattcaaacaaactaacctactatttacaactataaataaaaatgagaatcttatcaaaaattggacccaaaaaaataaacattcacaaaaaatatgtaaatgaaaataattaaaagagttagtagcattttcacgcttggacgatggtatttaaaatactagctattttttctgcactgctacctactaatatgcttcggtgattgcctttcaatgattcgatagctaccttttgtgtgcatacctctgataggccataatcttctcccatttgaacatagttgtcaatagctttaactaaagttactcttccgttgaattttccgcttggaacatacttatcagcagctgccaatttgccgtagaaactggttgcggcatcagcaatatcttctttcttgtattgggtaacttcggcgacgatggaagttgctctagcaagtctttcttcccacgattttagggccataagttcgccgaaaagcttttgctgatcgacgtccttgaattgcaagataaagtacagtagtacttcgctttgttcagctactgtatttccttggatcttggtattctttgcttttccggtgtgagtagcaacataagagtgagatccatccaacaataagagagatactctttccttactcttttctaataagattcccatttcgatggcgacactggcaccaaaggagtaaccaatgattgtgtatggtccttttggttgaactgatttcatcaagctaatgtaatatttggctaagtcagttattgaagtgagtggagtttcagcagtacattgcagaccataaacaggaatctcgatgttctttgacaagttttctagagcatttactactccctcaattggatgaataacaaatactggagcctttttgctatctgaacctttactattcatttgaactaatgattttttgggcataatatcggcagacttatcaaactgaacattgttatcttgagctggtgagctttcagttgcagctcctcctgctggaagagctcccccgtcgctcaattcgactaatcgcccgaaagtaagggctctaatttcttgtgcgctaagtactaaatcatagtttctttctaaggtctgtttaatttcagcacccataagggaatccataccaagatcagctaaagtgttgctaggtgctacagtgttgggatctttaatacctaaaatgttagctacagcgctggtaagactaacttggctacctcctgcagatcccttgtgcttgtcagcaagtaccatactggcaacaacagaatgaggttgttgcaatagaatatccattgtgtttaagcaagaagacattctttgaggtaaagtacctccaacttcagtgtcgtttcctcccatggtttctaggataagccctacatcaccaatagctccccattgaattgcaataccaggtaaaccaacattctgtctggcttcaacaatacgttccatggcagagttggctagaccgtagttagcttggccagcgttaccacgtccacatgaaactgatgagaagttaacgaaatagtccaaattgttcgccatttctctggaaaccatatctaacattttgctgccgtcaacttttggtttgcagacagtcttaaagtcagcttcagattggttttccatcattgcgtcacgcaagactactgccaggttaaagattccaccaacgggtcctaattcactggcttctgtaagaagtcttctggcacctttgtcagttgttgcatcggctgtagaaacaagtacgttcacacctttttctctccatcttctgatacatagtgattggtatccagttttaattccacttctggaggtcaacaccattttcttggcacctctagtaaccaaccagttggctaattcaagaccaaatccaccaagacctccaaccaaaatgtaactcttttcaggatccatgtatgttctgggaatagcgctgacagtcttaacagctgggcgagtggcagttttaggttcttcttctcttatttggagcaaaactttaccaatatgtttacctgaagccataaatctaaaggcttgttctacttggtgttcattgtatacagtctttggaagtggccttacagctccgctcttaattccttcagttaccaatctcattacttgtctcttctgaggactgtctgaatcaaagagagcgtcaagaaggattccgtggaaagtagtgttcttcaagaagatgctcattcccaacgcagaattgttagaaagatctacttttccaatttccaagaagcgaccaccaattgccaaacatcttacagaagcctggagttggtgagcagccaaggagttcagaacgcaatctactcctctaccatttgtttggttcataatcatttgttcgaagctggtgtcacgggagttgccaatgtgatcgtctttgagttgtgggaaagtcttctttaagaagtcacgtttagcttggctactgacagttgtaaaaacttcgcatcccatgtgtaaagcgatagcaattgaagcttgtcctacacctccggtaccagcatggactaaaagagattctccaggttgtaaacctcctctaacaacaagggcatagtagctagttccgtaaactacagggattgttgcagcttcttccaagctccatttttcaggaacttcccataagaaaccgggatcggctaaaacggtagtagctaaactcttcgctgcaaccattcccattacacgtttgccagttgagttgcgtccagaaaactctaaaccgagaatgcaatcttgaccagcaagatcaccaggaagtgcgtctgggggcaattttcctgtggcaagcataatgtcacggaagttcagaggagcataatatacgttgcataattcagcattaggttggtcatccttgtaatatcccagaggtccttcgatccatctcaaactagccaaatctcctctggttacagtgttaatgtaagcatgttctacttgaagttttccgctatcttcaaagtgttcaagtacaagatgtctaaatgatccccacaccttcttccttaagacattgtgcactagatccttcctaagttgttgttcgtatgcagcaatagtgaacttgggtgcattagtatcttgaatgaaaacagctctcatgttagaaccaccaggttcttgttttaagcagttcatcataccgaccaatccagtaagttcctctccttgaacgtaaacgtagatctttctattatcggtttcagcttgtttcatagcatctttcaagggttctacccaactgaagttgttttcggtaacctggataacggtggcatcagtaggcacagtgattggtttacgcaaaagtaaatatactttcatatcgcttatttgtctgcttattaattccaaaccactaagaattgacatatctggagatcccttaagttcctctattaatacaaaacctcctgccttaagtgattttactgcgttgtctaatacggctcttcgtttatacatcaatatgtcactcaatacaactaaatgaacgtcttgtgctacttgtgatgaattaacatcacggacagcatgcttaatttcatttgcttccaaagattcggtatcaataggtcctgatgtaacaacagtaacatcagttgatagcataggttcagattcaataatatttttgagagcaatagcaagtacagattcaactggtttgtcattcgctacttcagcaattttgatcttcatagcgccagcactattttccataacagtttgtgcgatgactgttaacgcttgcattttgttcttttctggatcctcgataagaggttggttgttctcgtatggtacgaactgatacttttctagttttggtgctgattgggcctgttgacgtcttggagctaaactagctttcattccacggagctcgataccggcagatttgatcacaccgatgttacggtacatgtatacgggtaggctttctccttctggaaggccttgaattgcttgcaaatgttctttggggttaataacaattctttgtaatcttgtaggtaggtaaagttctctagtattttgtccaagaatggagaattgtaacatggtgtcgataaagctgatccagttgttgtcccatctaagttttccagccaaaccatggttgtcagattcggtgatacctctaaagattccttcataatcgtaacccctgagtctaagttctttgtagatgtcaagagattccagaggtaagacatctttctcgtttctaactacaggctttggtagggtgagcacttctttgctgacatcttctggaacagatattttaccagatacagcaacggagcctccttcgcagagttcgaattctcctgttccttcgaagatgttaataaggaatttaactgaaccttctttgggcataatggtggctctgtggaattggacatcttctagaataactgggaactgctcgtaatcttcgttcctcaatttggcgaaagttttccatacaagagtcaaatatcctgtagctgggaataaaactctgccgtcaatggtatgcccctcaagatatttgtcttcttctttactaagatcgatgtcgacaactaactctccagatctgtttcctttactagcgaagttagcaacggaccattcgatggagtgatcccattggatcatggagttgatcatgggagtacctttaccgactgggaagctgacggggtggtaaagatttccgaaacgaggttgggctccagcggcgaaaatctttccaagagctgccaaaaggaattccatattgtcagcatgtcctcgctttacaagactaatgttggtaactttagctcctaaagctctcttcaaaatagcttggagaagtccagtaggtgcgatttcaatagcaattgcattttctggaacgtgctgtaaagcttcatggaagagaacaggcgaaagtaaattgttaacatggtaggcagctgagctttgtagggccaaaggagtaccccaaccagattctggaattgaagatgagatccatcttggtgatcttggttttgggctaggaatgattgcttcaagagctttacgtaactttggaccagcatcggcaatgtatttgctgtggaaagcgattccagaagatttaacacctttggcgaaaatgttttcagcttgaagttctgcgacgaatttatcgatggcgtctttgggtcctgagatagttacgctgtcttcactgttatggcaagcagcaatgatctcagaagggcaacgacgtttagcttcttcccatgttagtcctactgctgccatacctcctgggataagtttactttccatgatagcacgacctcttgagtaggcagctaatatagtttgttcgggtgttaaagttccatcagcataagcgcaacccacttctcctacggaatgtccaacgatgacatcgggttccactcctacagttcttaagacatctgtaagagcaatttgcatggcggcaatagatacaaaagagttcaaaacgttatcgaatgtagcttcacttccgctgataatgatgtcttctaaattaagtccgtgaggttttagagcatcagaacatcttttaattgagtttttaaaagtatcgagctgcattaagtctcttgccataccagaccattgggaacccatgccagaaaatacgaaggcaatcggcctgtcttctgatggaagttgagatacttctttaacggcattattgtttaaaacagcataacccctgtatgcatgaccgttgatgtttctgctgtggacttcatcaacaagtgccaaaaattcttcatcgtttttatgttcttcaattttgttcaaaaagctgttaactgcttcttctgtacgtcctgaaactcctacaactcttggtactgctcctgctggccatgtggttttgggtttggggttagattttaagacaatgtgcgcgttagcacctccaaaaccaaaggaatttacagctatgattcctccattccatggttcatttttagctacgacctttagacgaccatcatttagtgctggaatgtctttgttgggactcttgaaatgtaaattttggggaatcatacctgattccatagcgattactatttttgccaacgagcagagaccagatgctggttcagcatggcccatattacttttaactgatccaatcattaaaggttctttacgatccctacagaagaattctgcaatggagttaacttcttgtggatctcctactttagtaccagtaccgtgagcttcaacatatgaaacttcgtgaggtttgattccaatttcgtcgtaaacttcacggattagtttgttttgcatatttcctgatgggaaagtaataccttgttctttgttaccgtctgtgtttgttttagcgcccaaaactgtagcgtaaactcttctggccacactagatttttgaagaaatactacaacggctgcttctgaccgtacgtagccattaccagaggcgtcaaaagctttacacataccttgagggcttaacatactaagtctgtggaactgtagagaggatgttggttttaataaaaggtttactcctcctactatagcggaatcgcattggccggtcttaatagccgtaactgcttgttggaaggcgaataaactactcgagcaagcagtatctatagcgtaacttggtccgctgaaatcgaaggtgtaagatattctattagggaacatagctctgcagcatccagttagaccgtaaccattaacttgttcggggtctcgtgtccaaaactctgatgattcactgtctgataccccgatgaagacacctgttttcgtgcctttcatctcaccggggttcatacctgcatcaaccatagcttcgtacgtcaattctaacaacattctaagttgtgggtccattacatgtgcttgtttagcatgtactccaaagaaagttgcgtcaaaatactgtaagtctttaactttaccggttctggttggtagtccatacagaccagatggccatcttctttcgtcatttgttaccaaatctacgccatcgaagagttgttgcttgaattcttcgatgctgttactttctggtagacgaccggatatacctgtgatgacgacatcgtcggtgatgttgatacccatgtggcgttcagtttcgggtgctctggcaggcattgtgtctgtatttgtattttaaactgtcaaaagtatccgtaagatcctacaggaacgtttttatcacaaaaaaccggtacacatttaataaatattgtgtattttgacaactattttcttgtgtcctggggtacacactattgactgaccggcaaagaagtgcgcttgccatttatttgccagcgctagtggttcgtt

SEQ ID NO: 6284 - DNA, 7657 bp, Diabrotica virgifera
  SmartBlast Evalue=3E-41; Info=Putative senescence-associated protein (Fragment) n=1 Tax=Pisum sativum RepID=Q9AVH2_PEA
aaaaatatagagaataatagcttatctaggctaatgtactttatattttcctttcgcaccgtagattcaacagctgagtagcaaataaaaatatatgattcataaatcatatattttgtataaatcagtgacaactgatttatatatgacgtttcgtatgtatgaaaatacgtataaatcgtagcgctctcgcagttgtactatggtttttttgctgtgagatcgagaactttacaagctttttaagtgagtggttcaaaaacgatcgaaacaacagcgttttgattgattttattatcatcaaaacacataaatgtgcgatagctctcctctttccgagcgagtatattataaaattcgtaccgattgcttctttcgagaacaccgtgtcgctttcaatctagcgaagggttgagagaatgttgaattttttcaccggatggcgtaaaattgtaacgtagatccgcttaaatcattctgaaaattttggattgatctgaatgggcctttatcgttataaagtcaaccggacatatatagacttaaatgtatgtaactattttgtcatataaattttttcgtaagcgtggcgtttgaaagtatatctcttcaaacgcaaataaacacgcaaacgaaaaagaattatgatagattaggatacgtttgtctttctcttattaaaaactagaggagactgattatctattatctatttcgttctttttcgagtagttaatacaacagctccctggttgatcctgccagtagtcatatgcttgtctcaaagattaagccatgcatgtctcagtacaagccaaattaaggtgaaaccgcgaaaggctcattaaatcagttatggttccttagatcgtacccacatttacttggataactgtggtaattctagagctaatacatgcaaacagagctccaaccggagacggaaggagcgcttttattagatcaaaaccaatcggtggcgggttcgctcgtcatcgtataacttggtgactctgaataactttaagctgatcgcacggtctcgcaccggcgacgcatctttcaaatgtctgccttatcaactgtcgatggtaggttctgcgcctaccatggttgtaacgggtaacggggaatcagggttcgattccggagagggagcctgagaaacggctaccacatccaaggaaggcagcaggcgcgcaaattacccactcccggcacggggaggtagtgacgaaaaataacgatacgggactcatccgaggccccgtaatcggaatgagtacactctaaaccctttaacgaggatcaattggagggcaagtctggtgccagcagccgcggtaattccagctccaatagcgtatattaaagttgttgcggttaaaaagctcgtagtcgaatctgtgtcccacgtcgctggttcatcgtacgcggtgtcaactggcgtgtcgtgggacgtcctaccggtgggcttagctcgcaagggcggtccaactcaatcccgccgcggtgctcttgactgagtgtcgaggtgggccggtacgtttactttgaacaaattagagtgcttaaagcaggccaaaacttcgcctgaatactgtgtgcatggaataatggaataggacctcggttctattttgttggttttcggaaccccgaggtaatgattaataggaacggatgggggcattcgtattgcgacgttagaggtgaaattcttggatcgtcgcaagacggacagaagcgaaagcatttgccaaaaacgctttcattgatcaagaacgaaagttagaggttcgaaggcgatcagataccgccctagttctaaccataaacgatgccagctagcgattcgccgacgttcctccgatgactcggcgagcagcttccgggaaaccaaagcttttgggttccgggggaagtatggttgcaaagctgaaacttaaaggaattgacggaagggcaccaccaggagtggagcctgcggcttaatttgactcaacacgggaaacctcaccaggcccggacaccggaaggattgacagattgagagctctttcttgattcggtgggtggtggtgcatggccgttcttagttggtggagcgatttgtctggttaattccgataacgaacgagactctagcctgctaactaggcgtatttcgacatcccaaaggcccgtcggtggagtttcctgctcttgctgcacgcggtttttactgtcggcgtacacacaattcttcttagagggacaggcggcttctagccgcacgagattgagcaataacaggtctgtgatgcccttagatgttctgggccgcacgcgcgctacactgaaggaatcagcgtgtcctccctggcagagctgtccgggtaacccgctgaacctccttcgtgctagggattggggcttgcaattgttccccatgaacgaggaattcccagtaagcgcgagtcataagctcgcgttgattacgtccctgccctttgtacacaccgcccgtcgctactaccgattgaatgatttagtgaggtcttcggactgagcgcggtggcgtttcggcgtcgtcgatgtttcggaaagatgaccaaacttgatcatttagaggaagtaaaagtcgtaacaaggtttccgtaggtgaacctgcggaaggatcattacagtgttgtcaataaacgacaagtctgtactaaattatttcgaactgttaaaataactgacgttattatctttgtgatcgtagaataaaatgttttgatataacaaaatatctctcgacaatatattatatcgggtacctaaaatatttcggtggtgataaagattttcgcccgattgtcaagagatcttagacttaaacgtaatttcttgatcgctttaagagaggaaattcgtgtatagttttttggcacacctcgtttgctaaacatgtgtgttgtgctatttaaaaaaaacctaatatacctccttttttaatttggctaaatatacttatcattttacataaaagacgttgttttcgtacttaaataaacttttatgtttaaattttcgaacggaacgcgtctaatttaaacgattaccctgaacggtgaatcacttggctcgtgggtcgatgaagaacgcagctaattgcgcgtcaacttgtgaactgcaggacacatgaacatcgacatttcgaacgcacattgcggtcctcggatactcgttcccggaccactcctggctgagggtcgtatctatttcaaagactgctcggttttcttatataggaaaacgtcagagcgtgttggatgttatcgtgtgtgtatatgttttttatgtatatatgcgacatcttaaaatacgaaagtaacgtatacaatccaattggaaattattacgtattttgtacacaacaattcgtttacaaacagaattaatattcacacatacaaaaaaaatatttgtttgactggtgaaaactaattgtttgcacgatcgtcgtgtccgagaaaaacttcttttgaagatgacgtctgatctgtgcctagtttcaacgcctgtttataacgaatgtatgtatgtgggtgaattttgttgtgaggaacgtgtgattgcgtacaaaattttaaatttagatttatcgacctcagagcaggtgagactacccgctgaatttaagcatattactaagcggaggaaaagaaactaactaggattcccttagtagctgcgagcgaacagggaaaagcccagcaccgaatcccgtggcggacatctgtcaccgggaaatgtggtgttagggagggtccatttatcccgagatcgtgcggtgcgtccaagtccttcttgaacggggccacagcccatagagggtgccaggcccgtagtgaccgttgccgattgcgggaggatctctcctcagagtcgggttgcttgagagtgcagccctaagtgggtggtaaactccatctaaggctaaatatcaccacgagaccgatagcgaacaagtaccgtgagggaaagttgaaaagcactttgaagagagagttcaatagtacgtgaaaccgttcaggggtaaacctgagaaacccgaaaggtcgaaagaggaaattcattcgcgtttcgactgtcgaagttggatgtttgtatgacggatagcgtttcggcgtcgtccgcttcttatattcttcgtgtcgatgtcgaacgcgtgcacttttcctctagtaggacgtcgcgatccgttgggtgtctgtctaagactcgaggtggagcccgcgtaatttttaattatgcggacccttgatgttccgacagactcgctcgacggtatactaatggcgcagggccgctacttcagttagcgttcggcccgtagcaagcacgttctgtgtttgatggcgatcggacctggtgccgattctatcccagaacgactgttggttacggtgttctcgaacagacctcgtatgaaacgccgatcagcgacgctctagatttgggtactttcaggacccgtcttgaaacacggaccaaggagtctagcatgtgcgcgagtcattgggatataactaaacctaaaggcgtaatgaaagtaaaggtttaccttgcgtagatcgagggaggataagcggtttgcccttaaaagttgccgcttcgcactcccagagtgtctcattctcattgcgagaagaggcgcatcaagagcgtacacgctgggacccgaaagatggtgaactatgcctggtcaggacgaagtcaggggaaaccctgatggaggtccgtagcgattctgacgtgcaaatcgatcgtcggaactgggtataggggcgaaagactaatcgaaccatctagtagctggttccctccgaagtttccctcaggatagctggcgctcgttccgtacgagtttcatccggtaaagcgaatgattagaggcattggggtcgaaacgacctcaacctattctcaaactttaaatgggtgagatcttcggcttgctcgaacttatgaagccgtgagaaacgaatcagagtgccaagtgggccatttttggtaagcagaactggcgctgtgggatgaaccaaacgttgagttaaagcgccaaaatcgacgcttatgggataccatgaaaggcgttggtaacttaagacagcaggacggtggccatggaagtcggaatccgccaaggagtgtgtaacaactcacctgccgaagttactagccctgaaaatggatggcgctaaagcgtcgtgcttatactcaaccgtcagcggcatgtgcggttcgttaatagcgactatgaagccctgacgagtaggagggtcgcggtggtgtgcgcagaagggctagtcgtgaggctgtctggagccgccatcggtgcagatcttggtggtagtagcaaatactccagcgaggccctggaggactgacgtggagaagggtttcgtgtgaacagccgttgcacacgagtcagtcgatcctaagccctaggcgaaagccgatgttgatgtggtgtagctttatttacgtacattttatgtaaaaagattgtacacacccattgggcgaaagggaatccggttcctattccggaacccggtagcggaaccgtcaaaaagtcgggccctcgcaagagagttcgtcggggtaacccaaaaggacctggagacgtcgtcgagagatccgggaagagttttcttttctgtataagcgttcgagttccatggaatcctctagcagggagatatggtttggaacgcgaagagcaccgcagttgcagcggtgtccggatcttctcctcgaaccttgaaaatccaggagagggccacgtggaggctcgcaccggttcgtacccatatccgcagcaggtctccaaggtgaagagcctctagtcgatagaataatgtaggtaagggaagtcggcaaattggatccgtaacttcgggataaggattggctctgaggatcggggcgtgtcgggcttggcgaggaagtgggtcatggctgacgtgccgggcctgggtgaggtgaagtgagcctaattcttacgagttgggtttcatggatccgagttcggtcccgtgccttggcctcccgcggaaccgtcttgctgcgaggctctgagttactttcgggtgcttggatgtcctcttcggccgccattcaacggtcagctcagaactggcacggactaggggaatccgactgtctaattaaaacaaagcattgcgatggccccagcgggtgttgacacaatgtgatttctgcccagtgctctgaatgtcaaagtgaagaaattcaagcaagcgcgggtaaacggcgggagtaactatgactctcttaaggtagccaaatgcctcgtcatctaattagtgacgcgcatgaatggattaacgagattcccactgtccctacccactatctagcgaaaccactgccaagggaacgggcttggaaaaattagcggggaaagaagaccctgttgagcttgactctagtctggcattgtaaggagacatgagaggtgtagcataagtgggagatggcaacatcgccggtgaaataccactactttcatcgtttctttacttactcggtaaggcgaaacgcgtgcgtcgttcgctcacgaggctgcgactgtcacggtattcttgagccaagggcacggagtgacgtttcgttgcgttgtgccgttcgtcggtttcgtggttccgataaggcttgcctttcggatactcggctagcgtccgtgtgcttcgtttcgagcgtcaacttacctccagcctgattcgattcgaggacactgccaggcggggagtttgactggggcggtacatctgtcaaagaataacgcaggtgtcctaaggccagctcagcgaggacagaaacctcgcgtagagcaaaagggcaaaagctggcttgatcctgatgttcagtatgcatagggactgcgaaagcacggcctatcgatccttttggcttgaagagttttcagcaagaggtgtcagaaaagttaccacagggataactggcttgtggcggccaagcgttcatagcgacgtcgctttttgatccttcgatgtcggctcttcctatcattgcgaagcagaattcgccaagcgttggattgttcacccatagacagggaacgtgagctgggtttagaccgtcgtgagacaggttagttttaccctactgatgactcgtcgttgcgatagtaatcctgctcagtacgagaggaaccgcaggttcggacatttggttgacgcacttactcgagcgggtaatggtgcgaagctaccatccgtgggattatgcctgaacgcctctaaggccgtatcctttctagtcaaaggtggcaacgatatctcttggagttccgagagtcgaaaggctcaaaacaatgtgactttactaggcaatcgtagttcgctacgactgtcgcacgagcccttatttccgttgagattatcggtttacggtgggatcgatccttgccagtagaccagatctttagacggacgaacatgggtattataatcttttcgatgttggaactcggaattgtctgtagacgacttacgtacctggcagggtgttgtacctggtagagcagtttccacgctgcgatctattgagactcagccctcagcttggggattcgtct

SEQ ID NO: 6285 - DNA, 7455 bp, Diabrotica virgifera
gcacatcactggttgttaacctaatgtttttgggtcatgtgtggacatattctatctgttttatgagttcaaggaatggctttataaattattcatcgctttctagtaaatccatgaattctttgtttttatcaatattttttgtctttttggcttttatttgtaatgttttcacttcctttgcattgttttttaggctagaattaatagctttcatttctttatcgtcatcagtgtcattctctccgatatttaaactttcatctagttcttctgatattgtgttatctttacttgttgtatgttctggactggttgatagtggttcaacactggttgtcgtgctatctaatttattttcaaattgttttattttcttttccatttcttccattcttctaaccatttcttcaaatgtttgtataggaagctttaccatttctgattgttgtacttgtttatctatcacagatttatttattttattatcagttatatttccatcatcttcagaactgctaaaggcatatttagacctcattgttttctttctttcttcaccgccactaccactactagaatcttctttaatagatctagcttcatttatcttcatattaactctcatttccattctactcctcatctcttttctttttttcttttttattttatctttttcttcattcattacaacatcagcccagtcacttgaactgccattatctgaaacacttaagtcttctatcaaccaatctatatcttttttcgatattatttcacataattgtgatatctttaaaatgtattcatctcttatgtctcttgaaacagtattctttattacatctataacagctttatctttaaataacttttttagactttgtctttctacttcatgacttaatttccaataaacattgtcattgtcattccatgtattgatggcataaatagtgctatttaatatatcattttttgtcaaatttctttctaattctgttatataagttccttttatactttcgtcatcactttttgatttagtagatagccatgatattattaattcacttgttttctctagaaattggtctattgattcttttgaagttctagttattttttccattttattcattatttttatgaattctttagttagtatgattaaagcagctatattgcttaaattaacattatgatataactctttcctctttttatattgtgttgataaaaaactgttttctattctttctgctatattgatattttgtagctttgaattgccaatatctatatcactatacatatcttcgtcatatatttctacttccattatatcatcggctgtttttactttgcttatatatcttagtacttcttcagtgtttcctaaatctaattctatgttcacttcgtctatggtcatctctttgaactccgtttcaattcctactatcctcttcatcagaaacattaaattattacatatcataacgtctaagtcgttcacctcacaaaataaggaatatattttgtcctcagtaatatcctctatatttcctcttattatatctagcaggcaatctagtttaatatatttattcaactgtattcccatcaattgttcatcacttacctctagtttgtgtgttttggattctttaactaaaaatggcagcttgaatacttttacagtgttatcaactattcttgtagttgtctttcttgatatttcaccaattatatatccagttttataatcaactctaatattgtttatcatcttaatattccttcctgctggcctcaatctattatttatttctattggtatctggctttttttcatcctttttttataactgtctgtctctatttgattcataagtctataagtgttcatggctctccaattgctattatcatatctacgtctttccatcatgacgaattccttaccttcttctgttatatataaatttgttgtatcattggtggtatgaaacatgtcactcattaatatatcattgtatcttcttagctgtctatatccaggaaattttatttcactaccaacaaagtataataattccattatcttatctacttctcttgtgtttgattctactataaatatatttcctggttcacctttgattaatatcacacttccatttcttgagactttgagttcaaaataacctgcaaagtatgattttccatttgtccctacttgtctaatttgttctttacccattcataacttacatcttctttttctctaaattcatctaatatattaggatctctaaagaccatatatttcattatacttaatatctttttatggtactgctttactcctttgtataatatatcgtatctatcagattttagaaattcgtacaagctcatttttattgttgggaattgactatgctttttgctgcttgcatctcctcttatttctgttatttccacacttattctctttgaacagttaacagtttctccgttatttctcctgctcataaatctaagtacctcataactacccattataacagaaagatttttgtctgatactgatactccagttgtttcttctattctatcaaatttagttttgcatatgtaatctctagttccattagcacattttgcataaacatctattaaataatttatgattgaattacttctcaaatgaggggatataatgaatcttttttgtcttaattttagataataatagtatattttcattaggtttccaactgtaatactactgtcatcagataaccaagttgaatgcacatttcttatcatcaaaatatctgtattcaaagcattgacattcctaaatttgtaattttgtttttctaaatatccaggttttaccatttctactaatacagaaactaagtcattttctgtcttaatttcatcttgtatcatcggtattttattaactattatattgcctttaggcttaacatcgactatttttgtattattcaatatttcgagacatatgtcagctctataactaggatcttcataacaatcaagcattctcatcattattattaacattttactatatggtcttaacctatcatatacgaattccaaaaaattccatatattcatataattgcctcttaccttgtaaccttgtatttttatttgcttcccaaatattattttgctgtttattacgttcctaataataggatttgatccggctctttcttctgccaaggcaatggtttcagtaaccaacaattcctttctatcagctattgctgtttgcacagatgttctgtttcttattaatgcccctactcctgaagattcatagtttattttcctaaaataatcaacaactttatgatattttttagttagtggtttgactgttataataggtgatattaaacttcttgttatgttagattcattaatacttctacttattttcttgtcttcactaagattatcattgtattcaacttcttgtccttctacatcttctatttcatatattttatcatcttcttctacttcatttattaaatcactattatctcttatatcattccattctttggctgtttttttaattaaattgactataacatgtttactgaattctttagcatttatgttatcattaaaatttgaaggttctatttcatcgtcatcaggtttgtttgtagtaataaccagtgaagctaaacatattttgttttctttggttaacactttgttttccaggtttttttgtatttcattctttaaaaacgttaattgtgaaaatgttccacatgaacatatttcatatgttgttaatttacctggccaacctcctaattcaataggaagcatttctctgtctatctcttcactatttatatatttctttggtcctatgttatacgatctatttattaggtctcttaattccttccttactattattaacgcagtttctggtgccccaagcttttgtaatgaattgagttgtcctactgctccttcacagtcttttattaagtctatcttgtttattaaattatatgatgatatgcattctttaggccacacattaattgtcttaccattgcattcgtatttttgaatcacttcacccacaacatatgatagatatgatttttttatattcatttttagacagaacatcttctttccttcttgtataaaatcataggaaaactttatggcttcctcattattacaggagcaaaatactatactgtcatctgaattgattagataattaaattctattttaacatctttgaatttctttatactatttatattctcttttaaaagtttgcataagtaatctgttgccaaaatatgtatatatgttgatgatttatttaacataccttggacccatcctgcatttccctttataaataggttacttactaaaaattcaggtgtcaatcttgcacttttaggtatctttggaaaatgctgcaatctattttcatctgatcaactgtatttaacattgtttctttaattccctcaataatcaaactactgttcttaatagtcaacttgaatttgtccatactatctgattctgagaattttgattgatcttgtacgaaagaagctttatacatcataccattcttcctacatatttcatccattgaggcactaaaattagatattttggcggatctattaatccttctagctaacaaattttcatcttggtattctcctatacatccgaaggggtcatctaaaacatataacttttgttttgtataaggatcaggcgaacctataggccttacatcacctctttgttctttttcagatatattaaaaagcatttgtttatccttgtgcaatttgacgaaatttatgatttttgattcttctgtcttatctcctgttattaaagattcgtttactattgcattcgatagagtaccaggtatcgacaatcctattttctttccgtttattttcccatcttcatcaactagattctcaagttcttctatactagatcccgtttcttctactatcatatccattgttttacaagagcctctcattgaagtgttatatacatttatattctctaaattactgaattgtttagcttttattttttctcttttgtctagcaattggatttcatacctatttattgcattaattaatgcactttcgtcgaagctatgcttatgttcaaaattaaacttatcaggaatattaggctccttggctttttttattcgtttttctaatatttcttttgtttctgaaatattaaaatctattacactttgtgcagatttatctatgccctgactcatatataatttctttggtcttgactgaaataaaagctgtgattcaacaaagaacaatgacatgtctctcataatgatattctccgaaaagaaactatgcattttaaattcttcaattattctttccttatctatctgcttatcacctcccatccttttgtatacttctttacttttatttaatgaatcagtattttttatatagaatttgattattttgtttattaaatataaatcaattgttgtttttgccggtctaactaatttatctctcaaaagttctctaatattattcctatcagaaaatatcattcctacaacatatttcatcaagtccataaacattgatggattttggtgtgtatccatcattaatatagtatatatagctaacatattatctctatattctgtccaatatttttgttcctcttttgagaagtaactgttaaaacatgccaccattgttcttgcttcataatctaagtttgacaatctgttcaaaacagacattctagcagagtacttgtttgtcaatatatatgtgtaattattcgttttttctatttctacaatatttccttttgtcgaattcattatttctattagcaatcttttatctttattttcaattctagttatagacattctgtatatcactggatctccttttattatgttattaccagtccaagtcaagattatccctgatcgttgcctagggatggagtaataaaatccatcctttacatttttatccatatgaatgacatcatttacgtattgagatagcacacttaaaacatttgtagaccataatttgtcagtctcaatataatcttgttttgcttcattcaatacccttgattcttttctatgtcttccgctatcctttttatcaggcatatcaaaattatatcctgtagtattctcatctttttctagttttttattgaagagagcagttatatcatttatattctttatagaggaatccatatggtcccaatggatgtatttaatagcatctgttcttggatctttcttcttttttaattctatcataactttatttaggaatattttgtcactatctccaacttttcttatcatattacctgttggagaccaataaggagatgtttgaccaaattcatcttttattttctttttgaagtctctagccctatcactattttgcgtcaatttgtttttttctttatcattagaaaatatatttctaatttctttcatttttctcatttgcaatgtcgttggtaataatgattgtattctagaattagccagttgatccaaatcctctatatagtcttctagcaactctagatctcccacttcttcattgttgtacaaattcatagcgatatctacgggagattttatctttttctttatattgtctttatttttttcttcataagcctttttaatgtcttccattaacgttttgttatgttctgttgatccaaaatttaattgtttgtcttttatgtgttctgctatttcgttaaatatagttaaatcatcttttctactagtaactggaataattgatgctccacctccataactatcatacgctgatggttgagaattcttaatttctttaataaatttttcaaatgcttctctattagttaccttgtttaatatttctcttctcgcatccttaatatttttcagtttccttaacatttcttctttatatgtcctcctatgagcgatcccagttatatcttccattgtgcttatgacgtcatccaagtttttattgttttcatccaatatgagatacaactcatttatagtcaatttttcattcatacttctaatctcttctattaagggaccatattttgtttttttatttctgtaacactgcctatactttgtgaaacagcaatatctcctatatacaagattccatttaaaataaacattatatcaggtgtcttttttgattctttaactatagttatcaattcattcttttctaaaaatctattgatatttatatcacctatttcaacatcatgtaccctatcca

SEQ ID NO: 6286 - DNA, 6996 bp, Diabrotica virgifera
  SmartBlast Evalue=0; Info=Sortilin-related receptor n=1 Tax= Harpegnathos saltator RepID=E2C949_9HYME
gtccagggagaatttgtggggatttttgtccggacccccattatacaaagtattgtcacatatggttccgaagattggccactaaaagagttctaatgaggatattcgcaggttaattaaaaacacaatgattgtttgaatgagagaagattggttaccaaagtagatactagactagacaccacaggaaagacatagaagaggttataccacgacaagttggaaaaaaggtatcgacgaatatatcgaaatggaagaaatggggctaaatgtggcaaaacagaatacaatggagactaggaatcgaaagacaaccaaatttaatatctgatagaccggtacttctagaacctttatcgcagttaaaaacccaatacactttattattagtaaatcattataagcaactcattaatattttcacattaatatttctttagaaaaatttattacgctagaactaagggttcgtcatcagcaaatcctctaatatgaggactgtcatcttcttctaaattattgtcgtcaaatgtggctgcttcagatctggtatcataatgagagtttgtaaagcgcgtaaagctgttctgaattttcttatttcttacaacgaggaatgcaacaacggctaataaagcaataatgactaaaacgctcggcacaatgacagcggtcatattttgaggagcttgcacattgaggttttctaaactgaggctatgcgacatttgcgagttaagacctttggatgtttttattcttacagcaaaagtgtacatcttagcagacgcgtttgtgtatacaaatggtggcccgtccacaataaacttctgcgcgctgctctcgtttaacttattaccgtcatgtacgaagacttcatatcgatactttccgatattctgaggcaagtcttcatctttccaatccactacataactgccattatttattgctcccactcttagttcgacgggtggcgatatagcaggggcaaagtattttaccgctttcgaatatatcgcattaggttcgtcagtagcaaccttaacttcgtaaattccaccatgtaatactttaaagacgtagctgttcgcatgggaaccatctgccttgcggaaatatgtctgcgttgtgcttttttctgtaatcaatagcttgtaaaacactggttggcgtgacggacacggcggtatccaagatattttcatctgcagaggatcatttccatcttcttccactataagcctcttaggtggagccctgggattttcagaagtactaacttgttggatatttccggatagaggtccgaaaccaataggaccaaccaaaccaacagaaaacacgtagttttcacaggaatccaagttcgttattgtgatactttcgtttatagttgtatttctagcactttcaaagagctgctggtggttgataccataatatacaccatacatccaatttagtttcttcgcatactttggtctatcccacctcaacttgaccgctgtaccaatatcctttagcactattacttgtaaagattcgatttcgggtagagaattgcctgcccttctaaaactgatgtagctggttggtccaacaagatcctttttaaatgcgttaatcccaactttataattaactccaggcgctaacttgagtgtaatgtttttagttgatgtggttctaggaggtagattgggatatggtctatctgtaaatacccttacatcaaatccttctacttccttactgtaatcccacgtcagtgaaatggtgtcatcctcttcttttactttaatatttttaacaccttctatatttgatgttccatcaaacattaatgtagccggtagagactttttactttcgaattttctattacgagcaatcacccagaaggtgtagttaagcccgttgtcaaagtcttgtgaaagcatatgtgaggtttcattgccagataatttaagcctgatctcagctgaatttgggtatatccagcacagttcgtaagaaacaataagtccattaggagaccgtggcttattccatgatatcaatatgtgtgaaccatttctttgcctagcggaaacattccacggttcacttggaattgactcgctcgtggaagaaacattatatatcgccggtgggaagactacgtgtgtgttcttgatcctaacatatacagtcatgttatatttggtgaacggttgtaggttggtaaattgatagtaaggctgaccaatccaactttcgtttctccaatgttcgtccccaatttttttgatagaaggttggtattcaagttctagcccggttggtcgaacaatccaccaattaatgtatatcgtactagcatttgtaaacctttcgtcaacttccatctgattgatttggtagactctcgcttttgctgaacaatccctctcgtcgtaacgatctttacaatcgtattttccatcacaaagaagatataatggatagcaagtttcgtcgcatggaaacattccaaagctacaactaggggcaccaggtccatccggtaagttgtcatcacaagacaattcgtccgttttatcaggacaatcaaaatgaccatcgcaaacagcagttgccggaatacaactgccgtcggtttgacatttaaattgagatcgggaacaatttacagaagagtcacaatttctctcgtcttctcctccaagacagtcttccatgccgtcacatacccaagaagctagaatacaatcacctttatcacactggaattgattgctctcgcatgtgacagccggtctttgtgatgtcggattgtcaataggcggatacggtgggaatgaacagcctacttcgtcactattatcctcgcaatcgtcagcgccatcacatttccaccagaaaggtatgcaacgttggtttctacactggaacatccatggatcgtgacatgtgccatttcgactctgaaattcatccggaagcttgggtatgtcggcgggagtgaaagtgcagttagcttcgtctctgccatcaatgcaatctttgtcgccgtcacatatccaagttttgtatatacaacgattcgttgggagtccgcaagacatctgtgagtcgttgcaggtgttgttagaacacgaagattcgtcggaaccatcggtacaatcaggttctccatcgcatttccatgttgtaggtatgcaggttactccaccgctagtacaatgaaattcgtcatttttacaaatgataggttttccatcattgcaatttctctcatctgatccatctctacaatcattttcgccatcgcatcgccattttgaagatatacatcttccgttttcgcattcaaattgtccttcagtgcagttttgacggggacatttagcttcgtcagacccatcagcgcaatctgtatcataatcacacctccaataattaggcaaacattttccatctccacaaacaaagaatgaaggcgggcaggtttgcgtgctacactggaattcgtcggaattatcgccacaatcgtcttcgccatcgcatttccatcctctagggatacaaaagtgattgctgcacgtaaaatgctcggggctgcaactattgccaacgcttgggcaagtaaagttggttgaagataatggttctatgtttcctggacacatacatttgccgttcttcattgttaagccatcaggacaaaggcatgcttgttggttcttgggtaatccgacgcaaatatatggacatgttgtattggtacaggcatttgtgcctatttgaattccatgtgcaaataccttaagatccataagacctgccatctgttttaatattacttgcacgcctttaaaattgtccttatctgaactgaatatagagtttcgtttccagtcgtcccagtacatattacttttaaagacagctatggcaaatggatgggaaactacgtcggtatttgaaaccacttttacgaaaccatcaccatgcaaatctgagctacctatgtaatctaatctagcatctacccagtataacctattggcgaaataatcgactgtgataccattaggccactcaactttgtctcttccgaaaagagtcatattgctgcttccgtccaaattagctcgattcactgaaggattttcggcggaccaatccgtccaaaacatatatccgtggctgggatgtaaaacaatacctctcggtttatgcaaaaccgttgaattcaaaatagttctcctcatccttccgctatgatttatattcgttctaataagttcaatttttgcacggacgccatcaacgaaatacaaagttttggatatccagtcaaaggccataccctcgattgatgctatatcgctcgaaactaaaatttctatagcgtttccgttaaagaaacattgtcgtccaatagtatcatcggctatatctgcccagtacacgcaattatctgccatgtcaaaatctattgcgattacattcttcaagtttggcaccggcaactgttctaaattcttacgtattaagttgtatctggaaatgttttccctttgagcaaatagaaggaaatcatccacttgttggataggacaagggactatgtctggaaggtagtgagattcaaagccgcctacacaactatctgcggctattttacggtagcctttggtacggttgtaaaagttgcctggtttgcacggagctggaactctatatacatcaattgacgcagttttgtcccgaatgcagcgtggtggggaaccaactcttacaaatccaaaatcacattcaaaatcaagcaaatcgcattcacatacaactgtagatttgggttgtatgtaatccatgccgtttagacatttcgccaatggcattcttctttggtaggttacttgcacgcccatttcacatggaatataatttcgaatgccttcactgtggctaggagaccacattttgtaatcatctttcgtacatttacgtttaaacactttggtgaagtcaactttaacgataatccattggtggtgttctggtaaagatccaaacatagtgaaaacagtagtattttctcctggttctgtcattaaaccgtataatcttaattcttcattatggaattcggtttgattccaacttagtccttcatctatagaatattcaatgtgacgagtttctccttttgttttataatatttcacagcggatagaatacctccgtgatctcccatattgaaaaagtacaattctctaagtgtttgtcgccatgttactcccccgtccaagcttatatatattccatagtgacttttcaaattctttcctaagacacctgtggccataataaatccaggagctgatttactcgataagattcccactgatctagtatcaggtaataactgattgaatttctgacttaaatgtaacgaacaatttctcgtagttacacaacctgacgactgaccttctgcatcgaaagcaggtggctgaattaatctccaagtcgctccgtggtcgaaagtaatgactgatcccaaatgttgaggtcccagatgagccccaactggtttcgacgtgactctcgatgctatgtaaatacctgtcagaccttctactttataaacatctgcaaatgcttcttctgacatgtggtgaagccaagtgtcttgccaagtagttgaagggaaaaagacgaaaacatcctccaaggacaaagtgaatttgacctgttttccattgccagctaagctttccgatacgtacaaatgagatgttgtgttcgaatgacctgctgcaacaagagctctggtattggtcacatcgacgatgaagtaacttttgaatttttctttggaatcgaagatgcatagcagttgagcacctaacttgtaagaaacgtatagttgtagctctcccttttcattatattttgtactaaaaagatagtctcctttgatgaagaaatctttcacgtttgagacgtaaatttgagacgccctatttttaaacaaattcattgaatgaagaattgtgctcaaatcgtttggttcggacctttgcacgacaacacggtattcgtcatttgcatctttcaaccagtagaaagccttaacaaattcgtgtaccatccggaatgattttccgaagtcttctgttacccagagcctatgtttcgtagtatttttgtcaaaaagaacaaaaatcgacggattcaattcatgaaaagatatttccgagggcgtgaaattcaaatctcttctttcgaaagtttttccatagtcagttgtgacgtatagtacattgtgcttgatgtccgtaaacacaaaatgcgtatggagtttcggatgattgtaaaacttctccaatgtagcgtatcctccgtcgggcaacttgaagttttctgttttattattgtagttctcaccatcgtcgtaagatataaaaactgtggaaggggtaagtgtcgtgaagccgggtattatgggtgcaggatctcgagccaaacagatgattaccttgctgttttctcccacccaatgtaccatcaactgtttgtgagtgtcgttcagatagttaacctttgtcactacatccgataaactactttcggcctctcttctttttcggcgaatttctccattgtaagacacactatctgcaggagcatcaagaatgttcgttttcgaacttttttcaataccgtcaatattgccgtacaatgttcttgattgaatatcaacacctattgttaattttgtaaaaaggagtatgaaaagtaagaaatacattgttcctactttacattcaatcacaaaacaagagttctttttatttatctaacgcacacaaaggattttaccgttatttactttttaatttcgtataaagttcagatatctctgtttatcacaacacaaattaatgattaatatatttgtatcaattaatcatacgacttacgacttcacacaccac

SEQ ID NO: 6287 - DNA, 6728 bp, Diabrotica virgifera
  SmartBlast Evalue=1E-68; Info=Protein-tyrosine phosphatase n=1 Tax=Aedes aegypti RepID=Q17N21_AEDAE
tgagttagtgtaatatcatcaaataatgtgactagtttcttgggaaaacaataagatatttttataaaaacatgcggtcaatcggacgagtcataaagtgatactgcaaccatttgttgataaaagcttccgtttttatatgtaagttcacccagtcgtcgtgcaaatgcagaacatttagttttggaagtatgagagtgattctagtggtagtgttgtgtttatcttcgggattttggacaaatggcagtgagcaagataattccaccgagcggtcttctacaaatggtgacttaaagttagattcaactactttaaagagtattactgataagggaacaacagttggaacagctaatgcattacaaaatggaaaaacagaacttctttcacgtcatctttctgatcttatctcagctttaaaaagttccacacctagggttctcgtaggtaatcctgcaaaaagtactacccaaacctatgttaggtgcaaaatctacgccaacttcaagatcaacacaaattgaaagttccacatctagcactaacgccgataaaagtacagaaaatccgaagctaagtaccctagatcttccaccaacaacacacattatgacttccacatccacgcctatcgtaggtaatgtaaacagtgctacccaaactgcattaggtgcaacatttacgccaggttcaacaacaccacaaattcaaagttccagattaggggctatgccaggtaacgttgcagaaagtactaacaaactatattaggtgccttatcgatgccagattcaagtacaacacaaattcaacgtcccaaattaaggatggaactgcccattggtagtaacgttgccacccaaagtactacccaaactacatcaggtgcaacatttacgccaggttcaagtacaacaaaagttcaaagttcctcagatggtgctagcgtaggtgaaactacagaaagtccgaagccaactacactagatccttcaacaatcgcaggtggaggtgattatgcagaaaatactgctccaattatgtcagctgcattatctatgccagattcaaataaaagttccaaattaatgtccgaagaaagtccagagccaactacactagatccttcaacaatcgtaggtgatcctgcagaaagtactgctccaattatgtcagctgcattatctatgccagattcaaatcaaagttccaaattaatgtccgaagaaagcccgaagctaactacaatagatccttcaagaacaatacaaattaaaaaatccaattacgggcctataggtgatcatacagaaagtactactccaactatgccagctgcattatctatgccagattcagattcaaataaaaattccggattaatgccaagaaatgttgaggaaagtactacccaaaatatagctggtactgaaaatacgtcagattcaccaataaccaatgaaatgaatacagatttaaccactacatacatggcagaagaattgacaacaaaatattctaccacaaataaaaaggaagaaacctccagtacaggcccttcccagagtcctacaccaacaccagaacctatgaccactactattgcctgttcaaatccgtatgcacctgttctatactttgacaattatgaaattatatggaatataaaaccaaaacaagattgcgatatagattctgtgaatttgacatgtgtgacaaaagatgatgagtattctcggacattcgactcaactgttaattctcttaatgtattggatgaaaagataactcaaggaaaagtatactcttgtgaagctttcttgaatgctaccaatggcgctacttcagagaaatctaatacattacagctgcccccaggaacacaacatataagtcctaacctcagtaatttgacgttgaaatgggaccgaccttttgaaaatgcaagtctgacgtattctgtagatataacgggcacaaccaaacataccattccagatgattgtgaccaaaaagacactcgttcggtaacgacgaatatgcccaatattacgctgaaagctgattttagttatattataacgatatacacatccttctggaaactgtatgttacaaatataacacaaattgataccccaagtacagcacctggcccacccagagacgttaaagttagcaaaaataccacgggctatattttatccgggaacatgccttgtgaccctaacggagtgcttcttggttataatattgaactttcagaactggcagacagctttctgaaaacgaaaactactaaatcgatttcagagattgacatatttgacttttttaatactcagccaaagccatctacaacatattctgtgagcgtatcagcaattggactcaacaacgtaaaaggcgaagcagctacttttgaattcgttactgacgcactacctaacacaccaaatcttaccattactttccaaaatgcaacttcttttggtgtaggatgggacatggacacttcgaacataactaaatacgaactaaatattgatatcttagggccaacatatcctcaaaatcctcattgtcaacaaccatctcctattagcgcagaaactcttatgaaaaatcagtctgaatatagttttcatggaagcgtggcccagttataagtacaaagtttctttgaccgcctacagtgtaagtggacaaggacctacgggatatattaatgtgacgaccagttattcagagccagagctcccacaggtttaacaatcatccccaaatcactcgagaataaccttataccggtaaacatatcttggatggatccttgcaagataaatggaaacatgaatgggtactggattgagatcaaagaaagatatacagaagaacaagatcagcaagtgttctacaacggttccgtcacggaccaaatcgtttaccgtagctttaatccgtcacatgaatatttcatcagggtcgctatacaactcgatgatgaaacgatgggaagctgggtcgagaacaatattaccacagaagttggttatcctggaccgccgatacttaacccgtcaaagatcacgaaaggaccacgagatttatatataacctgggaaagacctatagaaaaaaccggtcccattgaattatacgatcttggcgtcaaataccttgaaccgatgtatgagattccacaggtttgttcgaaaccaacacctgtcaacttttcttttctacccagtaaaatgaaccaagatgttacggacctcctgccatattcaaagtacgaaataaagataagggcaagttactattccgggactttatggaaattatactactgtgactgtcacgactttggaaagtgatcccgataaagcgaccaacatcatcacgaactgtacaaggagttaacggaaacatacacagccagtcttaacgtatatttcaacacgccctgtaacttatacggaccttttaaaaactttaccattaagtgtcatggaaaacgcaatggctataatgatgtcaatctcattggaggtgttaagaatgctatttacgatagttccaattggttttcgactatggatcttgttccgcaatacgattacagttgtaacattacaacttttaataacttatctcaaagtatatcggacgagtttatatttaagagtccagctggagagcccaactttaccataagcttcaacggtcttcctgtactaaacgtagaaccaaacaacgctcaaatccatctaaagaaaatttacttcgagtcatggcaagcagacgcccagtacattgctttaatccttactaaaaacaaagttgttaactacacctcatacagacggatgcaatcagactggcctgctctggacgaccaatcgcgacaaataactccggacttttggtatccatttaatgataaagacgaattctattttaccgttggtaatggttcggcattaaatcctgctttggaaccagaccagagctatcatctatctgtaagagttattacagataccttctacactgacagtccaacattagattttaccacagcctcacttagtaaagcaggactcatagtaggtattataatatcactcttgctgatagcccttttaggagtagctggtttctttgtatggaagagaggtcttcacaggaaattcattgaaaagtatatacgtccttcattgggggcaaaaccaccccctcttagtgctacggctattcccgtcaagaagtttgtccactacttcaacgcgaacaaaaataaacccgaagtattcaaacaagaattcattgatataactgaacaaggaaaagaaatacagtcactgcacacaagtaactttgccggattgttagaaaatagaaggaaaaatcgatacgtcaatatattgccatttgatgctacaagagtaaaactcctaattgacgaagatgatgagattggatctgattatataaacgcctcatacgtcaagggatactcgggagatatcgagtacattgccacacaaggaccgcttgcgacaacttgtagagacttttggaagcttgttcttcaagaaaatgttacaataatagttatggtggcaaattttgtcgaaaaaaataaggtaaaatgtcacaagtacttccccgaaaaccacgagaaccttatagtaggcgataatatggaaataaggtgtgctacagagctccatttcggtacacatgttataagaaacttacaaattagaaaggacttgacacaatacactgtcacacacatgcaatttctggaatggccagattttcgggttccaacgggtaccgagcatatgcttcaattctgccacaagttgagagaaagggtaaggctggaaggtggaataatgatcgtacattgcagcgctggcgtgggcagaactggtactctcatcgctgcagacatactcttgcagaccgccgctgctaggaaacccctagatgtatataaaacagtattagatctaagaaaacaaagatgtatgatggtgcaaactgaagagcaatacatatacgtacatcggcttcttgcagaccatatagacagaccagccacaccagatgccacagaagcagatcctgtatatgaaaatatggacatgatcaaaaggaggactagtaccagcgattatagaagtacaacagatgaggaagaaagtggactttaaatgctacaatttttttattaaatcattccaaaaatgactgagaacggagtattatatataactagatagaataaattacttttatatttgcttataatagaacctaaaaaaattgttcatgtgaagtggtatagtataccacaactacaaaatatgaggttaaacatacttaaagtgctagaattatttttcttctgaatgtatattatgtctgaatattttagtaaatgttttgcagccttgtaggctaaattgaggtgtaaataacagtacaagatgtaattctcatatttttctgtatcacatataattttagcacaaatatgatcatagtagacccatatttcttgtacttaatattagatatgagtttgataaacctttaaaataattggaatgtaaagaaacttgaatgtaaaaaactgtatacactgtaaaattgtaaaaaataatgttatctatgttttgattgatgtgtacatacagattctttttttttcttttagaagaacgaaattattacagtattaggcttcagattaagccaataatcgtatgtaaaatttgtagtaaaatgtatatttttattatagcttatgatgtataaaagaattcttctctttataaatttttactaaaacttttaatttgtctattgggagactattattataatttgtctattgttgtattgttggtggacacttgtcactgctgttgtcagcttggactaatggtatatcaccctctagcttttcctcaaaatgttttgttcatcttctttgtatgtcttgctgttctgtccatataatacctttcccatccctacacatcgataagactttcttgtccttattggctttcttagttcttgaagttctttgtccatattttccctcttctttcttcaatgaattttcttttcttctttacgtagttgtttatttttactatctgcttgtgttttgtgtttctgttgtaatctgacattctttgtcaaatcagtcattcattcttgctcttatttgtttaacgtccatacctagtaattcttctgctgtttcttttatgacgtttttgcacccttctactctcgtttgttttcatcttttagtctgttttatagtttgatatttatattttctctatattctctatttttattcatatctttgagtcctacattgtatggctcatatttcaaaacctctttacttttttgtgtttgacattctggcccttaccctactttctactaggaagaaatcagaacctgaatttgctcctctcctggtttgtgtggacgtttataatattcaattggagtcttgggtctacaatggcatacttactgtaagttagtctgatgatttccaggtgcccttgtgtatatgttttcgagcaaagatttcaaatttttgcgttttgcatttttgtgctgatttcaaattcattgtactttacagaccatgtaaatacaattaggtatagctggac

SEQ ID NO: 6288 - DNA, 6560 bp, Diabrotica virgifera
  SmartBlast Evalue=0; Info=Chromodomain-helicase-DNA-binding protein Mi-2-like protein n=3 Tax=Aculeata RepID=E2AEH3_9HYME
tttttttaagaaatccggttttattgaatggactgaaaacgtatacataataaaaaagactttaaaagtgtatgagcaaactaaggaaaatataagattctgatgtattccatatagttaccctaattcggtgtttttaaactgttatttgaatcgtttagaaaagtcatcgttacagtcgtatctttttgaatgaacactttggtcctgttgcgtaaatcataaacaaacacacagaacttgtgcttaaaaaagtaaaagaatcatcaataacttttgtgttttttaagaaagccctttacctacacacaaactttattgccgctatcgcagatcgagtcgttttaaattactacatgttctacatcaaagtctcagcaacgaagatgaaccaaacttttagacacagaccgatgaactcgaaaataaatatttgtgtgaaacaagtaataaattagattaagggatttgagctattttcgtgatatcacttagataactaatattatgaggggaatcccgctggtggttggcccggcactgagtattgtggcctgaagttggagaagtttccggtagagccggtgaatccgggaaggctgccggcgctaaatcctggcgggaactggctcattacttgtgttgtggactgtgtatttgatgatgaagtggcagccaatcgcgacaagatactcctctctgacatctgcaaccgctgtgccacaggcggtatcctagccagtgtagccggcaaccttgacacatccgatttcatgtcagacaacaactcttcgagttggttaagaaccttgtgcaatactgcattagcaggtttattgccagccaacgattctttgctgagatgttgatgagactcagccagacattcaacctcggcgaagcgggcgttcaaagacatcgctggatgattaggatcttgagtgaggttcagataggcggcgcgcctaagttgttcttcgattactaaagcttgttccagaagcttgaatcgcctcgccaagaacttattcttgatttccaagaagtttcctttccaacatccatcttgaagggttcgttgatgattgcgaaccgcgcgtcggcttgaatgtcctgccatctaccgtatccgtgcgttactatgccggctaacaaccaatagtcgtggcgtcggtgccaaatttcatattccctaccaggagacgcggccttctcttcattcagccacagcgtgtgcagttcggtgaaacctccgtcggcaatgttgaacatgaaacgcttcttggcttcgagatcgatttcctttttgtccttcttatctttatcatcatcaataaccataacgtcatcctcttccttcttttccacctctttcttaatttcctccttcttcttatcatcctcttcttcttttttctcctctttaacaagttcctcctcctgtatttccattttggtctcttcgggttcttcctttttggcctcttcctctttctcttctttcttttcctcgctggttacagacgaggtatcgacttcggatttgatctcagatttatcagcttcggaactagcttcgggagtttcggttttcggagaagcttctttcacttcttccggttcagttttcggcttttctgttgaagattctcccgttttcttctcttcatcttcggtttccgttttattaaccacttctttatctttattttcgtcactctgaacggaatctttatccttatctttatcttctccttgtgtgggagcgggactgggagcagcacttgtagctggcgtagcactagtactggtagtagcacttttaggcgtttctgcttcgcttgtggtggcggtgccggcggcattgattttattttgatccataatgctctttttgattacttccggcatgctatactcgccgttgatgtgttcgaactcctgaaccttctttcttataagtgacatcacaccaatccttgtcaaaacatgttgcctactcagtccttccctcggcacaccgtccgcaaacgtatcagcattatctgcaccaggttcgcaaagatgcctcataaagagagacacgtaagccttgaatatcttctcagattttcctcgaagatctctcaccagccactgtgaattgaaagcgtcttgtggtggcattccgtagcgcataatagcattaaggaacgctttacgctgcctggcattaaaaccgagtacttcaatattgccgccaactctggctagtaacggtggtaaaggacgatccttctcgtctttcctttccatctttcttcgactccttctgcttaaatcggcgtcgttcttctcatcgaaatcatcgtcttccttatcctcatccgatcccgcagaaaagtcagaatggtaatcagagagattttcttgccatgtcgtatcttctcgtgtgtcagttgtcattcctccgtcattataattaacctgtttcctcactcttttgccttttcctaacgtcctagctatatcttcctgttgttgctcataatgatgtctaagcagcttgatccagtaggccggatcggtattttccgcttcttgtttaataatctcagtgtcaacttcttcctcaacttccccttcttttgtaacataactagccactttaaatgaactgagatattcgttcgcccaactctctttctgttctatgccttctttagaacgatccagcaattctcccacagctttgtcgtcgtagtgaatggcttcgtcttctttgccttcactttctttaaacaattcttcagtaccgaatctgagaatatcgtccaactcttgcttagtaaagttggcaccttttccgcccattccaggtctgactaccaagtgagttaacatcattttccgcttggctacttgcgtaacacgttcttccacactgttacgtgttacaaaacggtagatcatcaccttgttggcttgaccgatacgatgagctctggagaatgcctgaatatcattgtggggattccaatcggaatcatagatgattacagtatctgctgtagcaagattgatgcccaaaccaccagctttagtggacaaaaggaaaacaaactggggagcacctggagcgttaaacctatcgatagcttcttgacggagattaccagtaatagccccatcaatacgttcgtatttatacccttctccttcaagaaaatcttccattatatccaacatcttcgtcatttgcgagaagatcaacactctgtgaccctgttctctaaggatcttcaacatcttcgctaatagcaccaactttcctgaagccttaatcaaatgacctacatcccaattaccatggggacccagcggagcttcttccgaggcggctgggaaaagatagggatggttgcaacatttcttgagatccatcataatgttaagtaaagataccgactgtccgcctcctttaggatttaaagcttcaaagttcctcgtcaaaatatatttataatatttcttctgcatgggcgataattcgactctgactataaattcagatttcgaaggcatgctcttcagcacatcggccttgagacgacgcagcatatgaggtcccaacatctcgtgcaatttcttcacttggtcttctttcgaaatgtcggcgaattcggcttggaagttttggagatcgttgaatttctgaccgttgaggaagttcaacaaatggaacaattcttcgaggttgttttgaagcggtgttccggtcaagaggagtttataagctatattataagcgtttaagattttgaagaattttgattgattgcttttcaatctatgagcttcatcgactaccaaaacggcccattcgatagaaccgagacatgccgaatcgatcgaaattaattcgtagctggtcaacaaaacgttaaacttgatggaaccggctctgattctcgaagctcgacctcctctaacagcaccatcttcgaaactgagttcgttctcacgaatcacggctctgcagtccttgtcaccaacatatgtaatacaataaaaatcaggtgcccaattttcgaattctctctcccaattgatgatcgttgaaagtgggacactaattagaaacggacctttgcagtgaccttccttgtagagcgaatacaagaagacaatggtttgaatggttttaccgagacccatctcgtcggctaagatagtgtctataccgttggcccacgaataacgaagccagttaagaccctctagttggtactcgtgaagcaatccactctcgtccaaatatgagggttgtttgtctagtttcttcttcagatcactgcagggcttatctggcggtggagtatatctgcgaggaccgtttctatcgtcgtcatcgataagttctttagctttcggcttccttccaactttcttctttagcttacctccagctccggataaattagcagctcttgaatctgtgtaatattcgatggcagactttagggctgggatatcgtcagaatcttcttcccaggtagcttgatcgtaagttagctctcgccattttactaagtacaaagttcttccgtctcgcatcgtacggtggttgatgacacgatggactattagccattctggttttattccgtatctgtaatacttctcttcgagttcatcgtcgttgttgtttccacccattttcaggaatctgctacatctagtgtcagcttcatccataggttcttcaagtttaggaggctcttccatgtcccactttcttgaataacttcgaaacatgagaggatgatatacatccaattgaagctcggttatccaactacaatgccaatatgatagctcatgccacttaacaaagtactctctatgtcgtgtaggaggctcctcttcaccattgtccttctttttaggaggatcatcaacccatttccacgtaagaattttcgcaactttgcccacaagaggcggacaaccgcacctaggacatttccaatcgccgtcaggtatttcgggaagtggcgggttaagacagtgcgtgtggtacgcagatgtacaggaatcgcaacacaaaagttcgccaccatctttgcaaaccctgcagaattcttgatgttcgtcatcatcttgttcagccggaccttcattctcacaatgagggcaactccactttccttcaggggcttcttctaattcaggttccaggcaaaccaagtggtaagctctagggcaagtatcacagaggataatttctccaccttgttgacatacctcgcagtaatcttgatgttcataattttcatcttcaggtttaccactctttgttttcttctttctctttgttttgcaaccaattttggttttcgctttgcgttttggtggtggattttcatctgcaggtgattctgatggctgtgcggattcttcaccagtggtagatttgttggattttggttcttcagcttcttgtagcatctgctcaaactcagcatcagaatcgcgatcagagccacctccactaagatcgccctcttcatccgaacttccacgcttcctctttcctagtttaatctttaaagttggtactttagtagccttctttttactaggccttcctctattactctttttttctttcctttctcttctttttcctcctcgtcttcgtcatcaaattcatcatcatatggctcagagtcagcctctactatcttttgtgctgcttccttggatgctctagaacgattagtttttggataactttcttcagatgtggttgaagttgcagcagacggttcattttcgctttgcagattggggtttgaattagaaaattcgcgccattttgcagcaaccaacatcatcaactttgacataggaacctttggattttccttagcaaggagcggtctcacatgctgttggaacaacttataggtggtcaagttttgcatatcagcatctgaatagtcaagctcgacatcagttaaaccaaatgttgaacaaacttgctcgatggtgggcatgcctcctgcgccagagtcactagctggtgtaggtgttgatgatgcagaagagtgtttagtagaaccctttttccttcctcttttactactgcttgcataatctgagtccccacctccattatcatcttctccaaagtcactttcatccccactatcattctttcgctttttcttctttttcttgcctttcttttcttctcccctggcttttcttttctttcccttctttttctttctggaatcttctggttcataatcatcatcttcttcccctcctttaggaacaccatcttcagaatcaggatcgttatctatttgttcagccgtatcgtcgggggcatcttcctccccggcgaaagaatcctccacttcttcatctgatgccatcacttacaaactataaatacacaaatcactaactttaagtaaattttaacacgtttgtaattaatttacacaataaccaaagaaaaagaaacacgacgatacactcgttcgtgttctcgttctcaaactctt

SEQ ID NO: 6289 - DNA, 6451 bp, Diabrotica virgifera
  SmartBlast Evalue=0; Info=Rabconnectin (Fragment) n=1 Tax=Aedes aegypti RepID=Q176B5_AEDAE
agtactcctattaacctatctggcaatgacgctatggttgacctacagcaagcatcggtgttcaaagaaccattctttatagtccttttagactgtaccgatcaaaataccattatacatatgtggaaattaatcatttcttcaactgacaccgagtactcacttactagtagccagatgtatgtaccggattctgtgttggttcaagatgagaatgatctatctagaaagaatagcttggaatcattgcatctaaaaccctcgaaggtcagtcctcatattaatctaacagtaaccagagaaatcaaacaaatattacctctgtcagatggtgtagaaatagtccatgctactccagctgcgggtcatttgagttctgcttccatttaccctgcctgtttagcaccctactgttttgccaccgcgtgcaccgatggaatcatcagattttggacagtttcgaccaatccgaaacaagtaaaagatttaagtcatttgatgttggaagaggatgggttgatagttaatactgggcaagtctggagcgaatggaacatgattaaggaatccgccattgaaatagagggacaggtactaaacattagtgttgcttattctggaagacttgcttgtgcttacaaatatggaaagagctttaccaggcctaataaaagcgatcaagattcaagatttatcaacttatgtgttgctatatacgaatgtgaatctactggcggtagcgagtggatcttggaagacgtgattcacctcaaaaatatccatcttccacgtatcgatattaacaaacatctagatttgagctatttatatgattctaaaactttaaagaaaaaacaaagaattaatgaggtgttgcatacatttgctggagatgataggcaaactttagctaccgaaccttgcattaaatcaaccttactggccgtaccaagctttactaccttacaatccttgagaaagtctatttctgagaagggtaatatatgtcctttaacacagaaacatattgtgcagttagattgggtttcaaatgaagatggatcgcatatcttaacagtagcagttggcagcaaaataatgctatacactcctctctctacagatttagcacaagccaatgtcaaggctatgaaagaaagtctaaataattacagaccgattttgagaaaagccagttctttggctcaacctatgttcgttgatgatttcaagtggatgactttaaggaaaatcgaacttcaaactgccgatggcttacctgcattacctatgcagattagttgggtgagagatggtattttggtggttggtatggattcagagatgcacgtttatactcaatggaagcctcagaatccgaatttacaaaatcaagttagcgaattcgacggaaagaatggacgagatgtcgattttcgaactttaacccaagagaatcagaaaaaactagcagctgtacctactcttggaaggataagttctgtaaatttgcaaattctggataggaaaagaaacaaggaacaaaatgtagattatatgccagattatggattattcgaggcttctcgcatagcttgtcccgttttgccacagtatcatcctaaacaacttatggaattactcaattctggaaaaataaggtgggtaaaagctattttggcccatttggtcaaatgtataggtggtaaccaagacgcatcagaagaaatacaaggttggacacgtagtcgcactctatctgtcagttacccaccgggaagtccagaacataggaccagcatcggtgaaatcaacttggactatgacgaaatcaacaatattccacctctgccactgtggactcttctagccgctgataaagagtcatctgtcagccaagaagaaaagaaagattacaatgaattatttgatagcaatgttgcaatggaagacagtttggacaacttgttggaagatcaggaggaccagcgtagaccatcagaaagaaatgtgggtgttactcattttactccaaagcaaggaaggatcttgtccagacttttaacacacattcatttaccaggtttgtcgagtttggaccaaatgcatcttttggcgctggctgatactgtggcaacatgcaatacggacttggctgaaagattcgcaatcgacgctgcaaaatcagctatggttaaagaaaatttaatcggacagaatgaagaattgatgactgaaaatttggatgattgtggtttaagatttttgctagccatgaagcattatggatatttactaagatgtcttccgttggctcaaagaacacagttccaaaaacaaggtgttggcaacaacaatttagcatgggccttccattcagaaagccaagaagaattattaaatttaattcctagctatgctaaaggagaacctacttggcctcatctaagggaacttggggtcggatggtggataagaaacttaaacctgctaaaaacttgtgttcaagtacttgctaaagcctcttttcaagttaatcaagacccaatggacgcggctttatattatttggctttgaataaaaaaaatcttctttggggattgtacagatccaaaagagatgaacgaatgactgcgttcttttctaacaattttactgaagacagatggcgcaaagcagctcttaaaaacgcatatgctcttttgggaaaacaacggttcgatcatgcagctgcatttttcttgttagctggaaatgtgaaagatgctgtagaaatatgccttcatcgattgcaagacttgcaattggctctcattatcgtaagaatttaccagggagatggcgaatacctaaagaaattattataccaagaaatattaggacgtgacgaaaatggagaaaatcaagatatgactaaggcacatccagaccccttcttacgatcaatggctctgtggacactgaaagagtatcagccgtctttagatactttgttggtaggtaacgctggtacccaacatcctgctcacgatgacgaagctagagaaacgaaagaggcagatcccaatgtatttaacttttacgtgtaccttagaactcatcctcttctagttcggcaacatttgtccaactatggtaaaagaaaggtatggatgccaggtggtaaacaaattatcgtagacgaatgggttacgcctttggagagacaattatattttgctactgctcatggacatttcagagccggttgtccagctctagctcttgaagtattatcgaaacttccgtttgttgtatctgagaaatctaaacagcaaccagcggaatccaataagagtaatgttcaagataattcaactattgctactggaactgttacatcatgggatagtaaacctcagcttagttctgatattgattggggggctcctgtcaccggatccggtgttaaaactgacgattttgaattgaaatggagcgatgatgagcatgaagagtcagaagattctgatggaggtataagtatgtctattggtaagaaaaaagaggaagaaaaggaggctgaaataatagatgatatggacgataaagataacgaagaagaaaaacaacaacacatcgatatcatggcacaacagttaaagtttgtagcatgtttgaagattttaatggaagaactttccaccttagctactggatttgaagttgatgggggccaattgaggtaccagctttacatgtggttggaaaaggaggtagaagctctcagagaattgtgcaattatacttcgtccaatgtatcaaacatgccagatatagaacaaagtccagaacctgaaaacattgccagcgttgacgcttctggtaaacctactcttcatgagatattagttcaagaaaaactcgatttcgaagccaaagtgcaacgcgcagctaagagaaagcgctggttaagagccaacgaaactttgttacgcaccttattaagttactgttcgcttcatggtgctactggtggcttggcatccgtacgaatggaattaatgttattgctacaagaactacaacaagaaaaaactcatcaacaacttcttagtccacttccattccctacaagtctgccactcttagctgccagtgttgctagtagtaaaactgttgttgctgatcccatcagatatctgcagtgtttgacacatgacatgttacaaacattgatggagttacaacagccacatactggacagaatcagttactagtcataagagatctagcaatagcattatctgcttgcatttatcaatcactgtgtgattcagataccttcaaaaattctttgcaagaagctcaggagatcggcgccacattcttagtaggtcgaaagagacggatatctgttaacgaaggccattctataataaccattccatctaagtggccgggtgttacgagtttaagatctctcctggcgagggaaaaagatgacgacacccccaggctaactgttatcctctgtgaatcttttacagctgtgtatctgtccttagtattgtatgggctggtcacatatgattgtattattttgttccacgtaaatgcgcacatatttgattcagacgtgtggggaaaattatttggaggaggtatcaaaaagcttctacgcacagctagtctagccggaaatcatcctcatcaccctcagtatctttcccaacaaagtgtcaaaactccttctaccgatgaacctaatggacccgccacatggttgagtaaacaaagagtcaaactcaataccaagcttttgggacaacaaccatctaaaatgaaggaggataaaccaacttatagggagcaatttgttccccctgaaatgagcattttggcgtatttattacaaaagcctgcaaccattgattacattgaggaagtagaaagcgatatagaagaagaagacgaagacgaagatgtatttgatgctcctgtaactaaaaccattaaaacagttaacaacgagcattctgatccgaactcttattcgtggttggttttgcgattggctaccctaagaattgttcataataaaattaacgaatttttggcagttgctggcttggaaacatccgaactgccagtggccagtccgttgattcacagtagcttaaggaagttgacgtgttggcaagaaagtttaaagaaggagcttgaaagcaaacaaacgccacccgagtatatacctggatgttttgttgaaaactcgcacggtccagttatacagaaatataggcaacttttggaacctcacaacacgccgttcagtggtaaaagttcagctgcagcagctaggcacctctggacgtatttagttcgtcaagaatcagtccaagatatatttataagagcagtatttggtaaaagaagatattctggtgcggtagaagaaattttaccccatcctgaaccgactgttttagaacctgtcagaattattcataaagaacaagattctatatctgcattctccttaaatcaggtaaccagtggtcttatagcgattgctacaccaagagaacttcaggaaatggatatttctcttctgctagagttacctgcttggttagaagacgaatgtgaactggacattctaaatttcaacaaagaggtaccagatcctacggtgccaccattcttggtaattcaaagttccacagacaaagggaaggaaacacaaccgggaagtccacaggcgggaggaactgctggtcagagcggaaggggaactagtgttgttctgaaacacaaaatcgatggtatcaaaagaatcacagcgcatccattgttacctttatatttgaccggaggtcaagatggttcagtacacttatgggaatggggtcatcaacagcccgtagctgtacccagacctcctggaacgtatgcgaaagtaaccagggtgagattttctcagcatggtaataagtttggtgtagcagattcggatggaaacttaagcttattccaagtgggtttgagtgttaatgctacaagaccatttttcacgcttcagtgccataataagggcatcagtgactttgtatttcttggttcgtgcagtcttttagctacagctggccatagttccgagagtaaaaacgtctgcatctgggattcgattcttccgcacggaaaggcgttagtaatgccgtttacttgccacgatcaaggtgccagcagtttggtgtttgccccacagcatcaagttctaatatctgctggtaaaaagggtgatgtctgtctcatcgacgttcgatccaagtcaataaggcacaaattctctgcccacgaaagcgctgtaaaatgtatagccatcgaccctcacgaagattatttcgccactggatctgctgatggagatattaagatctggggtgtgacggttccaaatgtccttc

SEQ ID NO: 6290 - DNA, 6361 bp, Diabrotica virgifera
  SmartBlast Evalue=0; Info=Titin n=1 Tax=Harpegnathos saltator RepID=E2BM23_9HYME
gtaccgtagaaccaaaagaagatcctaacatgaagatcgaatggttctttaacggaaaatctattgaccatggtagcagattcaagtttactcaagagtttggtttcgtaacattagatgtcactgacgtatatgaaagagatcaaggtatttacacttgtaaggcttccaacaaatctggagaagctttcacgtctacaacaatttattgcactagtaaatcaaatctcatcgaaagaacccaacatcctaaaggacaagagggtcttgaaaagatccaagatttggaagattctcttaacagaccagacctaccacaagcagaatctgacgaaggacacgctcctgtattcacttccgaatttactcctcttaataatgttaaagagggagaaattgctcacttcgaagctggtttaactccagtaggtgaccagactatgaaagtagaatggttctacaatcgaaagaccatagaagcgtcccaccgattcagaacagtacatgcctttggaatggtggtattagaaattcttggtactaagattgaagattctggaacctatacctgtgttgcaaccaacaaatggggaagagctgaacaaagcgtcacattaaattgtacagaacgaactggtggtcaaccacccaagtttactactcacattaaagatattgttggtcttaaagatggacaatctgctcatttcgagtgtactttaataccagtcaacgacccagatcttaaagttgaatggtaccacaacggacaaccaattttagataaaaacagaatcaaatctgtgtccgattttggtttcgttgttatggatatctcgtacattcaaaaccatgattcaggagaatatgtgtgcagagcttataacaaatatggtgaagactttactaaagctacaattgctgctcacggaagaggtggagtatttacagacagtcttcaaccagaatctttggctaagattagagaattagaaagcatgcaaggtcaacatgcacaagcaccaagcactccggttactgaacctcctaaattcatcacacagattcaagacgtcacaaaacttgttgaaggacagagcgctcactttgaagcccgacttactccagttactgatccagatttggtagtcgaatggtattataatggtaaaaaactacctcatggccatagataccgcaccttccatgatttcggtattgttattcttgacattctttactgttacgaagaaaactcaggagaatacgaatgcagagcttacaataaatatggccaggactcgaccaaagccaatttgaaatgcgtatcaaagacgaatttaatcctggactcgcaactcccgcggggcatggaaggtggtctagagaaaatacaaactctagaagacgctatgatacgaacacgagacgaaaaggaagacacaagggttggcaaagctcccgtattcactgttcctctatcaaacatcgatagtctcagagaaggtgaaaactctcactttgaagccagactcataccaaccgacgatcccaaactcaaagttgaatggttctggaatggcaaacctctcagaactggatcaagattccgtactttctgtgactttggttttgttattcttgaaatttcgccagtttatccagaagactcaggagaatactcttgcagagctattaacgaatatggtgaggctgttacaacagcatcaatgaaggtatcgggtaaaagaagtattattctcgaatctcaattacctaaaggtatggagggaacaattgataagattgctgaacttgaaggacttggtgttgctccttctcaacttacaccagatgacgataccggcagaccaccagaattcatcacatctccttcagatttaatattgaacgaaaatggactcgctcacttcgaatgcagattaatacctgttaatgaccaaagtatgagggttgaatggttccacaatggtaaaccattatgggctggttcaagaattaagacaattaacgactttggtttcgtcatcttagaagtatcgggagtttatcaaagagactccggtttatacacttgcaaagcaacaaacagacatggagaagctactgtatcttgtcaattacaggttaaaggcagacaaggaattataatggaaccacaattgccttctaacttccgcactggtacccaaagcattcaaaaacttgaagaaatgctacacaagaaagaagagttactcactgaagaagaacaacctaatccacccagatttacagtggaagtcaaggataacattgatgtaccagaaggtggaccaattcattttgattgtagagttgaacccgtaaatgatccaacgatgagaattgactggttccataatggcagaccattcgctactggttccagagtccatcaaatcaacgattttggctttatttccttggatattgactattcgtattccagagatgctggtgaatacatatgtagagcttctaacaaatggggaacagctaccactaaagctactgttacatcaaagaccaagaagagtattgatactgaaagtcaacttccttctggaatgagcgccgagaaacttaaggaactcgaaaaaggtccagtttctcaagcacccgaaaaagaaaagacttactctcctcccagatttgtcacacaaattgaatcttcaactgttgaagaatctgaatcggttcacttcgaatgcaccgttgaaccaaaagatgatcctaagcttagggtcgagtggtatagaaatggtaaattgttaccttcaggacaccgttacagaaccgtttttgatcttggatttgtttctcttgatatcttgtacgtttacgctgaagattcgggagaatatgtatgtagagcagtcaatgattatggagaggactttaccaaggccagtgtgtcttgtaaaaaacttcctaacattatcctacagaaccaagtaccaaaaggaatgaagaagtctgaaactctcatgcaaatggaagctgctattaagaagtacacttccgaaatccatcttacagaagacgacttgtatgacgtggaaaagagacagcctccacggtttgtaacccaaattaaagatcaaactgatttggttgagatgcagaccactaaatttgaatgtcagttggctcctgttggtgatccaaacatgaaagttgaatggttccttaacggaaaacctctaccacataaaaatagatttacaccaatctatgactttggttacgtggctatgaactttggatgggtatatccagaagacagcggtgaatacttgtgtagagctactaatttgtatggcatggatgaaactagagccgttatcaaaacaactggtaaaccaggcattatctacgactctcagctacccaaaggaatgaagagtatcgaaaagattagagaacttgaagctgcttggcaagtggtacctgaagaagcagtcgaagacactaaaccacgccaagcaccagtgtttgtcagtagacctgaaccagtttcagtagaggaaggagaatgggcgagattctgctgcagagttacaggccatcctcgtccgcgtgtcatgtggcttatcaacggacacactgttgtcagcggctcccgctacaagctcacctacgatggcatgtaccacatggatatcccaaaaactcgccagtacgacactggtaaggtagaagtgattgctcgcagctcagtgggagaggctatcgccgaaactgagctcaaaattatccccagacacgatgactacagaggagttcttaagaattcgccaagaccttggtacgatctagaactaactgaataccaaaaagaacgcgcagaaaccgaactcgaacgagtattcgacgagcgaaatactgcccttagagaaggtggcgtgaacgtcaccggcgaacacgtccaacccaaagaattcagagaaaccgagacggaatggcagcgcagcgtgaaagataagaagggacaagagtattatgataagatacaggaacttgaaaaccaacaggtctccaaggagatcagacttcgggaatcatcccaccagttcgctattcccggagagaagattcttagcagttctatggctagaggaatggctcagcaatatgaagaaaatcttgatgaaaaaccaaactatgacatcaacttagcacctgttccccgactaccaaaagcggaacaagccaagcctgtgccacacaaagaccaagtacagttgagaaagaccgacaaaggtcaggagttcatccagcacgaagtagacatcgactctaaacaaggagcctatccaccagatccaaccgaaactggagtacacggtagagaaatccacgttactaaacaaaaacaggttcaaaaagaacaaaagggagatctagaaattactagaaatatcacagctactgaaacgactgatgttgaacacaaagcaaagaccacagaaagagtagtccaaggccaagtactaccatccaatcctccagtatttaccaagaagattaagccagtaagagcgttcgaaaatgattctgccaaatttgaggttgaatttgatggtgatccgttacctaaaattacctggttcagggaagatttccccattactagttcaccagatcttaaagtttataccttcagtactaagtccatccttcaaatgagacaagtgtttatggaggattctggtgtgttcagtgtcgttgctgaaaatagaggaggtactgctaaatgcagtgccaacttggtagtacaagaaagacgaagacatggtacacgtggtgctgttccacctagcttcacagccacaattcaaagtaccaaagctaacgtaggacaactagtaagattcgatgctaaaatagacggtaccaaacctattgatgtgtactggttgaaaaacggaaagaaaattgtgtctgatataagatacaaaactttggaagaagacgaaatctatactcttctcattattgaagttgttccagaagataccggtaaatatgaatgtgtcgctatcaacaactctggagaagctagatgtgaagctgaatgtgtagttacttcaccatctgctgcccagaaacccgccaaacccacaactcccggtgcggaaaaggctcctgcccttctagaacctctcaaagatcagactattaaagaaggacaagctgtcgtgttcagatgtaagatttcagctaaaccaactccagttattaagtggcaaaaggctgataaggtcatcaagccatctaaatacttccaaatgaccaaagaaggggacttctgcacattaaagatctcagaagctttccctgaagatgaaggagtctacaaatgcgtcgctgaaaatcctgcaggcgctgttagtactcaagctaagttgaaggttattgcaccagaaacgcaagaagttgcaccatcactaaccccaatgaaagacgttactgtacctgaaggtagccctgctcaattcaagactactatttctggaaaacctaagcccaccatccaatggttgagggagggattccttattccagaatcgccagatttccagatgatccaagaaggaaacaacgctattctattgatttcctcaacctacgaagaagacactggcttattcacctgcagagcaacttcatcagccggtcaagttgaacaatctgcgaaactaaccgtaaaaagtaagaaatgattactataaaaatattcttttctaattctcaatttgttaatgtccatccatgtagttattgttagttatgacagcttcaagctggttattcaacacagtataataagtgatcagttagcagaactcttgaagatagtcaatgatattggactaatggtttgagattataatccgattccttattggtggtggtttcagaactggtgaataaaatttgacttggaattggtacctgtaccaaggtaccagttcaaattcaaattttaatcatggtccttcgaaccggataagatctaaggtgtgcgaaaggaaaaactgtacagcaggttagagcactggtatttattatactgtgacctttttacttgttttgttaacaatgaatcactggatcgaatccattcaagaaaagttctatacgcatagttaggttagtgatggcgatttccaaaattttgttcaagttccacagtgataatatgttttggaatgaatacagctttggctctaattcgctaaacgctggcttagttataaatttatgttaataaatctgtataaatgcataatttatttaataaaaggctattgtt

SEQ ID NO: 6291 - DNA, 6304 bp, Diabrotica virgifera
  SmartBlast Evalue=0; Info=Bifunctional aminoacyl-tRNA synthetase n=1 Tax=Culex quinquefasciatus RepID=B0XC16_CULQU
atttattttgtatgtcaaaatttggtggaaatgagtagaataataatttaatttaaataatctataatgtcaactaaagaagaacaagatacaccacctaatcaaacacaagagtctgaggaacattcagctagtggtagcagctctgaagacgagcaagaggagaatatggaacatttgcgtagattctttgcagagaagcttaatttttcaaaagccgaagacaaggaaaaagtaaaggtgctaaatgatgtgtccattgatggcatagttaactacattaatgaaaagaactgtaaaaatatcattactatggcaggtgctggaatatcaacttctgctggaatcccagatttccgctcaccaggtacaggcttataccacaatctccaaaagtataatttgccacatccccaagcaattttcgagttagacttctttcacaataatccgaagccattctttgagttggcaaaagaactttacccaggtacattcaaaccgacattgtgccattattttgttaaaatgttagatgaaaaaggattgctcctaagacattatactcaaaatattgatactctggaaagggttgcaggaatacatgaagataaaattgttgaagctcatggcacatttcatagagggcattgtttgaagtgcagagaagagtatagtcaagactggatgaaagaaatcatttttaaagatgaaattccatcatgcgaaaaatgttctggagttgtaaaaccagatataatattctttggtgaggtattaccaactaaattctataatggtttaaagacagactactcaaaatgtgatttactaataattataggaacttcattggcagtacaaccgtttgcttccttagtggatagggttgaagatcatgtaccgcggattttaataaacagagaaaaagcaggacaccgatcaagcatcatgactatgcttggaatgggaggaggcttaaattttgattccaaagataatacaagggatgtttgttggttgggagattgtgacgagggatgtctactatttgctgaaaaattaggatggggggatgaattacgacaaagagttaaagaagaacatgaaaaaatagacaaagttaatgaaaaggtaaacgtaacaaagaaaccagattcagaaggaaagcaattaccaaagttataataaaaatatcaatgttaatcaaattaaaatataaataaataaaataactacataacatctttgaaaaatgctgttattgttaaaataaaaatgttacagcttatttttagttgaataaattatttcaggggcattctagtaacttcttccgaacaatgtgtaatattttggtttgtttttacaatctggatgaatgcacttgtcgcttggtttgatatcggcaggttgttctaaggggatacaaagagatttggcacccatggatggagctccgggttcagcattttcgccggcgtccctggtactatcagccttaattttatcctcgcactgaacttcaccacagaatggtgctaaaatgatatttcttttatccaaagatggacagaactgcgaccaatccttaagaagcactttatgactctccaaatcatcacaagcttttttgtacaagtttgcgtgaacatcttctaatattgctcctaatttggtgacagcatcggcgcggctaatagtaattttttccccagtgtctctccttacagctaccaactgatttttttctatatccttcggtcctaattcaattctcactgggactcccttaagttcccaatgattgaacttccacccaggggagtaattgtctctgtaatctcctttaacgcgtacatttgctgcttttaagtctgcttccaatgcatcacaggacgactgcaattttttacgagaatcttcagaaagattggcagtgatgccacatggtacgatgacagtttgtatagctgccactcgtgggggtataaccaacccttgattgtcgccgtgaatcatcactaccacaccaattgttcgcgttgtaataccccaagaattctggtatacatgagtcttctcctgactatctggatgttcgtacgtaatatcgaacatctttgaaaagttttgacctagatgatgcgacgtggctccttgaatagctcttccgctagctgaaacataggcttcgactgttaaagtgtagtctccaccagcgaatttttccttttctgtttttctacctttgaccactggtatggctagtaaatcggtgtatactcttgcatataaatctaaaatttgtctaacttctacatcggcttcttctttcaaggcaaaagctgtatgaccctcttgccacaaaaattctctagttcttaagaaaggttgaggatgtttgaattcccatctaacaacattgttccattgattcaatttaataggaaggtcacgatatgactgaatccatttcgcatatgcaggatacattacagtttcagaagttggtctaactgcaataggttctgccatatcagagtcacccgatttggtaacccatgccacctctggggcgaagtcttcaatatgggtcttctccttttctaaagcagctttggaaacaaatattgggaaatagcagttttgaacacctagtttcttaatttcgccatcgaaccaatctttgatagcttcccatatcgcgaatgaccatggtctaaagatgtaacatccggaaacatcataatattctattagttctcctttcgtgataacttgagagtaccagtcagacaattgttcttcttttttcgcttccagaccaagtctagtttgttttttagcaccactatcgttggcctcaacaacctcaggttttttctcttttgctgctggtttttgctttactactttttccttaggtgccgcaggtttggtttcttttggggttctgcccgctacaggaaaatctgtacctgttagatttttatattcaaccttaagggctaagagtacttttacagcggcatctactttttccttatcagctttttgtgtttttaaatctcgaaccagattgccttgatcagtaatcttagcggttaatacttccttggcgttatcacctccagcactgacgttttggttgttgggtactgctggttcaggtttcatattgggtttccaatctttgccagttaaattcttaaagttttcttttaaattgagcagtttttttacttcaacgtcaacttgggacttatcagctttttctgacttaagttttcttacaacgtctccctgtgaagaaatgtctaaaagtagactattttcatccaccgttacattcgctgaagcggaagaagttgaggtatttagagatggtggcgccgcaactgctccaggcttccaatctttaccagttaatgtcttataatcagcctttagagataacagcgccttgacttcgtggtcgacagttgatttatcggccttttgagattttaaggttctaactttctcaccttgtagagctatttgctggagaattgaattttcgtctaaggacacgttttcttgttttggtttggtagtagaagatgtctgatttgtaattttgttggtagaagatgcctgacttggagtccaatcttttccagtagcagacttgtactcagcttttaatgataacaattgcctcacttcggcctctactgctgctttgtcggctttttgtgattttagctgtcgcccttttcgccctgggctgcgattttcgcattgatctcgtcacaatagcagaatcgtcttagaaactgaagctgtaggaggtacacaaccaggtttccagtcagtattagctgacagctttatattcagcttttaatgtcaataatactttacggccgtgtcaatatcagccttcgctgctttttgctcctttaacttgcgaacagcatctccttgttttatgatttcattatttagatatgtggcagatttacttgtgaccttactatccgcttttggagcaacattcgtcttagatttggctacagcttgtccgggaatgctttctttggcacttccatcagggatatggaaaaggataactggttgttctttgtaagtatgtagatttgccggtttgtaagctacgtcaacacggaaaaatcctcgtctctgtagctgaatgatgtctccaacttgtaaatttctcagttctggatcgcctagcatttcaacttctttctttgtttgatgaccaatgaattgtttgaaatcttcatcttttcctagcactgctttactaatgatatgatcaaaataaacgcaccaagttggagtaaacggtgccttatctgtttctgcaagccaagtaagcttcaatgtttttttgaaattcgtgtcttgaagatttggttgtgcttccacattaacgatatttccattttgtctattaattttagtaatcatcaaatttccccaattaataaatgtcgtattttcaccttcctttaaggcttctgcatctactctatcgatcagaatttttggacccaaccacgttgatttgttaccaacttcagcattcttaggatgtttgggtacggataaacattcttccttgactccttttaccaaaactggtacaggatcatttacatccacagctgtgtatcttggtgcaataggatcaatgacctttttgttgaaggaccaaattttgtcccattccatgaacacaacggatctgctcgaaccttgagcaataatgaattcttttagtccttgcactgtcatacctcgtcttaggacaccgcgaaccgttggcatcctaggatcatcccatccatctacttgtccttcattgacaaaccacgttaatttccttttactaagtactgtatttgtcatggatagtctgctatactcccaaatatgtggttttcttaatcccaatttttcgataaaccagtaaaattgatgatctctgtcatggtattccattgtccgcaagacgtgagttactccttctatggcatcgacaatcggacaagcaaaatcgtatgtagggtaaaccttatatttacttcctgttcgtggatgaagttcatttttacatctgtatatggtagggtcccttaagcagccattgggagaatccataaacattttggctcgaacacaacacttctgacctttctcggtaccttttttcatttcttcccacatagcaaaattcttctgaacatcattattcctgttgactgactcgattttttgttctctttgagttttcatttcctctggttcagtatcatctacataggcatttccttctttcatcattttttcacataactctaacataagttcaaagtaatctgaggtatatgtgaatatgtcgggtttaatctgtaacattgctacatcttccagaataacgttttcaaaatgcacattttctttggcaggattagtatcatcgaaacgtaaaataagtttcccctggaaagcttcctgatagtgttggttgagaagggcagctttggcgtggccaatgtgcaaataacctgatgcttctggtggaaacctgacaataactttacccatctctgcaaaaggcaaatcgacaaattttccctcttgatttcgattaccaatattagtatttttctcttgactaacttgtttttctgcttgtgtcaacgaagctgctacatcttggggtaggttatttaaaatgttcataacagcttcttgtgcatgtagaaagtcgtaccaacgaacaacattaactggtgccgatttagatttggttaaatcattccagtgtttgtttgtatataagctaccaaaaacaatgaaatcagcaacagtaattcttttagcaaccaagtaagtaactgaacctaaaactttatttagggtttctaagacaccggtaacttcgcttctattattaagtggaccaagggaaagcgttaaccagttatctacttctgttgtttcaagagctgaagatccatacagctctggacaaaatgatctggcaatagtccttgctacatcattgctatttttgcaactcgtattttcgacaaccgtctctgaaccccatgaaatttccaaggggatgcttttaactaattttacatattcggcaagaaataagcctcctaaagggggactagatttatttacggtaattttcattgtctttatttcgttttaagatggtgataaatggtcctaaaattgtgcaatcatttaaaagttgttcaatgttccagat

SEQ ID NO: 6292 - DNA, 6056 bp, Diabrotica virgifera
  SmartBlast Evalue=0; Info=Plasma membrane calcium-transporting ATPase 3 n=2 Tax=Formicidae RepID=E2ANE0_9HYME
cactgtaactcgaactcaccgctcagtcactgtttactgttatcgaccgaacacagcgtacaacgccggtacagtaagtggaaaggcaagacgtggggccagcaggcgcgactgggactggattttcgttctcgattctcgatcctgctatagcagtggctctcctctccgtgtgttgatttctagctcatttcgttcggttcggagtagttcccgtttattgtagtctgttttttttttcgaatgtgtaaaaaacattactaaagagttaataatttttattgtttagtttttaattatttcgcgacatggagtgaagtgtgtttattaccgttctacaaatctttttacatctttacaattcaattttattcaattttttgtatgacacgactgaagtgaaaagatcttgaagtggaatatggctacgatagacggccgtcccgcacaatatggaattaccctgaaacaactacgtgaccttatggaacataggggcgcagacggaataggaaaaattcaagaattaggtggaacacaagaaatatgtaaaaaattatacacatcgccaagcgaaggacttagtggatcacaagtagatcttgaacacaggagagaaacatttggatcaaattcaattcctccaaagcctccaaaaacctttttacaattagtatgggaagctttacaggatattacccttattattctagaagtagcagccatagtttctttattgctttctttttatcagcccccgttagaagattcagcatttaacgatgatgaaacaagtcatgggtggatagaaggtttagcaattctaatttcagttatagtagtagtatttgtaacagcctttaacgattatactaaagaaagacaattccgagggttacaaagtcgaatagaaggagaacacaaattttcagtaattagacaaggagaagtcaaacaaatctctgtcagtgatatagttgtaggtgatatttgccaaattaaatatggagatcttttaccagcagacggaattcttttacaatcaaatgatttgaaaatagacgaatcttcattgacaggagaatctgatcatgtcaaaaagggagagcatttcgacccgatggtattatcaggtactcatgttatggaaggatctggtaagctgttggttacagccgtcggtgtcaactcgcaggcaggtatcatcttcacacttttgggagcagctgtggaccaacaagaagctgaaataaagaaaatgaagaaggaagctaaaaagcagcggaagaagaaaagtttaacaggtgatgaagaaaatgttactggaaatagccatatgaacacagggaacaaagaagaagcaggagccggggagacaggattcaagcttgacgcatcagctgcccctgatcatgacggcaaagaaaatcacgtacaatctgaaaaatccgccggagaaaggaacaaaaaggaaaaatcagtacttcaagcgaaacttacaaaacttgctattcagatcggttatgctgggtccaccattgcagttcttactgttatcattctgattatacaattctgtatcaagactttcgtcatcaatcatcaagcatggaaaaacgtgtacgccaactatatggtccggtacctcattattggtgtcactgtacttgtcgtagctgtacctgaagggttgccactggccgttaccttgtctctagcttacagtgtcaagaaaatgatgaaggataacaacttggttaggcatcttgacgcttgtgaaactatgggtaacgctactgccatctgttcggacaagacaggtactttgactacaaataggatgacggttgtacagtcctacatctgcgaacaactttgtaaaaccatgcccaagttttctgatatacctgcccacgttggaaacgttatcatccaagctatttcgatcaattgtggctacacgtcaagaataatgccaccggaagagggcagtgatctaccaagacaagttggtaacaaaacagaatgcgccttgttaggattcgttttaggacttcaaaagaactaccaaacgatcagggacgacttccccgaagaaacattcactcgcgtatacactttcaattcagacagaaaatcaatgagtaccgtaatccctcgccaaatagctggagaatcaggtggttaccgattgtttaccaaaggtgcttcagaaattatattacaaaagtgtgcctttatctacggccatgatggtcgtctcgaaaaattcaccagagatatgcaggaaaggctgttaaagcaagtgatagaaccgatggcttgtgatggtctgagaactatctgtctcgctttcagagatttcgttactggtaaagcagaaatcaatcaggtgcatattgaacatgagcctaactgggacgatgaaggaaacatagtcaacaacttaacatgtctgtgcgttgtgggcattgaagatcctgttcgaaatgaagtacctgatgccatcaggaggtgtcagaaagctggtatcactgtcagaatggtcactggtgacaatgtgaatacagccaggtcgatagctactaagtgcggtattgtaaaaccaaacgaggacttccttattctcgagggcaaagaattcaacaggagaatcagggacagtgccggagaagttcaacaacatcttattgacaaagtttggcctaaattacgtgttcttgcgaggtcatctccaaccgataaatttattctcgtcaaaggtattatagacagcaaagtcagtgacaacagagaagttgtagctgtaactggtgatggtacaaatgacggtccagctttgaaaaaggcagatgtcggattcgctatgggtattgctggtactgatgtagcgaaagaagcttctgatattattttgactgacgacaacttcagtagtatcgtcaaggctgttatgtggggtagaaatgtttatgacagtatagccaaatttttacagttccagcttactgtcaatgttgttgctgttatcgtagcttttattggcgcttgcgctgtccaggacagtcctttgaaggctgtacaaatgttatgggttaacttaattatggacacattagcttctttagctctggctactgaaatgcctactggagacttactgctaaggaagccgtatggtagaacaaaacccttgatttccagaactatgatgaagaacatcttaggacaagccatatatcaattagtagtaatttttgctttattgtttgtaggtgacaaatttttggatattgaatccggaaggggagtggaaatcggtcatcctccaactcaacatttcaccgttattttcaactctttcgtaatgatgactctcttcaatgagttcaacgctaggaagatccatggacaaaggaatgttttcgaaggtatcttcaccaatcctatcttctacactatctggattggaacatgtatagcacaggtgggtattatccaattaggtggtgtagcgttttcgacaaccagtttggatagagaccagtggctgtggtgccttttctttggagtaggaactcttctatggggacaacttgttacgactgtaccaaccagtaaaattccaaagattctttcatggggcaggggtcatcccgaggaatacacggaagcgattgccattggagaggagaaatacgacctcgaatctgacaagaaacctcgcgctggtcagatattgtggataagaggcttgaccagattgcagacgcagatccgagtagttaatgctttccgacagggcctagatgctcggtatggtgaacacagcaatacttccttagcagaggtacttcgcaaacagacgactttatctaagaggttgtctcaaacttcttccattgaatatgccgataacatcccagatgaattgacgataccagaaatagatgtggagcgattatcgtcccacagccacacggagacagccgtttagcttcctatccccgtcctattagtcctacttttattattactattactgttaatactgcagcagtgcgttttattccgcggcgctaacgcgggcgcaatggcagcagcgttcctgctcttcagctggttttactcatcccaatccttaccgtcctttgactccctttcatctcctattaacctgtctccttcattcttctccacagtcatggtttaatttactagaggagaaaagacattaatctgtatagttaataacagactgtggttaagttatatacggagagaagctagttagtagagtacccacgatactggaattatgtactgtcgtccttatctaaaattgcagctgtcattaaacatccgatatttgttaaacgctattggtcggtgttttattatttgtttatttttcgtttttgttatacactttgaaaaccagaaaaaagcaggatacggcgtgctgtcaatatggactacaagattagcaataaatgagtgttcaacagttcactcataaattaaatttaggtgcctatataagtgggacttctattctggggtctcacgactgacgaggatgcgcggacttacagtggaatcgggcagtagcgagcattccccttgagccattccctttggcaactgctgtaatgtctgcttgttctcgtcctgaaatatacatatataaatatataaaaaaaaatgtgcgggctgccgtccccaagtcgcttccttccatcggggacagcggttcgtcttaatttttaacactagataccgaatcagatgttatttgccaaatatttgggagaaacggtatatacaggacgatgattcacgtgaaagtaccttcatcatattagttttccattcctacccgacaaatactgcttctccccaccctcatcatgttgtaatctaggtctaatataaaataaaaccgtagatagatcaagtgaaatttaggcaacacaaatttgtacgtcgtgcattgcatttaaaaccacccacctttttaacacaaagcatatacgtctttataggtagctttaagagatacatatttgaccgtttcaaagaccccgcaacactccttatggaggggtggccccggtcgtttaatgaaggtttggtcaatgatggttttcagtgcatagattgaaaaggtccatgagacctaggtctgaaaaactattattctgaagctgcatccttctgaagttgttggattcaggtgctcggtttacgttgagtgcactaattcgcggtcaagtgaaaatatttggtattgaaggaagagggactcattttcttcatgcatatttgtgtgtttgtgaattcgtggtcaaaagtggatgcattccattttggttttcagaaaacctcctagaagtcctcagaaaactcgagaagtgcgatagaaaatgtgctgctatgagcggcatgagagttatcatgttttcatgaatgcttcatgcttatccaataccggcatagctgcaattccgccttatctttagaaaacaactgaacagtggcagatcggggagaataggggaatttcccccgtaatacgctccagaattaaagaaaaaattgttaaaacatattagctggcatgaaacttaaactacagacaaacaaatacaacccaattaactcaacagttagggaatttattgcacatgttattatctatgccttttatgtagtttgggtttatcttttggttatagtttggttggtgtttcattaaaaggtaccgccccccctccaaggaaaatatctagatccgccactgctaataaagcgcctttagaaaactggggaacaaccataacaagtgctgctagagtcgcacaagatttctcacggtttcacgcatgcataatattaacctgatgtcagcaacagcaccatttgatttttaaaaaaacgctgaatcataatttaaaaaaatgaagaacggtcgcactggcacttgctgcatcgacaatttcttttagattttgtagaaaaaagatcatcaaatacaaggagctatgacacaacta

SEQ ID NO: 6293 - DNA, 5996 bp, Diabrotica virgifera
  SmartBlast Evalue=3E-77; Info=Reverse transcriptase n=1 Tax= Anopheles gambiae RepID=Q76IN5_ANOGA
tgtatcaaaatatttttgtataaaatatttcctacattaatatacatagtctaatatacgattataaggtcgacttgcaatgatctgtttaatggataaaaattatttgataatatataatatataataggcggttgaagcgtagcactggccctgttaccttccttgtataccgtaggccctagatatagcagactaccctgctgtactctaaaagccgcgtgcggtataaaacgggagaccagatttagccatacggcccgcactccctgtaaggggaaaattcactcatcccagatacctagggtatcaaaaggattgagctctggtgggactctttccatgttatcgagccctaggtgacttggtacgccggagtgtctcccaaaaattttcgcacgcatctggaggtcgagagtagcacagctttctgcatagtcttgtaaagatgttcatttagacctagctttttgatgttttctatgaggttctttggaatgactccagtagtagaaataataataggtattgtctgggtactttccattctccattgtctccttatttgtatttcgagatctctatacttcgcgatcttttcgttgcgcttaacacgcagattattgttgttaggtatcgccacctctattaatgttgtttgtctagtaagtttattaactagtatgagatccggtctattgtgtgccactgtttggtctgtgagcacagtgcgatcccagtatagcttgtagttgtcgttttcaagcattctatcagggacgtattgataataaggaagatggtcggtttggagaagtccaagtttgttagctagttcttggtggagaatctttcctactgagtcgtggcgttctttataatcagttccgacaaacgcctggcagcccccggtaagatgttggatggattcttgggcttgacatccatatcggcatttgtcgttttggacctgaggatcttttacaatatacttcaggtaatttctagttggaataacctgatcctgaatggcaagtaggaaaccttctgtctcgggaaacatctttcctgataccaaccaatagttcgacgctctactgtcgacatattcttggttgacctcattgagatgccgtccatgcagtggtttacccatccaggtgcgcattttttcgtccttagataggtggtttatgcgcatttcttgttccctcagtttaagcggcgttgagtcatctactgcgcagattgcacgatgtaaagtagatgattcagcctgtgcctgaaaataagttcttaagttagccacttgtttatccaattgctcacctatgtccatgagtcctcttcctcctagataccgcggtaatgttgttctctctactgcactgcgaggatgatggttgtgtgcctttgtgagaagtgttcttactttccgctgaagactttctatatcggtttttgaccatttgataataccaaatgagtagctaagcgcggaaaaggcgtacgtatttaatgccttaaacaaatttttactattgagatatgaccgattaagctgtcttacccttcgtacaaattcagaagttagttcggttttcatttgtttaaacgggagactattattattattataatttttaatatactaaattaatttattatgtttaaaattataaaaaagaaggggtgcccgatataattttttcctgactaaaattaattaataattaaaaaataactgtttttattaattaaaaaaatttttggaccattcgaattaaaaaaaggtctttttgaatttttctctcaaattgatcgttttcgagttataaacaatttaaaactgaaaaaaggacgaaaggtgacgattttcaaggctcaaaacaagaaataaaaaatattatttttgaaattacgaagtatcttttttttatgttcaaaccttattctatcagttcttaattagtattttgaacttattcttgaaccttcctcataaggaaccttcctcattaacaattaaaaaaaatatatttcagaataaaacatgtcaaaaattcgtaatggtatctgatataataaggttacatcttgaatttaggtagttaatgattacttcttcttcttcttcttcttcttcttcttcttcttctttttcttcttcttcttcttctttttcttcttcttatattaggcctcttgacctgttcttaaccgattttgagcttgtattcgtagctgtgatgttgactgtcagctatctcacacataacaatgatgctcgcatcatgttcaaagcatattctaccaacattcgtcggagtacctatattctttttagtatatgcgtagtgcaagcatagcaagtaccataaaaaaacattccaaatttcatgttctttgcatatacttcaaagaatattctcgtacctaatagactgagcacattcgtgtacgtagtatctcggaatattcaaaaaggtttattcttagaatatacctttattcaatattctttaaaagtatatttatgcttgacacattacttatattataagtacttttaaaatatcttcaaaagaatgcgaagaataatgttagcttatagattatcaactttgttaagaataattaataaaatttaaaaatttatgtatgtaggtaggtacatacataaaagtatgttcttctgaaaagtatgttctatgaatatactaagaacatgaaattgttatgtgggctcgccaccttttaaagggccttccaattggttcgttttgcctgttggcttcgaatccctggctatacgggctattctcccgctgtccattctcgtcacatactgattccactctcgtcgtatctgtcttccccaccgtactatatcttgtatgttacagagatctcttatttcgtcgttcggtattttgtctctcagtatcttcccagttattgacctcaacgttctcatttctgatgttctcagtatcctcttggtttctaccgcgtacgtcatgatccgtcttacacatgatttgtatatgcgtacttcccttccagcctcatatctttatttctccagatggcatccctcagacgtggcaacatggcatcaaatggcataggcacgttggaaaatgttcctaagccaaagtcctgtaaaaagtgtaaaaagaatgttttaaatggtgtaaagtgcagtatttgtgaaagctgtttccatactggctgtgcaagaagtcttagtgcagttacgtttattactgacgatgtagtcacatgtactccgacagcggtaactaccgacctagaccaggcattttacgatgctgtggaaactcaaggaagtaggctagttgactaacaggtatttacatatatatttaaacaaaaagatgtcataataattgaattaagacatcctgatacgtaattggctttatttgcttgctttcggacgctctctttaacatctccataactacatattccgacacccagatattcgaatctcgagacttgttcaattagtttgtagttaattactaatttgcatcttatgggttcccttgacactaccaggcattttgtcttagctgttgatattttcatgctgtagttcttcgccactgcattgaaagtttgtgccattctctgtaggttttcctcgttataggagattaagattgcgtcgtcagcataacagaggatttttattcgtttttctattctgccatcttatatccttttccagtacctagctttaatgtttgttatgattttgtccattactaaattataaagcaatgggctcaagctatctccttgattcccgagttgatttctacttccgatgaatttaggtagttcataattacaaaaataatatttttaacttgtatttttgagcagtaaaaatggttattttttgttttttattcagttttaaactgcttataactgtaaaaccatcaacttagagaaaaattaccaaatacttttttgtttcgaatgatccaaaaaatctaaaataatatacctatacccgggccgattttgtttttatttataaaaaaatcattttaattacatattaataacatatttatagccaggacaaaattatatcgggcacccttgttttttttatattttttaatatactaaattacatgtccattaatttttatccattaaacaggtcggtgtggaggtcgaccttatttctgatcctctactaataaaaattacctatagagggccgtttggaatacctccagcaatactgttgttcggctaggtctcttagttcgttccttttgacttttccagaaggtgttaacggtatactatcgacaaacatcactccaccacgcaacctttgcttatcttgaactctttcttcaatatacttcgctatatcttcttcggttacttttcctttgtattcattttccagaactactatcgccataggatggtcgccatcttcttcgtgctttcttcctatcaccacagattgtcgcacagcaggatgatgtgatagttccagttccaaaattgcaggcggaatatgccaacctctatacttaagcatttctttcactctatctactacgtagaagttgcagtcttcgtcgtatttaacgacatctccagttctgaaccatccgtctttatcgtatctattgctacagtctctttggtaatagcaattcattaccgtttttgctttgattagcagttctccgggttgattggcaccaaggatctcacgggtttctgggtctacaaccttgtaccatatgcctctaattggtataccaacgatatctggattattcttgtataattgcctctgcgttttatgatgaacttgaaaacttgtcaaaattcctacttcagtttgtccgtacgtagggataatatcagtttcgggtaacaactcttgtagagcaaatatcttctccttggacaatgcagaaccgccggtgattattcttactaaggtatcacagttggtatctgttggttttccatttttaaccagttctgatacttggaatggacttaaaaatacgttaaagaccctatacttatcaactaagtaccaaaattcttgaggatcaaaactgctacataacaacctagtaactccagtaattgctgacataaacagtcccatgcccgaagagttccagtagagagaaccatatgttaagaagcttataggaccctccctcattttcatttcgaactgtcttctagttgtatctacatcgttgtttataggctgcggtacaagtggagaatgatgtagataataataatggtttaggcatataccttttggaaacccagaagtaccactactgaagtaaataactgctgtttccatgtgatctttaatgaatattggtttaaagtcattttctgattcttgtggttcgacaaaatcagaaaatggcgtgaattcactagtttctccaaacaccacaatctcgctctttagctccaattttttagcaaagtacttgatttctttgagcgaatccctcacagtgaagatgatttttggtcggaccgcagatatcagcttctctaactctatgttggaaagagttggatccaaagagcacgggatggcaccaataaagaatgaagcaattattggtacgcatgcgtcaaggtgattatcagaacagccggttacgatgtcgcctttttttattcctttcttttgcagtgctatagcacacctgatgcatctttgtaaaagggactcgaatgtatctcgctctccagttgaagccagaatctgtgcaattttcagtccttgctttttcatcttctcaaaaaacacatgtccaataccaccaagtccatcgaaattatagttgacatcttcagttttgattatattttcttcaatccaataatgggccatttcgcttgtggtcgtaccgcggtaccgcacgccgcaacaactt

SEQ ID NO: 6294 - DNA, 5786 bp, Diabrotica virgifera
  SmartBlast Evalue=0; Info=Sarco/endoplasmic reticulum calcium ATPase n=1 Tax=Bombyx mori RepID=C7AQP4_BOMMO
gaacacgaaagtaacggagtggttggtgtgtagtgttgagtagtgatagggttttttggagtttattcaacttttagaaaaaaattgttagaaaatgaagatttcgtgtgccacaatcgattgcaatagtacataataatctttgattattcagatctagaatactggttgcaaaactgtgacagtgcaaattctgatatttttaggttataatttgctcattaaacttaacacgtttttcaaactattcaacgaagtgacaactgggcagaatggaggatggtcacgcaaaaacagtggacgaagtacttaggtacttcgacgctgatcaagaacgaggtctttcacttgatcaagtcaaaaagaatcaagctaaatatggacccaatgaacttcctgcggaagaaggaaaatccatatggcaattagttttagaacagtttgatgatcttctagtcaagattttattattagccgctataatttcctttgtattagctttatttgaagaacacgatggcgcattcaccgcgttcgtagaaccttttgtaattcttttaattcttattgcaaacgcagtagtaggtgtatggcaggagagaaatgctgaatccgccattgaagctcttaaagaatatgaaccagaaatgggcaaagttgtccgacaagacaaatccggtattcagaaaatccgggcgaaagaaatcgtacccggagatatagtagaagtgtcagtgggtgacaaaattcccgctgatattcgtttagttaaaattttctcaacaacactccgtatcgatcagtctatcttgactggtgaatccgtttctgtgatcaaacacaccgatgccattcccgacccaagagctgtcaaccaagacaagaaaaacattcttttctcaggtaccaatgttgctgctggtaaagcacgtggtattgttattggaactggtcttaacaccgccattggtaaaatcagaactgaaatgtcagaaacggaagaaattaagactccccttcaacaaaaattggacgaattcggtgaacaactctccaaagtcatttcagtcatctgtgttgctgtatgggctattaacattggacatttcaatgacccagcccatggtggttcatggattaaaggtgctgtctactacttcaaaatcgctgtagctttggctgtcgctgccattcctgaaggtctaccagctgtcattactacatgtcttgctcttggtactcgtcgtatggctaagaaaaacgctattgtaaggtcccttccatctgtagaaactcttggttgcacatctgtcatctgctccgataaaactggtaccttaaccaccaaccaaatgtcagtctcacgtatgtttattttcgataaagttgaaggcagcgacagctctttccatgaatttgaaatcactggctccacttatgaacctattggtgaagtattccttaaaggacaaaaagttaaatgtgcagaatttgacgcattacatgaaattggtaccatttgtattatgtgcaatgactccgccattgatttcaatgaattcaaacaagctttcgaaaaagttggtgaagctactgaaactgctctcattgtattagcagaaaaaatgaatcccttctctgtcagtaaaactggagatcgtagacaggttgccatctgtgttagacaagacattgaaactaaatggaagaaggaattcactttggaattctcacgtgatcgtaaatctatgtcttcctactgcacacccctcaaaccatctcgtattggtaatggacctaaactcttcgttaaaggagctccagaaggtgttttggaaaggtgtacacacgctcgtgttggatctcaaaaagtaccacttaccagcactcttaaaaagagaatcactgatcttaccgctcaatatggttgtggacgcgacacgttgcgttgtcttgccctagcaactgctgataaccccatgaaaccagacgaaatggaccttggcgattcaaccaaattctacacatatgaagtcaatcttacattcgttggtgttgttggtatgttggatcccccacgtaaagaagtatttgactccattgttcaatgccgcgctgctggtatcagagttattgttatcactggtgacaacaaagctactgctgaagccatttgcagacgtattggtgtattcactgaagatgaagatactactggaaagtcatattctggtcgtgagttcgacgatttgcctacttctgaacaaaaagctgcatgcgctagagctagattattctccagagtcgaaccagctcacaaatccaagattgttgagtatttgcaaagcatgaatgaaatttctgctatgacaggtgatggtgtaaacgacgctcccgctttgaagaaggccgaaattggtattgctatgggttcaggaactgctgtcgctaaatctgcgtctgagatggtgttggctgatgataacttctcatccattgtagccgctgttgaagaaggtcgtgccatctacaacaacatgaaacaattcatccgttaccttatttcctcaaacattggtgaagtcgtatccattttcttgacagccgctcttggtcttcctgaagcccttattccagtacaactattgtgggtcaacttggtaactgacggtcttccagctactgctctcggtttcaacccacctgacttggacatcatgagcaaacccccacgtaaagctgatgaatccttgatctccggatggttgttcttcagatacttggctattggaggatatgtaggtgctgcaactgtaggcgctgctgcttggtggttcatgtacagccccgaaggacctcaaatgaactactatcaattgacacatcatttacaatgcattggtggtggacctgaattcaagggagtcaactgcaaagtattcagcgatcctcatcctatgactatggctttgtctgtattggtaacaattgaaatgttaaacgctatgaacagcttatcagaaaatcagtccttgattgccatgcctccatggtccaactggtggttgattggttcaatggctctttcattcacccttcacttcgttatcatttacgttgaagttttatctgttgtattccaagtgtgcccattgactgtagaagaatggatgacggtgatgaagttctcaattccagtagtattacttgacgaaacgctgaagttcgttgccagaaaaatcacagacggtgagagctacatatacactgtgcattggatggtactaatgtgggctgtgttctttggctttttgcgtgtgtgccccatttaaaaaaatgaaccactatcgtgcggttcgcgagatactgcctcaccaagacgaggacaggccttagtgcgtaaacgggtgctttaagcaaattctacaatgacaaactacaaacagataaacagtcgttttctctaccacgttgtttatcaataaaaatacatattttgatgggtatctttcatgattaaaatagattgtttatcttattggcacagaaatcaaaatttaagggatttttggatttttaggggtacgatgaaattagtttcttaaaatattatgtctaaacgattttcctatttgatgtgaatgtttatagctaattctttttctgataacctttctaattatattgcaataaataaataaaataggttctctaggtattagttatctacgagtgagacacagctaagatttttaacgtaacttcctatgaatgctgttcgttgaaaaaataatgtatgactgatggaatgactgtaaacctactctctttatattaaaacagttatacaaaatatatattttagattatctgtatataccagtttttaattactttttaaatcacattttatcttccttaacattgaaatgtacaaaagtagacgtggatatttgaattatgaaagataaaccgaaaaatattgtaatattcaaattatttaatcaatatcatttactagatctgaagtgccttttctctaaggtttagttcccggattatagcattttttaaattaatttatttgtatcaaagtataaatatattagataactttagtttgtaaaggttttattttttggattgggtaaatacacgttctagctggtttcgattcgaaaaccggctatcacattagaatagacatcaaacctttctatttagtttggctacatttcatgtattttccatcattttctacacaaattaattcactgaatggtatctgtttctttctcattcggtttggcctctttagatgatttcagagatcgtatttgtaagttacgtttagttatttaattaaccattttttaaatgtacaggtggtaacgttacgaagtataacccaaaatagaaaataaaagatcaactgtcacccgttcttacacactaaaatgcaagtctaaccatagctagtgttccttctagtgtcaatgagaagctaagacaagaacaaaaatatcaagacaattcgtattcctaacatagtcttgtatttagtacaatacgttaatcaaattcaaacaagaaagaagttataattttaaaatatatcatttagtgcctttctgacatttacatggcgtggctttgttaataatttcaagttgtcttgatattttttccaacaaaatttagtgagttcttcgaatatgcgaaaaggcaagtcgtgtggcctctacagtgtgttgtgatctttaggagaaattttaaagtaggactcgaaaagtgctgcatggtttattgcaacaaattaaataacaaacgcaacaagactgactttattgttcagcaacgaaagcgtgtcaagtaacgagaatttctctcgattcgtgattgatatggacagcttataacgttttcactacagaattattcaaactgatataaaaactttaatagttcatgttaattgttttattatattattgtcggcccggtaagtacttagcctacaaaagaaaaacgaacaattttgtgaaagtggcgatttattttctatggcttctaattcgacttaaatttctgcccggcaagtgactttttcgtgtttgtaaaaaaaggagtcatacggggcaaaatctggacaataagttggatgcggcagcagttcgtagtcaattcgaccaatttcgccatggcgacgacgtaagtgtgagccggtgtgttgccatgaggtttgttccaacaaacagtttttgtacggtccagaaatcgtcacgaaactgcttgtaccgtttttatgcgcatgttgtcaggaaattcactagacgatcacattttttgttggaacaatcggaagaacgatgcgataaacgatcattgttttgttggaacgtattttgtttactgcgcaggagcgtgatcgttacatgacggtttttcgctgtgttggaacaaacctatgatgaaataggcctttgttctctgccaaatggggccgttttttgtgcaatttggcgtccaagcagcccataattcggcataatagagctctgtgaccgttttgtccttctccttttgtcaagaggttggaacagcactccaaaagaggcactcgtttttaacttgattttagctgcctcttaagtagtttgacctccagttgtaatcatctctttggttgttccgtcgtctacatgagctttttcatttttttatctgttttaaggcaattttaacttcctcggggactatattcaacgggaataaactagacaggg

SEQ ID NO: 6295 - DNA, 5734 bp, Diabrotica virgifera
  SmartBlast Evalue=3E-40; Info="VAMP-associated protein, putative n=2 Tax=Aedes aegypti RepID=Q17GP4_AEDAE"
aaaagtgcagtataaccgggatctgtcactgggttataaaagtatagaaatcctagtaatttgagtatattttgtgttttagttttcaagtgttaagttaaataatgtccaagccagagcaagttttgcaaatagagccccaacatgagcttaaattcaaaggtcctttcaatgaaccttctgggacatatatgaagcttaccaaccctactgataaaagagtagtatataaaattaagactacagctccaaaaaaatattgtgtgcgtcccaattctggcattttagaacctaactctcacactgagatttctattttcttccaaccacaaccgttgttgttcgacactgcggaaaagaacaaacacaaattcatggtgcagacagcatttgctcccgaatcggacttcaacatggatcagctgtggaaggaaattactcctgatcaactgatggattccaagttgaagtgtgtcttcgagttaccgcctgatcagacagaaggcaccactgaagacgctactaagtttagtcccaagacagttgctgctaattctgcagtgccagacaatagtaacgtagagtgggagctaaagaaagctgcacaagaggtacagcagcttagagaagaagaaagtcaattgaggcagcaacatttacgactaaaagaagaaatcctccaattgaaacaacagctaggccaatcacgagccgccccagtcaacagatacgccccacccgtacaggaacagaccattccaatggtgtatgtcggtttggcagtacttctgagcttcataggcatcatattgggcaaattcgcgctctgaaacggagtccacacaagactcggacaccattcttgttgtatatagaccagtcgcagcataagattttatcattttatgtggtattgtagaaatttttgatagtgacattttggtggaattaaataggtatcttgtttcggaaaaatatccttctgaataaactgtgacgttactatcatcacttaaaagacaatttagtaatagtgctaagtattctcttgttaagtgatcacagtatttctgctcttattagatgctgccagcgtcatataatttaagctcttttacactcttgtaaccatcatccgctagatgtacgtttccattgatgatgccatttaaaattatcatgatctgaatcctatagatattttttgactcatcagttgcatctaaacttactaagttactaagtattttctatgacatttgaaaaaaatatttatttccgtttttttaagccaagagccctatcacattccaccgatttcgtgtttaggtttctggaaatagggtatctattcactttactaataggaggtggcataataataatttaacagtttgttctcaatgtttccaatggctggtaagcttattgttcatcagggagtttcgagaaacagtttagacgtttcaaacccgacattttcattgtctactataatagatctttgttcttcagtttaattggttcatctaaggtataataactaaatcaagtattataacatgatttcatattctgaataaaggcatttaatatatatttacatttatcctatacatgttttccttgactgaccaataaatatatctataaagtttatatttgtaattaaacattctgcgggtagatagcgagttgaaccaacctttaatcgaccaacactcggaacatattttggttagcctataccagaagcccgtacgtatattaatccatgagctaatttatttggtagcctaccgctagagctttatgtgtactgaagcaggtatcccgcttcctgttcgagtctatattgaatataaagtaacatatacattgacaaatacaacgacaaaaattataacgcaacttttcgggtttttcacgtctaaaaaattacttaatgacaacgtatttattttacatgccttgaccgtagtgtaacgaaaaccgacaataccttaattatttggctagctatttgctttgattgttgcaacattgagaatcatacttgcactaaaatatttatcactctcgtcacattcaaaaatggctactcttaatagcaaaaactaatcattgactggtgtaatatttattaaaggttattcattcatattgtctattgtatattcggcaaagtggttaacaaaacatgacattattttaaaaaaactgcccttcgttttgcgttaccaaaaatacctatccaaaatttgtcaactttatttgttgttattggtgttaatttagaggtatgctgatctattgtcacctgtcaaatttaatggcagaagacataatgacgtaacattggaatgttgagaaaattcgatgaatggatgaactacaaaaggaatgatgagcgaaaacctataaaaaacaaaaactttatcatacgtgaaatataatataatgaggaacaaaaggttcgtgtgtgttgctactaatcttacagttttaatgcagttttcgtatgctaatgtcatggaggtttgtgcggtataactgtaacacttcgttcaattcctactggttccgaaaatgcgttctatcttaatgcctaacgagaacattgagtgggggtggcatcgtagagaggtgccaattcaagataattgaatcggtacagagtggcagggatttaaagaggtaaaaccaagctgcaagctttactagatcacgcttaaagctttaaagcttccagtgagaccaggtttgatgaataaatctgatatatcgcaacatacctattcttaagatgcgctaaaattcgtttcctaaattgtctcgttgtatgtccaatataaggtttgaattggctatttgtaatgaaaggtaattttatttaaatgattcagaacagtagagattaaacggaaatggagagcagttgatggtcatgtttgttcattcactatcacattaaattttttctttgcccaatatgtaaccattcgaagtagattattttgaggtggcttatttaaaatcaatcaagttatgattttctatcctcaatttaagcatttttattttttttatttttcctatagtctgtaagatatgtgttatgacactatttgctaggttaatctatttttaatcttacagtgtgtttcatataattctatttcgttttgttgattatttttaaatgttaaatgtaggtcctaactgtgttttgtttatttcctttgtaaataaaatcgtaatatggttatctgaaacatcctgtatatattaaccgtttcttttttatgaaatctgtcagaatttcttttcgacgtagtatttagagactatggtcacttattacagtgcaataatgtcgtcgcattcaagatctaatatgtataaacaaagtagaatatattgtatgttatatatgtctattgaagaaaaataatcttgtagttataaacaatattccaaattatttcctaaaaaaataaagaacatatttcctggatgaacgagagattttatagtgaaactattaaaaatccaaaaaaattaggcgccggacaaaaattaatgaagaggatggtacattgcgttccgacaaatctatttatgggactcttgctttctaaatggaaaaaaagacaatttttaaatatttttaaagaaaacactatattttaggttataagttttttatagataggtataaattgttaagattttgaggcaaacaaaaaaaaattgttggcacttttagttctttttcactactgtagaggacgttttcaaaaaatgcattttaatttgggagactcttttcggcatttctgtaacaactttttttaattccagcggtattcaatcgtgagacttcgcgattttattaaaagttcgaaaaaaacatttgggggtgaatttacccttgtgctaagtatcaccaaagttttggtttactgagattggtgtagtagatttagagagaaacgtctcccagatttgaaaaatgtgattttgagaaaaacgcgtttaaggtatctttactgtaattttatccaataaaaggtcatatttattttttctctaaccagcgattcctggtgcatatttcaatgaccaccagatccaggcatttttccgattttcaaaatagtaattttcgacaaatttcaataatataaaacacgtgctcgcgtttataaaccaacgcgttttagaaaccaactgtcgagttgcagctgcacaggacaggcgccgtgcgcattgttgtgtccaaactagttttagctcacgcaggtaccgttataaatacagctataacttcgtttctatatggaatttcttaatatctgttgatacaattttagaacagtatttcggttactaaggaatgtttttacgtaaaaaaacaaaaacctttaatttagagagaagtctccttaagtagctttacgcatatgaatgcgtttaatgttcacatggatcttaagttttgacaataattgtaactactagctagtactataacatagtttttgttattgatgacgtatatcggaataagtgggtcataaataatagtagtgagttaaaatcttgtctaaaacagggatcctaaaatctccaaagggtaaacaacacatttgataacatattatatgaggatttttgttacatgtaatttttagtttttttattattatttcttggggcatttgtagatataagcacgagaaataacttgtaataaatgcaattccttcatcaaaaaagatacaattcacgcaattttccgaaatatatctatcaataggtatatcaatattcaaaaacgaatttaaatatctttatgagataacgttcagaaagataaatttatttattcaatttgtattttggaaaatcgtatttggctttggtgtactaaggtattcgcctaaataaactgtactctatatatacgagtagacgtatttaagagtatatttgtcgtaggagcaagatttgttagttttcgtatttaaatcggtaaacacctacttagataggaatatttgtagcgacgtgctgttggtcttgtaatcaagtaatgaaatccacctcttcttttcaaccagatcctttggaaatacaaagaatctacatatccctttctcactatagtgtttacacaaacattatcatttttattatacaaaatacatacaacggttcacaaaagttcctaacctttgcttggtgaatatcattaaaaactatatttattttctagaaatttaagaccgaacaatgttgttattatctttaaaacgctatagttaagcagaaaaaacagaagaggcagcaaaatttcaactttataggaattaaaaaggcttgagattgggctaatcctggttttctacctttgtttacaaataacaatatgacagtcgtgacatcacacttcggttgtcagccttaaaatcttttcgttttttttttatatttaaactatatttatgttttatgtcagacattttctaccatgtagagtatttatagcaaatttctattaatgtattgatatattatcacaaaatattcgtagtaaaattttaaataatttcttgtttttctaaatcatacatatagcatacacagcatatacataagatcgtcccccggcgacgtcagagtgtgtgtaccacgtgacctataatcatagttaacgctcccagcggat

SEQ ID NO: 6296 - DNA, 5694 bp, Diabrotica virgifera
  SmartBlast Evalue=1E-134; Info=Protein transport protein Sec16A n=1 Tax=Harpegnathos saltator RepID=E2C585_9HYME
gatcacaggatcaaatcgattaaaaattattacaccattaaaaacatttacactgcatcacctgacacagtctccaaaatattcataaccatttttatccttccgttactgtggctgaggatctcctatatgaggcacaccacccggtgtaagaaaatctataggcgcgttaggatctgcaataggctgaggaacgaagaagttcatctgtggagcagctgaaggcaattgattgggtgcgggaagagaagcaggccctgaattagcttgttgtttattaccttggttgaaaacgtctatgtaggaatttttcaggtttctacccttctgcagtttaaacatattcccctgctgtgatggtctttgtgggccagcatcttctattccagaattcgtattaggtactcctccattttgttcaacaagcgttctattgggatcaaaactaggcagcgaggtattggcagacgtgggagtagaatgagcttgttgagctggaggtaatttaggcatcaattctgataacttcggcggaggtttaaattcattcgccggatcatttggatcttcatctacgttaatccaacgttttttgtcttgatcccaaacgatctttggattcttatcatccggcaacttcatctgatttttaggcttcaacgccaatttactaaatatacctccgaaccatccagtactttgcgttttttctggttccgcaggtgctggtttgggtttagctactggtttcctttcttcttgtttttcgggtttttcatcttcgtacgcattcagttggttcggcaacgatatctgaggttgtagcggttcctcattaatttgattatttaatccgtacatattttgttgatcaacaggttcctggatatactgatttggttgattattccattgctgttgatttgaccaatagttttgttgatcttggtattggttttgagagaaatctgcttgttgggtctgttgctgaagctgattatcctgatattccgggacttgttgatgttgttcttgttgccaggattgctgcggagcagaatttgattgatactcgtattgttgaagttccggcatactattttcataattttgttgttgttgatttatatctgcttcgtaagacgttgttgtgtaaggttgtaaattttgcatgctttgatgtgaaattacaccggcatggaaatcattttgcacatttttgagatcttttaaccaagaattgtctggcctgttcgtttccaacattccaccaaattgggactcatcttcaacttcgccgacaagatcgtagtatttcagtcgatcggctaggttatatacattatccacgaatgatatttcaaccagggaaggattcgcaacgatgacagaagcgatgttttccaaatacgctaaagatttttccacaagtcctcgatcaaccagcttagtcgctatgagatatttatacacctggaaatgaggaagaacgaaagcggaatcattcagtccacaagcatactcatagatttccgtcatatgtatagcttcgttcgtagcaaaagtgggataaggtttcgagtgatctgcacctaagagcaccagtcgtgtatcagggttgtcgtacttgccaaaaccaacctctgccattaaataacaaaactgggcagcatacaaacttcctctatttcttaaagtatctcccaaagttgtaatggctttacagtttaactccggtcgctgagatgaattggatagaatcattgctaaatgcggacgccaatcaccccatttatcgtcggaaacacacgttacagcagcaggcatttttccagaaagcaattgatacaacgtttgcagcggatcattcatagttaaaccgtttgcgaatctcatcatcacattggcgtaagtccttttatctaatttactagctaagaaaagcgcatgaccccatagactatgtttcattgcccattcaagggcttctttcccagatccataaagcaaaaattccctaaatttattagttatctcctcctcctttagtacggacaataaactaccagtattttcagaaacgatatgattactcgcttcagaagaatgattgatatctccattgttactacttaaactggaaatgacagaagcagcccgaggagggggtatttcccttctattttggagtaaaagctcagctatatcagctcctaccaccatcccattctgtctaatcaacaatattagcaactcccacattaaaatataactttcgacatcatctattttttgaccagcaatagcatttctaattttattctcgcagtattcaattattgtttttttgtgagttactcctttaactaacggccctggaaactggcttagctcttggaactcctcatcattagccaagaaggatgaagtgctacagatttcaactactgccggctgaccgtcgatgggatagtggggaaggatacggagcagttttcctgaagctatcgaagctttgatgtgagccatcgtgaatttagcaggggttagccgttgagaagctgctgttgtatcgtcgagggccaatagcgaatcagtttgatcgaagggtcgagagtagctatccttcgctagttcctcatttgcggaacttcttccagaatgtaccgaagctcgatcctctcccccatatgacgcagaatggctagtagcttgttggtagtactttctataccattccgcgtacgcttgaggattagtacgtcttagattttcatagtactgatattgttggtagtacggattaaacggatcataagaataaccttgataattatatgcatccctaggatctcttctcgatcgatatttttctctttctctatctctatttcttctatcacgatcctgatctttgtctctggccctgtaggattcatgtagggagtctgatctgctggatggcctagatctttgttcattttcataatcgtcgccgtacctgcttccatagtagtaatctcttctattataatctcgtggatctctctccattcgacgcctttctttttccttgtccttgcgcaaactgttatatttcctatcatagtccctatcccattcatcaaaacctttctccttttccttatcactgtaataatcggtatcgtcttcatatcgtcgatctctgtatcttcgcctctcatactttttatctctgtagttatcaggactgtacctctcccgatctcttctactcttatctctatccttctctcggtcccgatccctttctctatctcgatcccgtttagtagttcgttcagcagattttttatctctagaaggacctcttggtggtttcctcgattctctatcactatcactactttcttgcctactttgtctcctcggaacaggatcaggtaaactattattagaaacgtgaccgtcggtcaaattttctccgaccgtcatatttcttacggaattagtaatattcgatatttcttgctcctggggttccccttcgatagaatcgcgtctcttgttatcgggttccacgctggaacttcgggtcggtacgttggttccattttcaagacgggcgcgactaatattattggcagatggttgactagcgatgggattatttacagcagggggagtgtctgccccgatagttgccgatctaggttgagaagtatgctgagttagttgactgaattctggttcggattcattatcctccctattttgctgttgaattcgtaacgacgactctggagaactagattcacctggaatcattctgcgcaaaccttcgggaggaccagaggtatcgaattgagagagtaaatcaacattttggacaaccgttcccaaagtagtaggagctgcagattccgtttgacctaataccattctgctaaggcctggtggtggttcatcagtaaaattaggaacattactagtaggttcagcttgctccagctgtccgggtaccatccgtctaagacctggaggcggataagcatccgtgatattttcaagcccctcttgatcgtaaatttgctgatcttctcgctccgatgtttgttcattcattcgatcgttgtaatttacttctgatagttgaccagtttctagatattgatttctatcattcataggtgcttcattattatctaatttatgaccaagttttatcttttgtacagattgggaatgatcaggatccgacattgctatcggctcagaactatcggcattttcaagattgatctgttgattgtgaaatgtgggttggtaaacattttgtcgggtatcgggcggtgtaatatttgaagctctaaatctacttgcggaagtatgcgacaaggttgttgtcctcttatacggattcctcggatcgtctgctatactggatgttggtaatggaggaggtccttgaagagttttcggtgatggaggtgtaggattcaatctaacgttcgacatcatttctttagtttcatagacgtcgtttttaacaggtggttcatctaaattttgtgctattagatcgtgtcctgatataggagaatgactaattgttgagctccgactcatcatatggcttttatcactttcggatgtatgtagaatatcatctgaagattcttgcgacatttgggactctgtagaccactggggtgtttctagtttgcttctttttcctgttacagtcagatggtcttgaagaggatgtaattttgatatatccgtatccgtgtcagattttggagagattttagccactaaaccaatttttggaaataactcatgcgtatctgtgggttcttcattcttgacaggatttttcgcctcctgagcaggccagttccatgtatccagatttccaaacgaaccatcggtttgtcctcctgtttggttaggagtgatggtcgcttggggagttggctgcacatttgaattgtcttcatccccccatgaccaattccaagggtcttctccagtctgttgctgtccactctgagttccagttccataaacattattttggttgttcaattgactatattgcacattactataatgttgttgttcatatccagagttattttggacatatcccgtgtgttgctgattttgatactgatgttgattatactgactgttttgattgtatgagagaggattgtgttgttgttgttgttgccagtaattctgctggggtggattggtattttcttgtttcggcactggttgatactgtgcatgttgttgtccttgataccaattgttttggactggttggttttgccattgtgtctcttgtgttgcggaatgttgattggggttgtacataggtactgcaggcgctggagcagggctaggtgtacttggacctcttctcttcatccaagacatcgtttacgtttttacagaaacatatgtttaactttcagcttttagcattgatcttgtttcctttcattttaacatatttattcaccctaaattaagttatatgcacgtagaataaattataaacttgatatcaaatcacttaacagtgaagaaaagcacagacactactaatgtaaaattatttaataaacaattacaacaacacttattttcacaaaaaatatatcacaatctcatttctaaattctacattaatttacc

SEQ ID NO: 6297 - DNA, 5548 bp, Diabrotica virgifera
  SmartBlast Evalue=8E-52; Info=Transport and Golgi organization protein 1 n=1 Tax=Drosophila melanogaster RepID=TGO1_DROME
gtgatgtggcctaagctgaagcaaattgtcaaagtatgacaaaatgtgtagttttaagttaatatgttttattgtatttttatttaatatttataatacacattgtttaatatcagacaagagattatgtattaatgaagactgttcagaaccaatttctttggcaaaaacactcttagcgtataacagggcagagcagtatatgttatcgtttaggcccaacacaaacattaaagtattcagtaaagaagctggttccagaactgatttgtggggtgttgaaatcaatggggaaagaggctatatccccaaaagcttagtacgggaatataagatattgggaaagccaactgtagttgtagaaactgaaatctctcaaaagccatctgtgcctcaagacacgcttaaagaggaagtaaatccagataaagtaaaggaaccttttgaagtagttgatggtaccacgatattgttagatcctgctggtatcagccctagcagcactgaaaatccaattttatctacagttagcagtactataagtagccaagaaacttctagttcagaaaatcctgccacagaagaaaaaaaatcagatgctaaagaagatggaaagacagaacaattacctcagccaattgaagaaacagaagtaaaaaatgaagattcagtcgtaggtggagtcttctcttcaattaaaaattggataaatgatgatgaatcaccagaagatgatgaagatgacgatgaggatgatgaagatagtgatgatgaggaggatacagatgaggaggatgacgaagatgtatatgtagaatctaaagaaaagttggctggatcagattctgaaaaagacagtgatgttaaagaaatccccaaagaaaatgttgttgaagctaaagaaaattctgctgaagctacaaataagcctgaaataaaaccaaatgaagtaaaagaaagtgaagaagaaaaacctacagaattaaacaaaaacgaaataagtgaaaatgaatctagtaaagagcaagttactcaaagtggatcaaaggaaaccgaaataactgaaaatgaatctaatgaggatcaagttaatcaaagtgagggagataataaattaaatgatccgaaacaaaaagaggaggattctggagaaagtaaatcaggagttgaaccattgcaaacagcaaatgatgtgaataaacaaaaagaagagggaagttttgaagtaaataaaagtgacgaagatgttaaaagcactggctctgaagaagtagatgatgttggtaaaacagaacacagtggtccaactgaggcagatgctactgaaactaataatagagtgaacactgaagatagcattaaacatagggaagatactgttgataaacaagaatcaggttcaatagagaatattaaatcgaaggaaaatgtaattgatgttaaatatgttcctcaagaagtaaaagttgaggaaaaatccaccgaaactgtaactgatttacctattgaagctaccactctgcccaatgtggaccaaatcgaacctcttccttttgtgcctactgaaacagtaacaccagatcccactgaacaaatccaggaattgaaacctcaagggtctcaaggaatttattctccaattgtagcgtctttatatgataaaaaacctgataatatagttgttgagaagccagaagttgtggagactgattccatggataataattcatctgctgaaattaacgaagtaaaaccagaggtttcggaaaataataatttcactattgaccaatcatctgctgatgttgatcagttgccgtcgattcccgagtcaaagtatggtgcatatagtaatcttgagaagtcgaaatcagagaacgtagatcagtcaggaagtagtgcagaacaacttctcgagaaacctgttattggtttttggccttctgaagccagcacaccgaaaatcgaagttcctccaccagaagatacaccactgaacggtataccgccacctgaaacccattcctcaaaccattggcatagcaacgagaatccaaacaaagacattgctgcagacataaacaatgtagacacacatgtaattcgcaataatgaagataaccaaattcctgatgccccttcagatgcggaaataaatgcattaagaaataacgatggcgtaagaccgaataatctactaggggaaaacttagacgagggtgttttaatcgaagaaacaatattagtggaaagtggtggatttttgtcaggattattttcctttttttggcggtgataaagaaaaacacgagactgtagaaactcattcaaccccagtgagcaatgcagatagtttaatacgtgagagcactcatcattcttctaatcttaaggaaaacagtggctattgcctcagtcgtgaagaaaattgtgatactctagaaattaacagtatgttagaaaaattggtcttccttatgagctccgatattcttatctacttgggaacaactgctatatcttgtataatatttttattcgcttatctattgatagacaaaagcagtagagaggcaccgctagtgcgaaaaattaataaattagagaaagaactgctggtgattatgaaagagaacgatatcttacaagaaagtgctccaacaggaactcaggttccttccgaggaagttgatctgttgaaacaaaagttggaagagcaagaacttttaaggcaaactcttgagatgcaagtgttgagtcttcagaaggaaactgaaaataaacatgagcttgaagaccagatcgagagcttggagaaggaattggaatcatctacggaggtgggcatggaattgaacaggattatttcggaaatgttggattcaaataatggaggtgagaagttgaaagaaaatgtcgagcagttacataggcaactattagagcagaaatcgatcataaacgatatttccaaatcgctgaacgacaaagaagaagaaagcgctgggttgcaagcgcagttggacgagagcaaaaaacattctactaacttgcaacagaaactagatgaaatcgtagaacagattttgaggatcgaaaaagaaagaggccagcaagaaaaatctcttcaggaagagatttcgatttatcgacaaaaatgtagtgaagaaatgatgaagaaggagatgctcagtaacgaaatcaagatcttgcaaactcaactcgcagacgctcagcgcaaagcagatctcaaaataaaagaataccaatctctgaaagatagtctgaacgatataaaatccatcaaaaatgacaacatagcccttcagtccctcttaaacgtcacgtcgataaaggccgagctcgagcagctaaaatcagaaaacgaaagatactccttgatgataaaacaagaggaagaagccaagatactgtttgaaaagaaatgccaagctgtgatagacgaaaacaatgcattattgaagaaataccaggagtctgataaggaaaaagtggaagctactatgaaattggaagttttgaataattattttaagaagagagaggaagaactgcaaagcgaacttttgaaatacaagacaatttgggatgctaaagaaggtgaggccacatctactaccgaacgaatgaaattgatggcagaagaaactgaaaattataaatcgcagaacgaaacgctcaagcaagaaattgttgcgcaagaaatcgaattgaagagtcaaatctcgatgttggaaaagaaagttcacgacaattgggtgacgtccagacagatggaaaggaagttggaggacagcagacaggaaacagctcttttaaggaatcgcctgacgttaagggagagggctatgctcgacgaaaggacacaaaacaggttgcagtctcccgttgatcaaaacggcgatctcactctctcacctccacccatcgaatctcctgcttcaccggcgatgttattcggtggacgagatcacataacaaagtcacctcctatacccggtcttcctcctttccttccccctcctcctggggcaccgttcatgccgccacctttgcctggtatgcctttcatgccgccaccaccctccatgtttcctggagatcacagaccaccgccccttggaagaatgtcgtctccgccaccgcttaattcaagatactctcctgacacctctgcattttcaccatacgatagacatactcctagtccaccatacgattcagaatatggagcatcacctccaccgatgcgaggttacagtccttacagtagagatgataggagagactataaaagaccaatgcacatttcaaatggtagaaataataaaggttcactaatgagttctgggtctgatcattcaaacgattccttagataaagtaaatagaaaatcgtcaaagatggtctagcagttcagctgttgtttctataggaattaaaaaattgctcctttaagccaaagcttaaaattacatttatacaccttttaaatgttacttctttgtgtatgagatatatctatttttttattgtattgtttttccgtgttaagtacaaaaatgcggttacaatggtagtctgattgccatcgacaggataactagaattttttaaataaagaaagagtagtatttattgttgaaaacgatgcagagaaaacacagcgatatcagtaaactattgtccttttcatgatcatttttcagtgcgtaacaaatgataggaaaaagggtaagtcagtgataatacacatttatgacatttattctaacatgacattttagttaaatctgacatttgtcacattttattttcaatttggaataaaaacaaatcaaatgtgtttcttgcatttataaaatggtatgttcttataaattatgtatagtcttataaattatgtatagtcttataaattatacagattatatttgtaatattattatctaattaaaaaaaaatatttttttgttatggcgccatctatcgacaactagaataactagaataaattttataaaaatgtcaccgacgaaatgtaatcaccgacgtgcctttttttctgtcacttacaattgaatgcgttagaaagtaatcgaaaaactgtgacgcactgaaagatgatcatgagaaatactgtatattttaatttttacaaaaccgatacatatatttttttcttgaaaatgtatacatacgtgttgtcaatcagttagtaatattttcgtcttgagttttttgtgcccttcatttcttcggcgattttaaagaatcggttccctaatttttaaagaatatggttatatatatttttgattttaatagccatccccccccccagtttgttggttgaattatttgatcatttcgttcattttatagcattaattcaagcgttttttgacatttgaaaatgtacaatgcatttttcatagttaaagattcattcaaccttgaatatattgtagtttgtgacatgccaaaagataagtctatctcataatgaatcaaatgcattttataa

SEQ ID NO: 6298 - DNA, 5471 bp, Diabrotica virgifera
  SmartBlast Evalue=4E-80; Info=Ras protein n=1 Tax= Fenneropenaeus chinensis RepID=E4W4T2_FENCH
gggtgcggcatgcgctgctacaagtgagcatagttggtggaagaatagcgacaatttttacagtagctgaaatgttttgcacataaaagtatcagcaataaatttgtttagattatccttttgagcagtcatagaaaacgatagttaaacggtagtaaaaatgcgtgagtacaagattgttgtattaggatcggggggtgtaggtaaatcagctttaacagtacagttcgtacaaggaatattcgtagaaaaatatgatccaacaatagaggatagttataggaaacaagtggaggtagatggacaacaatgtatgctggaaatactggatacagctggaactgaacaatttactgcaatgagagatttatacatgaaaaatggccaaggatttgttttggtttattctataactgcacagtctacatttaatgatctccaggatttacgagagcaaattctacgagtaaaggacactgatgatgttccgatggtattagtgggtaataagtgtgatttggaagatgaaagagttgttggcaaagaacaagggatgagtctatcccgtcagtttagctgtgtttttatggaaacgtctgccaaatcaaaaatacatgtttatgatatattttatgatctagttcgacaagtcaataagaaatctccagtgaagatgataaagaaatccaaacccaaatgtgtacttctataattttagaaaatctcttggaaccaaaaagtacattaaagattcaaagactattatatatatgtagagtgtaaaagaggcaagtgtggacttaaagtctcttgcagtgaagttttttaaaactctgtatatcattctttttaacactaatttaaatatttgtaataaagttgtcggttaatttttccacaatcaggttgttattacatggttatctagatgcaatcttagtgatagagtattttgaaatactgccaatatgtggtgtcaaatagagatagagattttgtgaattagtagtatttgctacttctgattcaagactatccacaggacaatacttcactaaaacaaaattttaactgacatctgtaagtcccatgtccaacaatattaacccattaacgccgagaaaaaattttgttgccaacaaaatttaaacaaccgttaagtgtaacagtcttttgtacaaaacgcaacaagaaaattgtttgcaaataaaataataaatgagaaaaaaactgttcccatatgggaccactaggcgcgaatccgataactgtttgttaagagttaattggtatgaaaattgcgaaaacagtcaatgcaaatgccaacatcaaaattgcttggtctcccccggcttaaaaatcgaatccgtgcgcatcttcttttgttttctggtacagaaaccacaaaatgatttaatccgtcgtaggtatcgaatatttctaatacgagaatcacttcttgcagctgcggacactcttcctggtgctttcggtgagtttttatatcttattatattcgtttggataatagcccctgtccattccaattggctaatattacgaccagattttctatacaaatatgtattttgaatatttgcgtccactaggtatgataaggtacattcctatcaatcaaatcagtgccacccatattattgttgaaacagtatttttggcctcggaataacaatgttttttgtcctgtttttttttgtcctaaaaatctttttaaaaggtctagttggtgtaatccaaaatgttctgtagggcttgaaccagcatactttgaggaatcacacactgataaatgtaaaaactgtagtaaccaaatctccttcttcgcaaaaatctgtattttgcggccgcgtgaacataaattagatctccatcagttgaagttggcggagatggaattactctgctagtatggggtggattttacgtggtttcttctatgatcgtgacttcagcagtgcctccgattctagtgtccaaaaatacaatttccgcgtctaaaggtatctggttgcgatttagattatatataaaacccgcgtcatcagtcgaatcttcgtatgtcaaaatgttactatctgaaaattctatgtaaacggcagaaacatcgttataactttcgttttccttgaaagctatatcgagatcttctttcaaagaaattcctctaaaaataataaaatttaaaaaaaaatagtgaaaacgacatatccagcaaaccgcctagtggttccatttgggaacatacatatttttggcgtaattacgaaaaacccaaatgatgaaatattataaaaacttacacaatttatttattgacttttgtagaaaatcttttgaaaacaaaaacgaggatcatagtgcaaacagtaataaataaaacacacaaaacgaatgtccatattttggcacaaacaacaccaattgtaaattcacaaagttactaccaataagagacttgaactgcaaataggccgaatctctgcgaaatttaactaacaatatggtaaatagactccgatgggtacgcaatttgttggctccatatggtgcccgtaggcgttaatgggttaacatgaactgcaacttcttattccgttggaatttctcactttaaccaacgcccatttgccccataaaacttttctttgatcaatttgaacattaacttgtggtgagatgtgataataatcctatggtgcttttctagtaggtagtgatgtccttggcgagatcaaatattctattctcaaaagggtgcacccttacgaatcaccaaattttattttacaaattaaaacaaatcaccgaagcattacacaggcggacatagatacgtcaaccaattagtacccatttataagaaagttgtgattgtttgcacatttgcaagaacgtttattccaaatcagtaaacacttccattgtgtgaaatactatagaaatctcaactcacaagtttacttataaatcttacaatttttagcggtgtgatagctcaggcggtaggatgtctgacttccacgcaggccggaatcgaatcccagcgccggcgataacatctagacatgaataaaaatgagtaccttaggtataaccaggcggttgaagcgtggctctagccctgttactttccttgtataccgtaggccctagagatagtagactatcctgctacaattcaaaagccgcgtcagcggtataaaactattattattacaatttttaaatcttaaagtatcatttatttcattccttctagagaatcttcttcactcttttactattataacatgtaatgtctacttgtgcgagtttactaatatactatgccaatgctcatatcgatttattttgttacaaatttacatacattcccaacaatctcatgggaaggtaaaataatttgatcatttatctaccgtgtcattcttttgggcatggattgagcaaggttcaagaaatattctctttccatggttacccacaatctcttcaactcctttcagctgatttatgttgctcattcgagactcttgaaccttcatgtgtcgagtgctgatactttttacaaaaagctaatctttttcttcattgcttttgtaagcaagtgcttctttgcagcacgtcgattaggcaatgcctagatctttctgaagctggtgacaaatagttcttgtggaaatgtcgttatttctcataatattcgaggcgttctcaatgggattaaggtcgggcgagttacccgaccattccattacgttgatattgtgattctgacaagaactttgtcactgtcttggccttgtgagcacgggtgccgtcgtgcataatgaagtcacattcgtgcatttcccaaaagttcaaataagggtaagaacagaacaagtgggtggcggtggaggtggaggtgtatgtaggtcgcggtcgatgtcgatatccatgtaaaacaaacacattgtagtgaatggaagagaacagagcaggtaagtcgcggtggaggtttagcgcgatgccatccaggaggtttacatcgatgcttttgaaaataaaatgagtttttacattgatgtccaccgagcggcccacaaggatgcttttttatatcattctttttttgtattcagtttatttttaaatttctaaagtaattaaatttagtaaatttttgtaatatgaaggaggatctgattatttacaactgacatttcatcactatcatcacttgactgacacaacatcccaaaagcacagtctttttgtcattcaaatttcattaaactacagtggaacctccgttatccggggtaatgacgggtttggggttgcacggataatcgaaaacaccggataatggaaatacattattttattgacttaatgtgatagataagaaggataattaaaaaatgtatccgaaaaatcacttttattaaaaaacaaacgtttttttacatatgtatgtacttcatgtgtatattaaattatggtatgtatgtatattgtataaaacacttaaaaaataaatacataaataaaaaataacaaaaaatttgctttttgtcaccccggttaattggaaccccggttaatagagcccggataatgggggtcctactgtacttcaattgatagtggttctagtttgactgacagctcaattgaccttgctatgtgttgtcgacatcgacttaacaagtagcatccaccgcgacctacacatccacctccacccacttgctctgttcttaccctaaatgttgttgtagaacagccaaatagttgcttaccctcattgtaacattattaggcaagaagtacaattttgaccgtgtctttccactgttcaggtatccagtgctgacactttttacataaagacaatctttttttcttcattgcttttgcaagcaagtgctgctttgcagcacgtcgaattgacactggtagatctttctgaatctgatgacgaatctttcttgttaaaactttctgaaggaggtcagtatattaattgttgagttccgtgctaattatggaagagttcaacattactgcatgcttgatgatggtgtcagtcctagatgatgttgttttagcagctccagaaccaagttttctttccggaacaggctctgaaggcaacgacattttgttttaccttgtgagttttgagtttctttcgtattaggtctgttgagactagaagggttgtacaattccatgacaatctaagcgcttccacagatttctataaatgggtaataagatcgtatgtctagccaccccgttttataaataccacctaaataagtatattgtcttctatgaccaaacatttcccattctattgtaatgtcagtatagcattaagaatattaaagcgtctcttatatgaattaataaatgtgcgatatgatgtaaactatctttaaaattttaaatataattgt

SEQ ID NO: 6299 - DNA, 5428 bp, Diabrotica virgifera
  SmartBlast Evalue=0; Info="Ubiquitin-protein ligase EDD1, putative n=1 Tax=Pediculus humanus corporis RepID=E0VM80_PEDHC"
aatttacacgaatccgaaattcttggttttgatggcgagcagcagtttctgccttaggactgttctactgctgtataacgggatatatagtcgagatatacatgtgtttgccgtgggcaaatgggcgtcgtcggccggccggatggtcactgaaggcatcggctggaagccgtcttcgcttgctggcaaggccggagaaccggtccagaaatataccaaatcctgtcgttcaatgtgagtcatcttctcgacgatagaccatagccatctcttaaatttcactagtcggtcgctgttttcaccagattcgtcattaaacgaagtatacgaaattagaacggctacgttgatatctcctactccatttaggagaagtcgtaagtcttcagctgtcagtccgtccaaggaaccttccggaaggacgtcaaaaactccagttctaatattctctatagctttctcttgtacttttatcatcctataattggcatatttcctaacataatcgtaaacattacttgaagttacttcgatttctttgccgcctggtattaattctacagtaccacctccttcttctggacacagatcgatagtgaagttaagatctagagccgacaaaaaacagttactatctttcgtctccgcatcaaccaccaattgcctcaaagactcgtacactactgagtcaaagaaggccaaatcgtggaatttaactggtctacctagtatggatttgagtacgtgtctagtaaggaaaataggacaaagttcgttttggagcaggcacagtcccaacaatcttccgacgtttctgaaagcattcagcctttcaaaagtcgcttttccttgtctgggagcataaaagcctcgttttcctggacaatagaacaacggagctaggtcctcttcatcttgaagggattcttcgagaatagcgtcagtagttaactctgactgggaatgtgtgtgggctaagatcatctctacagcttcttctaccttgcttctcaacgtttcgtcagatgctagcaatagtaaaagctgcgcaggtgacaattctaaaagcatacctgtaattctagcagcgaaagtaggatgcaaattgtgcactttaggatacagtctttctccgagatgttgttgctgcgtcgtgagatgttcgtttctggtcggaggcggaggttggttgacgttggcggcgccctgttggttgttagccgccgaagaaatgtccggcatcgagggggcatcggaatggtggatgttgtccataggggtgaacggacgcgcctcggcgctcatcgtccgacggtggtgatccctagttttattccaatttcttggcggtacgctcctcttcaacacatccctgtccctccttaacctctgcaagacactgtactgcgaatatttattatcgacttgggcactttccaaattgggtaaattttcatttaacaaaattgcttctgcgatggcggtatagaaacttctagctacgccactgccctctccgggttcatccttgaacgtcacctttaccctgttgactgccaaaggaggtgaagacgacgaagtacgtctgttgtaactgttgtactgggtgtttagttctttgaaagtttggatcagcagttgagttctgtctcgttcaaccttagacaacgtcagatctctctgttggttgttccgcagcttttccatgtctctcctgaatttggcttctttgactgggaatccccccaactcggaaacgatcgatcctggttctagacctacgtcttccatgaatactcgcccgaaaagatccagggaaagccgccatctgcccaaaagtaggtcgtgtgatactgattggccgaaagttggtcttggaacttcggcgttcactggtgtcgtcacgacagttacgttcgcggatatttcttggttttctaatgtttctggttgggagatgtccatggaggacatcaatatttccgtgtcttcgagtttttgggtagtcgaagatcgtgctctaacgatgacgctcttgctggggtttctagaagtcaatgcctgatcagatacttcctcactgacgttactttgggagcacatttccaggctgctttcgccagaagctacaccagatgaggtcgattcgtgacttgaaatcgacgatgaattttcagattttctaggagaaacaattatctgaggtctggataaagtctggttttctgcgctgctcaaggaaaacatatcgactgatggattatctctgcatctcgacaaatcttgaggaagttcttcgtgtggcttcggtataggtaccgaagtactcgttgaggcatcgacagtactagtttccttgtgaaccgatctgttctcgtcgtcgacttgatagttctgcggatacaccaacggattaggtcccataacgatcgaaatgggatggttagccttggcgggttgactcatcgcgaactcggtagttctggtggacaggctcaatttcgtaggtagattttccaaaggatttgccgcgttagtaccgcacgaggttaaagtgacgggctgtttgggaatgccgaacagttcttctcgtctggcgttgggctgaagcaagtggggttggtctgcgaggggtagagcctcggctagtggcgtgtcgaatgggtccggtggtggacaaccgagacataacgtagattcggatctctggaagaacgagtgtttccttccttttccggtgccactctggacagcagtagtgttcagagtatttgatatattgttggccaaattggatacatcttggtcatctagcgattcagtatccatagcaactgcaatatcctcctcagcttcgtcattttcagtttcatcaggttcattccaattaggcagcgccaacccttctctcctggcatcgggatcgttcagatcagaatatcctgacttcatataatagatcagagcatcgaaaacgtaagcgacgtgttttaaggcagaaacgtctagaacgggcagcgaatctagatgttcgttattgtgggctctcatgagagacaaacagtagagtaaaaattctcttctagcagcgtgtgcatctccactctctctatcgcttctagttctgccactttctacgttggcggtgaagccaacaagtctgctaccggatggattcgtcgagctacctgttactgtgtgcgttctgtgtgttctaatgctgcttgtagaactagaggcgactaatgaagctaaagatgtagcaggcatattacgacgcccacctcctgaactactggatccagtgttcaagggatgtccaggactgttcagatccaaagagttggtcaacgaagctccgaacttcaattgtgcttccgtagcgtccatgactgtcaacaaccagtcccaagtcggtttcagacggaattccaagtagatctgtagattgtaaatgtcgtcttgtgtcacttccatatcagttggtgatgcaggcatctggtttaagtattgtatcaggtaagacagatatgatatttgccttacaacgatgccgaaagctctggcgagacaactggccgtggttgccatcgtgatgggttcggagctggcctgtaccgtggtgcttccagtggtcgatctcctaagggaactaggatcgataaataccaaattagaaccgtttggtaaacgaacgccctgcgatctgcctgcctccctggaccgaatggcccactgcatgttttgaggagcgagattcgtgcgctgaccatgaccagcagcattacttcgtctctccaactgttcgtcggttagcgtgtaatcctcagtatcttgttcgtcggtttcaccggcctcgctttcttcttcttcctgctgcgaagattctccactttcatcttcggggaataacagcataccaccagtatcagagccagcagtggctccggtctgcacagatcgctgcgccgaagcggcgtcttggttgctgtggttgtcgtcgctgtctgattcggtctcggccaatagatcgagctctgggtcgctctcttcgccttgcaggcgattttcctgctgatcggcggtcgcctcctgcgattcgttttcgtttagcgaagattgccgaacggcaatcggtagttctcggtccgccggcgtgtcgtcgtgttccgatgcgttatcttcgtcgttatcgatggccatactttctccgtcattgatgtcattcaacaggtcgtttctgctggctacggcccttctgacggcttccgctaagaagggaaagttatctgaagactgagaattgctaatggatctggagccgctgttcgccgacgatggagccaaaggatccactaggaacaattcttcggaacaatttagtatatcattgggtgaagtggccaaaggaaacggagctgtaggtctggcgactcccaacctcactggagcgatcaatgaatcagcagtctcgcacaattcttcaatggacaacttcgacaaggaactaaaaactcttttgcatttgttcggcaggttttgcccgatacgcaggcgtttgttggtgctcggagccatttcaatgctgaatatgacgaaaatccttacgacggacctcacgaatctcctagccaccaagtgcgccgtttctttcaatttgggatcgggattcttcatttctttgatgatggtttctagtaacacatctaaaaccatttggcacttgacgaagaagcagtgagtgaatttgtctaatagcgtagttcccgtttggccagtgacgtacggttgatcctcgtactgcccctctttggtttcattggctccagacatgatcatgctcttaacggctttccagtctcccaagaggcactccagagccctgcggctgaatcgcgggggttccaagtcgtgttcgggcatgtcagattcaatgtctgatgatggcgttttgtttctagaattggatgatgcagttctggatcgtgaattcctaaactgtctctgctcctggttttgtcttcccaccgtttgcaccaaaaacagcagaatactctcacccctcgaattgggcaagcacaccaagtttgtctctttgacgagtctcgtcagcagctcgtatctgaccgtctggttgcccattatcaaagctttgcatttacacttctcccagcaatcgcagtaagccgtaggggaagttctcttcagcttacaatcgtgtcctttgtggcacactctggcgcattcggtacagcagcaaagtgtgccggtcagaccgcaagttctgcattcaaaaatgtcctggttgatgtgttcagcacctgtccatgtaaaactgcaagtgtcgttgcaacagagcacatgaaggggagactgatctggattggagcctttgggaaatatcatttcttcgcgttcttgagccgtg

SEQ ID NO: 6300 - DNA, 5203 bp, Diabrotica virgifera
  SmartBlast Evalue=1E-171; Info=Adenylosuccinate synthetase n=2 Tax=Formicidae RepID=E2BWT4_9HYME
cagaggcgagaggccacccagaggctaatcagctgcaaaagtttgtgataaagattaaaagaggagtcctccgttttcctcgtggtcgtggtcgtggtgcattttgcgggtacggacgggtagtgaagtgttcttgttggttagttggttactgctgattaattctgtgaatatttccaaaaacacgtcgctttctttatttaaatatttttcgtcttttcccgtttaataaaaaatatttggaactcaaaaaagaattaccatgtccagcacaacaaatggtatcaacggatcaccccgcaaaaaacccaggacggacagggagtccaaggtgacggttgtgttgggggcccaatggggggacgaaggaaaaggaaaagttgtggatatgcttgccgcagatgtagacgttgtttgtcggtgccaggggggtaacaatgccgggcacacagtagtaactgatggagttgaatatgatttccaccttctgccaagtggtataattcaccccaattcaaaatcaattataggtaatggcgtcgtcatacacctgcctggtatgtttgatgaaatcgagaagaacgagaaaaaaggtttaaaatcttggagggaacaattggtcatatcagacagagctcatctggtattcgattttcatcagcaagtcgatggattgcaggaacaagaaaacaatcaaaagggccaaggtttaggtaccacgaaaaaagggataggcccgacttattcttctaaagctactaggaatggaattagggtaggagatctattaggaaattttgcccattttaccaaaaaattccaggaattagccaacatgtaccaaagaatgtttccttcattaaaggtagatatagaagctgaactaaaacggtataaagaatatgccgaaaaaataagacctctagtaagagacacagtgtcgtatctagacaaagctatacgaagtgggaagaaagttttagttgaaggtgccaacgctgctatgctcgatatagattttggtacctacccctatgtcacatcatctaactgtagtgtcggtggagtctgcactggacttggaatttctccccataggataggcgatgttgtgggtgttgttaaagcttacactacacgagtaggtgatggacctttcccaactgaattaaaagatagcattggtgagctgatgcagtcacgcggaggtgaaattggagttaccacaaaacggaaaagacggtgcggttggttggatatcgttattctacaatacacgaatatgatcaacggctatacttctttgtgtcttactaagttggatatattggacagcctacccgaacttaagctagctgtaggctacaccctgagaggaaagaagatcgaatatttcccttccactgcagcggatctatcagaagttgaggtggagtacttaacaatgccaggatggcagaaaagcactgaaaatgtccgagaattcagtgaattacctgaagaggctaaaaattacgttaataaaatagaggaactcctgaacgtaccagttaaatggattggagtcgggaaaggaagagaatctatcatcacaatacacgactaaactttttatccaacattagtcaaattgtaagttaacataagcttaaagtgtaacggaagaaattgaaaaccgacagtattttatctgttgttttggttaaaacacttttttatttggtttttattcgaacagttgacttcaaataattttaggtactttatgtgatactttatttcattgattcgttgattttgcactggattaattttccattttgttaaagtagggccaaatccacatgaggggcttaaaagcaaaacgcgtttagtaagtcaatttttatcaaacttaagttatccactgttaaagatactttacagtatgttatatattgggtaccaatcgtagggaaatttcccttttttcgggaattttcaacataaaagggaaaaacttaactcaaaagggaatttttgctccagtccaaattgtaacacatatttaaaaaaatcaaaatatttgaaaattcttctcagattttgtaaacgggagggaattttttcataaaagtggagatttttaagataagttgagagaaaaacttttagcttaagtacaccagcgcgtcatcaatattaaattcgagaggtagtagccgcccagtttttgaaagttctacgaaactttggcaacagtgcgtcgaaattacgtgacactaacaaagactacggcacaatattgtgataatatacattgtgacacattgtagacacggtgactatttctccatgttgccaaatcagtcagttaaattcaatttcttggtatagataatcaattttagtagttccaatgtaatacacaatctaggcacgggataaaaaatttatttgaagaaagtatatttttttgttgttcttaatggcggtaacactcagtctgtaccactgtctatccaaaaaattgtatatacagtgtttctacttggggcaactgggaaaagaaagctagaaagttgctaaacagaagcaagaccaggtttttgccgttttccctaaaattgcacctttggatttaacgcattttgcttttaagcccctcacatttttttgtagttgttatctcatttggacctggaaatgtacgagtatgttttgaataagaggattttgttcagtcaccgcagcactatattaacttatccgtaatcctccaaaaatgtgattttctgacagaaattggcgtcttaaagcacattgcattgcatcaacattttccaatacgcgacaagctagcagtagaacgtactttacttttctttctggtttggttaggtttactcaatggtcacattcagaagacgaaaaagtgagggagcatttcccgatggagcggtaacagttgtgtttcgtcttgttaacgttccgctccctaaattcgtgacagcctatcactttctgtaatatacttgcttctgcacaataaattgttttttgcttcataatcatggtgaaataccatggattgtttacgtctgcgctatattccaattgataattagtacttggtggttggggttgttactccctatgatgggggttgatgatgtagaacattattggttagatatgtatttattcaccaactctaaatgtaacagtaactagttggtgggcaacgtctatcttctctctaacttgatgtctcaatattaaatgaataaacattgattaacgaatgatctgtaatactttctccgtatctataaataaacttgtgatcgtttttattatgattgctgatacgattcgaccgtgaaatattcatatcaaaatagctgacaagagcgttctcgaaacaagtgcattatattgggaaatgtgtgtcacctagttattttacaacaaatagtaatgtttgtttttagacctttaaaaattaaatggatgtgaattgcttttgggatgctaatataatttctgtacatcctcatccttacaagaaaaattttctgagagatgtacatatttcctctgcccttccgacaaagaagaaaatttttctagataacgtcaccaactgattactgtgttgtaaccaatacaaaattaaatatttatttcctatggctaataagtaaacataaaaaaaatgttcgataacaacattgttcccgtttcacttgtaactcactgtgtccttggactgtaaacatatagtctattcttatgtatttccttgattttattattttccattttaattttacaattaacgttatttacctctgttattgagaaggggcctacataaagactatcaaacttaccattctcctctttttgccagggctaggtctcctattttaaagtgttgtggtgtcgctttggacttattcttttcttgccgcacttttttgtgctttagtaagaaggttctagctctctcgtgttcgcattgtagtttgtatcgcaactcattgtagtatacatctacgtcggcgtgtaaccatgatacgcgttaggggttgtattgtagcagtatgtgaacattctgcaacacacatcccaattttctctgtcttcatctatgaatgctcttacgtactcgtttaatgttctgtgcagtttctcacaacttccaatggactgtggatggtatgccgttgaaaagttgtgctctatttttagcagctttgttagttcctgcattacttcgtttttatactctgtgccttggtctgttcttatttgcttcatgagtccgtatgttggtatgaaatgatcaaagattcctcgggctattgtctctgcttctttattgcacacgggtatgctgaccgcgtattttgtaagttcacataacattgttatacagtatctattaccttcgttacttctagtgaatggacctattgtatctatgtatactatgtcccatggtttggaagatgtgtccgatatcacgaactcttcgacatgtgttcttttcggtttgttaatttgacatttgtggcattgttttacgtattttcttacgtctttttccaaatttttccatcggaatcttgcctttagcttcttaattagtctgttattccctacgtgtcctccgaacatcgggtgattatggtattcttctattaatctgtgtttttctttgtcatcttttattgtttctggtacttcacatatgtatatttctatattcttcaattttttatttccttctttaataaattcatcaattgtgcactttttaaaaataatatcatttacgtatatctttactttacgtactgcattctctaccgccagcttatcaagctgtgccaacatttggtttaaatcgaaattgattgaatcctgtggctatgctcttgctgcattttattttgtttttgaccctaatgctcagccttggtgagattagttctgctccaaaagcaaaattggtagtctatgcgcctctaaattatttagtacctttcttactgtctgtttgggggcttctggctgtagtgcgagttcactttctgccttcgtttgccttgcttctttcttcttttctcttgcttgagctcgtgttatagctaatatatgggtattgtctatgtataggttctttagttgatgtaatgttattcttgaaagactg

SEQ ID NO: 6301 - DNA, 5179 bp, Diabrotica virgifera
  SmartBlast Evalue=0; Info=cap-n-collar n=1 Tax=Tribolium castaneum RepID=UPI0001C0B39A
cagtgagttttgatttttgatgactcgtagaatctctagaagtacgtggttggttaataatagttcgtagcgtactctttgtttacaagtgaggtgattttaaaaataggaaactctattgattaatataagtgacaaagttaattcaagttgtttcaaaataatatggataactgctttttctaaccccaaaacagtagtgccggtttaaactgtcacttctctgatagatcagctggtagttttgtttacaacgaaatatgtggataatatggactttatacaattcttaaaaattcggattttcttattttttctaaatgatgtcagtgtgccagtgaccaaaaactgtattggacattcaataattttaaggttatgttgattttttggcagtgaaaataaatactgttaagatgttgtgtctcaaaaagatgtacagggatgagctcctccaactcgccctcctgttaagcattttaagagttaacaatgattccgtctatgacaatatctatgacaatttggattttgataatggtacaagctggagaagtatcaatccatcagtgttaagatcacactatgtaaatccaaaaagtctagactctgttctgttaaactatcaaagagatttatttgctgatctaaactctttagggagatttaacaggggtggcttcagacatccagatgttactacgtatttgcttaacatcgaacggactgctgcagctggagctagcaatgacacattagctattccaatcgtgccacaaaatcagtcagataacattgtcacggaagaacctacagattctttggacatgggcatcaatcttactcaggaggatatggatttgattgaagtattgtggaagcaagatgtggatcttggtttcaccgttgacaatgtggtaccgaaacaggaaaaagaagatattaagctcgagccagacgacgccactacatccctatcgaaagatgacaatttagaaaaaattaaaactctacagtccgtcaatgaagattccatcaagcaagaaaaagaagacgatccttggtccggattcgactacaccattgatacagaaaccggagagtatgtgataaaagaagaagccagtccgcttccacgagagtcttcagagccagtcaatcttaaccttgatgatcttactctcccattgccggaattctttcttgatgaagctctgcgtctgatcgacttggaagatgaaacgtcacaggaaaatagagtaagcctcaaggagctggaaagtctctccactgaggccagtaataaatctgtgccggttgcaacgtcgacagttgcagctaactctgatgagctcgcatcttccccagaggaagcccttcctaaagaccctgaagacgagttcggtttcctgtcagacatgatccaaacaccacaatttcaccacccccatcacagggctccgttccagagccgcatgcccttcgtaagagcagtgagcatggaacaacgatggcaggatctaacaaatttgctaagtcttccgagttcggatggaggcggtattcatcaccatttcagtcatcaccaccatcccttgcacaactacactcaccatccccatcctcatagcatgagctacagccccgaggccgcccgaggtgtgctgctccacaacgccacgttgcccacgcccattggtgacttaaattcgtctgtgccatatagtaatttaggtggtacgaactttgggagcgccgtagcaagttctatgaacctcacgaatagcagcgaaccaatgggagagtcttcaaacacaccccattacaaactggaaccttcgcacgacatggtttattatcagaatggttcctctgagattaatcaaactgatggtttcctttcttcgattcttaacgacgaggatctacagctaatggacatggctatgaatgaaggcatgtacaccatgcgtatgctggacggtaacagcaccttgaacaacgttgctacaaacaacaccacaatttcaatgtcccgtaacgatatggaacggatggatacgtcgagtgatagtgctcttagttcgatgggttcggaacgagtaccctccatttctgatggggaatggggagacgcgggatctgattctggccacacgtctactgagccgtatgtcaccgattatgcatccaaagtccgcccatacgactacagctacactagcagacagttgaacaacggcatgggcggatctgacaacacgagagtcccaccagtggcccaaaagaaacatcagatgtacggaaagcgatattttcaagatcatagctcatcaaattcatcacaaccacctgtcacgcctttgaaatatgaataccaagaaccttctactacgtataacattgccaatcagtctgaaggtgcagttggacccaaactaccggaaatgaagtactcgtgctcgatggaattcggtcttcaaagtcaccttgcaagaaatcatgtaaatcacatacaacataatcacacttaccatttaccggctgaaagtgctggtgccatgcagagaccagtcctaagagataaatctaagcaccgaaaatcagaagatgagtatttaactagagacgaaaaacgtgccagagcgttgaacgttcccattactgttgacgatatcattaacctaccaatggacgaattcaatgagcgcttgtctaaatacgatctcagtgaagctcagttaagtctgatcagggacataaggcgaagaggaaagaataaagtggctgcgcagaactgcagaaagagaaagctagaccaaatattgagtttagcggacgaagtcaaagaaatgaaggacagaaaaatgcgactcattgcagaacacgagtataccagtactgaatgcaaacgctacagagacaaatatcaacaactatacagacatgttttccagaatttgcgcgattctgagggcaatcaatattccccttaccaatttagcctccaaacatccgccgatggatctatcatcttggttccaagatcgaattccacggtttcgaattccgactcaaaggatcctctccaaaatcgcaagaaaccataaaacacttgctcaaaattttatttactaattgttaacagggttgtttttatttttattttatttttatttttatgttacaggacatttcaacaatagtaaagtttcgaaatttttctttgtaattccaaaaaattaaacattcctgcgatctgaacagtacaaaagtgtttaaccaacatgcaatatttattctatactttatttcacgttacgaacggaactaatggcttatgctgatcagcgttgccaaaactatcaggcacgtgttgctactgactgctgatatacgattcattctcgatacgatagaagcggcatcggcgcgcatctattgtccataagaaatacatagccctatatctactcaacgttccgttcttcacgtgaaacgctctatagttatttttgtcaaacaactataactgttattactgcaaaatatcatattcaataatgacaacgttaagacctatatactattaacatcaaacaaaactgagaaaaaatattgctcgtcatttacactttcagaaacatgatttgcaacatacatttttcttgcgattgagtaagaaaagtattgaaattattattgttttatctttccacttttcatctatctttcactccattctttctttttcgcgtatctttaataaatttgaatctttagtatcgcccttattgtcatttatcttctgtcatgtccaaattatccattaattatgaataattcatattaatccatattatattaattatattatcatattaattcgttggcacatgtgataaagtttataacttagaaacattggtattcagttttttctgattgatttttttcggcctattcaaggctatgattactgctttaaacgtaaaaaataaattatgtaattaacaataccccttaagaatagaatacaatagaatttgtctaatgtgtaacattaattaataaaaattttaaaattatgtcatttgtaattataaaaaaatataaacacaataaaatatggctaaaatcatagagactttttaacttatgtaattttacatgtgtaggagttttatacattatttccatatataaaaataaatttacaatttagagtttgaacccagttttaggaaaatatacttattcttttgcacctgtgaattgtcttagtatacttcatcatcaccattatgacatttcaatcttcccaatatgtactatacatagattcaatgaggtgactcttggcccattccactgcaaactttttagatctattgtggtcctctagccctaaatacattctctagcctgatccgttttaaaaggtctaatttgccgcacattttaaaaaccgcacatttgccatgctatcacttctctttcttgtagtgcctatccgttttggatgttggtgaccatcacggcaatctgcactttgcacactgctgctcaaaagatacttttgagttttattttatttactttattatataatatatatattatggatatattattttactttttgatttttgttgttcttattgtggttactgtcattgtaaacatactggcatgtaaaatgtgctctgctgtttgttcttctaggtgacagaatctgcataggtcttcatctgccaatcccattagctccaactgcctattcagcttacagtgcctgttagcagacgtactatggctttgactgtgttcctgtcgttgcatattaggtctgccgtacattttaacgaatattctgtaataaactgtttcgcctgtctttgtcctgttcaattcctccaccattccagagagttatttcccctgtttcactggagcgagttagtcgcttttcctccagtgtgtcttcccctctttggatcggaaagttaacatttcctttccggaaaagggtgacatttgtagtttatggagctcctctcgagattaaaaatccattggaaacccctttatttaaagctttgctaccccagactgtccacgagatgtgttctgagctcatggttacttatccttagtctattaacgctccttttggact

SEQ ID NO: 6302 - DNA, 5112 bp, Diabrotica virgifera
  SmartBlast Evalue=0; Info=ATP-binding cassette sub-family A member 3 n=1 Tax=Harpegnathos saltator RepID=E2BWV8_9HYME
aatattaacagaaaatacaaataaattaatttaaatattgtacatattatgtcttcaaataaatagtaatagtaatgtaatataccattatcacataattaatcttcatgttcaccttcttgggcgaatttcaggaaaacttgttccaatgttgtctggctaaagctgtattcttcaatatttaatcgacgcttaccgtcctctaaactcctaaaacaattggccagggaaggaacactttgttgtggcacgctgaatatgagcctgtcgccaaaagtttcctgtaatactgcattgggaaaaagatggaacacatagttttctaattcttttaatttttggcgtaaatctgtaccctgctgtgttgccaatttaacttctaaattgtatccagctccatatagatttttaagatgttgacttgatcctagacatctaagttctccatttaccataatgccaattctcgaacataacgcatcagcttcttccatggagtgtgttgtaagaatagctccccttgaacccctaaaactagctaaaacagtatcccataaaaatcttttactttgcgggtccattccagtactaggctcatcgagaagaactattttcggattgccaatcatagccatagcataactgagcttccttctggtacctcccgaacatttttcagcctgtttatctttatgttcgtgaatttgaagacccgttaagtacaagtcaacagttcttttaatttcattcttcggaataccccttatgtgagaatacaattctagatgttctttcacagttatatttttccattgggcatcatgttgtggacagtagcccaaatactggaatgctgtattagcgctggaggttatgtttcttccaacaatttgtacccgtcctcgtgttggtgcctcttcagctgtaattattttcattgccgtagtttttccagcaccgttgtgtccaagaagtccgaatacttctgccgaatctactgccaatgatatagactttattgcgaccttcagactttccgcagaacgtgagcaaataccagatttaacacctttttgataaaccttatgtagattctcaactgttataacagagcggttattttgaggatccctaattaaattgtttactcgctgtctctcatttttaacatctctgtcctcatgtactccgacatctctggactcttcaacaatattttcggaaattttctttgatctaaatatatccaaaacttgtcctccatttttcttaacatccagaataagcataatcaggaacaagagaggtatttgaattatcagcgtaacaaatagtactataatttccggtatcatgaagctggagaatgtagttccctcgcaatggggatcagatatacattccaaattaatcttttgtatataataaagcataccataaggtacatacatcatatcagtaaatgcaaatacgtaatgcaaaatagttgcaacactttcttttgcatacatcacagatatatatggtattaatcctagaagagtagatacgtttggcataaccgattgcgcagactccgacttatcaaacatgtagctaacgcaggaacaaaacaaaactgaagcggggcaatagagaataacccatattgctaaaactgttattgaggaatttgaaaaagtcggtggtttcataacaacaataagaattattaacaatatagttatggttgccattaataagatttgaaccaggaaaaagcttgtaaagtaaacggtgaaaggaagtccattaactcttaactgatttctggcttttatctctctttcatacaccatatcaactgctagtacgattggcgcaaacaggaaaatcatacccaaaatgaagttccctggactagcaggagtaggactcacattagttggaggtagttcaaaagggtatgtggtaactgcgatttttccagttgttgcggccatactgtaaaaagtattgctgataagattaataaacattggtaagttattggaatagctgccattgtaaagtacggatatattttgagaagaagaactaaaatcgtgaatgttaaaagatgcataatgtggagcaatgtctaacaatgaggtaaattctccatcataagtatctagctctgctccatttttctctaactgattcttaaatgtagttaaatctgccggactcccattgtagatactaatattatagcctaggtaatggctcaagtctaatggcattggatatgttttaggtggttcgtatttttttccagtgtcaataaccttatttaagtacagtcctagacctgtaaaaataattggcaagatgattaccatccacagcttccttttctcacgtcgtagtctcaaaagtcgtaggcctatcaacgttcttaaattttgcgaagtactaggagtacagcgaaatgcttccaatgaacgaataccttcggtaagagctctgttttcgttgctaatcccttctgagctctggggcaaatcctggtataccgttgcgtcgccatattcctcttctttttgcaaaccaagaaaaacttcttccaaagtagtcattgaaacgccataactggaaatacctaaatcggatttaatgctgatctcgtgttctatggccgcaaaaagtgaagcaaaattttcaacagcattgtgtggcaatataaaactcaattcttttccgtgtcgtctatctttccttgccattttgacgaattgcagaaccaaatggtttatagcattttcatttgacttatcctccaggacaaatgtcaaatggtagccgattccaaatttgtttttcaaaaataatgagcttccgcaacatcttattttcctttggaaacaacagcttttctatcagctaaaatatcagcttcgtccataaaatgtgtagtcaataaaatcactttgtcgcgtcttacattttgcaaaacattccataaatgtcttcttgaatagggatcaacgccagccgttggttcatcaagtataatgatttttggatcaccaatgagagcaataccaatagagagtttccgtttttgtcccccgcttaagcttctactggctgtgtcaattttgtcaagtaaatctatttctcttattatcttctcgattgcggactgtctgttcgatattccttttatggctgcaaagaattccaagtgttctcttggtgtcagatcgtcgaacaggatatcatgctgcgggcaaactcctgtcattcttcttattttgtccatttcattggggttactgacatcatatccaaaaaccaaagcactcccactagtaggcgaggacaatccagtcaaaatattaaagagcgtagtctttccggcaccattatgacccagaattgcagtgatttggcctttgtaaatcgacaaattgataccatcgagcgcagtaacggttggtttacggcattgcgtaaaacttttattcaagtttataattctgattgcttctttgtcttgcatttcccttggcaccggctccacatctacagaactttctgtattaagttggttgggagggatctgattatgactggatctccaataagatggcatcaggaaaaatattggcgatctttttacaccatatgagcttggaatgacattatcaagataccagcctattatggcatacaatactatatcgaccattatcataaccaaactgccaccaaaaggaacccccgaaccatggttatcccacatattactgaagtctaatccttttccttgaatatctgatattgctactttatcaagagctgatgcaaatccagccggacttaaaagggacagtgcccataaatattgaggatgtttaccggagacaatttgctcgacgaaatataaaacaattattagtaccaatataaaggaacttagtactccagccgtcctcgctttgtcgaaaaatggtgttaacataaatgcaaacataatgagggaaataccatagaggaccattaagatgaagattagtagaaggtttacatgaacaaataccttgaaggcaaataacagcaaaacgcatattgtagccaaaagaattacaaaacatgcgtatataatcaaccatgataaccagaacactttgtccatcaatcccataagtttcattccttccttaatctttttctccttttctccaactattaaaattattagatacgtaacgaattgagaaagagctagtaccatataaattggaattataatgcgaatcatgtctgcaaaatcaccaacagtagttgcagcttttgggaatatttccaaagatatatacggtatattatcttgagttggattatcaagttgtattcgcgtatagtctaagagggtttgaagagccaaaaatccagaaaagtagtaagtattagctggacatgtactgccgtcttccatgtttgaatttgggtttgtaccacccctacaagactgtttatcccagccaatatcactagaactaggggtactgatatagtagggattagtacgaatctggtaacttaatgaggtatgcacataaggaaccttaaagatcactgccatcggtgcaaatttatgatcttgatcataagcttcctggaccttatcctctgtactataggggacccattctagactcgatttggaattggacatctttttccatgtttcggttacattgttgacaaagtcgatatttgttgttgtatttggtgcatatgctattttatgacattcaccgttgtcaaaagatttaaataaatattcttctcctcttggagtactgatttctggtaaatttggatcaggtagaaccaactcgataacaaccagaagggctagaaagtagatggggaacaagatttcacctatcgtttttaatttttgcctcttttttagtaataaattccttttgagcattgctttcagttgcgagaaaaaaagtgatttgccgccgtaggccattttgcatgctgacttagatcttctgattatatgagttgtataatctactgattggtacaaaatagatgacactgataataacacaactgcgaaactgg

SEQ ID NO: 6303 - DNA, 5063 bp, Diabrotica virgifera
  SmartBlast Evalue=3E-89; Info=Putative sugar transporter n=1 Tax=Lutzomyia longipalpis RepID=A8CWB1_LUTLO
gagttcatactcttgagtatagacattggtatattttcttaattaataaagaataaagtagttctttcaaaaatattatttgtttaatacattattatgtaacctgtacagagagggtatcgtacgattagaaaaaaataaaaatgctaaaaagtttatatctacaaatgaatcgaaaagaaaaaataataattcacgcagcaggtaaaaatcaaaaaataaacaatgcaatcaataaaatccacatttatttagttatgctcatttctagcttccatttttagtcttcttcatcataagctattaatatttggtcatctgcataatatattacctatatatatttgtaagcccacgagtgcatcttttgctactattttccagtttttcatagctctttttatatacttaacagtggggagggcagcaatattgtcattacgttaaatctttttgatagatgtttaacatattttattttagagactgaattttctgtgaatcttcgactcttttttttgattagttgatagaaagataatgttatatctatcgttgcttatactgctcaaaatcggttttgttctgctacttcattggtgttgttgttgtggacggtcgtagccagtagctagtcgtagcaatagctagcggcaaggtactggctttataagccgattctcgattctcggcaccaacaacatttttatttctatgatacgagccgttcaccgtgcttcggagggtacgttaaagagtcggtccccctggattagttacttcaaacaaggttaaagatgcaattggcgccggaaaaatccaaaagtatttccccggcaaagatgccatacgatattattattgatgctgtaatctacacaaataatgtttgtcatactgccctggttcttctataattgttgcataaatctgaacgcccgttttatagaccaaggtaattcatcctacaataataatacatgaaaacgtaaatgaggagtgggaagagtacagaaacataataaaaaagcagctaaagaaggcatggcagatgtaaaaagagcaacatgaactaatgactggtttgacgaagactgtgcgattataacagaaagaaaaaataatacatatttacttttgcacttgtgacacagatcccgacaagacgaggaggactataaacaactaagtaaaacagattaaaattcaaaagagaaaaagagcatatttggggcacatacttaaaaatgataagtacgagtccctacagctgattgtgagaggtaaaatcgaaggaaaagacggacaactacatttttttcaaaattgagttaatggtacagtcttatagaatttttcacacagaattcaaatctgaattgctttagtttcaaaagcggctagaacatgcaagaaattacattttaaaacgagcatcagtttcagaaacggacagctccaacttgattttgtagcagaataggactacttcgttacagccaattgaaaggtagtatttccgtcaagttgccatgcgcactagaacaaacctactgagtttttactacattgcgtttcaagtttgcaacaatttacgacgttatttaaaccgttttcgtgtttttttattattatttgagatatttttccgaaaaatgcaagtgcgcctaaaaatgaagccaggaagagataagtcgacaaaaataattcgtttaggttcgaaattgggttcaaaaacggacagctccagaacgtggttgcaatatcggccaactccattttcgttattgattttaaggaataaaacataaaagtatttacattttcgttattcaaatgtattaagagacgttagaagtatattcataaaaaaatcacaattggatgtagataatataacgcgctgcagtttttcagctttcctgaaaaaagtacaaaatggagtagtccgtctttcatacttagctcctcaaatatcctggctgaaaaccattcgcgactggaccgggttaaacacacatacgcttttcagaaaagcagaaggtagcgatgaatttataatggttatcaaccttcattagtgaagtcggtactagaagaagaagaagaagtaaaataggagacaactgattaaagagaaaaagtaaatccttcgaaaacataatagagaaaacgtaaacaaagaaacactaatgcaaatagcaatgcagaaataaggcaactacaaaacctaatcataggaaaatacaacattgagggtgtaaaaactttacaaacgtaggagcacaagttaggtctgataactctaacgtctaatcttctttgccaataaacaagttacatggcttatttagacagatcaggtaacatgtaacatcgcaagaaaaaaacaaaatgccgaatatacaaaaccttaataagatcagtactcacatatggttcagaaaccttgacactttctaaaagtgaggaaagatcattagctacctttgaaagaaaaagccttttgacacatattcaaaggagcaaatgaaaatgtaacttggaaaagaatatgtaactttaagatatatcaatgacgtcgactttgcaaagtaacaaggcacttactcaacacacacactacacattactcccctgacttagtgataagttatacaattacgtggctaaaggttctagttctaaaccaaagccaaaatcagagaaaaaaaaagaatcggatatagtaccatttgtggaaagaatggaaaaatcgagatttccacacaaaataggcaaatagtgccagaaagaaaaataagaagaggaagaccgccgttgggatacatcgaacaaatagaaaataatatagcaaccttaaaaataaaaattggagaaaaaaacacgaacaagatcacaatggagaggaatcctggaagagtcaagaccaaaaaggccatcgagccattaatgatgattaatgagtcattctttggaatcatttgatattctggtactatatcttctggtgtaggtgtctcccaggttttcaaagtttcaaattctataaagactattggaacaaaaaggtaaaggtttggtcacttcgagcagagagcagcaggcctacgcctctccgatgatgactccaataagagtcgaacatcttcgattcagagtgctggactgcgctccctgttctaagtgaagaataagattgttttgccttcattcatattgcaactgaataaaaatggcatacatttttactaatggatgagttgtaatgcaattctaacaataaataatatataatggagcctttacctatctaacttggttttgcagtacttttgctactactctagtactactaatcgtaaactaaaatttttattacatatccctctttcttttaattttatactaaatattaccattttgtgcaatggtaactgaaaatagctgaatctgtagcggtaaatattttcttagagatctattagtgcttacattttagtaaagataaaaaatatttaacacagagccacagataaaatttaacacaaatataatgcaaacaatattaataatttctaaatttgataagatggcttcctactacctccacttaagatatactgaatctcatggacatttttgcctgtagtttctggaagaaacttgtaaacaaaagcaattgctatcaaacaccaacctgtaaaaaatccaaatgaacctgatttacctattagttgtgttaacaatccaaagtaatttgtaataaagaaccctaaaatccaacacattgaagctgtagccgatgatgcgacagatttaatatttcctgggaaaagctcgcccatgactgcccacggaagaggaccgaaacctaggcaatatgttatgatgtacacaaccatacttgctatgggtaaccaaccaatactagaaacgtcgctttgtttgtcatctttaaggtaaaagaagaatgctaggactccttccgatagagccattcctacacccgaaagcagcagaaggtatcttttaccccatttttcaacaagaagtggggtgcaaccgcttgcaataatctgaactactcctataataattgtacatatttctggtgccaaagctacacctgcatccgtaaaaagattttgtgaatagaataagatgatattaattccagataattgttgaaatgccaccaaacccacagataaaaataatgcagttctaagtcctttacatttgaagatatcaaaaaagtttcctttatctcgctgctctttttctacctgtactttcataacctccatctctttttgaacaaacgatatttctcttcctcttaatctaatcaacgcttctagtgcatctttggtgtttttagtttgaagaagatagcaaggactatctggtataaatatcaagaatattatcatgaagagaacaggaggaattaccaagataatattaaatgttgcaatgcttacgaatggtccaatggcatatgaaaatagtagccctatcactatgaaaaattgcatgaaagacccaagggatcctcttacatcatcatctgatatttctccaatgtacatgggcaacactgtaaatattatccccactccaattccagaaaggaaccgtccaatatagaagatgaatacggatttcgcaaatatatttaaaatgtatgctactataaacggtaacgttccaagtaataacgtcttcttccttccgattatatcagctaaaacccctcctccgatcggtccaatggctgctgctagtggtaaaaacgaaccaatccatccttcctgagtatctgttagttcgtgatctaatggacttgtagtattgtctttaagtttgggaagttctggtgaagtccatccaaaaccagttccgcagacaaaagccgcaatattagctgcacatgcggctatatacaagaaggtacgatttggagagctggaagtcatgttgacacgataacaccctagctagagcttaaactgaagatagtttgataggtcaacactcacactactttttggttcccc

SEQ ID NO: 6304 - DNA, 4994 bp, Diabrotica virgifera
  SmartBlast Evalue=1E-46; Info=Histone H3.3 type 2 n=2 Tax= Coelomata RepID=B0X778_CULQU
attttataatttattattataagtaccattttgatgtcaatataaacagaacaaaatacaaattgatgtgtatatatcaaaaacagcacaactctctatttgaaagattctcatcctttttttgtatataatgaaatctagtaatataaaaataaatccaaaaacagccttacagagtatgttaccagatcagaacaaaattacatggtcttatttagtaaaacgcttaaaaaatacacttaagaaaatattggtttagtccattagccgtcacaaaactacaaaataaaaaatgcctattctagaataacttaagaacggatcagtctcattttaaaagataagtgcaatgttgattatttgttaatcagtaatcagttgtctattggtaaacaataatttatttatagttgaaaatgtaacatttaatagtttcttatggtcttaatatttgaaggaattaaactatttatagaactgattacagattaaacgatgaatgaactagttgaaatttatggaaattgaggtaatcacattaaactgatatatcgctcatcaggaagaaaagtgacaaatcgtcggtctaaatcgcaaattgccaagtccattttttgcgaaaattgttttttggtttcatctagtagtagacggtaaaagctactgcctgacaattcccacaagcgcaattattattttatttcacggcaatttcggtaaacgaaagttattttactcataggacataggcaaactccacacttttttgtctctcctctaaaattttcaatttgtgacttaggcaatttgcgatttagactgacgaaatgcataattccagttatcttgttaaatgactccaaaagtcgtatacttttaccaagaagtttcacattgcaagatggcggtagtgtcattattcttttggcagtaaaatcaatattttattccgaaacaatgacagttttcagttatattctggcgttctacattaacatatagttgagaaaacccttgtatgtattttgagaaatctcctaggtattttgcattaatgtttaaaaaagcgacatattttaaaagaaaagtgacaactcaaaattttgatcgtttttatttgttaaatcaaatatatagttttcttgattgctaatagaaagacagtcaacatttaaattaagttctaaaatatattttttaacgtcttttctttgtttatgccctttctcctctgattcttctgaccagctgaatgtctttagccataatagtgactgtcttagcatgaatagcacataagttggtatcttcaaataaacctaccaaatataaaatctgtaaatctgtcttaaaatcttgagcaatttcacggataagacgttggaaaggtagttttctaataagtacttttctggtagcgtctaatttcacgaagggctacggtatctggcctgtaacgatgaggttttttaactcctccagtggcaggtgcactcttacgagcagctttagttgccaactgtttgtgtggtgctttaccactagtggattttcgggctgtttgctttgtatgtgccattttttcatgtgcgtatactaactgcgtttcctgaaaaaagctgttttttgagttgtgactctcttcttccagatgagcaatatattgaaaatctataaaattaactaatttgaaatactacattatttacaaattattacctcaacttcagaaaatatccctggcaaaaatatatattttgtcaggtctttgctaaggagtcttaaagttacattttttcataaataatgtggtattatcaccacaaaatcttttttcagatatatgcataaatcaataatttgtataaaacaaatgtcaacaaaatgtattaaaatttgagcttgattttattaatgaaatatacatttggttaacccaatttgtagaatcacattctacaaataaatttgaattaatacattatatatcgatcatgccacgtattaagagtataagtcaaaaatgacagtttttcactacagcttttcgaagtttttattaccactgttgaaataactattacaactaaacatcaaaatggtgatgaaatatgattcataactgtagtaattaactattttactttctattttgataataccttattaattataaaattcaaattgtagaagaattccgaaaggtcttttttatgacttatagtagttagtctccttacaccttacagtaggagggattatgattatatatagtagttatagtcttagtacatagtatgttatatataatttttttttctgaatatacttttttgggtagatgttcgtagaatctaattgtataagacactagacacatcagattaactagtgaagaagaattcataatttcccaaatatgactattcctaagatcctttaatccacctattttattagttggattatacaaattggttatatcgtccgtgatgtgacaatacctcctatctgctttttcatgaatttagggtcatctcctattttccatatgatattttttgagttgttttgtagtaaattcaactatttatttactacaaaacaagtcaaaacataagaaaacaggatgtgaccctaaaaaaagtttgaaatccctcttacaatattcatgaaaaaccagataggaggcattgtcacattaccgacgatatattatattatcattaaaatatggtcatattgtctttcaaacaattatggtatatatcagctttttataactttctaagtgctctaaactttgttgcaaacacatgctaaacacagttgcttgaaatgacatggtgtagtttacctctgaggtcaagatatataattttaataagtgataatctttcagactctttacaactaacaccaaaagaatatacattgaatcgatttaataaatttactgggaatatgccataattttgcttatgaaacgtcaaaataaacttgttttaaataaaattgtggcttatacccagtaaaaatagtaaattgtattaaggtaccataagaaattaacttcagaacgatacagtgaatcaaggctgtacaacaatagggcttttcatcgattgtcatttgtttcgagcttctgtcaaatgtataatccgtgtatactattaatatacatggattatagaacatattatgaatacatttgaatcagtgtaaacaaaaacgtgtctttttttcacttttgacattttgtggattacattatgaatttttttgacattatgtggattatattaaataattacattatgtggacatggtgttgttttaaataagttccatcaattcacttattttattagttggattatacaaatttggatatatatagtatttttactacaaaaacgctattacgcaggtcaaaatttgacgtaagagaactgtcaaaacattagactgcgactcctcatcattgccgtgtttataataaacatagcaataacgaaaagtcacattccaatgctttgacagctctcttacgtcaaaaattttgacctacgtaacgtttttgtagtaaaaatactatatattattatcattaaaatatggtctcattgttttataaaaacaattattggatatatcatagtttacctccaaggtccagatatcatacatattattttgtgttctagttccctaaaagggtttatagatatgaaatttatatcaatgaattctgtttcacttactgatgattgtacaatagtttttttattgggggcaagtgttctttttcacgagtaattctagatttatgtagttttccagtattcgacaaaagttgtttagaacatttttgtttacgctgattcatttatagtgtagctttaaaattcagatcattgacccaaaaacagatgctatattttatagaaattttacaaatatcgatacatttttggcaaagcaacgtaagtgacatttttgaaaatcatgtttttccaccaaactaacgctattattgttcagaaggcactgccaaagtgtagtaaacctatacatatattatttttaaagtaattctaggcctactacactttggcagtatcttctaaacaataatagtgacagttcaatggaaaaacatgactttcgccaaaaatgtcactttactttgccaaaaatgtatcgatatgatatcgaaagttcttacaaaactaatattgctttcacattgagaattgatatttgattgtaaattacaataatttagcctcgtaaaatgagactgaaaaagtactaatggactttccaaaccactgacacactaacacctacaaatataactttaaaaaaccttaatccctacgtcttggtgctcccatgtttggtgatctggacctgaatctgtcgttaaaacgaccacctcctctgctgcctcttggtccactgccaccataaccattccttggagggaagtctcttcttctgtcaaagcttctaccaccaaagcgacctcctccaccaccacctctgctgctgctgtagcggtcgactcgaccaccatcgaaacggtcgaaccttccaccccggcttcctctgctgcctctaaaaccaccccgggggcctccacgtcgtggtcttccccttgcaatttcaactctgagtttagcacccaggaattctgtaccattcaagttatcgcaggcagtttctgcatcggtatggttgttaaactcgatgaaagcgaaacctggagggttgaaggctacccaaacagagtttagcttgccgtatttctcgaactcgccttctaggtcctctttttttatggactcggtgagccctccgacgtacaccctcgtcgtcctatctcttgatcggtcgcccatatttccaaattcgaagcgatgcgtagaaccctgctttcgatgaaattgtcacaacgtagaaaatgcttcggtgtttcgttgacgacg

SEQ ID NO: 6305 - DNA, 4974 bp, Diabrotica virgifera
  SmartBlast Evalue=0; Info=ATP-binding cassette sub-family A member 3 n=1 Tax=Culex quinquefasciatus RepID=B0WD35_CULQU
aatcttcaattaaatgcgaattatgtgttttgagtgcctccacttcttggaaaatatcgctccattttttagttttatccttaatgtaaacatggaggagacctgaatgttcatctttgatttcaccgcgatcatgattcgtaaaataggatttaagatcatcgacacttttaaatttgttacttattactccatctacctcgtctacgtcatcatctaccagatttataggctgaccttgattagacacaagttttaattttaatgtaaatccaccatatctattctttaagtccaccaatcttccttcttcaacaaacgaacctttcttcattattttcagctcgtcgcataaagcttcgcattcagtcatactatgagatgttaaaatgaatccaatcttgtttccactattgcctttcatgagtttaatcagatcccaacacttccttctagtagccggatctacgccgttggtgggctcgtccaataatacaaacttacggttacctataagggatatggccaagcttagttttcttttgtttcctccactataatgtccgcacgggatatccgcatattgttttaagtcaaaagcttccaaaaagcgatcaatcattgtttcatcagtaacacctcgtaactttgccacggtacttagtagttgtctgccagtaaggacaaagtttagcgaatctgactgaggacaataacctattgtctccaaatactcgcttcctgtgatgtccagaggttgtttattattgtctaattcgatcttaatttctccatcatcaaccacttcctctcttgtaagcattttaaaggttgtagttttaccagccccatttacacctaatatacccaaacagtgaccgtgcttaagagtgaaatttatatttttaactatctgttttccggcatataatttcattattttcttggctcttaaagtattgtagccgtcaccaacatcttcgttaacatatttgtcatttttggggattagtgctgtatctttgtctttgaatgatttcaaaataagattacattgacgcataaccatagcttttaatttcttcataaaatatgtgtctagaataatgtttatcgttagataaaaaactccgcatcctatcataaacatgtaatgttcgctgaataagttgttgtagctcttataattttgacattcgattgaactttcaacgcagcaagcgtgtgactccatctgattacacataactctcaaacgttggggagatattttgaaattgtaaatattaactgtgcgtctaataaacgagaccaatgcatctgataatgaaacttgcggtaataagaagaaacacacatatttaattttatttccaatatttacgtagtattcatcttgcgattctagtaatacggctatggttagtgtaagaatgatgcccaagaacatccccatgatgacgaataacgcaaaggcaccagatgctgtcttctttcggctgaatatatacgcaaaaggtatcccagcaataccataacacagaaatatggaaaataaataaccgagttcggtaccgttatgttggaatacgggagaacatatccacagtaagaaacttaatatgaacattaaaaatatgtaaaatgtcatatcggcaatccaattaacaagccaatagaagaatggtttcacgccagccatgtactgtatttgtaaaaatctcgtcgatatttcagtatgtgggaatatgataaaaatgccgtgaataaaaagacatcccaccggtaacaggatgagccacagaacagcaacttttgcttccgaatactcctgtgatgagagtcgctcttggacctgcggtaaaggccaattactgacagatattccatattcgggacctaataacgttttagccagcgagtcggtaattagatttaaagaaatcggagtactgtgagtagctataccattgtataatgctactaatgtaaaatcacgatcataaacgaaattagctccagcaatcatatgttctttatagtaagctatgttttccagacttctttgcaaaatagatttttcaacgttatcaactttgaatggtaaacttctttgcgattctacagctgacatgtaatatttcattaacgtattaattttttcgtttgatgtgtccccgctgtagtaaaccgatgtttgtttgtagctgctgagtttgaggggtagttctggtcccctttcactatagtagtcatttccagaacttaaaaataccgtcagagaaaaaaggactacagctacacccacaggtacaatgtatgttgaccacttttttagagagaaattcactttctttttgagtaaagtaataagagtcaaagaggcatgaggttggatgtcatcttgtgtggccactgatgaagtgtcgtctgatgaatgttcaatctcttggcgtgtttttaggaatacatcttccaaagtcgttatcgttatcgatatattactaaggtgtaactcggatcgatttttctccaaatctccaagaagccccgtcatgttggtattctgatagggtaaaacaaataccaagttgtttccattatttgacgtcaaatgcgcatcgggcataaaatgtttaactcttctactaatggcatctatatctgcgtcttcttcaatcattaaatttaagtggtaacctgtatcgtatttctttttcaaaaacattggagtaccataacagtttagactaccgtcagacattattgctatccagtctcctagtgcatctgcttcttccataaaatgtgtggtaataaggattgttttctcccctcgccattgcaacaatagatcccaaagctctcttcgagattggggatccattcccgaagaaggttcatccaaaattaatacctttgaatcaccgataagggccattgccaagcatagctttctttgcataccacctgagagtgtctgagccatcgaatgctctttatcgggcatatttaattttgccaataaactttttgcttctatgttggcttctttcgtagattttcctttcagcttggcgaaaaataagagatgttctttaactgtcaaatcggtaaacagaagattatgttggggacatagtcccaaactcttcctgatttcgtccatgtcagtattaatatccaatccatttattgtcaccgaaccagacgtagctggaatcagtcctgttattattgacatggtggttgacttccctgctccattgtgaccaagtagtacagtgatttgatttttgtaaatgtctaaattcaggttattgacagcttgtttttgtttataccttttatgaagatggttaatttgaatacccttagctaaattgtgacctgcttcaaccttctccaaaggaactgtttcagaatctactggcactgtggtgatagatggttttctacagagcttcataaaattttgtaaagggaataatatactctttcggaccccgtatttaccaggattaactccatccatataaaatgtgaaaatggtgtagataacaatatcgactattaacatcacataaacgtttaacatggtgatatcatctgatgatccactaccaggcttgaagaaatttgaccaattgatgccgacttctctttcttcaaatacagaaatgatggaatatccgtaatgaagggacatatttggtagtaggtttaacagaacgttggataaccaagacaatttgtttgcttcgtctagtccacatgcgtattttggtatgaaaaatgataaaatccatacgagaattcctgcgactaatgcaattgtgggtcggctgaaaaacgaactgatggcaaaacaaaatgctactgcagccatacaatacaatattagaaacacgaatagtattccgccgttggcaaattctacaagtggagagtcagacccaaacattggtactttcataaaaatagatatcacactaacggcgaaaaacatcggtatcatggcataaataaaccagccaaaccataacatccaggatttcattcctaccattttcattagttcctttgttcctgaatgtttctcttcaacaactctcttaagtaccgctggacataaaaatataaaactaaacaatgtgatcagcggcaaaaattccaaaaacaatgttgttatagcagagtctactttatggggagggtatggaaactcttgtatttgtatggagtaagtgtcctctatattgctacttctcaaattttcctccaagaatgacatgtcgagggctagttgaattttcaaaaaatcttcatcccgataaacatactcactgccggggctataaccgtagactctttggtacatgcgatcggtgaccaaaaactccggctggtagtagtttttgtgataccttatcttgtagttaaaatgtttggggtttttgtcatcaaatataattgcaactgttgtatagtttggatttttatagtagtatcccaataattcattttctgatccaaacctttgtatatgatcactaggcatccccaacttggttaacattttggtagtaatgttggtataatattcattatagggtgtgtataatatatacgttccagccacatctatgttataatttataccatctatcctgccatacgtgggattgggaacttctattttgttcaagcctgtgatttgacttctgccgtaggcaatcaataaaaataggcatactggcaggaatgattctataattgttagaaaccaatgcctttttcttattatgtagtttttccaaacaacgacttccagttgtaaaagactcattgttaaaaccaaagaaaacaccctcctagaaaaccataatacaaaaatggattttgtaggaaatttttttttgattttttattttaatgtttataacacatacactttcgaactttacatgacgc

SEQ ID NO: 6306 - DNA, 4956 bp, Diabrotica virgifera
  SmartBlast Evalue=0; Info=Golgi-specific brefeldin a-resistance factor n=1 Tax=Aedes aegypti RepID=Q16V71_AEDAE
ggagacgtgtatattttgaaatgttaacatattttcaagataaaaaagatggcacttccagggaacgggatatttgtcgtcaaaggagaaatctccaacatgatggcggctatgaaaagaggaacaaggtggtcgtctcattcttatcaggacgatgatgtagattcattactaagaaactttcaagaactaagagatattctagacaatgtagacgacttaagattcgtagaacccaacacatttttggccccctttttgaatgtcataaggtccgaagaaaccactgggcccgtgaccagtctcgccctatcagctgttaataagttcttgtcctatggattactggatcccttgcatgcatctatccctcaaaccatccacagtatagcagatgcagtcacccatgcccgtttcgttggaacagaccagtcgtcagatggagtagttctcataagaatattgcaagtcctaagaactctaacattatctccagaaggtaccgccttaactaatgaaagcctctgtgagataatgctgtcatgttttcgaatatgctttgaaacaaggcttgtcgacctattgagaaaaactgccgaacattatttaaaagaaatggtgcaattaatttttatgaggttgccgcagtttagtgaggatctcaaagtttcttacattaaacagttaaagatgaaacctggagctttagatcaaacacgtactaagaggaaaaagcagtattcttcacttaaaaaagataagagtgacactgacattaagtctccccaaaccccacaaggtaatcttgcagcagtagcacaaagtagtatagtagatatgcaaggttccttgcaaaatcctgaaaacgctaaccctgtaacctcaaatgctagtccaaaagaaaacttcaagtgtgatgtagatatcattgttgatagtcctgttagtaataatgaagatctaaaaaatatcgattctatatcgtctggtgtagaagaggcagcaacagaacctaaatcacttactgaagaagaaattacagaagaacagagtccgagtactcaagattacataaatcagagaggcataaggtttactccacaattgcagcaagaagctaacttatcaccctatggtttggcatgtgtaagagaattactgagatttttaataagcctttgtaaccctcttgataaacaaaatacagaaatcatgatccatttaggtttaacccttttaacagttgcatttgaaataagtgctgataatattggtaaatataacactttgctagctttagtaaaggatgatttatgcaggaacctattttctcttatgaataccgaaaggctagcaatattttcattggatttacaggtgtcttttttattatttgaatcattgaggacacatcttaagtatcaattagaacactacctaaagaaattaatagaaatcatcctcagcgattctcccaaagtaacctacgaacacaaggaaatagcattagataatttacttcagctgtggcgaataccagggtttcataccgaactatatattaattacgactgcgatatgtactgtgcgaatctgtacgaggaattaactaaattgttagctaaacattcaatatcttctaatactggagtgtaccatacacatttgttatctttggatgcacttatgataatcactgaagggattgaaaaccggtgttgtgaagaaaaagataggttagacgcaggaaatagcgaattggttcaacaatcaaatgacattagcttctatgtcggaaaaaattctagaactaaagtttctccaatcatgccaaagaaggaggaattagctcaaaagaaaagtattaagaagtggctaccgcaaggtaccgaatacttcaacaaaaagccaaaaaagggcatagaatttcttcaagaacacggagtattaaagcaggatatcgatttggatgaaatcgcaagatttttaagggaaaatccagttctgaacaaggctatgattggtgaatatataagtaatcgaagtaatttgaaaattctgcaatccttcgtcgatacttttaattttgtcggagtgcgtatcgatgaagctttgagagcttttctagagacttttaggttaccaggtgaggcacccacaatctccctgatcttagaacatttcgcagaaacctggcataaagccaacaacgaacctttcgcagatgtggattcggccttcactttagcctatgcgataatcatgctcaacgtcgaccaacataacgaaaatgccaaaaaacaaacgactcccatgtcggctaatgctttcaagaaaaatttgaaaggcgttaacggaggtaacgactttgacgaagaaatgttagatgatatatatacaacaataaaaaacgaagaaatagttatgcccgccgaacaagccgggttagttagggaaaattatttctggaagatcttgctgagaaagggacagacgaaagatggcatctacatccatgataatagtggtacttatgattctgagcttttccagattgtttatggacctatagtagcagctctgtcttctgtttacgagaaggctgaaaacgaaagtgtacataaaaaagttcatgcaaggattcgaaagatgcgcctttattgctgcaaatctcaatatatctacaaatttggatatgcttattctaggcatttgtaaattcactgtgttctacaatcaacagaaacagaacaacattgtggtgcaatttggaatgaacagcaaggctcagttggcacttaggacggtattttctctaattcatcaacacggaaacaccatgagggagggatggaaacatttatttgatctcttgttagcgctctatagcaacggactgttgtcaaaaacgtttgtagaggtagaagactttattgaaccaagtggcaaattaatgctagtctacaaggaagcaccatctgcggcgaagcaggataccggtttactgagttctctttactcatacatggtttccgcggaaaatctatcaaaaataccgactccagaagagcaaaactgtatagatgctgctaaagaatgtataaaagactgtaatctagagcaaatgataaccgactccaagtttctccacgaagaagctctgtttgaactcgtaaaaaccttaatagagttatctagagggccggatgtacacgaaagtgtggcttatgactacaatgataacgttaccgtgttcttcttggagttattgatcaaagttgttatacaaaatagagatagagtgatgacagtgtggcagaatgtgagggatcatatatacactttggttatgaatgcatctgttttcgatttccagttcttgttggagagatctgttattggtctattacgtattgctatccgtctgatgagaaatgaagaaatgagtcatatagttcttcagtctttaagaatgctactgcttttaaaaagcagtaccctttctaggatatcccggcaaatatcatttggtttatacgaacttctgaaaacttccgcacaaaacattcacaccaacactgactggactattattttcacgcttttggaatgtgtgggagcaggggctcaaccacctaagcctgttagttcagccgaagatacagaactgaaaagtaaatctgacggtgaaacttccgataaccacgaggaagagggcaccctttcagattcagaaggaaggaagagtccgaaagataatacccagagatcacaaagtcctgtgagtgttgtaacttcgcctgttggaactccaaatacaggtggatggattttggtaggcaacgaaggtgaaattcaacccgtcatgggccgcaccgtccctccaacacaatacggcctagctttagagaagaaccttggaagccatgaccccagaagtatgatgaagtgctgcgaaagtcttgcgtttttagtaagagatgtcgcccatattacaccgtacaattttgacgtttgtgttcattgtataaggacttttgtagaagctagcttacatggttctaatttcaaaaggttgagagattctaggtctagaaagaaaactttagataggactagaactagaaaaagtccgacaagtagtcccgatgaggatgatagtgacgacgaaaacattccaagtggttatcaccaaatatcaatacagttattagatttaatgcatactttacatacgcgaacggctcagatatttaaatggtgggctgaagaaggtggtgaaatatcgcaagaaacttctctttggactcaaggctggtgccctcttctgcaaggtatagcaagactgtgctgtgatacgagaaggcctgtaaggatgagtgctataacgtacctacagagagcgctattagtccatgatttacaaactttgagtgggtcagaatgggagcaatgtttccaaagagtattatttcctttacttagttacctgttacagtcaataaatcctaaagatgccatatcgatggaagaaactaggataagggtagcaactgtgttgtcgaaagtgtttctacatcaccttactcctctattagcacttcccagtttctttaatctatggctggtggttttggactttatggataaatatatgcatgcagataaaagtgaacttctttacgaagccattccagaaagtttaaaaaatatgcttctggtgatggattctgctaaagtttttgacggtcccgatggaaagaacattctatggaatgccacttgggaaaggatagggaaatttctacctaacatgaaagacgacttatttaaggaaatagaagaccaaaatagaaaaaacgaagaagttagtaacatagagataatagtgaataaagaagaaaaagatgtaaatacagagaaattgactactaacgataaccttattacgtgtta

SEQ ID NO: 6307 - DNA, 4951 bp, Diabrotica virgifera
  SmartBlast Evalue=0; Info="Eukaryotic translation initiation factor 4 gamma, putative n=1 Tax=Pediculus humanus corporis RepID=E0VCE7_PEDHC"
cgttcacagtatagttgtttcttagtgacacattaagttacctaagggtattgaaaaaaaaaagtttaaacaacgaaaaaatacttgagaaaatacattacttggacacgagttacacaaaaaatagaacacatttttgtatataaaagtattacagaataaaagctcgtttatgtcttaacacagtcatctgggtggtgagcaaataggtgcagtctcatccttaatcattaacaaactaaatatcaaataccaaatataatacatctcaaaattaaaaaataaatgttacttttccaaaaattaaatttcccaaaatttatacgaaaaaatgtgtagtgtaaaagtatagggcacatttcaaaaaaaggcagtcttttaaatcaaattttacatgttcatattagtaatatatgacctatgtatgagcactttcaaatgattctcacaagaaaacgtagagcccaaaaaaatctggttttaaaacaaatgaattttcattcttttctttcatgattttccttctgcaagaaacgagcacccagtttaaaagtggccgtgacactgttgaaaatgatcaacacgaaggatatctaaagacaacaactacactggaaatcatcttgccaatgtccttacgatatcaaaggaacttgttggtcgcacttcgaaccttgaattaaacagtcatcgcttcagtgtattgtgatgcgaaaagaattttgcagattgaccatcttaaagaagataaaaccataattggagaatactactctcgacttctaaaaatgtaatcggtaataaactgcatcattcagtgtattttttattggtagactagaaaacaaaacacaatcattgtttacacaataaatggatcgtaagttacatacacatatatggtccttcgacccggatttgtgtaaatgagttaatgcttaacatgttttacaacaacactgggaaccgtgttgaacgatgcgcagctgtcacaggggtgctacaaaaatgttcacttgttgacactcgggactttattgcagaagttcgtagctggccagctcttttcgtgtcattaagaagcaattgcaggagtagacgagttctttggagcggataaagttgctgctatcctataaggttttattcagtcttattagagttcatttttgcgcaattcttgcaccttatctatattttaatggaactgagaacatcaaatcatttgtcaacgacagatttcagcttcagaaaagtataaatgaatgctttaactttaaaccattttaagtcttttaataaatccccataacgaatacttcatttgtcaagtactacatcatatcttaaaatgtgtcttatattcaacaaaatattagttttatgtaaaaaaaatttattaatcaaaataaaggtatggttaaaagaaaccctaagatgaaactacacttacagatctattaatcatgatcattgaaaataaaataccatttacaaagaataaaaaataatctttacgtttatctaagtataatttcacaaaaaaaaattccactagagttcttcagactggagtataatcaatcgtccacgcacaagaagatattaactaaaaaaatcaacctagggtcccacaaaaaatttcggcgtcacaattgtgttactggctatgtgaatcccagtgtaggactaaagacggtgtcgatttacgcaggtggccacgcagatgttaaggggcattgaatgttcggcagttttcgtatctgatcttattgtatggacatgccagagaacactttttgatggatgttgatattatctaaaagtattcgatgaaaaacatgttactttcgttccagtttacacttataagacgcgaacaaaatgtcttttgcacttcctataaagatctaccactcaacgccctcagtccaacgctggtaaggtacaacgaaactgtcttttatattaaattagaaaaaagtctatcaagacgagaaattttttgtcgagataacaaatagcgaagtaatgaatggagactagacctccattacgtttcctgtattttttaatattttaataacttaacttaggtttaaacttctactattatgtgaaaatcacgccacttatatttttttattttttttttaattcctagttcaatcatctccttcttcctcttctgattctgcttcctgtaaccatgtcaaccactggttaacctgaaacagagcgttgcccttgcctggatatgcatcagttacatcctccttccaattcaagaacgcttcttcatcgacaatctccatgtcgtagagcgcattgaaccacctcaagagctgaccgcgcgggaatcccagcgaatggaaatgcatctggagcgaatagagtgccaccaactgcaaactggatttgtcgcgcagaaaagcatgcaatatcggttggtatcgcttcaagaggccattttccttttctataattgctttttcatcgccacaagcagatggttcctgtgtaatatatttcaacaaaacagtcataagagcgtttatgaatccgggatcgttaaaatttgaaggttctagattttctttgatccacttgtaaaacgcttgtggattgggatcggcttgaagttgacgagcaagatcagcttgtatacgtagcaatggatataggaacgttagatctctttcttctagaatttctgacaaccgttctttagtcttatcacaatctggcagttggctcatcaagttgatcttactctttccgaacatttccgataattcgctttttcccctcttcttgtgtatattctgcaatactaacaggaacagtgggtggtgtgctccgttctcagtcaaattggcaacgtcggaaaggggtacgagatgttcgcaaatcgctgtagcaaacagaaccgaagctgcggttgttactttgttaatctcattttctctctcttccaatacattacagagtgacttaaacgcgtcctggacagtattgccgctgatcaggttgtcttctttgaggttgctcaaaaatctgatcaatttttcttgttcgacatcagatttctctaaagcattagacaaaccgctcagtaccatctctttggcaaacttatcgggaactttgtgctctttgtaagaattaatcgcttgcttaagatctacttcgcctttccaaaattcttctattaaagtattaaatttcttaagaacttcctctttgtttgggcctttgtcttttttggattgtttaggtttctcagctggaacctgcttaataggtagagggtctttgagcaacgtcgacgggggttgtttgattgtagaaggtgcaaagttaggttccattgtcttgttattgttcatcatgttgttacttttcaacgaagaagccttcgttatcaacatcgagtttggtctcaattcaacatctgccatctcctctttgccgactatcaaattgctcttcttgaaacgcggagctaggtccttgttcgattggttaaattgtgagttggagttattctgattgtgcttgtactgccccctctggttgttgtaattgtacgcgccactgcgttggttgttgtgccccctgtaactgccatccctttggctgctgaatccgttgtgcgccccaaatggtggaacagtgggtatgagggatggagcggaaggagacaaacttatacccataagcatatcatcaagaccacttctggtcttcataggatgacggaacaagtccgaaatattagatctgtcattgtctcggtcgtggtttcggtctcttctgaaagctacaggacgatcgtcgtccacgggtttgatctggttgatgggcatcggaccttcaacgacgattgcctttcgcggcacccatccattttctcttaaatcaatcacgtctctcaacatgaatctgattcttggttgtaaatcttggttttctgcaaacattctcattcttccgaagtattggttcatgaggtttttacccttgtcggtgtccaagatgcggccgcaggtccgtaaaatctgacagaggcattccaggtcctcgcagaagtcgtcgccacgtctaaccaacaattccttgatgcataagtgtagaatgttttccgatagtatttccagttttcccaattcgccgatgaatttgatgttgccgagcattttccgtttcgcgatttgccgtctctcgtcctcctcctcggagccggcaaagttgttgcaagaagctccattgtattcgagggcagcggctctgttttcgaattcaagcttgcacttattaagtaaaagaactctaaaggaagtgggctgatcgggggattcgaaattaggtgcctcttctgacagtcgcttgcacaactgcgcatacatagacgagtatttcggttcgtcgagggccttctcgaatatgagaaaaatgacacccttcaagataacgttggactgtagttcgatacgcaataaatcatcgctcagcttcttgaatttctctggggtgagtttattaagaatgccgcggactttgcggaaaaccaggtcattacgtgattctggcgtaagagcatcttgatgtctcagtgtagaaggtgggacccagcgtcgcttggtggaaggagcgttgtccttcaccgaaacacgagcttgtggccccgtctgcctggggctctccgttgtggtgggtaaacttgctctcagttgaagacctcctttttctctcacactatattttctctatttccagttctctgtgcttagaagtaaattgggaggcaactgtaaaaagaaactattaattaactaggagtgcaccctaaagaaccttgcgaaaatttatctacaaaatgtcactgcctcactgttgtttgtaaagggcactgacagcgaccagcgacagcgacagtgggacgtggacg

SEQ ID NO: 6308 - DNA, 4862 bp, Diabrotica virgifera
  SmartBlast Evalue=0; Info=CG9318 n=7 Tax=Sophophora RepID= Q9VIK1_DROME
tgtattataatggagataaacatttaaaaatggcaaatggcttttttataatgtatttggtgaagaaataataaataataatgaaaattaagtctcagttactttacaatcgacacactacacctacatattataacaaaattcaaatttttgtttcttttcgtagagctcaattcagattacaataaaaagtaattgacctgaaagtaactacaattaccatttcaaagaaagtaggtacctacctacctagaaatgtgattgaaaaagtgttttatgaaaaaaaaaatctgaaaatttgaaaaaaaaaatcgagatgtttgtcaaagcaattaaatcctatcaatgcacgtaaaattatttaaaattattgtggaacagtacaaaacgtatcaaatgtttataaagatgatgttccagaaggtttagaaccagatgcagatgaggtagatgaccttaatgtaattgaaaatagaccatttgaccaaaattagtgtagaaggggagaagaaatacaatatgcaatttttcagcaatattttaatgtacttataactttattaataaaaatgtctaattagaaaatatgagttttactaaaaaataattaaataaaatattattttcatagcaaactgtcaatttcttcttctttcttaagatttttggcctctgacagtcagtttttggcaatttttaggttaaaagtagttcaaaaacgatcaacgtgcaacgttgccacatttaccaaaacctttaagaggattcctctaaaaaatattttagccgttgtctataatatatgtttacagaatttcaatctaacgtaaaagttttagaggaccgttaaaagtaaaattttagaggcctcccaaattcaacggaaatgttacacaatacaccccatagttcaattataagagagctaaaagttagccaacgactctccagtaaagtccatctccaccaattaaaatacattgggcatgttataagagcaaacacagaaaacatggaaagactcattatacgagtacaaggaaaggtggaaggccgaagatcacgaggaagatctcaaacaaaatggatcgataaaactgcaggaataagcaaaaaacctatgcatgacttaaaagaaataaccagagacagagatctttggagacggacaatacaggattggggtcaggattgaagagtgatggtacattagttatgggacacccctaccctgtatgtaattcgtaatacaatttaattttcatagataatctttacaaaaaattatgtatgtctatatttacggtagattttagcctctgataagtctttttatttgtatgatatttacaccacaagcttcttacttaaaacaaggaattagtgcatacagtttataccaaacccttctttcagtgcgtcattaactttgacgtcatataggattttaagaatgtggcaaatcattgcataacattttactcaaatctgaaaattgccagaatatttatatttaagtatgcaagccaattaaaagagaaagaagaagatatttatatatacagttggaattttgtggtgcaaatatcttaaagatacgaaatacaaagagtatacagatcagtggcgtgctggccatataaatgaatcggtgcaatcaccgagaggccgcggcctcttgaggccggtcaaataagttttcattataaataatgagtaaaaaattctgatgatagaaggtcgtgaggatgggaagccgctttcctataacatcgccgggccgcttgaaaagttccagcactccactgatacagatcaaggtaaatattacattttatgttatgttcctcacaaaacagaaagacggtatataattgtgttgatttacaatcgttaatagattaatcgtgctatttttccaatcgctgctgtaaatcagtacactttttgaatttatagaatctgtgatgagtgttggcttctctatacttaatatcttacttactgccttttaaaatatcttctaaatgtccactgccaatatacaatagatttaattcgacataattaagaaaaaataagataaaatatttcttaatttttttgggtggcccgttttctttgacgcgcagtgtactagtgattgtgtaaaaagtggcattgctctaatattaatgcattatgttattctggtatttgcaaacacacttacagctacaaccgtccaaaaaaattttagtacgctgtaaagtttcttacaattgaagacgcagtaaaacagaattttcatgtgagctaaaactattagattaaaaaatatgggcaaaaattatatgcatcgaacataatatatactttattaatatgtacaaaataataaattgaataattttttagatacaatagtattcctcgtaaagaacaattttattattgtcttagccccctttgcagtaactaaagtaaagccagtttcaaaccgtaaaaagtatcacaattggagctcgcttaatgattctgacaaaaggcagtaagcaataattttaaataacttggacatcattcaagataaaatgtaaaaacatttcacgaacataactttgaaattagaaaaacaaaacttactcagtcgactttaactacactatatatctttctaataaaccagaaacaggcaaagaaacctatcgctcctgtcaagaggttaaacaaaaacaccataatgagcgtatagccaaaatacagaaaacccgaagctgcgtcttctatctgaagcttcgtgaagaaataatgacagcagtataagaagagatataccgctgtaaaacccgaagttaggtacgatctccaccaccaatggtaatcctcggcgcaaaggtggaagtagcacaacaaaatggtcgtttcggcgcaagttattactagaatgataaaaactaaaaatagaaatccgaacatatagtacatttgagatgaccagatcgattttaggatgaaaaacagttgaataaatatgcatccgaacggtaaaactcctcccattattatactgggtatgggttgagtataaactgattgttcaggtatcaatcttgggatttggttggttcttactgggtgctccaaagcccttttcctgaacccgaagaaagcaccaacaaaagtaagtggtactgacactagccaccagagggctagcaatcctactaaagtactaaatggaacagcagctgaactgtccttagcccaaagtaccacattcatgacgaaaaagagtccaaaaacaattcctggtgctaacattgaagtcaacaaaacatttgacttccatttttctccaccaaagctcttatatattcttgcagaaacataaccggcaggcgatcctaagagtacatacaataccatggcacatgtcataagagctcccctgttggctggactaaggaatcccagacaagcaaaagctagtgttactaatgacatgaagaatacttgaacaccagatccaagaagcactgaaagaagcatccccttacgtggtggtcggaagacatctccgtggaccagtttccaaccaaactcctcctgtgcatcttccccattatcaatttgattatatctagcaatatctttatgtaatgtccttaacagaatcatagcaaccattccagacaaaaacagtacaataactaacgaattcaaaatactaaaccattgaatattagtatgtggcatggattctaatatgtagtcccatcttgaagaccatttcacatcattgtcttctacaaagtgaatactgtaagtgtagataatttcgaatttttctccagtctttagatttttcattggtatcataagtggttctaaatcgcctgaagaacatcccttccctttgtaatcaatactcctaggtacaactttaacagatataattcttcccccattctcatggaattggctaccccactcttctttagctccagaatgatatgtaattgttaaattaacatgattgtaaatataataagcatcatctcttcccacatcttcttttacacaattatgtcttccgtttcgagaatagcaccccatgtgaaagcctgttctacaatcgtcgacatcataacaagttgtaacaggcatattatcaacaatccaatgatgttggtagttcagacttatacctttccttaacctaccaagtttcaaattatcttcaggtttatccccagagtattgctttgtacagaccaccgtacaagtttcatttttcataaattcaatattatatcttgaaggtcgtattctttctccaaagacaacttgtcccaagttttccacaggagatttttcattgttgtctggcaaacagaaatcaaaatgattgtactcatagggtattattgattcatctgtgttcaatctatttacaaataatttaacttcagatttacaagtatcggattcatcttcctttttgcaatagttaacaggggccaatcctggtaaataaaagccttcaactaaaacgttaatccatacaattaaaatgactaatttggacaacatattcgaattggttgaggttcatctatattttatatttttatggaaaaattacacgttcacgttgatgagatgttggcaatttaaaaacgtcaccaaaccaaatgtaaacgattgatcgcaaacactgataagtacttgtagttgtacggcaccaccaacactttaatgtaaaaaaataaatatatcaagacttcatcccgatatccatataattgtaagcaatgatttattataaaaaaaatagaatatatttcaaagaactacttttcaattgtcgcaattttttg

SEQ ID NO: 6309 - DNA, 4784 bp, Diabrotica virgifera
  SmartBlast Evalue=0; Info=UDP-glucose:glycoprotein glucosyltransferase n=1 Tax=Camponotus floridanus RepID=E2AEM6_ 9HYME
agacttaattatttattaacttaaatcatatacaacttaagaaatgtaaatatcacttacaaatcaatttaaaaaatatgtacataatttattctatttatcataattcttgatgagtatcagtcctttctttttcactaacatcactattttcggctggatctgcatccaataaccctgagtctattttcttttgtaaatttctgatttcgtcatcgtatcctttccattctggaaggattcttactgcagctgttaatttggcttcctttgtcattggattattacataaatctatggttttcgctttatctttagatgcatcatcacaccacgtttcacaccacaaccattcttgaggcaatgatttaatcgctacctgatggatcatattattgggcaaatcctgatccaaatttgaaagactgttaggatcttgacttagagcttggtattgacctctaagcctatcaccagctgctattctacggaacctctttaaatctactacatataatgccgatatatggtaccttctaccctgtagatggtttctccaataaccatgcttccaaaacctgaaaccatccatttcttttcgagattcgcagaacggcgtgtagccatatggcgctccacctaaatctaattcctgaagttctttaaggtctgctctaacaacctgatctgcatcgacaaaaataattttctttacgtctagagggaacaatacatccaggaacaatattttgtaaccccaaataattctctgtttttcagtttgttgatgtaaccatctaggccatttgtattgtactaattcatattcgaagccatattctttcgccatgtatggaaggaaatccttaacttgtggagagagataattctttaaaaaccaaaatttaacaggtctctttgtgtgttttaacactgacaacatcataattctcaggaacctttcatataagtgaccagaagccaaagagaatatatttaatttttcgtcactctcgtcctcgctgcctttgaaagagctagttatggaactccaaataccgttattattatcatcgtctgataataaatctacatttgctttatctggcttcttttgtactcttaatttaacgatatgtgatcttaaagaactaataagtaccttgatgtcagtcgaattctctggagtatcgcttccttcatgactaacaatgtcatatatgtcagcacttctaccttgtcgtaatcttagaagccaagcaccaggattagctttaagttggaagtagcccaaattagccataacaatagtatctacgatcacaggctgactttcggtacccagggttatttgcaggcctcgtggaggactgcctgagctttgttcgaaacagtgaccttctagcagtaaatattcaagttcatattcactgtggacattgctttccacattttctaatcgtatgttatccaaatcatatactgatcttactacttctaccaaccaattttcaggtacgtgatagttttgggttaacagtggagaggtaggcatattgttaaaccttgcaattggacctggtaattgcttcccatcttctccaaattgtatttccggttccaatacaaatcggtaaaaacttttaaccggcatgtcactattcttttccacgctgttcaaaaatactctaattctgcagttcaaaacttcctgcagcacctgtaaaatgggacccaacttttgggcacctctcgaaacgggatcgacgattgcggcaatatcgaaggctactcggtcgggatgagctggaggaatctttattactgaatgttcgtcgccagagaagttaatttcgaaccgggatctactctgaggtcttgcgataagcagagatattaatttcattaatgagttgctggaaatatcatcttcgtcatcagaatttttatccaaagcagccttaattttctcccaatacgtagaagagctaaatctatctaaaagactaaaatcttcagaagtaaacacctcattttcctccagaggtccaagaactcttccattagctatgactgacctttgactttctttcagctgtagtactctttgacaataaatccttaacattttcaaattgagctcctgggcattaattttggaactgacttcaacaggaagatccagtttttctccattttctaattttctagcagcagcatcatcctttaacaatgatataaccagaggcaatgctttttctgacggcaattcctgtaaagcggctagaacgattttgtttaaagtgttgtcctttcctccattaacgttgggcaaaaagctaactcgtacatgtgtctcagctttcaaatgatttaaagcgtccaagagtaatgttctggatttcttacagtttaagtctccaattatccagtacgtcattgaatgatattggcctgattttttgggtgccgagaagtatcttacgttttctatggcagtggcggtcatatctctggtgttaagttttaataaactttctaagttgtttatactacttgctgtacctgtcatgtccaagtggatagatctatctttattcaaaattctatcattcagccttggcataaccttaggttgattcatgatatagtcgaagacgtcatctgaatctgagagttttcctctatatacgcttttttggaatgaatgtgtttgtgtcatgacttcttgaaggattgtttcttcgaaatcatcgacattaacttgttcttgaggaaatggtactccgttgagtagagcttgagggaacactttaagacctacccgttcaataaagtcggcagagagttgacgaccaaaatcatagactgaatcttcacccaatatatcgacaggatcatcgtcatagtctttacgcagttgttttttaatatcttctaccgtaagtttttcttctacagattttaataaagttctaacaaaagtaagcgctgtagcggcatctttggactgggtaatgtaattcaaggcacactgcattgctactccgacgtcttccaggccagtaacgtcggattttgcggtaacattaaaaactaggccgacgcgtataggagctgtgtgaactacaaatgactcaactaatttcaataattcagctgaggacttatcagttgggtcgatgattagaaccaagttgtacaaatttcttcttacttggcgtaacatcccaggaaacgttggacgtaataactccatgagtgagctcgaccatctagcatacttgggatcttgctcgatgtcattaatccaatttatagcggaatctctgatatcaatagcaaagtcttgaccgttttggtcatctccaaaatctaattccagtaatgaagacatgcgcttattgccgatgcccagaccatgtaatccttccatagtttttagttcctggcgtaaaatttctaatatcccatacacatccaccaagtcaatatcgtagaacatcccattgataaataatgctgtatctgaaggctgtaggttaaggtgggcggcaaacatattgctattcttcttcatttccgctttcaagtccgcatttactgtggtttttgctaatcctttagcctgcattggaaaattttgagcagtattggtcaatatcttcaatgcttcttccctgggagcattcataattctttcagcagcttgtaaacttagctcttgaaactgccacaccttcaatggagccaattcactggaagtatcttcaagatgcgttttaaatttatctaactgatttttaaggttagggaatatttgtttaagttttgcaaaatcaaatccttctaattctgtatcctcatcctcctgcgatgcctcagctgagttttgatcttcatgtagttctgtgtcatcttgagatttatattcagttgatttcatttgaagttccactccatatccagatagccgtaggtttttagagtcatttcccttaacatagtgacggatgacataatcgatctttccgtctacagctgcctgtttcagaactctgtgaaatttaccgaaagacttggttcctatttgaccataaagcacaacagctaaagatcgattagcagaaccggggaagtggttgtcaatcctgtgtaactctattcttttgtgattttcactaggctcatttattaaagagtttatatcttcaacattacacacaacagttccaccaatgtctgcaacacttggacaatcaggtaaccttaattcttgagctatctgtgcaaacatttgtactttaggtgaatatacatgtaatgacaaccccagttttagtactgctatctgagaaggtgttaaaaacttcgaagcatgtttgattacagttttgtactgttcatgttcactacctattgaagatagtggtgtttctaatgagcttatggaatccacaaagccccagaagaagtcaatattttcatcagccaaatactctgccgtctctagtactaggggtgttgcttgccattttgcttccaggagagtagtaacagatttggatttctttgcctttccattgacattttcacttatactcagaaaaataatgaaaactgtggatagagttaaaaacttcattctctaaaactagtaaaaaattgctttattagtttttactgtaatgatattacttgagcatttgtagaagaacgggaatacctcatttgataagaattaatttaaatattaaggttcaaaacattttgcccaactgaca

SEQ ID NO: 6310 - DNA, 4774 bp, Diabrotica virgifera
  SmartBlast Evalue=0; Info=Beta-galactosidase-like protein n=1 Tax=Tribolium castaneum RepID=D6WCM8_TRICA
attctcgatgacgcgttcgagcttttcgattggtatttgaccagcgactcgagtaatactggccttcaatgcctcaatcgtagccattttattcatgtcgacttggacttgaggtagccccagaggaaaacgactagacatgtgatgtcacaggatatagacagctaactcactggtccaaagcgtgaaataaattgctcacagaaccgttttctcagtaaatccatgctttcacgggatgtatggcagttggcgcaatatttgcggaagcaaatgtcacttaaactacgaactttaatttctggtaccaaatagtccgttatcatggcccgataatggtctccattcacagaaacattctggcctgtccaagacatggacctacgatgacaccggcccataaaccacaccaaacagtgtttttttctgaatgtattggcaactcttgaacctctttgggttgatcatcaacccaaatacgggcatattgtttattcacgtccttagtaagccaaaaactggccttatcggaaaatttttttttctgtaagcgcacgaaacacatttctcattgaacgcctattttcgtaatacagctaaataatttctataatataatataatagaccttgtgctgagtacagtctttctaggatgaaatgtcaaataatactgcataataaagcaactttaggtgataccattcatgcacgatctcccaacaaatcctcactaaaaaaagtacttctaaataaatcaccctttattatagtatgagaagagaaaaataacattattattcagtagaacagttcctgcgtaaccaagaaattacagtaccctcacatacatatttacataatgttatgttgtatttttatctatatttggctgtcataatatacagcagcctaaacttaagtttagttcttaagtttttttttatttaggaaaaaaaatgtcacgtcaaccataggttattagcgactacataagataagttatatagagggtgtccagaaactcgaccgacaaatgaatacaggagattcctcagataattttaagacaatttaacccaattcacttaatccgaaaacgcttcctaagggaactagatctatttgaagatggcgtctggtaattattttttcttaaattcctccggaacgcttctatttagaaaaacaaaaattggtatgcgcatccatcttccagagataaatcgactccattcattgcaaatttctaataccgatcacaggcgtccgtcttggataggacaacggttactctatcgcataacttttttgtctttaacttttaagcatttttgactctgggttattatattgatacgtattcttgtactaaaatataactcctgttttaagtcgatagggtacaccgttttctataaaaatcaatttgaaaattttcgttttgttaatttcaaaagaaatttcaaaaaaatctatttaaaaaaccgaaaacttttacgattaattatattccagagatgaatcgttttcattaattgcgaatttctagtaacggtcatatgcgtcggttttgggtaggtcaaggttattctgtcgaataacttttttgtctttaatttttaaatatctttgacattagcttattaaattatgaggtattccagtagtaaaagtcactcttgctttatgttggtaaaatacaccgtttttttgaaaaaaatattttttttttcaaattcaagggacgaaaaattttcaagtcgatttttctagaaaatgatgtgtcctaccgaattaaatcagagtaccttttagtactagcataccttacaatttaataatccaacgtgaaaaatgcccaaaatttcaaagacaaaaaagatatgcgacaaaataaccgttaccctactcacaacggacgcctatgattagtattataaattcgcaatggatggaaccgatttacctctgaaagacaaatatgcgcaccaatttttgtttttgtttttttgcttaaattcaatattaaagcagccgcccaccttcctcttaacagtttgaacatttaatttaagcgaaaagcaatgaatatttttcgaataaacattgttttctgttttcttagactagcataatgtattttgaattaaataaattacatgcatttttctttttatgtcaataaatataattccaaaaaatttttagacaccctgtataaagaattatgttaatatttatattactgaatagagaaatgaattaccttttaaatgagctatcacacgacccctattaccatttaaaataatcatccatgacgtcatcacgcccagatgggtgacgtcactagtatgatatatatgccacaaagtcgtaatttaaaaatataaattgacttgtttcgggatttttttccaaaatcgtccattctcgagaaaatgaattttttccaacatttacgtgctcactgtatatagatattaatatcttctaaatatcattaaaaactattatattttgtgagagcagattaaaaattattgactttgacagttacattgacagttcagttcctaaggttgattatgcaatttgcaatttatttaaattttgcaataaattggttctgttttactgcattattttttattctataatattgacgatttatttaatttcagttaattgcaaacaaataaaaaaccgctaaacgcggtttactataattaaaaaaaattaggaacactatcaaagcttaataaaatgtaaggactcgtttattttaatcacgttcattttctttaatacacttgaattgttcatattagcctcgtgattggaaaattggatgatccacaaaggttagttcatcgggagcattatagtgctcaaacacaataattgtattttcacctttatttagtaaaggtgcaggcagatataaactttgttggggaccaacaaagaaatgtcttcccagaacaaatccgttaactatggttatacctttggtccatgaagttgaatcaatgtatgtgtcttgtgggtcgttattaatatttagtgtaaacttgtataaagcaggtgtggattgtgttgatgtaagagattgccagttagttagagcattgttccaagattttttaaattccagtggaacaatatcaaatttcatcatattttttccatttatttgaaatgagtctgtcaatcccttaaattgtctaaactgatctaaacctccaaaattgttgcgcccattattttcgactataacgtcaattacgtatgttgtttcaggagtattttcatctgtttgtagatccaaagatgtgtcaactaacttccaaaaccctactccgtcaacatcgctcttttttgaagggactggtgttcgaagtgtcccattaactaatacaagcaacgtgtctcttacagttccagtcaatgttagttttacagctccagctgcagtatgggtatgtctataaacaatatatccaaagctttgtccagaattactgttaattggcaactgttccattggaatcggatcaccaatgtgatgaattacattttctcctgactgaatttctgagtatattatgtccgctagagttaactgtccttctatttgtagggattcatacttaatcaaaggttgtactttaggttgatcgggcaatttggttataacgggattacgagaagcaattgcatcctttacaatttgatatttttctgtgtaatctccatattcggttatgggagaatcatagtcgtaactagtggtagtgggttgaagtccagtattgtccataccagatttaagactgttagctccattggtgaaaccgaagttggtactacctacaaacatgtaatggttaacagaagagggataatccaaaatttcttctagaagacttttaaattgctgagcgcttatggtatgatgatcttctaaccaatgatcaaaccagcctgtccaaaactccatagtcattgtgggtttattatgttgaagttggttaagcttgtctagttgccactttggattagaattgaaattagcagtttgtaaaatacccggaatagcaccaagtccatttgcgctaggtgggtctgaagtatagtacaattcaatgagattattgtcttcaaaaatttgttgaatgtattttaggtattcaacatcgtcatttccagtatttccgtattcgttttcaatttggaatccgataattgggccccccttttgaaattgtaaaagagctaataatggcagcaaaatattaaaatatctcttaacgtaacttaagtaattttgatctttggagtttcttactgatgaagtgtttcttagtatccagctaggtaatcctccaaattcccattctgagcatatgtatggacctgctcgaacaagggcaaagagatcctcctctttcgcgattttcagaaattcttctacatgaagaaagtcctcaaaatcggagccaccgtttccaaagtcatatacacctgactgtggttcgtgcaaattccatggaacataggtttctacggtattaagtccagccgccctcattttccttaatctatccctccagtaggctcttggaacccgaaaatagtgaaaagcgccactgtatatagtaatattcttattattaagtgtaaaatagggctgtttatcagacaacccagcggtgataccaccatccgtgtaatattcatatgacgtcggtagtgctgcgagagccatc

SEQ ID NO: 6311 - DNA, 4657 bp, Diabrotica virgifera
  SmartBlast Evalue=6E-86; Info=Reverse transcriptase n=1 Tax= Aedes aegypti RepID=Q4F8P9_AEDAE
ggatatagaaaatttatttataatctttaatgatacataaatatatgtaaatagtacatatttgtatataataaaatttaaaataaagtcaaaacaattgtacctgtataaaggagtgtatatgaaattcaaaatataattactaagttgcctacgatagctgcaaatttaattctttaaatgttgatatgcaatagactttctttagttaaaatattaccccaggaatgaagcgtttcaaaatcgaaaaattacagtaattttttgactttcaagtgatttttcggctttgtttcctgaggtatatacagtataatataatatacagtatatattcattattgatatattatatcaataatgaatgtcatattgaaagaaatacaaaagggatagatgtgaagggaagaagtgaatgtgagggatgaaaatagagcaataattaaaacaatttgagcaactacatatatgtgccaagctgcaaaaaatgccaataaaaataaagtaagtaaccctgttaaaaaaaagtataacgaagcagaagaaagtaatatattagaggggaatgtctccatattgtataccatctagatagcacaaaaaacttgaattttcctaacactataacatctaatgagaagatctagcactaactttcatccaaatcaattatttcaatgatattgacgatccgtttgcatatcgctcatccggaagaaaagtgacacaactcaaaaaatgcataattaaagttatcttgttaaattgactcaaaatataggtatctaaaaagagaccaatattttaaagcaaaagtggcatactcaaaatttcatcttttgtttctttgttaaatcagatatcatagattttttggttttgcttcttacacaattagaaatattcacttatccatattcttcgtttttaatttaaaaaatttagcagttaccgtttaaaactgacagctaaattagtcagtatgactcaattcttgatctgtgtttctctgatacttatttaaatctaaaaaaagcggaagctttaatgacgtgtgacaggtatcatcccccacttaaagcattaatattatttgataatcaatatatcagtttggaaactaatatttattataactttcacaaggcggattatggtgccttgaataattatttgcttcagatcaattggattgagttgtactgtttagaggatgtaaatgacattttagatgctttttattccattatttggaacgcaattgaactttttgtaccaaagatatctgtaaaaagatcgaattttcctgtttggttctcatctgaacttaagagtaaagtcattgccaaaaagattgcgcataaaaaatataaaactacaaataagtatcaccactatattgaatttaaaaatttgagagatgaatgctcatcactcactgagcagtcttacaatacttacgtttcaaagatggaagtgagaataaatgagaacgctggtgaattttggaagttcatcaaaaataaaaccaacggacatggtgctctccctggctctatgtttctaggtgaggaaagtgagaatgacaaacaaaaaataacagagttgtttgcgaaacattttggtactgtatacagcacttttaattgtaaatctctggataacctggagagtaatgaaattttctcacaacagctggaggtggaaattagtaacctctaagtcacttttgacaatttactgaatgtgttgttgtcattaaatgtcaataaaggggctggccctgatttgataccgaatttgttcctaagagaaagtgcagtgtccttgtgtgaaccattagtatatgttcttaataaatctctccagacgggaattttcccgaacagatggaaacattcctttgtgtgtcctattttcaaggcaggagatcatagtgatatcaaaaattatcggccagtttgtattcagtcagccttatctaaagtatttgaaaaaatggttttgccaagtttggataattgttttaggaacattattacggacaaccaacatggatttgtaggcggacgttctactctcactaacctctttttgtatatcgatagtataggtacagcaatggatgagggttacgaggtgcactctatatacaccgatttcagtaaggcctttgacctactagatcatgtcttaattacaaagctgagaaactttggtatcactggttctttattagcttggtttacttcgtatttgcaaggaagaacattgcaagtaagatcagcaggatgtgtttctaatggatttgaagccgtgtcaggggttccgcagggttcccatttgggtcctaagctttttctgttgttggtaaatgatattgataggaactttaaatctgaatatctgatatttgcagacgacttgaagatatttaaatgcattaggtcagaatctgattgtgagggtttgcagagagacttggattctttagtacattggtgccaggaaaataatcttagattgaatgcttcgaaatgctcatatattattttttcacgtaataagaccaccagtgattttaaatacaagatacgagatgtggatttatctagggttcaggtaattaaggatttaggtgtgttgctggatagtaagctaagtttcgtggaccattatgatgccattattgcgcgtgctaatcggacattagggttagtcatcagaatgtcatatgattttaataatttgtttgtaattgtgagattgtttttgagttatgttcgttcattactagagtattgttcagtgatttggagtccaagttatgagaatcacaaatatcgaattgaatcgattcaaaataaattcgttagatatctgcggtatagattaggtactagaggaatgcaattgaattccagtcaggtcatgcagatgtttcatttgcaccgtctagaggatcgcaggcgatactttgaccttaatttcgtatttaaggtgttaaatggtattattgttgcacctagcattctgggtcgaatagatttttatgttccagctaggaatttgagaagatgtcccttgctatccgctagatcgtgcaatacacgtcatgcagaaaatatgcctttaaatagaattgtttctagtgtaaatgagtttccaaatatagactttatgggagtcacactaaatgcttttaacaggactatttcacgtgaattattttaattttttgatgtcgttagtttaattgtaagtaatgtaagttaacttgtgttcaatgtttaattttgacttttaattttaattgtaaaatggagttttccgtcaataaatattaatttaatttaaattaagatttaaaaaatcttttgtctctcctgaaaaatgttgtttcttgagttgtgacacttctcttcggatgagcgaatattttaaaaatgtactatgttaaaatcactctattaagactgcaaagtgctgtgaattgtagtttcacctgttagggtatcagtgaggtaagtgaccttaagaatgcggctgatatattgcttttctatgggactgttaactgtccaggccatcacacggactccttttgacttccaatcttgaactgtatgactacacacagaatccttgtgcaataaaataactgacagtcctaagagatagtaagttattcttggcaatgcccatgaatgcaacatatcacacatccaaactaaatacctctttatgaaagctttaaattgttttatgttgctttctccctggccctcactaactttcttgaaaatgcagggttgccatgccaaacatcctactatttctggcttgtttcttctaatcaaataaattatattggggaaaaatgatgtgattacagctttctgtttgagttcgggaaacttttcaaataatttcagtattacagggaccatcttattgttattttctttaatatcaatgaaaattctttgtcccatcccaagcatttgttctacagcctgctctaatgttggtacatgagaattaggaaatgaatctctgtaagcatgttttactgaaatgtctattttggccaagtcttcatacttcatatcctttattgcaatatttaagtcagccattctttctaagttggagtcatggaaaacaactggtacaccatcagatgtgaggaccacatctatctctatcacatcacatcctttttcgtggcattttttaaaggcttctatagtattctctggagcgtccaggccagctcctctgtgagctattgtcttaataacaaatccattatctcctgtgggatcatcaatttctttacccaatatagcttcaactgtgtctttctcgggagggggaactctaaatataactactactcctactaaaattccagtaaatattaaagttaaaggtatcaaagttgtgaatatctcagcaatcaggaaccaacttccataggtcgcatatactacagtcaacgcactcggtattaaatataaaaaatctggtttcattttaaatttggttatttttacgcgagcactaaaaatttgaaaggattagtttcttcagcacatttgttatctacatatcatttttttaattttaaaataccccaatgtttacttttgtt

SEQ ID NO: 6312 - DNA, 4607 bp, Diabrotica virgifera
ctaaatagtctgatttattttaaacctatttttatataacagacttggctttaacggacacctgttcccccaattagtccgttgtatcgaggttttatataataagtgtcgtggatgcttctgacactatactggttgatcgattgtaagtgaattatattttcctgagaatgtggtattcctgatgaagcaggactttctgattttgaggagttcaaaaattgaaactcgctttctgagttcatcaccttgcactcctcctcaagaacagaaaactgatagttggactgaaagtcctgcttcatgcggaataccaaattctcaggaaaatataattacaaacaaccagtacagatggtaaccaacgttctgaaaggacatggaagaagtacagtgccagaagtgtccaagatgcctctctcatcagtcctgcttcgtcagatgagaaatggcgaaatggcatctactagaatcagttctggaacttaaaggtaaactacactacaggcggagagatgaggagtgcccatgagcgatcgcatcaatcacttattttgtatttgctgtctttttctataaagagcaaacgtttgttatagacaaggacagcaaatgcaggatgggtgattgatgtgattgttcatgggtgttctttcatttttccgcctgtatgtcatttcgatcaactgtgcagtagagcacacagtgaattttacatctaaaacaaatttatgtaataaaataaatcaaactggataatttaacattccatataaaaagttggttaatgtaagtacaaataataacattgtttagttaatgttacaccctatgatgtgtagctgtagctgcgtatgcctttttaggattaacatactttatttgggttgccacatacactatattagatcttatggtgctttgtgaactaatagtttttaattctaatgtacatatcaatgtgggggtgtcgtaattatctattgtgaatttattgtattggctatttggcgtgggaaccaattttcagatatattttataattcttcatatatgttatcttagtctatccttgtcagacctggtccggtacacattttaataaaacagcatttttatgggtcacccccaaaatctatacatgcctaacttcacacgcaactttgatatgagatttataaaaaaatatgcattgaagtccagatcccgtaattttttgagcattataaagtgagtacaaagacatacaaatttttttttgtaattccaccttaaatttaccctgcaattcttgtagactattatcgataaggcagagttgtcattattttgggtcgtgccccatttttctttgtctgcagtaatgttataggtatttccaaagtatgtcagtgtttgaatgatttatatagtggctgttttgttgcgattttaaatcattgaaacttatctctacgattttttggtaaatcctattaactatagcatttttaaggaattttcaaaatttgtagattacacttaatgtttgttaaaaagttttagcaaaatatactttcaattaatctatttcgactacaattggtcctagacctatggtctgttgcttttctcttttataaagcttggaaattgattgtcaagcaactcataaatgaaattttgcagtaaaatgttacttcttaagtacacaccccgtcttactgacatggcttatttaattatcaaagtgttgtccatataaaaggacctagggactgacagggatactaaaagtacagtagagcgtcgataatccgaaccccggtaatcagaacgcaaaaaaaaattataaaattaaaaaatgattgcggaccgaatttttggatttaatgagcaaaatatgaccgcggattttttgttttgtttatgcagaaatacatacaatatatttgtttattatgcaggtgttttattccttgtaactaaaatgtatgtacctacataatatgtactatgttaatgagctttgtatgtattttgaacatatgtttgatactccgaacaatttgataatccgaactacccctgtaccaattagttcggattatcgacgctctactgtatatttaaattttacaaatgtttacggaatttgattgtttctgttagtacgatgacttcttatgtagtgatttgccttaagaaacttaaacactgaatttattgtccagatatttacatgttgtagatatttatataaaaaaaatataggtcttaaatgttaaattagatatatgtatatgatgtgtataaataataagtggcctttaacgttgtttaataaggttccctcaatcttcgatagatcaaaaaatcattggtaggtggagaaactaacattcaatacatatctctttagattagctgaatctaatttaaagaaacggcagactgggattgtgttctaaaatatataatatgcataaaatcaaaaccattacttcttattttattccagaaataccatttttatctttttattcttcagtatagtttaagtttaaatcattttgaaattgcagatatagatttaactagatgtttatactgccaacagtttcacatttttgattcagattttcttctattagagtttggttctccgtgactttatcaattgctcatatcagtagcatctcagggtatacactcttcagcttgatatgattttcaaattacctgttgatagatgtttttggataaaaatttttaaataagggagatcaaaaatctataacaagttttcttttcaacatggcagtttctaactgaaactgaagtagtcactgcaaaaaatatactatgttcaagatgctaaaaccaagcatctgaacaacagcagtatatctgcgccataagtttatagccccatttattacaccctgttcaaaattatttcaaacaaactgcattctttccttgagatgttcgatgacgtttcaaatcgttgtctgtcatacaaattttgttcgaaaattctcaaattgaatagtcaaccggatttaattgtgggctgttaggtggccacatctctggctcaatatagtccgggcagtataatatataagtatataatatataagtaaaagttatatataatttgaacaaaacattttgcattagtcattgctacagcagctaagtactatataaccaactacttactacctccttcttttttataggttatgattgttaattctcgaatcgaaccagggtgtcctagtttttttaattcataagattaaattgtcctgtacaaaatatcaaattgtgtacattatacaactataaaatatgcaacaaagaacaatacttattgtggtaaagctttgtcactcacattgttccattttaaccaggatccattagattggcattggttacagacaggtgacagaatcatccattagaatggtaacagaagtctctctaaaaagcagataacactaactctaacacttagcaaaaattaaaaccttaatggttaatatggttttaaagctactcttttgctgtgaaattcatcatcatctgtaaccactggcagctcgtggatggccatggttgtctgttgaggtttctaggctctaaaatttgacatggtgtggaggccagccacatgcataactcctcaaaaggtcaacgttttataacaaaaataggtacttcttagattgtcgtctttgagataatttcagtgtcatgtataattttgcttccttgactatagttgaccatgtttttctttcctttgcttgttttcccattctcgtattcctagttcttttaaattgtggttaataccatcaacacatctcttgcagaacaatcagaaatattttttttgtttctacttccacccaggaccctaggaaaatggttttcaaaattttgttgttgtttttttggatattgtatgatatatttaattgtttatataacttaaaacattagatagaaatcaaaaaacatatttttctgattattattgagtttaactaacactcagtttaactaattttagttatttcagcaaactgtacaagtaaatacaaattaaagattgattttttaatttgattcatactattcttataaaaatgtttagtctatactgatgcaattgaactaagagagtcattaatattcagctcagcggagtgctattcttcaaggtgtgaaattctatcaacaagggatctgcctgttttatggaatgatcccttgtttatttaagtacacatttccattaatagtagcccgctgagctgagtattaatgactctcttagtttgattgcagaactatacctccacctaccagtacctatattatttgacagacaatatttgtatcatactatttctgcattgtatcatttagattcagaatttacacagaattgccaaaaatgtggcagccctgtactactcagactgaaagtaaaccccctcttaatattttatctactacagttgagatgtatttttctattggcttttaagtgcacatagagctatattggtgtatctatataatatatctataacatttatatttat

SEQ ID NO: 6313 - DNA, 4578 bp, Diabrotica virgifera
cgcatttattttggaggaagtctatatacaaatcatcagtcagaaaaatactgtatatgtttcaaaaaatatatacaatatttcgtacacgatcattttctgactagccaacagtcgctcaaaacagtttcagatcataccaaaattatcttcaccttcacataaataaacattctatataaccaagaaatttgattatccaaaactgaaatgtgcagctgcacatatttctttatacagaacaattttattatacctattcaaatatatataacttaacagtattgacaatcctgtagagcagtagaatgtcttttcgggaatatttctacaagtaactagaacttttccagtaagtcagtttttcttggagctatactgtactatctcctctggaagtatttttaggatgttcataaatttcgtctacaaaaaattttataagcataatatcgaagtgatactagatcgacaatatattgaaaaattcaaaatatatatgcaaaaatatttgcatctgaaattaattgttcaaaacaatggggtttaaaacaaattaaactccgtatatttttatgagtttagaaaacattaaaaataaatttatagtaatttgtaaatttgccttaaatatctgaaaaatttgatattttaaacatgaattaatggtattctatttggacagtagttttgtgtaaaaaaaaaatagattcgcttttaattaaacaagtcaataatcgaatagtgtgactaaaaattcacgaaatggaacaagtatggagacgtaccctgttttcagggttggttccacttttatatctatatagcatcagaaaatgaaagagtcactattgaaccaattccaaatgtcatctagaagaaactactacgaagaaataataattgaatggctaataaaatatgtacagacttcttattttatttaaattacatacaaaataagtattaattgcacgtttcaaatccactataaccctgaccaaattaaaactcaaatatgataaaattattcaaaacaaatccacaaattactgcggcttgttatcaaccttctttcgataccaataaaaatttcgttaatttttacaatttggcacaatgaaagcaataattatcaaaatacacaacactttttgtataattacaaactaccctatctgctttcaatttgagattgttgcaatctcatcaaataacgcatgctttgtgacttttaagaataatcgttattctactatcacagacattgtttagaatttgcctttaaaaggaagttaactgaatacaccaaacaaaatcaagaagtcttttactacacaaattgcataaataactgttgaccaaaacatttttaaccttttgttgacggattgtaccgaaggttcatgtcatgttttagttaattgtgagcgagattacatttaaattggtattagttatagggattcgttgtcccatgatttctttcacgaagcgatttacatagacgaaaaaataattcattcagtctctgctaaatgacaatgaaattaagtttgccttcttaacaaatgtgacaggacagtgacaggaaacgtgtcttagaaacaggataacttgaatagtttttatgaatagattttcattgtttcgtgctgattccacttggagattctttagtttttaataataaaaattaattacatacgtcttctcctacgacacatagaaagcatcgcacgttccttctcttatacaaaaagcggaatggaacgtttcatcgccgtccgtttatctccagttagtcagttgattttgtattatgggagatgacacgacacgacgttaaattcagttcaaaacttatgacaattaaaaagataaaaaaatattattatattaatttactgttccatttctacttcccctaaatttgatactaaatagtattaaatttgtagtgttaaatggccttgtagaaatatatatgttcaaatttacgtagtgtcaggttaggttaggtcatttcctagaattcctaattaatattaaaaataaatcataaatgtaactgtagaaaattggtcggaaatttggaaataaatcagtcagcgattaattaactggcgatgaaacggccggcgatgaaacgtcctataccgtacgagtttcattatgtatctgatgtaattttgtttattttatgatcatcatcattattttcactgtatatgtatctgcaaattccaatgtttgctgcgtttatattaggtatgttaggcagatttattaccattcctttttaatattttgttgacatgcaaatttaatgtgtcataggtctttattgttattattcaataattttactcttagctttgatgagtggagaagaagtatctaaacaaaagaaaacgtggtaaaacgtaatgtataaccattgatggcgaccgagacaaagatctaaaatgggatttccttttattggtatttaaaagaatttatcatacaattaaagaaaactatttgaaagattatggctaccaaacatcctttacaataggatacacatgtacaaaaatagacaaaatggaaagataattttataaattggaaaaaaggaattattttgatagacaaaaaagtttcaaatgtcgaaaattttgaacaatggtattgttgatcgattatttgtaacaattctagtaaagcattagcaatattagacataaccgtttgagattagttgagaaaatgtgtgcacattatttcttggcttgacagatatcccttcaacaggcagtattttccagcttgataagagacacgcatttttgcttttctatttacgatattacgattgaaaaataggagggaatgtgataatgttttaaaaatattaaaactagagatgttctagataaggagaatattataggaacaatattcttttgaggaaagctgcacacatatcacattgcttgaagtactgctcttttatcgaatgccctgttttgaaaatggaaaaatgtttaatattggaggtatttttttcttcgcataactaaatgattaatcagactgtaaatgttggcaacaaaaggttaaacatgaccactactacgaataataatatgtaacttgtaactttaaaacgttataaaaatggagtaatatattattgctatatttcacttcctttgcaaatgtgtattttaagatttgtccgttgcaatttaaaaaagaattcttagttaaaacgctgtacatactgtacttatttatgttaatcagtacggcatatactctgtcagtttgaacgagatgaagtcattaagaatataccttctggtcaattttcgagaaattgactgagatatgccaaacagataaactttttagtacaatatacacatataatatataaaatgcgcgcctctaaatgcaacagtctactgtgaaaacaaagctcgatattgaatactccttcgactgaaatagtatcaaattataatcaaccaaattagcaaaacagtataaagttgtatatcttgaaataaaagaaactgcttgtattttattataaatttaaaatttacttatgtagtctatatccgttcttaaaatgttctttaaattaattaagtatcctttatttcatctttccaaaaatgacaatacaatatttcatgtgattactaaattaacactgaattagaatggaatatcgacggataagacattcaatttaagctgtagatgtgcgattaagtaatggatgacactgtgatttcaaataatacaacattaatacaaaatcaataatacaaaataaattttgttttaaaagcgaatcagtctcaaaaaactccacaataaagtttatatatattttcacgctttatagcatgtttgatctttctactaaacacctattcaaggtataaagaggaatactacttgcgccatttggttaggtcgcgagaatagttgtaatatactgaaagcgaaaaatttaactgttgatacctttaagcaaaatagatccaaaattccacatgagtgtaaaaaatagaaaataagcattacgagaaaactaggattatattctgtatttggaataataaatacataactatccgttcttatgtgatcaagaaaaatctggttgcagttttatttgataccaacagtaccagaaatccggagctgaagtactagatcagaatggaatcatgcagattaacaaagtcctttgccaatgacaatttgtaatataattgcaagataattaacatattaacaataaaaaaggtcaaatatgaagaaatttaaaaaacctcacgactagctttatcggcaccccatattgaacggttttccatatggtatcacttagtcgtgaatgaagagatatatatcatataaaaagtaaaaaaattgggcactgtaaatatgtacaatatgtatgtaatcttacggctttgatttataacatccattaaaaatgttgttctgaagctatttccttgtggcatttttataattaactatttagacgggaaacaagccacaatt

SEQ ID NO: 6314 - DNA, 4560 bp, Diabrotica virgifera
  SmartBlast Evalue=1E-100; Info=Amino acid transporter n=2 Tax= Culicini RepID=B0WV85_CULQU
gcgcgctcattactgtatactacacacatcggcgtacgctccactccatgttttgacttaatttgttttaaaatgaatcgtgacgcatgggaaaagttataccggacgaacaatatccatttttacttcaatttctatgacaagtttaggtatgatataataatatgtttacggcttacttggcagaagtcaccttgtcatatgtcatcaaaatgtgtgtgtcctaaatttgcggttaacaactgaccgtctgtttgttatttaacattttataaacaatatcgtaattaatttatttcgtattttacaaggattttggaattatctggaatattgttaagatattgtacagaaaagccccatggaatacctacctattttgcaattgtttttcccgaaatttttttataactcctgttctaagaatcggatcaaagtttatcaaacgccatttggttcattttttttaaaggaacaattttcattttggtaaaattaaatatctctaatagttctggagatataatcatttcttaaaattgttaaaaaaatatctgaagggtttttagcctggtaccattgaaaaatggaatctatgcataaaaaaatataaaaaacgttaaggtatcgaggggcatgcatacttaaacccctgtctcctagactatttaaataattataacaaaataatcagtgatgtgtagtgtagctacagtataatgcaaataaatataatacaaaataaaatactttacttttcttttactgatcactgttattaagatatctgataattaagcaatatatttaaccctaataaaattctaaaatatttttcttgcatcacaaaaaaattggataaataataaactctctgaatgtgaaacataagcaaattaagtctgcatataatttatttatttagtcacaacttcagtgacgagccatctgtttaaaaggaatattgttcaaacatatttattgttgtttaaaggttgtgaatatactgggtgaattattcgtgtcaaaatgagtatttggaagtatgtcaaaagtaaatgaagttgccttctagaatgcatggtgcatatgaaaattgttttcttgtgctctagtatacgtttacaaagtttttttatccttcgtgtgatgtatatttctgaaaaatctccagatttatattaaaaagaataaatatgaaaaaatattataaatcgacgataaaacacaagaaaaccattgaaagtaataacataactttacgtagataaacacttcagattatatcaagacatcatttattgctgaataaaattaacaattcatcattacgagggttggtcaataggtccgtgagtttctgaatttcctgtctactaattgaaatggcaacactgttcctgtgaacagacaactctcacttgactctggtgtaaatttgaacaagcttcgcccagtttgcttctggtagccgtttagcttagcagactaccgcgcgctttgagaagaaaatggaaaaaagtgaacttcgtgtgctcattaagcattatttttttcggaaaaaaccatcattcaaaccaagattaagcttaataaatattatgggtactctgaacatccatttatatggtaaagaagtggtttaccgaatttcgatctggccgtataatcacggaaagtgccaaacattatggacgcctagttaagggttctaaatctacatccgaaacaattgaaaaattcacgatatgattttagccgatcggatattgaaagtgagaaagattgtgcaagtcatagacatctcaaatggctcaatggtttcaattttgcatgatcaattgggcatgagaaagctttctgcaagatggttaccgcatttgcccacaatcgaccacatacgcaacggtgtgacaacttcccaggaatctttggcgatgtttaaaggcaatatggacgagtttttgcgctgtttcataaaagtggatgaaacgtgggttcactacaatacaccgaagaccaaatagcagtgaaatcagtgggtttctcggtgggtttgtcagccaatacagtcatggcgagcgctgttttggaatgcatgtggtataatctacattgactactttcaaaaggcaaaaatgatcaatagtatataatataccaacttatttggccgattcaatgaggattaaaaaaaaactgtactttgctaacaaacaagtactttcccaccaggataatgcaaggttgcacatatgcgcagtttccatcacaaaatttataaattaggctacgaattgctccctcgtccacacaattctacagatttagtcccgagtgaccagttcttgttccgaaactttaacaaatgtctcggcggaaagagatttaactccaacgacgaaatcatctcactcacaaacaaatgcctattttgatgtcctcgccaaatcatttttttcggaagggataaaaatttggagaaacatttgactaagtgtatagaattcaaaggaggctatgttaaaaaataaaataacttttgatataggtaaaaacctgtgtttcatccaaaaagtcaccaaaaacttattgacccgcgctaatactcgtagtccgtacggacgcgctaatactcgtagtccgtacggacgcgctaatactcgtacggaaatattgttaatcagattagtatttatgatatattttgagtgtttacacgtgcctaacaaagtaaataaatgaaataagttacaattaaagtcaacacaacaataatcttatcgttttgtcaagagtttcttaaaaatgtataaaattttactatctaaactagttaacgaagaattattatgtacacaattacttaaataatcagtgggtgaactcattgagggcagctatggtacccgacactagaccgaataatgagaaagtacaaatgagaacgttttttattaaaatgtaattaaacttccctaagtcgtcccaattaactatggtatctaacacagcgggaatcagaaaccctaatgtagataagaagatagcaccagctaagtctataagggcgtcgagatgatgcccagctgcagctgctattgcaaatatcactaccacaagtactgttctggtgataatttggccgatgttgtgtctttcttctgaaacgtggggtttaacttttttccatatggtttcggttggaacatagaactgcaacatgaaggtgaagaatactgccgatgagattgctgcttgaactacttgagccaataattcttcgttgggcaaattttgcgtaatggtagccgccgttttgtcaccaaatgcataataaccaaagcaacccaaactggcaaaaaatgtaacaataattgccatacccatatttaaaacaccaggacatcccaaaaactgaggagtaatcatggaattttcaacaggcataatagtaccgataccttccatggcaaatataacagtgctgaagaacgaaggcaatccggaccagctggttactaaattcctttctttcatttccactttaggaatttccatgaaagtataatacaaagtaattgcaaatgcgacaaacatggtgatgttagcaataaaagaaaatggcacaagatgcttcaattctcttacttggcagaagagaattagaggtccaagaatcataagtttaaagtaaagactccaaacgtcttcaccagctggttcgtagtatacttttactagcttttgaagagattctgatataaatacgatatacaccgctgttcctgcagcataagttgaggcgagagcaatatccgaaaaattcctagcaaaaccagaaaattttcgtaattttttaggaccattttggaagaccgcttcagcagtttctgcatatcccatactcggcgttttagtttttacacacattttttgtgaagctgataccaaaatgtgtactgtatgggtacataggaaaccaacgaaaagtgttccaaaaaatcctacagctaatccagcagctttaaaagcccttggcatagccaaaattccagttccaagagagcttttgaccagatggataaaagctccactaaacgtattgggatgttcaagttccctgtgttcatactgattatattccttaattagttccgagtcaatggggacctttacaggttcattcttatttaaagtggctgtagaactgaaggtagacacagtatatgttgaaggaaaattatcttttcccttctccatcttgaggtcttatagcaaaaaaaatgtccaaaaatttctaatttccacttctaactaatcacacttccgataaaacaactttttacactttctttttgtttccgcgtcggtttataaacaatcgtccacggtaagtataaacaatgaaactgattgagtagaagtagtgtagtagtaatatagtaatttcgcgggctaacgataataattcgcaagaccgccagatctgaattgggcgccgtgttcccacctaccaaaaatgaagctgcaacgcgggtacttatactggctcactgc

SEQ ID NO: 6315 - DNA, 4563 bp, Diabrotica virgifera
  SmartBlast Evalue=0; Info=ATP-binding cassette sub-family C member 4 n=2 Tax=Trichoplusia ni RepID=D2K6M6_TRINI
gttctgcagctgcaatgtatcaaaagatcacaaatttgttttcactttaataagatattacaaacgtataacattttcatatatttatataaaatagacatcttaatttaaggaactaatctttgttatcttcaattgctaaattttgtggaacttcactggttaacggtcccttcttcttaatgtagtcattctttgctacattacttaatagctccgccatggcgggtccagtttcctggaccatcttgctaaagtatccttccggattttgtagaagctgatatggatggtcaaactccattgcctgtccggcatccatgactaatactctgtctgaatccataatggtgtttaatctgtgggcaattgtaagtactgtacagtcttggaatctctcacgaatagttttttggatgaggccgtcagtctgtggatctacgttagcggtagcttcatccataacgagaactttgttattgcgtataatagctctagcgagacatataagttgtctttggccagcactgaagttagatcctccttcactgacaacttgatttaagtcactaatagcacctttgagttcaacgtcttctaacgctttccataaaacctcatcaccatgtttctcaaaaggatctaaattatacctgagtgaagcggagaacaaaattggttcttggggtatgattgagatatttaatcttagatcattcaaacctatttcggcagtatcaacatcatctattgatatagtaccctctatcggtgctaatctgaaaagtgacgcaatgagggttgactttcctgcaccggttcgtccaacaattccaatcttctcgccagaatttacttctatatttaaatctttcaatacaggtggaagttctggagcatattttaagtacgtattcttaaatataattcttcctttttcgggccaattccttggtggcttcttgccaggtagcgtttcgaagggcccttccttatccagtttagtatattgcaaaactctttctacgctaatcatattactcgccacttctgcactttgtcgcactccatattgtaccatgcccgttaatatgagactttgagatatgaccaagcccacgtttgcacttaaagtattttctgttctaaaaagaagaaattggtaagtcacaatcgccaagaaaaagcagctcatgacatccaaataaaatccaaaagcggtactgctgactataaataagtaccacgtgctggtgtgctgatcttgtaggatatcaaattctgtagttatcattttttcagcgtttgaggctctaattgttgttataccgtatagtgaagccgatatgtgggaaaacaccggagctcttgacactccttccagtctttttaacgattgtgcgcttgttaagtaaactacacggaagaagtagtaaagaggagcaagtattactgctggaatgatcatccaaggagtcactatgaacaccatagctaagataccaatcataaccataaaaatttgaatagcgtcaatttgacagcgtggtaaaagttcgtctactgcacccatatcttttgagaacctgtttaaaattcgccctgatggatttgtatcgaaaaatctcatcggtgcttgaagaacattgttaaacatcttattatgcaaaactttggaagcagtcatacatatctggtaataaaggaatgatctccacgtaagaaatacaacagaagctaatataattccagtgtacacataaatataatattctgtagacggaatgtcattcagttcttctaaagtagcatttctgatgaggtctgttaaatatcgtttctgacttaaacttagaagtgaactatctgcagatggtgttgaatctgttaataacgtagcagaagttgacatctcatcagataatccagtagacattagtaatggtctttctaaggttttattggaagttgcattgtgtagggaatcactaagatggtatctttttgcctcgttattagtccaatgtgtaagccaaagatctgatgcattcgtaatcatttgagcgacgaggaatataaaaattgtaaagaataagaataaaactccaccgcctgatttccaatattccacataagtagcatttgaaatggcacctttttcgataagttcgtcttcttcgttcggatcatccgagaatacagaactagccaaagaactcatagactggaaatgaggtactgtcgaatttttacgaatcttatcgccagtctctggtaccttttctttctctttatcatcggcctcaggttcttgttgaagagcattcaagtcattttccgacaattcgttaaatttggctattttctcaatttgaccattgtttataataattatcaaatcagctttcttcataaactggagctgatgtgtgaccaaaattctagtttttccatataaatatttcgatatacattcatcaaaaagatgtcttgctacctttgtgtcgaccgccgatagcggatcgtcgaataagtaaatatctgcttcagtgtatactgctctggcaagattaattcttgctcgttgtcctccacttaacgatgttcctctttcacctactaagcttctatcaccaaagggaaattgtttaaaatctctttctagagagcacaccttaactacgtcatggtacctgtttttcaagaatggttttccaaaaagtatattttctttcacgtttgaaacaaaaagccaaggttcttgggaagcataggaaattttcccgttaatcttcatttgccccctacttgccggtaattccctcagaagtaactgcagaagactactttttccacagcctacgttaccaacgacgcaacataaagttcccggttgaatgtgtaaattgagatccatcagagtgggtgcaattggtttcgatgcccaactggctgaaatattagtcaattgaatttctcctaattcgtctgggttggagattttttccggctccggtattttttcgttttcatctaataaaagaaagtcttctaaccttgtaatagaaactttggcttcagaataaaatgacaaagctcttgggaagaatatcgccatgatcaattgaacagtgttgaataactgagctaaagaaaaaactacatctcccgttaatctttgtccaactagtacaaaagtaatgactgtgatgtataaaatcatacgttctgtgaatatgcccattgctgataggacgccatagcaataagaggtagttgttataatatctatttcgtattttctagagagctctacgactttttcgaatggtttttcccatgcatacattttgatgacttgtattccagaagtaatttcgctcatcagttttactcttttgtctgtctttagagcaattttgtatcttagttttccttgccatttcgagaaactaccttgtaaaggaagagactccagagtaatgaaaaccattccagtaacggcagcgatgatgccaacatatcggtataaaatataaaacgatatccctgcagtaagtggcataatccaggcataatgtataaattgggcggctaagtcaaatctttggacgtcattagataagaggttaaccagttgcccggatgctgtttgacccagggaattgtggcttaacttcaagagttttctataaattaacgaacacactgctatacgcactcgcattcctaccctttgggtatctaaagtacaactatgcgttatgataacattaagaaaggccattccgattacaccagttgccagccaccaaccaatgtaagcttcttgattactgtcaaaatagtttatgaattcggctaatactatcggctgaagcattctaataactacaaattgaaaacctaatgctatgccagatctggaataagatttccaaaatgtctttaatatggcattttttaggctaggcttcttttgctttttgtcttcatgatttctaatttcatcttcccaatttttttgcaacgcatccccaagagcggctgataaatcaccttgtgtggtattatatacatcttttattgtgatgtcgtgtttgtatccaaatttaaaaaacggcagaaaccaccagtaaaatagttttgaaataagattagctttttgttccggtgatactttaacgtattttttggttgaatccatctcgaacttaagtactgttagttaagtaaggaaatatcacaaatgtttttgaccaaaaacaaagtacatatttgcactcggccctttgattttccgactacacgcctatgaagagaactaggcctactacaataacagttactgtaaatgcacttcttcacttttggtacacttttcaacaaagatttatttcataaattatcaaacatttttataacctatagtatagcacagtcggtgttttaatcagctagttatcacactcgcacttatacttatcacttatccacactttataatctacaacctaatacaaacagctccgctccaactactatcgacttaacatgttcgtc

SEQ ID NO: 6316 - DNA, 4552 bp, Diabrotica virgifera
  SmartBlast Evalue=0; Info=Titin n=1 Tax=Harpegnathos saltator RepID=E2BUG0_9HYME
atatgtcgcatgagatttgtcgcttgaaataatatatcgcttgatgttgcaagaagttgttggtaattactcatttgtaaagtctttaccaaaagggtagatgttacaagtagaggatgccgatggtaatgaatgtacaaaacggagtaattaacaaccaaagattcatataaaacacttaattaaaaatatataattttacatatactagtttatatacgtcaatacaattttggagcaagtcgttcgttagtcagcgttttgatggcgcaatcaaagtatttctagacttcactaggtggtactacgttgagtgagaaggccgcgaatgtttctcccttctttccaattgctttagcttggtattgtccaatatcgttggaattacaagacaagatttgtaatgtgtagcgttttccgtcagcggtaaagttatatttggcgctgctttcttttatggcttttccatctttcaaccagtttatctgtaatggttcgtcttcggtctcagctacgaaggttgctgattcaccttcagataccgtggcggaaatcgggaatgttttgaaaacgggactcttgggctgttcccctgaaacaacaacatttagtgtacaactgctgaagctttctccagcgtcgttgaatgcttcacaagtgtatgcaccagaatcttcagggaaaatttctgcaatgattaatttgtaaatgtttgcttcgttggtatattggaaatctttggatggtttgatttctttattgttgtgtaaccagactacatcaaatttgttagctcctattatgcggcaagatagggttactggcttgccgtcttctacaaatgctgatttcaaatggtctactattcttgggggtttgtcttctgaggattttttcttgccgttggtggcattggccattggtttaatggttagtttgcatttggtctcagaggttcctacagagttggttgctctgcacacatattctccttcatcttcagggtatacttcatttatgtgtaatttcgctattccgttcttgtatttgaggtcaacaacttcagaggaactcaaggcttttccatttttggtccaaacaatttgaggatctggatctccctttacgtgtgcagtcaaggttagactttcaccatcattgatggttaagtctgtgagatttttggtaaattgtggggcgtacattgttgagtcatcaggcagtgctaattctttagttgcgcttcttgatctatttggacttccagtagaatctaatctaccatatttcctaggcgtcctcttgtctccatctccaacactgagtgtggatgaagaatgcgctaaactatttgtgctaggattgttagatttcggttgtagagggtgaggatttgatgagggtattggttttcgcacagttacaggaattggagctggctttataggatgttcaatatacttcctgtctcctgaatagagtaatttgttggctagttcttgttgttctggtgtgctggtttgtccttctacaataactacacaagatgtttcgtctacgccgtgttcgtttgtagcaacgcaggagtattttccagaatcggaaggtctgcatcccacgatttccatagtgattacaccatcagagtgagacatagaatattcgtatttactaagctcacgtttgtccttataccatttgactgtcgggaatggtttaccacttaagcaacacaacagtttgcaagtatcacgctcttgcataacacgtggtcggagcaagaaagtaaagcttggagcacattctttttcttccctccataacgtgtatggtaatggttctcttcgtctaataactggtgcttctgatttgtattcaggtacaactttaggcaatggttggacatttaggaatactacttcttccctagctccatagtggttttcagccctaatgatatactctcctctatcttgcagccttgctctgtttatcacaaagtaatagtcatctccagcatatcgcttcataaatttaacgctctgtctcaattctacgttattgtgataccaactgactgttgcagcagcaacaccaataactctacaatagaatttaacactttgtccttcatagcagaacgcactttgtggtttaatgacgaatctgggtgctgcctgtctgcggtcaaagtaagcatcgtgtattttatatttgtctattaatagttttcttagagatgagtactctgaaagtcttccaattggtagagcaaatgaatcccaagcatcatatttagaacggatcttgtcacgcatacggatatatctggatcggtcaataacttcagttctatcggcgtggtctccactgagccatgaatgtaacaaacattcttgagctgtcatacgtttctctttgtttttaagtaatagtcttcggataaaatcttttccttcttcagaaacattagtgaatgcttcttcgtcgaagtcccagtcacaagccttaacattctttagtgtttcaatgtcgttttccccagcaaatggcgacaatccacttagtaggacataacctaatacacctacagcccacatatcagtatagaatcctacaggttctctttcaacgatttcaggtgctgcgaattctgcggtacctgttgaaatcttcacaatttcatttggatcaagtttagttgctaatccaaaatcgatgagtttaatattggtgctctttcgagtctggcacataatattctcaggtttgatatctaggtgaataatatttctttcgtgcatgtgtttgatagcttcacaaatttgtctcatgtaattgataacttcagcttcagacatttggtagccttctgcggttattctttcgaatagctcaccgcccgataggaattcataaataagaaccatttcatcgtcatcttcgaatgcatcgtgaagattaataagtttaggatggtgtaattggttcatgatatcgatttctttccttatgagctctttctccattgcgtgtgatactggaatgaatttggcggcgaatatgtttccagtcttacgttcacgacaacgatgtacgacaccaaaggctccagtgccgatttcttcaagaacatcatagtcatcatatactgatttagtcttgatttcaactggttgtgggacaaatttagagtaaatgtcaaatacgtatttatcataatccgtaactgcttctgtatgggattcacgttttttctttccattttcgtcaacttcatacttcctcttttcaaccttctttttaatggtatctttcatggttataatactgctgaggtctgaagcatcggaacgaccatatatgttctcagcatatactctgaattcgtattgatgtccaggtgttagtccatttactgctattgtggtcagtcttgtgtttcctactcttatccatgtagataatggatgttcacgtctttctacaagatagtttgtgatattgctaccaccgtcccatacaggtgctttccaggtgagtgccaaattgtcgtgaccaatattatcagctgcagggaaacgtggtggatctggacgatcagctatttgaatcttaataatagcagtatcttgtccaagttcgttctctgctgttattctgtaaggtccactatctaatttacttgcatctctaatggtaagaatggcatgtctgtctttaacttcgacgtgataatgtcctcctgattcaattacttcgccttctctgacccatgttatcttcggtcttgggaaaccagtgaatggaatcttaataacaacattttcacctttgtcaaagtaggccgagtcacggaagcgtggaggaatgttcaattttggagcagtcataattaacaattctgcacgtgtagattttacaccagctttattggatgctctacagacatattcatcagcatcttcaccaaatacgtcatgtataacaagatgatgtacttctccttcactgtaaatgtgataccttgaaccacttgtaatttctctagcacctttgtaccatgtaatatgaggagctggatttccagtgatggtacattcaaatttggcattgtggttttgaatgcattgggcgtttctaagtggtttgataatttctggaggtgtagcagcaagcggatctttaatttctacactgttggatgcactagagggtggtgaaatgccagctacattttgagcgaatactcggaactcgtattgacgaccttcaatgagatttggaatattaatctgtgttggtaagcatatggaaacattgacacgttgccatgttgagcttccaacttcacatttatcgatccagtaaccttgaacgcgagctcctccatcattttcaggtttagcccattcaagattaacaaagtctccaccaacttgtgtgactttaggtattccaggtggtcctggtggatcgaatggagctctggctttgattggattaactccatcaagcggtggtcctgcaccgttgtcattaacagccaata

SEQ ID NO: 6317 - DNA, 4521 bp, Diabrotica virgifera
  SmartBlast Evalue=0; Info=Lethal(2) giant larvae protein n=1 Tax=Harpegnathos saltator RepID=E2B5S5_9HYME
gtacacaacacaatacttttctatttgtagattaaagatggtttgagaagggtatttgaagtttaaattttagttttgttcaatgagccatgcaataagttaatgaatattaaatgggttaatgatacaaagtgtatgtagcgaaaacggcacaatttttaaattatattggttaggtagtgggtattagttgcagtaggtgtcttttttaatcacaaaaactaatatgtcgtctttaaacgatgtataatgacgtatatagtgtcaatttaactatatatgtgttaactgatctccagaatattccaaaacatatttcgcgtgattgacaaatacgtttagcagataatgtttagtatgcaaaaattcataaacttaaattactgttttaagtacatactgctgctatcgcggtttctaccatacacaggtatggacttcatatacagtgatgagcgcggcaacaaccggcaaaacaacgcaaaagatggaaaacaatacattgcgaggtaaaaagagatgaaactagtagagatggaaactatcgataaaaacatataaagtaacattacattacatagtttcccacctttagttcacctatcggaggagtatgacaattgtcactgtgataggagaatttaataacacactcctgtgtaagaggcgtctaaaggtgagaaactatgtaatgtaatgttaatttatacgtttatatcgataacatccacctccaccagttacatctctttctatttcacaacgtattatgttttccatcttttgcgccactttgccggccattagcgcgctcaccactgtatacaacttttgatcacattaatgctgcaaaaatatcagacattttttacggaacgctgaagaattctgtgaattattatgtactatatctgtcaatttttcgcgaacaataacttttattattcgtagcaaactccacgaatacttcttgtgttcatcaactatttgaacgtgagaatttagcattaagtggtaaatgttttaataaaaaataaattgtaacttttttcccgttgaacccactttgtctttcactcatcccaaaccatcttgtgtaacgaacataaataaaagataaaactacttttaaaaaacagtttgtactacatactagtaatacgtgattaattaaaaacgattaaaaatatgcggaaggaaatactgatcatgttgatatggcatatcatttgaccattttggaggcatgttggcctccgaatgtggatttaggggtcgtcttctgccaatgccaatggggctcgcagtagaatatcgctcacttggatctctttaatctgaaccgagatgatccttcacgctatcgatggttatatcaccgacgctgctcgacaccgtcacgttgtgcaatgtttcgtcgccgtttgttcgtgcatcctcagatttgtctgccacactgccctctttactttcagcattcccgttgactaaaggggcctctgataattccaatacctcattttctacttccacctcgacttgttcgccgtcatcccttgctcccgccggtagaggcaagtaacaccgagccattgttacgctggaagtcgccaaagacagcctctgaagctctgacgaggaatggaggtacaaggcctgagcatccttggtgaacaccagagacgaaacaccatttatatcttcccttttaatagctgctgcgtttagctgcctcttgagatctggaatgcttagtactagacaatcgcccatatttgttaagcagagtaagtccacttcggaatgttttacttcgtccacttggcagctgaagttggcgaaagccattctcctcactcgcgccccttcatgtgccgtcaatttgtatttacagaaaggcttcagactgggaagagtgaagattttgaattgttcttcggatgcgataacaactcgatgtgcctgagtcgtatccggcagtggtgccactcctttttctacttctagaggttcgggaagaggtttactagatccatccaatacggctatgcctatcactggagccctgtgttttaactgaatttctttcgctaacatgcacgagacgtcatctgtgtctcgtttcgaagacgacggaactgttatggtgaaggcgtagacagttccattatttgtagctgcccaaagagtggggtttgtgttttgcacactgactaaaaatgttctagcgaagtacaaacaccttacgaaagatcccatggaatcatcggctggtctcgcctcgatttgtcgttcaactggtttggcctccaaaggatttacattctcatcagtagcggcaggtaaggttctcttagttggcggggaagtagctgattttttgtcgtctttgttagtgttccgacgctgggaccgacctttccttaaacgtctgaacgactctcttaaggactttttgaaggactttcgtcgggatattggggtgtcgcccgctcctgtgagatcattaggattaagagtacatttgaccagaataggtttgtttttgatgtaatccaaaagcgcaagtccgtgcgctgtgccgactgaaaccaatccccaatctgcctgaagaacgctgcatgtgatagctgcgggcggatgaacttggagaattgtcgttgcttggaatcctctagattggcttatacttccttgttttggcgttagttgtccgtgtcctttccaaacgaatccgtctctgtcactgacaatgttcatcgatgaaacttttaaaggcccttctaggacctcagtatcgaatttggcaactacggtttgtccagcggtgccgctaactaccaaagtaccagacaatgggcaaagggttattcgtttgactgccaatcgtggatcatcggagtacgggtcaaaaatgcccgtttttttaaaaggaggccactcgtcttcaagatcttccggatcaggatgtacttcttcaaggtcatcaccagagaaaaactgagccgtgccgaatttgtacattaaagtaaaagtaacacctccggcatcccagaatttgacggttccatcttcgtgacctgtcaatagcaactcccgtttaggtacagctcctttggaacaaagaaggcttcctccgtccacaggccaagaacggttagagtaaagatgactggtttgcactttgccggcatctttaaggtgctcccacagttcctccggtactcctgaaacatattggctgcaagtgacagctgaggcgtgtagagatgccaaatacggcaaatccatcattcgccaaccgtcatcctttaaatcgatagctactatttcttcttcggccaaaactatcaatgtctctggttctcccttagctgtgttattttctacactgccgttgttagctgccgattcgtcgtgtcccttagattcgatgagaataaaatcaataactttactggtaaaatcgaaggcaatgtgtttctccccgtgagctacagagacggtgaatttgtcgctataggatctgggcagacctccggagaataccaacagattgtcgtcgccgagttttcgactcaacattttgggaatgcttttacaggaatagggtccgtatgtagtcaccggctcgctgatgggtttctctgattgatcgacgttccattccatgtagctgccgtcattatgtgagctgaggaagtttcgaccgtcctccttccagcacaaacattctaactgttggtttgctatgaaggtcttcactgctgtattatccaccctattccaaaggactataaggcctctgttgtaacctactaaaatgttgttgggttgatctggctgctcgaatattgactcaacggctcctggattaagtttataatcttgtggaacattttgcataacaacatcttggtaaataatatctggtgtcatggtaaatgtattcaaatccaataaatatatattgccaccttccgtgcctaacaacaagtgtttccccgcagattccaggcacatcgttgatattttcttaagtttgccttctagagcctgtgatttaacttctaccaaggagcttttgttgacttcccatagatggagcgaattgtcgtcgcatagagagacaaccctaccttggttagggaggaagactagtttcgtaacggcgatggggttttgatgctgcccgtagaattctactcctggttgtccgaagactttgatagcgccagttgccgttcctatacatattaatctcagcgatgaatcccatgctaaagatgtcggtttgtgtggaaatccgtgttggagagtccttctgtagaaaaagagttctttctgcaatttttgtcgttccgcactttgatggggcccttttgcctttataaacttaaacattgtgtttactgtcttatcctggttgttgtaaatgtgataaaaataaaaacgaatcctctaaactattgcacaccacaaaagagcgtgcccaaacgctgtaactgcattacacgtaga

SEQ ID NO: 6318 - DNA, 4488 bp, Diabrotica virgifera
  SmartBlast Evalue=1E-107; Info=Zinc finger protein Xfin n=1 Tax= Camponotus floridanus RepID=E2AVY0_9HYME
ggcacggtgtgatagtaacccaccacaccgatctttgctttgggtggaacacggtttcggttcttgttatttgctaatcggtctagttaaaaatgtatgtgccgcactaacaccgcgctcttttgtgttgcaggtcaaaagtgaaccgctctcgccagtgccagacatcgaggagaaaaagccgaaggtgaagacaccatcgaagaaattcaacatcgatggcaaagattccgatttcatcaatcccgaagatataatccaccacgccaatggcaagatatacttcaaaaacaagtgtaaacattgcaatttcaagacagcttgggacagtgagatggccaagcacgagaagaaagtccacaacatcgagcgagaagacctcagaccgatgattaagaagccacgaccggtgcctaacctcatcccgattctctcgcaaaactctctacttaagaaacccaaattggaagtgccagaatatacagaaccggtcatgagccaaaaagacattaacgatatttgcgccaaaagttcgaacagtgttctaaaagacttcgcctctcttttcgggtccgaagacgtcttcaaatcgtcgactcccaaagtacctgatctcatacctgctgctttgtacaataacaataatacctcaactaagaataataagataactgacgtttttaaacagaaaaatgcttcgtttttcgacaaccttagggaaaaattagaattgggcacactaggaaacagtaatttagtttgtaatatttgcaatcacgaaagcaagtgccttaccgaacacgtcaaacatcaaaaaacttgtggaaaggaaccaaataggaaccattttattattccttatagtaagagttcttctagatgtcaattctgtagacaacggtgtaagtccagcacggatctatacaaccaccttcaaacatgcccagaagctaggaaagcccaagatctgttggagccgaaagaagaggaagagtcggataatgaaggcgaactaaggatagatgaaggaaaagacgaaatggaaatgaagcctcatccaatggagaataaggtcttcgtgtggaacgatatcgtagtaccaatggatattgaagtagacgattcaaattacgagtacaccgaagataaagtagacgacaacgtttccttagacctttccattcgcactcagtctcctctggacagtgaaaacagctgcttgggtcaagaatctgtaactccaaatagtattcatcattcaccactggctagtacggaaaagatccctacccatggtaatgacatttcagtggctcaacacaaacgtgtctttaagtgtcctcattgtactttttgggcctccacggcttctcgtttccacgtccacatcgtgggccacttaaacaaaaagcccttcgagtgttccttatgtgcttaccggtccaattggcgatgggacatcaccaaacacattaaacttaaatcagttcgggaccaagctcacgagcaagctaaagttttgatgactgatgaaacgggcagaagaaactataccaaatacaacaagtacctgacagaaattcctgtgacgagcgagcagtgcatggatacaagtggtggatgtggcacaagaccaaaacaccacgacagaaattcctcaccttcgaccagcaaaactgatctacctaagttaaataagattccaaacaacaatgactttagtccgttgatgaagaacacttcacctttgaggggacctccggccttgaagatcgctgatgggacgtttgttactgaagtattagacaagaagagaaacaatagtgagagcaagagaacattattcaaatgcaagaagtgcaatttcaaggacgcttcgagggacatcctgttgcagcacgtgaagggccactaccaacaacaccctttgtcgtcgtcgcacccacctggagcaatggcagcatcgataccgacttcgccgttggcgtcgcaggagcgagcgtcgaccagcatcatcggtgacatcagtggcgtagcgcaggatttgagtttaaggggtacgagtcctgatagagatgaggcaagtgtaaataacataactggtgggaagggaagcggcggtactgcccccttccgatgcggtcattgcaaccaggtatctaactggaagcatgtcatccagagacactgcagattaaaacacagtggagatatccgagttatcagcagcaagcacggccacgaaaaaattgaagtagaagaagtttccgacgaaccagaccacatcgatgtcagccaagatggatccttgaagtgtactgtttgccccttttccagtgacgacaatatggaattcgaacaacacctttcaggacacgtccctgcagaagacagcatatttaaatgttattattgtaaattctatgttagccagaaagaagatatcaacgatcatttgaagttgcatggtatatccgatcctgaggaatttctaagcaaaatggctgaaaaatcagtgattgatggtgacagcaaaaaattcaaatgtatgacttgtccttacgttacaaactctaaatctcaatacacttatcacaagcaattccataaaccaagaggcggccagtacacttgcagtcattgctcttataatgtcagtaaacgacatcttcttcaccaacatctcaaagttcatggtatcaatatagctactcataaacaaaacggcgaaactatgtacttagacgaaatgacagatgacatcgaagaaataactcagtcgtctttcaacatcaacctccaaagcttaccagatataccattagtgtgggtttccaaaaatggaaagttttgtaaaatgttcaaatgtagatattgcccacacgtcaacttaagaaaagtaaacatacaagaacacgaaaaaatgcatagtatacgggacaaatcctccaacgcttccaaaactaacgaagtcgaacatagatgcacagaatgtaactacatatgtgccaacgcaggtgtactatcatcacattctaaagtccatcaaggatcaaacggtatagtccatcgactggtagatccgtctaaaaccgacgaagagcaaatcaaagaattgagtaggtcaattggacttcatcttgttcctgaggctaccactcaggacgacttcgaagaactgatggacgttgaagaaattgatagctcttcgggtacgggaacggttctttacttctgtaaagaatgccctgctaggttccttaaggaaaacgagtttggaatccataagagattccacggatctaagttattcttcaaatgccatcattgcacctacacttcccgagaaagacctcatattgcatctcattttaaagtacacactagcgaataccaagatagaaccaaagttttgcaaggcatgtatatagtcagttcgaattaccccagaccaaacattcaaaaaataagagacgatcatggggaacctatttggaccgtagtggagagtaccttatgtagtcttttaaacaaacccgtgaaatcctcacaaaatgtgccattgtcaggaacagacctgtttctgcaaaaatctgaagctgagcaaaaacacgcggccgaaatggacagagaaccgtcgcctcctagaatattagattataatatagctgagttaatgagggggaatcccgattttatttaccagcctataatgaaaaacggccggttgaaagagaagcgatacaagtgccatatgtgccctaccgcttttgaaaaaagagaacagtataaagtacatttgggtctccacggggccaaacaacgttacaaatgcgaagactgtgattattccgtcaaatactatgcgaattatgtacaacacttgaagaaacacaagatgaacgctgatgcacacgcagccagacgctccagtgaagattctgaagaaatcgatgaatcacttgaagttaccaatgcaattagtcaagaagaatccgtgggaagtaccgccgatcaacagatcgacacgttacttcagttacaagacagaagcatgcaaataaaggaagaagacaagaaatacttttggtgttcgttttgtccgtactctagcagtagaaaggacgctgtggacaatcaccaaaagcgtcatgcttgtatttccggtttaacgaatgcttacacctgtgactattgtgattatactgtaccacaaagtcactacctccgtgaacataagaagttacatttcttacaaagtaagaatcaccaagtggaaggcttcatgagttgtgataatatgaagctcgtggaggaaaacggtgctgaagagaaggttttgttcgaagaacatgatttggaaggatcgaagttttctcctccggtgaaaaccgaagtttcgaatcggttcaacaacaacgaaggagaaaaacaatatattaatgtacaaactggtgaattagtcgaaggaaaagaagtcagtgatac

SEQ ID NO: 6319 - DNA, 4447 bp, Diabrotica virgifera
  SmartBlast Evalue=2E-97; Info="Ras-related protein Rab-1A, putative n=2 Tax=Culicidae RepID=Q17B74_AEDAE"
agttcagaataactttaatttacaaaaaacctattgaccaagatttacaatcacatattacttacaatattactttttatttgatataaacaaaaaatgacgttaatgtgtagcgaataagaaaaatcattacataaaaaataacaagtatatatggataatataataaattgttttggaccaacagaaatcactaaaaatcatgttagaaatgacgtttttttattgtatagaacaagtgatatatgaaataattgtaaatattttccacatgtcgcacctccgctcaaatagtgtcacaactcaaaaaattttaaaaacggttttattgcaccaacagtttaataaaactacaaaatcttatctcaaaaagtgtcaagtttatagttaaagtattttcgttagctgacactaatgattaaccaaaactgacggtgcaccgaacataaacagtgtcacatatcgacttgtgccaggcatttgttcatctaagatgtgtataaagtgtcgtttgtggagtttacacagtataatacgtgatagctttattccaaacaatctgcgtagtgctcaagaaaagtgacacatttatcacttatttatcttcctttttgcagtatttttttaacgttgttaattgtttttaaagttacatcgttaaaaagtacgagtctattaactagataataataatgatattatattctgtactgcaagagccacttttgataaatattatttcgtaaatttttcgttattttatctgtatagtgtcacaactaaaaaaaaatattttttaaactatttttagcagattttttttcaaaattcactttccactgaagccaataaaatagatttgaaaattaatattagtaaaatcaagtccatgagaaccaatgcaaggaacgacactctatttactattcacaacatgcagattaaagatgtggaaaactttacgtattttggaagtgtcaaattcgtgattgaaattctcaaatttcaaccacgtgggaagagtcctgtgttgccctgggtaatatccaggaatattagcaacatcatagtataagacaacaactgtcaacatttaaagggtttttacccgtaacatttcggtgcctcaggcatgctattttttttttgtaacactgatggtggattttttaatccgaaaacgttctgttacttaatataacccttacttagggaattttaaatatacctttttataaaggatctcgaatttttatatttaatttgccaaaattctgctaatacacgtttgaaaagcgaacaataatttctaacgtcaatctatcatgatctggatttataaaacagagaaaggtatactaaaaacaatacaaaattaacagtcgatgagtatatctttctcgttctaatgatctcatatatgtagtccacagtatatcgtcgtttttcaaaaatgactacaaaagtcttaaaaatggttttgatgacttccttttaaacctgtagctctagcgcggttgttttgagattgcaaaactataatttttaattttaatcaaaaaattacgcgttagaataaaatcaaattattttcgtcggacaaaaaacatgaaataaaaccacttctgtgtaaaaggtatatttactacaattttaaaaatcccaatgaattaaataaaataggttcattcagaacgttttcggacctatcagtccatcagaacatcggcgcttagcctttccaaatacataacactataatgtagattgatttataagtacaaccattgtttggttctgggactagttagcgcaagtatatatgaattcactgatgatggactgacaggtccgaaaacgttctgaacgaacccagtttattcaatccatcgggattttaaaatttcagtacatataccttttatatagaagtggttttactacatgtttagagttttttaactacatggtatacagccaacccagggaactacccacttttagtttattaataattaattactagattgttgatctcttgtcagacaaatttgcagcctcccctctttagtcgaacaacgtaaatatgttaataattaacaattatgcagattgcgattataaaatttcgaacacgaaagtgatagattggagggttctttatccaaatagagcaatgtccgacaaaaattgggtatcagatagccagtccgacaaattaatttcaaaactttttttactgcaaccgccacagtactagataaattgagctaacatagccctggaccctttacttgttgcactgtttagttttatgtctagtgacgtctagaacgtcagaaaatgtatagaaaccgaatgtaaacatagacttgtggcgacacgctttaattactatttttgctaattttattttttaatatcatttctcaaaacggtcatataaattcacatttaatatacaaaccagatgctaagaagttttacgaaacgaaatgtatccctaaccatatttttggtgtgttcagtttaacaaactgaattccccatgaattaattaccttatcagattccatgtcaatgcatggaaatgcattcgaagacgtttcttaaaactacagatgtagtaatttatcgcttttctggccagatgttagaagtacaaacatattagcgtttgtggtttttttcagccacagcgtcagtcgatacataaccacgggtcgatttacaacctcccgtcggcagtcacaccccagcgggcgtcgggatagatgcggtgcgtcaacaacacaccctttcgagcaaaacacgtctttttatcgacacaaataaatatattattgttcatagtttacacttatttttaattaattccatttactcaattccgcagagcggaacagactaattactagactaagcatctatactagaggtaggtaatttgcgattataccgacaaacacaagtagactgtcactgtttttgttataagtttgcgtcgaacaatttttttgtcggacaattactttttgaacagtttgaacgttaaaaaattaaaattatgacttttgtaaccgcaaaccataacctaccataattaacatatttccgttgtcctactaaagaaacgaggctgcaaatttgtcggacaagagatccacaatatttagtaattatcaatactttcaattgaaaattatgagttttgtaattaacaaaactgtaccgcgctagagtgacatcttgcgggtgtttgcccctcttttttgtccgacaaaaataatttattttatttcaacgtataatctttctgaaatttttcataaagtggtagactcgtttaaacgaaacaattaaaaccatttttaagacttttgcaatcattctgaaaaggaacgatatactgtggactaatagtttagtaaaaatggttttataaatatttttgttaattacatatttatctaagggagttaagattaggctaagagatattggtgttttctatatttttgaaaaaaaaatctaaagtgaaaatcaaatcaaaaactttaaaataactatacatacagacggatattactagaataagagtaactgtagcgctgctaccgtacaaaagagatgacatgagtgaccaccttcaaccaaagagaactaaatattttcagcagcaaccggatttggttgtttcgactgggcgactttgatcgaacctaaccttatttccttggtctaccgcagaagatggaggtcctactctattttttatttcagcggccatagtcataaaggcctgttctacattggttgcattcttagctgaggtttccaaaaatggtatacccaattggtcggcatactccttggctgtagtgaagtcgacaactttcttagttgtcaaatcgcttttattccctaccagtaatttgtttacattgtcacacgcataacggtcgatttcttcgagccactgtttaacgttattgaatgaatcttggtctgtgcaatcgtacactacaataataccatgtgctcctcggtaataacttgatgtaatcgttctaaacctttcctgacctgctgtatcccaaatttgcaatttaattgtctttccatctaaatcgattgtcctgattttaaaatctacgccaatggtactaatatagctttctgtgtaggtatcatctgcaaatctcagtagaagacaagattttcctactcctgaatctccaatcagcagaagtttgaataaataatcatactcgggattcattttctacgtttatattattatggtgaatacgtaaaaatattgtttttgtatctattgcactttagtaatcttcactagttttttaaggattttttgtatgcagttttagaaatttagaacgacgtatttgttaaatcccaatcccaacaacttgattcatttgac

SEQ ID NO: 6320 - DNA, 4429 bp, Diabrotica virgifera
  SmartBlast Evalue=0; Info=Importin-5 n=1 Tax=Camponotus floridanus RepID=E2A245_9HYME
ggcgccatggccgccgaacaggagcaattttaccaaatcttaacaacacttttatctacggataacgtgattcgaactcaggctgaggatgcttattccaatttaccagtcgaaacaaaagtaagtcatctgttgggagctatccacaacaccagtttgagccatgaagctcgccagatgtctgccgtgttgctgcgtagggtgttttccaacgatttcatggaattctatccaaaactaccagttgaaagtcaaaatcagttaaaagaacaagttctcttggctgtacaacaagttgagactgaacaattaaggcataaggtatgtgaagtagtagccgaagttgcaagaaatttgatcgatgatgatggaaacaatcagtggccagaatttttacagttccttttccattgtgccaatgaccaaaatccggttctaaaggaggctgctcttcagatgtttacgagtgttcctggtgtgtttggtagccagcaaaataactacttggacttaatcaagcaaatgatattgcaaagcttgcagcctaccgaagaatatgaagtacggtttcaagctgttagggccgtaggtgccttcatgctaatcaatgacaaagaaacgcagattctaaaacacttcgccgatctgttaactccgatgttgcatgttattgcggagagtattcagcaacaagaagacgacactttgttaaaagttttaatcgatttagctgaaaatgttcccaaatttttaaggccacaactgctgcctatttacgagatgtgtatgaagatcttcagtgactctggagcactagacagttggagacagcttgcattggaggttatggttactctagcagaaatggcaccagcaatggttcgtaagaatgcagctaaatacatggaacaacttattcctctaattttacaatttatggccgaccttgaagaagaatctggatgggccgagtcagatgaacttttggacgaagacaatgattgtaataacgtagttgcagaggctgcgttagatcgtctagcttgtggattagggggtaaaatcattcttcctctcgttacacaaagtgttcccagtatgttggcaagtccagattggaagcaaagacatgctgcccttatggctctaagtgctgttggagaaggttgtcacaaacaaatggagggtatgcttcaacaaatcatgaatggagttcctggtgtaatggatggtgttatacgatatctacaagatccacatccaagagtgagatatgcggcttgtaatgccgtaggtcaaatggcgactgattttgcaccagttttcgaaaagaaattccacaatcaagtagttccaggtttgcttatgttactggatgataatgccaatcctcgagtccaggctcatgctggtgctgctttggtaaatttcgctgaagattgccccaaacatatactgaacggatacttagaaccactgatgagtaaactagaaggaattctaactgcaaagttcaaagagttggtagaaaagggcacgaaattggtattggaacaggttgtgacaacaatagctagtgttgcagatacagctgaaactgaatttatagcttattatgaccgcttaatgccatgcttaaaatatattatccaaaatgctaacaaagatgagcttaaattactcagaggtaaagctattgaatgtgttacattaattggtatggcagttggatccgaaaaattcagcatagatgcaaccgaagttatggatatgttattgaagacacatggagatggagctgaattacccgacgacgatccccaaactagttatcttatttccgcttggtctagaatatgtaaagttcttggtaagaatttcgaacaatatttgcctttagtaatgggaccagtaataagaacggcagctatgaaacctgatgttgcccttttagacaacgacgatatgcaaggagtagaaggtgatgacgattggcaatttgtatccttaggagaacagaagaacttcggaattcgcacggcaggtcttgaagacaaagctgctgcctgtagtatgcttgtttgctatgcacgtgagctaaaagaaagtttctcaaattatgccgaagaagtcgtcaaacttatggtaccaatgctcaaattctacttccacgacggcgttagaaatgctgccgcagaatctctaccatggctattggaatgtgcaacaaataaaggaccagccttcttaggcggcatgtggagttttatatgccccgaactgctcaaagccatcgacaccgaacccgaaagtgaagttttaatggttatgttagactcattgtcgcggtgtattcaaaaattaggaccgagttatattgatcaagaatccatgactgaaattttgaggataattgacaaattaatgaaagaacattttgaacgagccaatgatagacataagaaacatttagacgaagattatgatgaggaagtacaagagcaattggaagatgaagaatcagacgatatatatgtactcagcaaaatagctgatgttattcactccctatttctagtatacagagaaagcttcctgccgttgtttgatcagatttgtagtcactttgttaatctcttaaccccaaatcgcagctgggcagataggcaatggggaatatgcgtatttgacgacgtcatagaattcacgggtccagcatgctcaaaataccaaggctatttccttcaacctctggccttatatatgaaggacaaaaccaccgaagtcagacaagcagtggcttacggatggggagtgctagcgcagtttgggggtgaacagtttgcaggagaattagctaaagctgtacccatgttagtcgaagttataaacgaacctgaatcgaaagaccctagaaatattaacgctacggagaatgctatatcggctgttactaaaattatgaagtataataactcacagattaaccttgatgaaattattccactgtggttctcgtggttgccagttatagaagatgtagacgaatcgcctcatatttatgggtatatgtgcgatttaatagagcagaataatcaacacattttaggcgtaaataattccaatataccaaggataatcagcataattgcagaggcattcttcagggaggctatggaaccatccaaacctgaaggctttagaatggtaaacatcgttaggcaagttcaatcaaacgaatcgtttttccaaagcgtggtccaatctctggctccagaactgcagcaagctttacacgtggccctacatacaacagcagcagcagcgacatcttagctgggaatataaatttaagttattgtttttaacattcatttgattaattcagagttgaaataaaacattatgaactgttatcggacagttctaaagaaatttgcatccataaacgacatttagacttttgtcgcttattacttttggtaatcgaaaaatgttggcgattcatggcattgtttgtggttaacaccttcgctgcgtttagagatatttataaacttgcgtgaactgcgttacgacccacatatgtttaacaaagccatttaaaggctgcttgattcgaaaattaaagatattgttacgacagttctgtagattgatcctacataaaagaaaaagttccttaaaatgggttggtaggtttatttgaagataccaatttatgcgctattcacgctaagagagtcgccattatgcctaagaacatccagctggctagaagaatcagaggagaaagggcataaacaaatgtaatataagaaattaatcttgaaagacaagaaaggtacatcttttgcaagatgctggctagaagaatcggaggagaaagggcataaacaaataaaataaggtacaccttttgcaagatcagataattttcgacatattgtctacgcagccaacccttagtgtaatacgaggtctatatgtctcataacgcagcgaaggtgttgatttcatataaacatgacaatgttttttattaaactgtaccttttgttttcttttgtgattttccttaagtgttttaacctaagtctaattatctaaaagggatgcacattgttttagaatatccatatataaattatttttatatttgtgagttattgatagataaatctcgtcatgtgtagtggttacatagaaattttttacgaaacttttttataattacctaatcacaggtatttgttttatggattcattattattgtacatagatattcacaactctgaagtatatgtgatacgtttttgttttcattaaaattcataaaatatttttgtctacaagatcgacgttagtgtttaaaagttgaatatgaatcactaatgaactataaaatatctcaataaaatgcatttc

SEQ ID NO: 6321 - DNA, 4367 bp, Diabrotica virgifera
  SmartBlast Evalue=9E-81; Info=RING and PHD-finger domain- containing protein KIAA1542 n=1 Tax=Harpegnathos saltator RepID= E2BW47_9HYME
tccgagttggatatctacagcgacattgaaactgttactacatcaaaagccgaagaccgttcttcatatagaccactttctccaccacctatgccaaacatttctgggatgatggaggatgaaaataacgatagtgaaaatgatatggtcatcgatgatgaaaaattacaagaacaagaaaatcaaaatgaatacggaaaagaagaaaccactgtaacttcaacagtaggtagtaatcaggagatggaacctgaaatggacactttttctccaacggttccaactgcatcaaatgaaatacaatcaggtgctgtacaatcatcatcgttagagaatataagtaagtcttatcaatattacaatgatgatgattccgatgatggatgtccaaatgcaaatatttattctagagaatccacgaaacctccacaagaagaagatcccgactctgatgatggttgtccaaactttagtatctattctaaagagagtaagacaatggcactgtatagtggaataactctagggccagaaatatctacccctctagattatcaagttggagaaataagttcttctcctcaaaagcaagaaagcgaactagggtcaggagcaactagcgaacctttaaattcagatcaactatatgaccctgaacaaatatttgacgaacctgaggagaacggagaccagttgtctcagaaaatggacgagatgtcagtacaacaaactaatgagaatcccgaagaaagtgactcacacttacctcaagaactatcacaaatttacgaccctgaaaaagacactgcttctccgattcatgattcttctcaagctggagattcttcagttctagatcatacttacgatcctgagaactgcatccgttcagaagagacgttaaatacagatgccgaaaaaacgcttgatctcgatcaaggttatgatcctgagaatatttatgaagaaaacagtaattccaatgaaaaagatgttgatattgaaaaagcaatttatcagtttaattcacaaaatgctgatactagtggaattagtacaggggatcggtacgacccagcccttcctttcgatgatgatgcagatgcagattcaaagcgagatagtgataatgacacacaaaatgaaggaaatacaactgttatcccaaataatgagatagtaacaaatcagcctcaaagcgataagaaatctaaaagtgctaagtccaaaaggaaaagcaagtcaaaaggtaatacgctttatagtgattctgaagatgacgaaaacattgttaagaaaggagctaactcgtttggcgtgacagatataaatgaaatgactgaagatattagtgaagaagaaagaagttacacaccttgtttggatgaaaaatctcaaaaacaaggtttggaaggattagagacagaattaatttcagatgaagatagaaatgattttgatgaagctcaggaattaaaaactgtgtccgatggtgatgctttggaaattaacgctaaagaatcggagttggatttagctcgaccagaagattatgaagaaggggaaatagtagataaaaataaagataaagatgttcccaatgaagaaccggaagtagagagcgaggcagaaaaatccccgaaagaagctactccagagttaaagacaactgaaagaaaaaagaaagatgcaagcaaatcgcctgcagttgacaaggggggaaataaagaaaacgaggaaagcggtaaagatgcgtcatttaaaagattaagtaaaagcagtaaggggcgtaattatagagataaagaaaaacggccttctgattcgaggaacagatcgcgaacgcccgatcgtgaatacaacaaaaaggaaaagaggagagaaaagcgcaaggaacttgaaagatacaatgttagagctataatagcggataaacctcgtcctttgatagcgaaagatcaatttggaagggatattcgaaacactcctagcaggtcaagaagtagatcctatactccgcccccgcgaagtgcttcacgaccagtcagatcaccttcaaagacgatacgcagatcaccttcgagatcacgtcgatcattatctaagcgcaagtcgccgtcaaaagaaagatctcgaaaaacaagaaaagccagaagttacagatctgggagtcgctctagatctccaggtaaaaaaagggacgcgcaaaaacccaagaaaagaaaacgttcaactagtaggtttagaaagaggaaacctgatggtaggtccaaaaagagaaggcctggaagtagaaataggcgacggtctagaactcctgtaaggagagctagggagcgtgtagattggacacccatgtcacaaccacatgcttctccttcttggacaccaccaagattgatggaaaatccgcagatactaagaaatgatttaacagttacagtaaacaatgccgccaaaaagaaaaaagataagaggaagaaagataggcgtaacagaggagacactttagaaagcagacagagaaagagacgtcacgaaagagaacgtacgccgcctccttcgaaagaagtcttcgcatcaggtgacaacattttagtcagcgtgagttttaataatgaaaatgaaagaagggatgtaacgacaagagataaaagaaataatgttgaaggagccaagaaacgtaaaaagaagaggaccagaaaagatttgacaggtgtgaagcccatagctattatcgacttagcaaaatcgccgtttagggaattaacaccttctccaaaacaagtaataattctcactgacagtgataacgatgaaaacgtaatgatgagaaacggtcaaggtggtatttgcgattcatcgcaacaagtagctagtcctgaaagaggtattggtcctaaaacaccaccagaaccgcaggttaaattttctctggctgctaagccacctcaaatacgtgcaataaacaatcctctacatgatcctgaggatatagaaaccaatgttcaaaaggaaatgggctccagaataagccctggggttcacaaaggcccaaatactcctccagaaccaccaaactcaccgcctagttcgccagatgcttatgatccattcgaacctaccaaatcgagatctccaacacctgaaccacaactactgggcattaaagattcccacgaaagtatcgatagcagagcagctattgatctgttggagaaatctatgaacccgatgccagagactattaagtctcttactccgcctctggcagatatacaacccgcggattcgcagagtagcgtccaaataattactcctgattctaatcttggaaaatctcctgaacgaccacaaatccaaacggttcaacagccgtctaaacccgttgcccaaactataccattctcttctgtaccaactccaataattttggctactccttctgttgctactatccctactagaattaatattcttaatactacagtcatttctccaccagtagcatcaccaatacctcaacgaatagttttacccaacataattaagtcaggcatcgtgaagatatctcccaccaagcccactgtgaaaacaaatcccatcaaaccgatacaaaagacgaccaaatcaactaggaagagaaccacgaatggcagcctcgatgatatagtattagatttcgattcgccgtattctccaggaagtagcgattatgaggatctgttcgagcctccgagcgagatcgtaactaagccaatgatcaaaggcaagacaaagtcacatgcctccgcgtttgacgcgttgttcggttcgcctagttacagcaagaagaagaagtacaccaagaaagctaacccaaaaactaaaactgttggagtcaaattggacgaagattgtttgaagattcttgacgacttaccaaattcggccgtggagatgcaagttaaggataagttccttaagaaattgaatcgacaagaaagagtggtggatgaagttaaacttgtgttgaaacctcactacaacaagaagaggataaataaagaagaatacaaggatataatgagaagaagtgtacctaagatatgccacaataggtccggagaaataaatccaacaaaaatcaagaacctgatagaagcttatgttagaaaagttagacatagtaagaaggtcacttcatccagttcagtgaaccctcagaagatttagctgcttctttaatttcctgtacatattattaaattatgtattgaaaatttttatttatgtaatttgtagaatactaatttatattatttcacttttgtgattaattggacgttttacagtgttaagatgtaaggtttttagtaaataaatct

SEQ ID NO: 6322 - DNA, 4356 bp, Diabrotica virgifera
  SmartBlast Evalue=0; Info="Flightless-I, putative n=1 Tax= Pediculus humanus corporis RepID=E0V9L7_PEDHC"
atgacaatattcgttcagggcaaaattttgccctcagcagaaaatacttacctactcatcctgaaatctcaaaatgattttattttgagtttgtctcatccggtgctcatcaaaatttctttaattctttctaggtctatatttctattataattttacttaaagggtataggtaataatagtcttttttccttttacatttttgttactttcaacaaaatatttgtttggggcaaaattatgccctcatcagaacatacgtatccttaaataatctcaaagtttctatttagagtttgtcatgtatatgacatcaaagcaagttaatgaacgatgaaactaggttgactatttggacaaaatatttgtttattcaatctgatttttgttttgttttctaggaaaaccaaacgccaaactttgttcttacctcctaacgataggattttggattatatcccacatagtgcacatttttcttccttatatataaatataatacatgtaaatataaataataatgactcagaagtaaagttactcgaggggttttttatggagaccccaaccatggaagcacttggtgaatcttctcgattctttgttcttgagcgtcaaaaacagttttctcggtctttcaggttgctttgcgcgcgtgtgctgaatgtatacctgtgccgattttaaggctaattttatttccacttcgctacacttggctcctaaccataaaaatacttgttcgccgttgtcgaggatcattatatcatcatctgctaaatcatcctgacaaaagtccgaacacttctccgaaacaatgaaatatcctttttcgttggaacatctaaacaatctcgtgtattccataaattcggcatcttgctcgtacggcttcttcccgccgagacccaaccagaagaagttatcgggttcttcgccttcggttaagacttgcagcgtcacccacggactgttgaacatctcttctgcgatttcttgaacgatcctggcctcgtctgggtcgcttttggatcctatccagacgtaaacgatgccggagtcgtcgtcttgctcgaatggaacattaagaatgtaacagaaagcagagttgagcaaagtagcatctggttttatttgtactaatcttgtgtataaggcacttccatttgatctcaaatgataaaactcaacgtctttcttatcgatcttcttgttcctctttccttgctttataataaacttccttttgaaatgagccatgaacttcatgttttcttgttgttgatacgtcctgagtacttctaatttgttttggaatagtgctttgaacttcttttggagagtgaacgtgaaggtgagccagcccatgttggaagcatctctgccttgccagaagtaacaaacccattggaaatcgtccatttcgtcttctggcatattgtcgtcagtatcgtcccagtaacggcaaaggaatacgtaacaatcttgagaatagaatgttcctagttcttcttctggcaatcgtataaacttctttccttctaaaacaaaagcctccatggcttccaagtcctcgttccattcttccataagttgttgagcttctgcagacggcattgggggttgtctaggcgtgaacagagccgtgaggtcggccttggtctcttgtttctgtgcccatttgatcaggtcgacaccggtctttttgactgactcggctgttcgtgtgaaatctacagctatcacctcgtcccaaccgatgaatttagacttaaatatctgactttcagttccttcccttactctcgttacccgagcatagtcaggtctgtcgatcatattaaataattcctcagataatttcacagctgctgcatttacaagcctagtagactttttaccaatccacacaaacacatccaagtaacagtctaatatgtacacatttttgctgatcaacgctgtattgactagttttccctgttgaagttctacttgaggtaattctaaataacccattcctaattgcacttggtaaagtcgtggggaaactgatacgaaatcctcgtccacgtgttcctgaggtggttcttcgggacgcgcaccatcttcaatacccaagttaatccagaactccttactttcactaccagccgcttcggttaaaatctcggctttatttttcctctcgttcttgttgatcttctcgcacatcagtctcgattttgacttcagtgtatttttagcctttttgccgttccacacgaagatattcatgccggtatccaaaatgaaaacgtagcgaggatccaaagaatcgacactaactgaaactggctccaaatggatagaagggcctgctgggtggactctgtaaagtcttgtttcgaagttcatatcctcaacagtataaaatccgctacaggttctaccgccttcgatatgtgtgatcggagaatcgaatagtcccagaaattcatcggattcatcaccttgttcttctctaatcgttctgcattgtgctcctaggtagtttcttaagttgacggcatgaatggcggaacaagcctttttatcaagcgaagccttttctcctatccagaaataaatctgccacgaaaccgactggttttcatcgaaaaatgtcttcaatacgatataacaatctccttcgtaaaattttccgtatgctacttcatctattctattcggaaggaaattttctatttcccatatagtcaaaccaggaaactgaccagcatcctcttcaaagaattctgaataatccagtggaggtttttctaaagattcatcccagcgttttggctttacagattcagttttaggatcttcaagcaaatttcgttccttttctttcgctatgtctttcatacccttcaaaatttttgcttgatcttggtcagcttcttcgtggtcccttcgtccttttctcagtcttaacttccttgcaatcggatctttactgggattttgaacaggtgttggagccggcacatgtgcacctgcaagtctcaattggttttgcaaagaaaaatcgatgttatagaattcaattccggcacctctggtggcttccacaggctttggaggcatgattagatctggattgtttctcaggtccaagtttaccaagtcagtgagaagatgaacagcatctggtaaagttatcaagcgatttgaactaagattgagtttctttaaagaaccacatctgcatagaccttcgggaatcatttcaattctgttgttggccgctgaaaaaagttccaagttactaagttttccaataccagatggtattccttcaaaatctaattgattgtcatttacatataatcttcttagtgctactagtttacagagagatgcaggaagagatgttatttgattgtaagatagattaagggtttccagtttttgccaaacttccaaagctgaagataactcggtaatttcattttcactcaaattcaaccttttcagatttggtaaagcatagagagaatcgggaacccttggcaaattattctctgccaaatcaatatcggtaaggtttacaagactctctaaatttgttggaaagttgttcaaattcctttgtgtgtttctcatatgtaaagtttccaaatgcagcaacgaaggtagttgtcttagttggaagtggcccaaaggattgttatttaagatcaaggtttgtagatttgcaagtcttctggtttgtggtggtaatgtttctagattattctcacttagatccaaaaataataggtctgttaggtttataaagagtgagtttgggattgattcgatgtgattatggcttaaatttaacactaataaagatttagctttatctagaccttcaggaacttctttcaaattattgtggctgaagtctaaagtgctgagctcatctaaatggaaaagttcgactggtatacccgaagattttattttgttgtgccgtagatttaatgtacgcaagcaatttagttcagtcaattcaccatataatttttcaagattgtttctggttaaggacaggtgttctagtttaagaagattgcccatttctttggggatctgctctaaatttgtgcgatctaatttcaaccattgcacgccagtcatagaattcactgcgtaaggaaatttatccccactaaaatcatttctggtaaaatctacccctcttacgaagggtaaaactcctgtatttgccattatggactttacattaaataactatttcactaatttcacgtcgtttcaatagtaatattattattccatttttcttagataaaaacaccttaatcttaatctaatcctaac

SEQ ID NO: 6323 - DNA, 4354 bp, Diabrotica virgifera
  SmartBlast Evalue=1E-110; Info=Probable RNA-directed DNA polymerase from transposon X-element n=1 Tax=Drosophila melanogaster RepID=RTXE_DROME
aatgattatagcagtgtgtatctcgaaattcgaacactgttcgcataaatgtggatatacaattgtatagaaatttgtaagtgatattatttcgtgcaatatattgtcagtttgcgtgacaccgcgatgaaaaattaataaactaaatagtacttaaacaaaataatataagaatattttcattgttccaagttgttaagtgcgtgtttcttcatcaccactttatattctgcacatttgaacctttgataacaatgggtcctatttggagtgcctttggagctactaacacaggaaggacagatgatgctgactcaacgacgggtttaacctccagagatagatatttactaaaatcatcatgggctggtgtaatgaaaaacccgacagacaatggagtagctttacttcttttaatgttcaaaaaattccctgagacgaaaaccgtctttccttttaaagacataccaaacgaagaactagcaaacaatgttaggtttagggctcactgtaacagcgttgtttacgccattacttccatggtagatgctatagatgacccatccttacttgtaggcatactcgaaaaagttggccgggaccataagaggcgaagtattccccaaaaatattttgaaggacttcaagagacaattatcgaattgttttccacgttcatgaaacccaatgaaattaactcatggaacaaagctttgggtgttatttttaaagtagttgctgataatgttaaataattttagatgtgtcattggtgtatcattatcagacgttttacaattaaaaaatcgcaattattgcttatctatatgttcacaaaaatatagaatcgctatatttagattgttattttttatgcatctttagaaataaggttttatttttctatctttttattataaagggtcttatctatttaaacttatttctaacattatttccaaatttttttttgctctcttttgatttctgtaaacgccatttcaaaaatacttttttatatagcgttttcacgtattatcttaaaagaaaaaattgaaacgaaaaaatcatatacaattttttgcaattattcttagagaaaaaacacaactgtcattaaaaatatatttaaaaaatcattgatcacatttcgcgaaaatataaactgatttaaatataagtaacatggtttataattttactaaataatatcgggtcttaactcttctacgggcttacattagaagacatcagcattctgaagttttatattattgatttaaagattttgatccagctatatgcgttttcccgttttgtcgcgactaactccatagaatcttttgtggtgtccaattttgctaacttgattaaaataattcttaccagattcaggatatgtgggtaggcgttttcgactaaaaaatcagtcagaccaacacgcggtgcctgtggtacaacatatttaacaaaggctcaccgctcacagttagtattttttacctactggcctgtgatttgtccgctcttttaactcagaatcttaacttaaggaatcaaatttgagaagctcttgtcccgccaatgtgttttaatcttgttatataccgatatgaagtgagaaactacctgtagtttacctgtcacttaatgttgtggtggtgccatctatatgacagatcacatacttaagattagattagataagattaagtattctgatactgtctttaatttgttttttttttaatatccccaacctgttctgtcatgtattttttacttagtaaacaaaaaaaaaataatcatagctcttacgtataccttacatgtcaaagttatgatgtttattttggctcaggaatattttttttattattaaacacaagctgtgtttagactactgaaatctggtcatcagttgaccaattatcagttcttctttaacttatattactacatgatacataatctaagatcttaaccctatggtgtcctcttatttttttttaacaagtatgaaattttaaaactaaaactaacacacaatacaacactatgctctgcttttacactaacactttacactaactcaaatggttttcttcgtttgagtcttctttctagcctagtattatcgaggagctggatggcctcgatgtttacatgactatggagccgttgttcgtgactacctgccatcttcttgataactttgtctacatcttccatctcaagatccttgtggaggtcgacatttcggatataccaaggagcatcaacgatgttccgtaatactttattctggaatctctggataatctgaatattacttgaattggcacagccccagagttggcaaccatacatccatactggtctaagtatttgtttgtataaaagtattttgttatatgtggacaatgcagagtttcttcccatcagccaatacatttttttgtaacggatacctaattcttcccttttctttttaatgtggactttccagcgaagccttgcatcaagtgtgatacctaaatattttgcagaagatgcatatggtatttgggcatcatttattctaattggaatgttttcgatttttttatttgtaaaattgacatgaataaatttagattcatttaatttgattttccattttttagtccagttgtgtattttattgattgccgactgtaatttttctgctgcttcttcgctggtatcacctactgctaagatagcggtgtcatctgcaaatgtggctatagtatcattttccatttcaggtatatcgtatgtgtataacagttagagaacaggacctaatacgcttccttgagggactcctgctctgatttcttttagatcagtgtacacgtcttcttgcttaattctgaaatatctgtcagatatatatgattgtaaaatttctgaatattgtttaggcataagaattttgagtttgtagactaaaccttcatgccaaactttgtcgaaggccttagctacgtctaaaaagattgtagaacagactttcttttcttctattgatttatcaattatgttagtcattctgtgtacctgatcaatcgtagaatgtttatttctgaagccaaattggtggtttggaatcatttttttctcttctattattggttttattctttttagcagaagtttctcaaaaaacttcgacatcactggtaaaagtgataatggtctatatgaagacacttcatttggtgattttcctggttttggtatcattataacctcagctattttccataaatttggtacatatctcaatctaaatgcagcattgatgatgttggtcaatttgactatggctttacgaggcaagttttttagtaattctccagtaattagatcatatcctggtgccttcttggatttatattgtcttttatttcatcagctacttccttcggggatgttggtctgattctctcctctgtctgattaggctctatcgatatttgatcattattttggtcatcatgcggtttaaatgtattttctaaatatgtggcaaatctctctgccttttgctcattacttctagcccagctaccatcttctagtttaatgggtggagaatgggttactggtctttttagcctttttgtagctttccatagagagtactctgtgctactattatccgtcaactctctcaggtaataactgattgactcattttttatattttgaatctctcttttaagtttttgactagcattgtttaaatttgttttatcttggggtgctctggtttgttgccacttccttctaagttttcttttctctttaactaactttttaatttctttcggatagttgtttcctttgacgtttgatctaatagtaggagtactttcccatgctgatttttgtatattttgtacaagaaactcaacttcctcatctagttgttcaagtttttttttaatggtgctgctagttaaattatatcttcaaggattgatctaaaactttcccagtctgttagtttatttgttagtattgggttgcaatcctttctgataatcgtgtcactcacagtgagtattatgggtgaatgatctgaattcatatataatatgtatatttaatttagaatagtgatccatttgctctaaaatactcatttcgtctttgaaaatacctttttctaaaccagagtaggtacacttaaaaagtttatctagaaatgaccctaaaatgcacaattttttattttttcacatttatgtaataggtaataagttttatatgtttgcattaataatgtaatgttaagttttgaattgaaaataaataagatttt

SEQ ID NO: 6324 - DNA, 4320 bp, Diabrotica virgifera
  SmartBlast Evalue=1E-142; Info=Probable actin-related protein 2/3 complex subunit 2 n=2 Tax=Culicidae RepID=ARPC2_ANOGA
cctcccatgaatgtatgttctagttaaaaggttttaatacaatttaaattagttatttattaataaaaatgatactactagaaataaataacagggtagtcgaagaaacgttaacagttaaaattaaaaatgcacaagccggattaaaaaacgaaagtattgatgttactgtagcagatttcgatggagtactgtaccatatatcgaatatgaatggagacaaatccaaaataagaactagtatatccctaaagttttataaacaacttcaagaacacggggctgatgaactgttgaaaagagagtatggttcgtatctaattgctgctgagactggttacaatgtttcagtcttgttagatttagagaacataccagacaattggcaagagtttgtaaagaagttgggtctactgaagaggaattgttttgcttcagtttttgaaaaatattttgactttcaagaaaagggagacgaaggtcaaaaaagagctgtgattccttacagagatgatgaaacactatacgtagaagcgaaagcagatagagtaacggtagtcttttcaacgcggtttcgagacgaagacgatgtcgtcatcggaaaagtattcatgcaggaattaaaagaaggcttgagggcgtcccatactgctccccccgtcctttttagtcatagagaaccgcccctagaactgcaaaatacggatgccaaagtggataataatgttggttatgtaacctttgtcctgtttccaagacacacagcaagaaatactcgtgataacactattaacttaattcatatgttcagacattatttgcactaccacatcaagtgttccaaggcatacattcacagtaggatgcgtgcaaagacttcagatttcctcaaagtattaaatagggctagacctgagaataagagtacagataaaaagactattagtggaagaactttcataagaagagattgatgtgtaaatgattaagtgaaacgatccattcaaacaaggactaaaatcaactgccgaggtttcaacctaaaccctagccatttaaaatcgaactgtttgattctaatccaatatacatatatgtatgttttttttgtaaacacctcattaacatctatatctaatacctcgtatatttattacatgtttcttattacttcctacactttcagtattgtatagataaagtatattttaatattagcttggaatgaaacagttatgtttttaaatttaataaattaaaatatagtcacatctcgttaaataaatatgatatattagagctgatgtttcagctattaaaagtcgtgcgtcacaaacagttatgttacaattctattttgcaaatattaaatagattgcctgagtgagtccatagtaaaatgaaataaactaatagacttactcacaatcagttttatttaccccaaacgaccagttccgctttctacattacgcacctccgctcaaatagtgaaccaacagttatagtccagtcggcaagtacttttagcgacgaaaaattccgaagttaatgaaattttagggtgttgtttgtacatgtttagtgatgtcaaatccaagttttcgacctcgaggaggttgtggaaaatttttggcggccgaaaaacctcgaaattttcggacttgtttcagtttgttgctcataactctaaaacggtcaatcctacgtgaaaagctattatatagtaatttaaagaaggcacaatttcccgtcgatcaaaaaaaagtccggaatcggtccaatagataaacttttacgggcgattaaaaaatcacaattttttctaattttgttaaaatctggcatatcctcattttcaaagtgctgtagctttacaacatcactcccaattgcctacccccctccctaaacgttgtagagcatcaacaggagagttcaaaaacaacaaaaattttaaaattggcctaatttttcaaattgtttacttgtttacccaaaataaataaatatattactgttcgttgtttttacacttattttaatttaagttaattgtttccgttaaccaccaacggaacaagcctgttaaccagataataataatgatgttatattatgtactgcaagaggcacttttgataaataatcgtaaatttttcgttattttatctgtatagtgtcacaaataataaaaaaaaaatatatttttagcagaataaatacactattttgttgagcttcaaaaacctttgtaactggctaaaatagttattaaaatatatattatactaattttaacagtttttgcttttgacactgtttgagcggaggtgcgattataatagtctaccgagacctgatgatgctttgtatattgtagagacagaaaccgctcgtctggtaaacaaaagtgattgtgagtgagtatatttgtttatttacatagtataatatgttaagaccttgttctttttatatctggcgatattttatttattacagaacaccaagaaggagggtaacaattatcgacattgttgaagaaatatatgaaaaataagctcaacatttaatacgatcattaaaatctaatgtttcttcttctttttgtgcagacataactattttttaagtgcctccagaaaattgttgttacatcggctttttattggggaacggtctatcgcagtccttactactctatttgttgtcatagagatattttcaaaaatctatcgaatgataccaaacacgacccttcacggagaggggtgagggcaaatttaaaattttataataggaaccccgcgatatttctcgaaatgaacatcaaatcgaaaaactgaaaaatacacgtattcaatatttttggaaaatctataagtgacttttatttgagacattttttcgaattatggatagatggcgctataatcggaaaaaaacggttgttgaaaatgtaaaattaaatttattattctaaattgggaaataagccacagtttgacttgaaaaattattttatttgaacgtttcgacttccacttcggacgtcgttgtcaggatacaaaatattaatgaattaaacaaaaatgttgttgcttagtaaaaaaaaattatttatttactgtcaccattgcatgcggttgtctttttaaagacagatcacatgctatgatttttttgtgacggatattcttgagttaaagttgatttaatgtaatcgaatgaactatctttcaataaagtcgtcccaggaacgcaactcataaatattggcatatcattttaaagtcttctactttaaaatgtataatatatgtctgaattgccgatatgaatgagtctgattaaattattagaagaattttttacaacatttttgtttaatttattgatattttgtattgtgacaacgacgttcgaagtgggagtcgaaacgttggaatgaaatcatttttcaagttgaattgtggcttattttccaattagaataataaattacataaatgccacaaagaaatagcttcagaacaatattggaaaattaatttaaaaaatcgaaagtctccactaaaatggaaaacttaactttattgttttaggacctaatcttcactacccaataggtccccataacgctttagtaccttcaaatttagtatcctttcctcccctactattatgtatagtaggaaaaatgaaatattacccatgagcgatcatgttaaatacatattattttttatgttgcagaaagtagtgaaccagtaattattatatgtaggtacttgcgctggccaattttttttgtgacacggtgacagaaaaatacagcgtgttttatatattagtttatgagtattcttttggaggtgactaaacctccaaaccacgttatgtttattacatagactactacacttatcaggttttcgatgactacatataagcaaattattgataaaaagttctttttaatcaaataatgacaaatagttttgtaacagaattgattgtgaaacagaatatattgtatatagaaaaaaaattgaattgtgcttccccaaaagttgtggatgagcactcgtttaacaatatgtacattttgattactactcacgaaattttgaactacagagtgcaccctatagtttataataattatctttaagcattttgaataacaaaaatagaaataagagttctaatcctagtttacgccatttttctaaaagatttatttactttcctggtgcaccctgtatagtatttttgcttaattttaatatttctctggctgttttataagagaat

SEQ ID NO: 6325 - DNA, 4307 bp, Diabrotica virgifera
  SmartBlast Evalue=0; Info="Phospholipid-transporting ATPase, putative n=1 Tax=Pediculus humanus corporis RepID=E0W426_PEDHC"
ggttaattacacgagttggaaaataacttgaataagaaagaaacaatagttgtcgaagtgaaattgagtgaacgggtgtttaattctcgtgttcattgaaagtttctactacgcgtggcaatttatagttataatttgtttagtttgtgacaatattttttatggaaaaacaacaacagctgatggaagttttttacaagatatgataaatagagatttaagatgtcgactgccaacaccaccggggaaaaatcgactagcatccctcaatcagacacgctagtgcctcctttgaacgcacaatgttcaacatacacctttccggagccgaagcggtctcccgaaacgagaggccaccttcgtagcgtcagccacggaggtggcacgtctgtgggtagcaattcggcagttgtggtaggcagatccgcccttaaaggagctcgtggtcaccaaagggcgctgtctcagggacaaatgttcgattcgagtggcccgcctcacaaaccggggcatagtagggttggatccaagacagatttcatcttgcctcccggtcataaggaaacgatgcgacaccagcacctagaggttcgattaagtccggtcattctcgtcaggcttccagatcggattcaatttacaccttgcgaagatctgcaccaccgcctctatggaggcggatcttgtgtaccatcatccgccgctcgccgaagaacgatgagcccgaagagcggtaccgcgtagtcgttcccaatcacctcgtgcccccgaaaacgccgcgaaaagaacaccccaacgggcgcagacccgacaatcgcattaggactacaaaatatacgctcctctcgtttctaccgcgtaatctactagaacaatttcatagggtcgcgaatttgtattttatttttatagttttgctcaattggttcccggccataaacgcgttcgggaaggagatcgctatgatcccggtgatgtttgtgctcggagtgacagctgtcaaagacctgttcgaagatcgtagaagacatagtagcgataaacggatcaataattcaacttgtaggatatataacagtgaagcctgccgttataagaaagtattgtggaaggacgtgagagtaggcgatttaatacatttatcgaataatgaagtcgtaccggccgatatcttggtgcttcgttccagtgatgctagtggcctatgctatatcgatacagggcatttggatggagaaacgaacctcaaacagcggcaagttgttcgaggtttcgttgaaaagcaaagtgtctttgaacccagcaaatttcggagctcaatcgaagtggaggcgcctactacaaaaatttatagattccatggtgcaatagtacacccaaatggaagtagagtaccagttggaactgataatttattattaagagagtgccttttaaaaaatactgactttatcgaaggaattgtagtgtatgcaggtcatgaaactaaagcgatgttaaacaatggtggacctagatataagcgatcttctgtagagaaacaaatgaaccaagacgttatttggtgtgtttttattttaatatttatgtgtgtgttgggagccatcggttgcagacttagtggcagcacggaaagtgaatcctttttagccttttggacattcattattattttacagattatgattcctttatccctatacgtaactctagaaatgtgtaagataattcaagtttaccatattcaccataatgctgatctctacgatccattaacaaacaagaggactgaatgccgtgccttaaatataacagaagaactcggtcaaatccagtatatttttctgacaaaactggtactctgacggagaaccgcatgatattccgaagatgtgccatagccggtatcgattatgaacatgatctactcgaacatgagacagccggaaaccctgagaaatcgatccttaattgctcggttgcagttaacaatcgattaatgtcggacttgcagttggaaggaatcttctcagatgttactaaatcatatcattctgccaggattcaagaatttttattattattggcactctgcaacactgtagtttgttcaaaacaccctcatcatgatctcatgaacgccagtggttttatcgaagaaactccgtatgacaaattggatcagaactctagcgagagcagctccactaatacggctacgcaatcactgtcatcaaacgacaagtactcacgtctagaagaatcacgttcggtaactccctctccccctttaaatacgtatttatttgatactaagcgacttcagcataaccctacgctttcgcctatagattctatagaatcctcgccttcttgcgaagtacctacgatcgaagccacagcgctgccgaaggttccacgaccgaaattgcttaatatgcctatcggttttctgaagaaatgcaccaatctgaccgacgagcaaaaggtaaagctaaacgcgtcgactccctctccctttgatcacaaaccaatcttcgaagcggaaagccccgacgagttggcgttagtagacacggcgtacaattatggaacgcggctgttgaaaagaaccccgacgtcagtttgtatagaagcggcggaaaacggaaagatgcacttcgagattttaaacgtgcttcccttcgattccgttagaaagaggatgagtataattgtgaggcatccgcataccaaacagatcattttatacactaaaggcgccgattcttccatattaccccaattaactcccttcgaggatgattcggaacagacaatgataatcaacaagactcaacaacatctaaataattattccagagaaggtcttcgcattctagtaatggcgaagcggattctggcccaacatcaatacgatgagtggaaccgaaagcatcaagacttagaacttggtgtagataatttagaaagaaggataatagatagctttaatagtattgaaacaaatttaacattactaggagctacaggaattgaagacagactgcaagaaggtgtccctgaaactctaacgaacctcatgtcagccggtatcgtcatttgggtccttacaggcgataaacccgaaaccgcaatcaacattgcctactcagcaaaactattttccccgcaaatggaactgcttaaaatcatggctcgatccaaggaagccgttgagaatactatccatgtgtatctggccgatatagagcgtcaagaaagagaagagggagaaccagggagatctgatactaaagtaagaccatcgaccagcgccagcacgtctcatccatccgttaaacctaagactagagctttagctgtagatgggaaaacgttgacttttattttagataagagagccaatttaacaaagccttttttaaaattgacgacttattgtaattctgtgttgtgttgtagagcgactccacttcaaaaagcttatatagttagggtagtaaaagaagagcttaagaaaagaacgttagcgataggagatggtgccaatgacgtgtcgatgattcaaacagcggacgttggaataggtatatccggtcaagaaggaatgcaagccgtcatggctgcagattttgcactgtctaggtttaaatatttggagaatttcttgttagtacacggccattggagctatgataggctttcgagaatggtgctgtacttcttttataaaaatgctgcctttgtattcctgtgtttctggtaccaaatgtactgtggatttacaggtacagtgatgatagaccaaatgtatcttatgttatataacttattatttacttcgctacctcctttagccattggtgtttatgatcaagacgcccctcaagaaatccttttaaagaatccctatttatacagaagagggcgtttaggaaaagtttatagatcgttttcgttttgggtgacgatgttagatgcactgtatcagagtacaattatattttttatatgtcaatacgcctacagcgataccgatgtcgatgtgttcgaattcggaactacagcgaccacttgttgtatgtttgtgatgcttttacatgcttccattgaaatgcgttcctggacacttctccacatagcgtcaatagttttatccataggagctttctatttgtactcaatagtctacgacacctattgcataaactgctttggtttaccgagcacctattggacaattcagatggccatgcagaggtataattattggttggccactatgttgtcttgcgttagtggcg

SEQ ID NO: 6326 - DNA, 4255 bp, Diabrotica virgifera
gtttatccacttccaattcttattttgagtgtgtttttgcacactcgggagtggcggtactccccctgctccgggcaaaagcacacatcggcacaatatcactttttttctttgacctgttagctgtgtgtatgccaagtttcatgtcaatccggacggttctttaaaatccggagcaaaaaccgtgaataaatggactattaatgaattgagttatttcttattacttgccatacatgaccgtttggtgctagacatattcatataaaaagtaaaaacgataaattttatgataaacgccagtgtcaacaaaatatgtgtaaaatagtcatacatatttaagccatacatatatgctaaaaatatttcctagaattttccaaaaatgatgagaagttaagttagtttgtactttcatggtacaggccgtttctccgtacaaatggaccactttgaatataactagtttttattcgaagaaaaaaattacaaacacatgtcaagtcgttccagtgaaaacgtagccatgacatatatttatatttttcccttatctacttaaaatacctatacttattttaatataatttaattatatttagcgcttccgaaaaaaacttttcacaaccaattagtttatttttggagtgaggctgtttttccatttagataattgtaaacacttttgggaagtgtaaaatgtaaaagaattgatgctatcatccattttttattcagaaaagtattcagtatttgaaatttcaggttttatagtttttaaatcaataaataatttacataaaaataaaataaccatgcacctaaaagaaaagtcaaacaataagagttgcacgtaattattcccttgttgccctattctaaatttgaaaaaatatagagggaataatcggacttttttgacacgccgtaacgagtttatatgacgtcattaattcagtgagattggaaatagtaactgatggtcatgatattagaggttaaataaaatatcgtttttaaattataatcattattcatataatattgttttaatatacctaattcaattaaaatatcctacaatttgaatcaaaatcaaatagagaaactaaagtaacagaatttagtgtgtggacagtttcataggacagttttcatatgttttaaccaacttcacatctataaacaaacatcttacataaccttctacaggacatgggttgggcatttatagtacagatctttgttttacattttaaaagacaaacataaacagtatagccggtagctgctgtggtaaataaatatatgttttttttatttctcaacagcgctttcctgcaaaacttgacagtagcgaaaaaactaatatatgggggaaaagtgttgaatttgtttgccgttaaattggtaccattaagttatgatgtcattaaatctatgacgtacactcctaattgtttgaattggggcatataacatcatattaaataaacgccgaggatgaaaatcgtttactgatttagcgtaggaaattttgctatttccatagcatttttaaaaaacactcatttaaggatgacaaccctgacgtcttctgtcaaaatatttacatatacatatttatatatcgtcggcatactgcaaaaactgaccaagtcaaaaattactattttcgagaaattaaagtttaacttgaaagttgtttataaaatcggatattatagtctgtttttaaaccaagaggagtcattcaaatttcccgcgccgtaaagcttggttgtaattggtccaacctcaggcaagtttactccactcttatcaaattttgacactaatgacatttataaaattttgacacttttggcattttataggttaattaagttatataagtgattttttgtattttctgagttattcctttaattcctagatttttagtctgtttttatataaaaaacagttatttttagaactctttagcgacgtattagtataatataatatttatggattaccgtgaaaggtcgatatgatcaacctaaaaagaagatgtatttggtgatatttctagtgactttgttgggtgtgaatctgtctttttagtttacttctcttggtttaaaaacaaagcttagctatttatgactgcaattttgatatcgtgtgtattagaaactttagtttttaaccacgatatttaaatattgtggactttgaacaattaaaaaaaaaatgtacttggtcactttctgttggcgaaaaaaattagaaatttgacttggtcaatataagcgacaccgtattaggaaattatatttattaactacggtctgtacatagaaaaaaattaaaatctaatcagtttctgtgtcgtcgctttcagaagaagctggttacggtatgaaaactttttttgactactggaatcgatttataccactcatggaactcttgcggaataattttatttctacgcaaggaggctgtttttattttgctctggtatagacaaaagttttttgtataacattggaatgttcttaggaataacagctggtctgaccttgccacatactcaagagtaacgcatttaattttaaccacgatattttgtttccattttaatcttagtctctgttttttaagaacatctgtgcttaagatcgaaaaagtctgaccgtaattcttcaactctgtaggcaccgctcttttcgttgcgtcttgtagaacggactagcttgaaaatattcaacagatcgttcattgtaaaaaatggcaacattttcattaacagactatatggcactgtgcattgagtttaccgtttacctccatgtacgaatgtcctttctccataaaattatgctgcaaaatcttaatgtgtgtgttacaacaacatacaaattaatgcggcaatgaacgaatataaaaatctctgataagtcagaatataaactgatctctgtgatgccttttgatcatgtgattgcagagtttttatccgcttgatcaatgctattccaatttcagagcttccacgttgaccattaatctctgtccaagtataacattgcgcattatttggaggtgccgcttcatagattgtaaagttgtaaacacacaatttaaaagaatagtatagttgtgacacatctgagggtggtatttgcaatatactttataaatattactgttaaattataaaatatcgtactctttttaaagtctaaacagttctgaatcataaactaacgatacgcaataaacggacaagtgcaatctgctgacagccaaaagtgactaagttgacttagtcagtttgtcttatgtacatagtcaatatagacgagttttgtttgacggttgtattacgtttaaacgacttggtcaatttttctggtaaaactaacaacgtttcttagtgacttagttaactcaaaactgacaaaatttgacttggtcagtttttgcagtataccgacgatatgtatagccaaacttcgaagctccttcgctcgtaggtttgactagtcaacctcaagtcttagtcaaattttcgtcaaacctaggtgaggttaatttggtcacggaaacgtcgaaacttaatttcatgaactcggggtttgaccagttaaaccccgaggatcaatggaagttttttaaggttctagcaaagcaagagcaaggcacgtacacggtgtagtgaactgtatagtaaaacaattgatgtaatgtgcacaaagttataaaagaaacattattcaaatgaatagttaactaaattcaaaatttcagcacttaataagaaagttgccacgtactagtatcatgagtatcattttgcttctcaccagacgaatttatagcgttttatgactcttcctccgtctgcagaacctttttttcgggcaaagcccgaaacatattatttttcttcagacgtttgactttagaagttagaaacttctacactacgcttcgcggtcactttgcagtacagactattatgaagaatagtgttggctattctacgcctctacagtactttacctacatttagcttatcagcagatttcgaacatttttcacaacaatgaacatttttcagaacaatgctaacaaccatattgtcatcgagagagctcagttgtcacaattatctcaatttaatacaatgcacagtgggccgggagatgcagaaagcggtcaaaaatctgaaaatgggctgaagggctttaaaattgtagtc

SEQ ID NO: 6327 - DNA, 4254 bp, Diabrotica virgifera
  SmartBlast Evalue=0; Info="Fibronectin type-III domain- containing protein 3A, putative n=1 Tax=Pediculus humanus corporis RepID=E0VER5_PEDHC"
ctaataatctcacgaaacatataagcacagtaacagtcacttcaaaatttttgattaaaaaatataaaatatattataactatctaagataattacataaaaaataatagagatatatgaaatatataatataataatatagtcatctatactaactataaaaatatttaatttttaacagtaaatcaaagaaaaaattgaacaatacagaatatacattatgattaacaaacaattagattgacaaatatattaatatatttctacagtctatattggcatctaacctagacagtagacaatacaacaatttataattatttggaagaactgtaaaacattaaaaggttaaggcaatttcagtttaattaggaagcaaataagtattaagccacttaattttgttttgttaaacttggatttctttgataatatagtcaaatttgtatattaaactgcctcctgaacaacattttcaaaaatctgttttctagtaagttattatcacaaatatacacgataaaaaaatttctacaacacaaccgtcacgaatttggaaattaaattaactgatacagttaactacatgaaaaatatttagtttcttaacaaaaaacatctaacttgtccatttaactataataccaaaatgacgtttgttttataattaaaatttgcagtaaagtaactacaaatgtatattagtgacataatttactggataactaatttttgaaattttataaagaaactatatttggaatacttcggtctgagtctggtactcgtctaaggcttgcttaatttcacactgtacaacacataaattaaaaaatataaatttaccaccaccactctctcccaaacgttcctcccttcgtttatacatttctacatatgcgcattttgtgtaccgtcgccattttacaaaaacgacgtgatcagcagggatatgacaattccgattagcaataccaacatcacgtacatgtaaggtctgtactcctcggaaaaggtgagcgcttgccaaatggaatgatagagagtacgatgtttgtgagagggcccatgtggagcagtagttcctatggaggtggactttgcaggtgagcctgccgctggttccaacgcggttgttgtgaaggatactgaaggtgatgctggaccgggaagttccccggtcgatgtcagacggacaggacaaatacgagccatgtagtcggtccctggttccaggtcttcgattgtacatttaccctcagaagtcttggatacctgcttgaacacttgttcctttagtcttgctaattgtactctgtagacaacggaatccgaaaatgcatttttagctggcaaccactcaagagaacaactcctctgttccacttctataactttgggagctttcagcgtcgttggaggagcaacagtagtagtatactcatagtcttcagaaaattctccaacacctgcatcgttggctgcgttcaccctaaatctgtatgtcgtagattcgtgtagcttgttgactttacatgtgagagctgtacctttgtatacacactgataatctcccatgcggggattgtccatttccacacagtattgggtgtattcggtgtttttgccctcgccccatttcaatttaatatagttatgagcagtggcaatacattctaacctgggtgcagtcgggggcagcctcaacgtagcagttctcaatgaagacgaaaatggaccatgtgcaacatcattaactgcttggatcttgattttatagtttgtttccggttgtaaaccctccacagtatattcatttacagcgccatctgttgatattgtcctatcaccgatttcaatattgtaattcgtaatagggctaccattctcattaggcgtgttccaatataaggtaatggaggtaggagttgactcagatttcaacgacgtaacagcagaaggaggtgctgcaggtgttaatgtggtagcaactggagaaaatccgctgaaaccagcactattaccagcttgcactctaaagcagtaggaatgaaaaggggtcagaccctttacgtcatagttcagttgagagccttggtagacactggagaatttatcttcacttaagtcaggactcatttctagtctatattcactgatgggcgccccattagacacaggttccgtccagtcgacataaacatggaaaggactcttgcactgaatttgtggcaactctggtgcacatggaggtgcggcaccactggtgatcttcaaaacgtccgaccatgatccaggccctattctattaacagcccgaacctggaaggaatattcacagccaggactcaaggtgttaactgagcattcggtctctttgtttttatggacaagagtttgggcgttgtctggagttgtcatttctacttcatagtcaagaataggtgctcctccgttgtaatctggttccacccatcgaatagaaacagaattagctaatggttttcctacgaccctaagttgcgaacactgaccaggactaacagcatccgtagttactgtacaaggatctgaaaagttgctaactccaccggcactgatacaactcactctgagttgataagtagttcctggtgtcagtttatcacagactgcttccgtttctaggcccttatggacaatttcatagccactacccgaatttaactctaaaatgtacatggttatttcagatcctccagtattattaggtggttcccacttcagtttgaaagagtgtgcgtgtatccttcctttaactacaggttttgatggtctagaaggtttgtcgggcaaggtgctataagtcacttcttccgaccagggtgatgtcccactttcgttttttgaccttaacctgaaagcgtaactactgcattctcttagattcctgcagatgtgttgattttcattgcctaggtagacattcaagaaaccgtacttgttgtcaacatcattcatttgtaagataaattcatcatcttttggtcgacgttgccatagaagatgtaacgattggacgtttgcttcatgcaacgtcggtgtattaggctgggtaggtggattgtcaaaagtactatacgctatgcaatcagagtaagaacttttgcctacctcattttgagctgctaacctgaaggtatatactgtagctggaagcaatttctgaagtgtgtgcgttttgctctttcctttgtagaattccacaaactctcctccttttccttcgtcatattccaaaatgtagagctgtatatgagcgccgttgtcgttgacagcattccagcgtaattgtagtgaatttttggttctgttcaatagctttggaggctgcggttggtcaggctcgcacgccggagtgatgaatttaactggatctgatgcggagccttgaagctcgtctaaatgtacctgaacacatacggaatactcttgaccaggttttaagtcttgtatcctacaggagagagaaggaccactgtagatggatttaaacttcatttctctgcttttatcgctaaggaggacctcgtaccttagatcggactctgaaatgtcaatgtcgtggctatcgttgctcgctgattcagataaacggacgggtggcgcccattgcaataaggcactacgggaacttaattcagacaccttaggtgcctggacggacgacaaaatatcagtagcaatctgtatagagtcttcttcatcgggtacgctgctctcctctccatcttcgctagtcccgacactattcatacctttatcttttaatcccgctctttttaaaccatttactaattctttcctaggtatcaaaccgtcgcctttctgctgtttgtcatgtaattttttcttaagtttgatgtgttgtcgctgtgtcctctcgtctttgtaaaaagttggatttggaggtggagagtgacctaggtggttgggtaccggatgaccggtttgaagattggaatggaattgttgtggggcaaagccggtaggaagtcccgggtagaactgctgagattgagggttgttgttgcctggaccgccacccttactgttatcactcttgtcatcttcaacatctttacaaaaaatgttatcatcgtctttttgcatgataccgatcctgtatatcgaaaacacttactgaactctacatacataggtaacaaacacttcactaacttaaaaaatatatgatgtggcaggaattgatac

SEQ ID NO: 6328 - DNA, 4247 bp, Diabrotica virgifera
  SmartBlast Evalue=0; Info="Leucine rich protein, putative n=1 Tax=Aedes aegypti RepID=Q171R0_AEDAE"
ttataaaaaacaaattggccttttcgaatcatccataagaaattgctaaaacaacaacgaaaaagaacaaatactgcatccaataatagaaaatacataattttcttttgaaacatccgaacttaaaactacatatatacatgtgaataaaatatctaacaatttacgataaatcctctgtcggtacattatttttatttctaggtggtattggatgatcgaaggcttttcctaatttttcaaaagcttctttacttctgatgatcgcagtcctatttaagaaatttaaagatacagcttttgttgcttcttcgaaggtatcaactacatgttggtggttatctttgctgaacaacacatctaataagcagctgtacgcgttgccaagagctccttctgacacgctgctggcttttagatgttcaatcagttttttggctaagttttcgttttgctcatctctagcggtatgtactatcttttggaacattattctgtttgaatcctttaagtgttcattccagatttggtcggctttttcgtggaattggttgataaagtatcgagtccagagaacgttcaagggccctattattcctcgctttgcgtatttcagggccaactgttcatattgttcagtcaaatcgggatgtttctccaaaataccatatgctcctcctctgggaaactgttcgctaagtagactcaaatcttcatctttggcgttatctatgtcattgttgagcttctttaaataagcttccgcattaccagctaccaaatttgcatggcacattctattatcaaaagatacaattctctttacgtctgaatttattttttgtcctattttacttaatgtgtcaacatctccagctgtggccaatttatttaacaagaacctgaatactctgtttacaggaatattaccgcgatcgagtatttcaaacgttaccttggacgcttcattcaaacggttctgttgcaacaatttttctattagtactgccaaatctactacaggaagagcttctttactgttcttttttacctttaaggcttcgtcgacatttcccgacttaagtttttgtctgaacagaactggagccggagtaacttgtggtgcgatcggttttggaacttcagctgcttggactgttgtttgtggtagaacaaaaggaacttgccttcctttattttttaaaaagtctcccaatgttaataagaactgctctggcggagctagatcttcttcttgcatttgcgtccacaatcctagagctttgtcaacttcgtcttgcttgatgtagcttagtaacagttgataatagatatctgaacggtcaatgtggttgaggtcttttgtagcatctttcaatccttctagcggtttaataagtccctcttgttggtatctttcacaagcagtatttattctttgcggccgtacttgtaaaccaggagtttccaaaatttttctagcttgtctaacgcgaccacactcaacaaacgcaaatactaaatcgtacaaactgttaacttcaccatgtattgatgtacttaaatccgtgagtttttgaagcttctcagcatcttcgttttgaattagctgacaggctagttcatttttccacggcgtggctttgaaatgattgacacaccattcgaattttttcaaagcactttccaaatctttttttatcagatgtacttttattaaaggtcctagaactacattactgacttcaataaactcttttttgactagtgtatcgaacaatttatccaattcttctacttttccttcctctgcaagactattcaataatctccaaaccagagaagtgtacgagaatcccctgtcatcatcttttttatcctgtggggtattttctaacagtttaatacactcgtcgaactggcccgatttgatatataagtgtgcaaacctcaaaattttgctgctatctaaggcaaagtcagagccttgtttctctttaaccaaattatagtattccacggccttttctaaattaccgtgataagcatagaggtcaagcagttgggcatataaaccaggtgtgaatacaaaatttgcttgactcaaatcttgcacaagcttttcggttttctctagatccttagctctataatacaaagtaaacagttgtctcttcagtccgttagtttcttgattcttggctgttagattttgtatcaatctttctaattgtggaatattcatttggtgtgatggaacgtagcttggaggttgccgttgtactggaaccggcgtcagttctccggaacttagtctttctaataactgtgaaatctgatcagtcatcttttctcctaacttatcttctattttttcggctgttggcgtggatatactaagaccttgttcacacaatgcgttcaatacactttcaattttctccacaaatgccctgctttttgaagttaagtcgagaacaaagtttcctaccagttccgctttgttaactccttcggtcgcttcttcgtcgtcatcttcgtttttctgtgtgtttctcttacgatctacgttgtcgaacacggttctcaatatcgcaatataagactttagatcgttcgttttgtaaaatgaattagtaagaggcctcctagtcatatcgggattgtagtaagcttgtatcgtggtagcaatagctgctgcttctttaatctcattacgaagcaataagaacacgactaaactagatgcagcagtaccaactgaaatgtttccatctcgaagaagagctaaaatttgactgctatttccttttagatttggtatcacatactcccttatagtttcattgtttggaaaaacgttgaaatcatgcattttctgtaaaatgtctataacagctttattatcgttggctttagaaataaatagtggccagaagaaatgttgtctgacagtaataccgcgtttttgaagctcttcaagcattggatatgctagtttttcatttcccagttgaagactcatttcagctgcaagtagaaaacctcgatcgtacatatgttctttttccattatatcgcagtacttcaagataacgtttaaaggacgatcggccttaactagttgtttaataaagaaataaccggttggagcgggcgaaccatcttcgcgagtaacccgaggcattgattttagtacttcaaacccagcttcttcttcacctttgttgatcaaccttagagtgatatttacagcatcttggttgtagccaattgctttacgcacctttccgagaatagcaggaacatgttgtttatgcccattgacagctaaagcgtagatgatgtccaaataatctttatctaataggaatatttcttttgattcgcattcttcaagcaatttcagaatggtctcgatgtctcctttagatgcatatccacttactaaagtggtgtaactgtccgcacttggttccaagccagcttgggtcataacatttattatgccttgagccgaatccatgtctccagctttagagtgtccaacaataagtgcattaaagacattttcattgactgacatttgtttttctctcatgaactccagtatttttgtggctccttctatatcaccatcttgacaatatctggctataagtctctggtatgtaactctatttggctcaatgcctttattgtctagttcactcaaaaactcagtgggtgaaaatggatgttcattttctaagtacactcttaaaagagcattataatgtgatatatccattggtacatttagtttatttaatgtattccatatttcttgaactagttttgtccttatttctggcaattcatcaggtactaggttaccgcaacatcgtatgaccaacaaagattgtgagctagtagcagatctagtctgtctgatctcttcaagaacatcttcaatgtctcttctagatatgcggcctgattttctgacatcttgatcgattcttcgtaaacttgtctctaaattttgatcttgtaatgttgaagcttgtgtagcgaagttactctgtagaacaccacacagacattgagaagtgtttacgaaatttccatcaaattctctaggtgtgttaattacgacatttcttgcgaatcctgctatgtaccttacaaatttcgaagatctgagaatcgacgccatttcggacttttcgagactttttgcattgaattgaggttatggaagaaag

SEQ ID NO: 6329 - DNA, 4225 bp, Diabrotica virgifera
  SmartBlast Evalue=0; Info=CG9987 n=12 Tax=Drosophila RepID= Q9VIW7_DROME
tcattcattaaaagtgcatgagatgaagcatagcccatatctcaaatgccatttagcgcagaattttaaatgatttaaatgataggcgcaaaatttgcttgcgatgcttattaaatgcattaatttctttcgaatcttggaaaaactaatatatattttaaaaaaattcaaacccagattggaagattacattacatattaccgagggccgaaagtcagaacaataaaaaagtttttttaataagatatttgaattaaaaattacactcaattttctcgttttttttttcattcctgtaacttattcaaataaacattatagagcttttcagagactttcggccctcggtaataatgtaaccgtttatcctggagttaaatttttcaaaaatactaatgagttttcatgattccaaaaaaatgaatgcatttaaaaagcactgcaagcaaattttgcacctacccacttaatgaaaaaatactcgaggtcgacgtcacggtttctcatagcaaagtacgaaatgaatcttttcagtatttcccacgaatttttaatacattttggctataatcgaaaaaacaataaatattgagtgtgccaattatttcaatacgttaaaaaaagcgaaaaaatataaagaaatacatttagtaaacaagaaaatgattttccatccccataatgcaacaattcatgaaatggttactctttccagacattataacctgttgcaaaaattggaaagaggtaataatcacttggattcataaagttataatgaaggtgttactaattttgtataaacaagttttttctgggtcaggcatcgaagaatcatcgtaacacaatcagaataagtttgttcaaactgtgacaccaatttatatattaataaaattaactctgtccactgcctcaaaaaatacacttttgtcaagacatcggacacaataataattagttccatgacatctcgtaacgcagcatttcgtaaccgggcaaatggtaaccgacaattcgtaacggcgtcagttcgtgacggtaaaattcggaacggcaacattaaattctttttagcaaatttagtattactgaatttctacaaaaatggattttactaacattcctatactaaaagtaacgttacttttgttaagaccacttctctttaactatattttacacttatgatcactttaaagtagtaaaattcagtgtgaaaaataataaaacaaataaaaacagtttaataatagtgtatttactatagtaattaatacaatttacaatactaagtagattatatgtattttaagagcgtatgcgcaaatattttacggctatccctactttttctttttttttacacggccaatttcgtgtagtaaaattctcactattatggaaattatggaaatgtaaacataagttgacaatgacattgtcatcattaacatagggatggctatttcattgtttttgaatgttcttggataaccgttacttgtatatttgtttaaattattattaattcagttaattgataggattattttttcactacgtattcagtgattacaataatttatttactatacgataaaaactataatcgaggaaagaggaaaagtaattttaataataaattgttactatggaacgcttagataaattttgaacatctttaaccataaaaacttggaatataccatggtgtattctgtgcttggatcttccataaataataaacaataaataactgtttattaatttcacatcttaaatcaattatctatccaatacaccatcaatattaattaataaacaactaagaatatttagtagcctggttgttactgtcttttcatcatattctgttcgactgagtgcgttgtatgacaaagatagcgaatgttcgatttggaaaatatcactacggacatggtgttaattttttcgaatcctgaaaaatttaaactcagaatgaagattacattattaccgacggttgaaagtcccttagaataaacaaaagattcgtttgaatgagatatttgaaattaaaaatcacactcaattgtctcttctttttcacccctgtaacttattaaaataaacatagaagttttcagggacttattaccctcggtaatgatgtaaagatctttcattctgcgttaaatttttttaaaaatacgtattagttttctcaggattcgaaaaaaatgaatgcatttaaaaagcattggaacgaaattttgcgtctacgctcttaatttgaaaaatgtgtatctccacaaaatatgaaatgtgtcaaaaatgtttttatcctgatgctggttcgttaaattgataaacgtaatttcaattgtaactgtaataaaactagtttccacgttaaacagaataatcgattttgacgtttcgagttgtatgtgccgtgacgaacatgtacagttacgaactgttacgaaatatccccttacgaactgtcgccgttacaatttgtccgctaccatttgtgggattacgaactgtcgcgttacgagatgtcttgtcacgtacctaataactacatttaacctttaattacagctataggccttagtttaatagccttcttcgaaattccggcagcgtggcacgtatttacaacatcagtaacgtttttgtatgattctggagcctcttccataactagcttcggtgatgcgactcgaatggaaattcccatgtattcgagcttccgtaagacatcagtataatccagattccttcttgatttggcacgggacaaagctcgaccggccccgtggcatgtagatccaaatgtctccaacattccttgttcggtacccgttaaaacataactgcaggttcccatagtaccaccaatcagcactggttgtcctgtaagttgatagtctacaggtatgagtgggtgatgtggtggaaaagctcttgtagagccctttctgtgaactaaaagtgtttttggtttcccatctacgatatgttcttcaacttttgctatgttgtgggacacatcataaatgacatgcatatcgagatcatctggagctaagccgaacttcttggcaaatgcctgccggcttaagaaagtcatagagcttctattaacccacgcaaaattggcagcagctgccatactcttcaaataatcttgaccttcttgactgttaattctggcacatgccaactgcctgtcgttagtttcaatattgtctctcttcatggctttttccatctgaacaagagcatctgtagcaacctgatgaccaaatccacgacttcctgagtgaatcataacacatatttgtcctttttcttcaatacccatcttgctggcagcccatttgtcatagatttcttctactacttggatttcggcatagtggttgccagctcccaatgttcctaactgtggtaagcctctctttttggccctcatactgacttttgaagggtcagcatttaacattcttccatactcttcacaatgttctttatcctcagcccaaatatatccctctcgaagtgaccagtccattcccatctccaatgcttcctcaagatcttttgcattcattggtataataccttttgaacctactccaacagggatgtggtcaaacaaactttgagctagctgttcttttatgggcattacatcttgctcaaagaggtttgttcttaataaccttactccacagttaatatcaaaacctactcctccaggtgaaacaatagatttgggatcattgacatcaaaagctgccatattaccaatggcaaatccatacccagaatgaacatcaggcaaacctactgatctacctacaattcctggaagagcagcaacatttgctatttgttttacacctggtaaaaagccacctaccatgccaggtctacaagcatttctaagttcgtcaaacataagcttttctaaggtttggttgacataaaatacaccctcaacattcatgtttggttgaaatccttttttgattctccagcaatgagaattaattttttccaggtattcaagttcctggttatattgtctcaccaccattttgtttatttagaatactttcacacttaacaaaattatttaggagatgtaattgcaatgtaattaaaattacaccaaaactttatcttttttttttaccggcgatgatggttcatggttcaacg

SEQ ID NO: 6330 - DNA, 4233 bp, Diabrotica virgifera
  SmartBlast Evalue=0; Info=Vacuolar protein sorting-associated protein 13B n=1 Tax=Harpegnathos saltator RepID=E2BJX3_9HYME
taggtttacataatacgtcaatactgttgattccacagaaacgtcgacttcgctactaggacctggtgaagaaagaggtgacacatcgaaattcaattggtctggtaaatcactagcttccggtaggtgaagcacgcctactgtgttttttacatactcagcaactcttgctcggctaacgggatccatttctacactttcctcctccatagttggagttttaagaggagggtttaacttaaatattaacaacgttggatcactactaggacaaacagtcaaatctgaaagatttataacacgttgggttgagtctgtttccaaattaaccacgattagactttccaaggtaagaataagagctatggcttcgtactgagtgtttgaaatactcgtagcctctgtgacatacaataaatgtgacggagtcaaggcttggatattcttccaactatattttaaaagagaattggcgttttgattaattttgtctattgacggactatttcttggctcgggaagcgatgtccaaccagcaccttgcagcagaccttgtcctgttagggccacaagctctgcagctccacttaatggcttcgtaaccatcccaacaagacccaaacctacgcccgtaaccaaagatctcggagaagctccatctgacataattgattgaaggggatggtgcgatacacctcctattgctcctagcaagctgatacctaacccagtcaaaccctgtaaaaatccttgagctagtccttgaggtctcattcgcctctcttcttctttccttcgcacgtgttcttcgtctagcgttaaccgatctagatttctagctacacttgaagccattttcgtaactgattgtaatgtaccagcagtaatatgcctcatcagcgaagcagaaccctgtgtaatacctcttagaaaagccattggtccgacaaccaaacctctgtaaggcaaactgacaaaatctcgtaagcccgttcccattgctctagccagaccaccaggactaccaataagttctaaagaactaactacccatccagcaccaaatatcgctccagaaagataatgcatagtcatcgcatggcccaatctgtagggtgtggtgaaaaccctctttctttcgaattttccaaactgcaatggagattggtctagtgctatatacatttttatagacgaatgtatagacagtaggagagatattggagctatgtttaaatttcttactgttaaaggcctcgctagtatcgcacactgccaactaacaatctctggtacacttaccgatccagaagtcccatttagttttaaaggtaattttttatcgggccacataattaattttgttggtatgaaaacgtaaaaatagtccattaatctagtcaaatatccatcttccacaaaacatgaaattggattaataacaatttgtaacgacttcactcctgtagtgttgctcattacatatttatccctccacgtttctaatgctaaatcaactactaacaaagcctcctcatcggaattttgcaataaattttctataggaatgtttaaagtaggcattttgtttgactctttcacatcttgtcccaccaataaaacgggaaagtcgtaagactctcgagaatacaactgattgtcaaactgaacagcagaaactgagaattttactttcattttctcagtctgagtggcacaaactacaatattatcacagctgagactagccacttcccacctttctgtcccttctatcttgaggtccgaaataaatatcacagaaaacgatttaataaaagcattcaatttcatacaattccatatttctttcataggtagtgtgttaactaacagggatttagttttaggcgataataggcctagattagaacccgacgatcgtcgtcttgattttgaatattcttctgaagaaccattatcactacaagtagagttttgtcttgtctttatagatgatcgtcgtcgagcacctgattgtatagcagtatcggatatgaaacgaggtacctcttcccgagagtacagttttggcagttgcagcgtttccgaatgtttttctcctacaccttcactttcgcgcaggctgagtcgcacacgaatatcactggcactaatttccatctcactagcagactccagtattaaaaatgttgtacaagctgtatttacaactattatttgaatatctccgtagaaaggtattctcaggtactgctcgtattcgtgtgttaagctaaagtttgtagaccactgaaaatcattattaatatctggctcaatagcaagtgctatcttttccgaaaactgatattgtggcaattcgggaaatttctcagaaatatttggcatattgtaatactgttcttgatgtggacctatcttacagtaccatcggaaattttgaacttcatcaaccacctctccttctttcaatgattggccacaatagaaagtagtacccgttctatttgatataagtacttgcggcctagtgtcattgtgtaacgacaaaaagagctgccctttgtgctcttgacaagtcaaaacaaatgccaatggatgcgatgccgaggtaacgcaaaacgcttttcttagaaatggtttatcgactctaattgggcacgaccagcccacatctgcacttaaacaaaacgaaaaataaagagcatattcactgaaaccagatatattgatgggagtatgccattttatcacagaaactcctgagttactcttgttcaaatatggtgccagagtaaaactgtatggttcagcattatctggaaaatcataaatattttcaccctctggcacggccaaacatattacttgcaattgtgttgccgtgtgatttgacaaaacgtgtgtagatgaaacttttaataacctcatctcgtttgtaactgaacttgctatggatatactgcaaatatgactatcacacttaatcgacgttttgatacatccattttgaggaatcgaaccggtgattttgggcatataaaaagcttgactccaatctgacttcgataattgaagtggttctgaataataccaagaattgcccatataaacaccaagattgaaattttcctccagttttggtggtgctactattccgtgatgaggtattttacacaactcaactccactaagcatcaatgaaattggtatacccagagtattgactgtaagacaccacggtagcaattcaagcagcaatgaacatgagtgggggcacgccttttggtacttgacctggacgtgtgtcaaaggttgatcgtcaactacccaatcgatctcatccaattcatctccaaaatatggccaagattttttattaaaattactcagaactgtcaaaatttcttctatgtcttccctctctggtcgtttgaaaaacttatgctgatcgacattgctgtagttcaatggaatgtaagagttcgaggttgcttcattattgtcaattttaaaagttaattgatggggatgatctatggtaccggggcagtacagttgttgtatctggcctctaccacaaacggtcgagtctatatggacgtttaacgttggagtttctatgtgtacctgagaatctacgggcagattggatttcaccgtgaacaacggccagagaacagctaaaatccttttgtattattgatttcttgtgttataatccgacaccaaatgctaaggaattgtccacgctcttgtagaggtactttaaccaaccagggttgacttccagtatgatgttctttcaatggaatatctccggtccacgctgactccaagccataaaaccgcaacctcaagaaatatttctttttattgttgataaatatcgacggtgtgttattatgagatggtatcaagattgtggtagaatttttgaattctatatccctcttttctttaactgattcgaccaccttcatctcgaaatgttccagaagcatattagatactattaactgaccgaatactgttattttcttctgtgttgccgacagtgactgtatggatacaaaaatcgagatgtttcgttcggtgctaaattgaattacctccattccgtcctggataagtggaaacgatcttgaccaaacccagtcattctcctctaacgctatcctcagcttttgcttcttcttctgagatcgccaagaatacaaatgaaactgt

SEQ ID NO: 6331 - DNA, 4239 bp, Diabrotica virgifera
tgactatgtctttatattttgttaaaaaaaaatagtatttcacatttgagcctccaaactatttacaatgactaatcccttgttcattggtttttctttaaatcattaatattgcaaactatttccaaatcattattgttgtaacaaaaataacatttttatgtatatctagaaatatctactaactgatctgatattcatctacagaggcaagttaagagtcatcccatactctctctaacactatttcacagccttcggaaatataatcattcggtgttcctatatttagcgtgctttttctttactgagtatattatagtatgaaaactgttgaactttccatacaacttatattgcacaatattgaagatatcaatgtaatgataatacacttagatctagccattactgtaccgtttaactcctgtcccattaaccgtcataatcctttaatattttctatgtataataacagtaaaaagagtacaataccttcttttttacatcccaataagacagtcctgtaaatatgcatacatacctaatctgacctaatttctgacatcactctaaatgacgtgtttgttcaaacatttctacgtctgaaatataagcttgtagaaatttttctttcagaaactagttactatttgacattattcaactaaagatttagagttcatatctaccacaactatcttaactgtatttaaaatgagacattttgtgatagaatcttaagactttttgttactactagttttttttctattcgactttaaatctttagtttttggtttaaaaaaatgtacagtatgttctttatgacttaaaaccgctcttcaattttaaaaatacaaaactatttttaaatggaattaactagtaaataaagaactgttgtcatttgttatttttaaaaaattcaggtaaatggtaaatccgtttaatggttataacataattggcattaccacgcttgttatttgaatggtgcaggaatgaattcatttatcaagagcgtctgatatacttgtattaaaggctcgactatatagaagaagattttaatagtaacgttatttaatatcctgtttgtcttactctgtggctctacggctcttgtagacttgcattatccccttttaatactcactgcgccattctctaactcatgtttcttgagatcgtccttctcttcttctaaaggtacttatcttcttatgatgtagatggacgacatttactgttattttgtattcactccagcccaaaatagatcaattgacgttaggcaatccatttcccaagattgttcaaccaggatatatgtctggctggccaaaatgatgttcttcatcagtgccttcttcatcagtggaagttggcaacattcgaccagtctgtatcttctagaggggctttaggctatctactttcgtggtgcaatactacgtcatagagtaaatgtagcttagtgattattcttgctcttgctatcttcatcattattcttatttctaggtcctgttctaggttgtatgttatccagaagcacaactattttaatatcgtcacttctgccattccaatctgtcgttctattggtttgtcgtagatggttatatttatctgcaagttgggatttcaaccatgatcttggttttagtcttgttaatttccaggcagtaatcgtcgccttctctttgtctggtgtgtttagtaatagttggatagcttctgtgttatctgataacagcactttgtcgtagtggttttgatcatgtttattgttacgtttatgttcgaatgctctttgaacgatgcattttgagtagtcattttacaaaacgggtaatagcacactgcctttcctcggtcaattgtgttaggccgcttttcagtcttgctgacgcttcttggcgcctatatgttggtgcccatatcatcgttgtttttatttaaacattcattcaagtatgcttgaagtaatcttccgagaaaccggcgtacgaattactgtttgttgcattaacccgaagacgtcgtaccacagatgttatttgttcttggaggatgtatgcagagctagagagtcctgtagattccgccatcctaggccttcacttagagttgctgatcgggacgctcagatcttaagagaggagcagtgtaacgaaagagtacatttgaccgacaatcgttgttttccagatgtgtgtatctacaatttccattaactcagagtgttcggcatagtaaaacgttgttgcgtaatctataacacaaattagtgatcttttaatcgtgtaaagttttcgagggtgttcctactcatcagtttgctctcctgttctttatttggatcatattatgacactccctctcttattccatgtattcaactaatttattctgtggtattagcacatgtcttcaaattttaccaacaatggtaatgttctgtaccaataattgcaaagccatttattctcgttaacataattaggaaaggccgtttcgtcttttattaatatgatttctttgcttttattgaaagtggccaaaaagaccaaccttgtctagatggaccacttctaggtttactgatttgtattgtagtggcaataaaaaaataagaatatatcatttatattacaaaaatgataaactatatggcagctctattaatttactgctaaatatctagtccatgcaccgaaaaaagttacaaacttactaaatataagaaacttactaaatataaggtttgttgacgttgatgatgaaatttacatactgtatattttcagtaaactgtcctcgtccgattcattttcaaaaaacgaatttgaactcatagtgccaaaaaagcacatccttgtttacaaagttttattaacaaagtgtttgaattgtgcattacttaatatatatgtttcatatagttaaattgccaggagcaaattatgattttttgttctaaaaaagctgaatggaccgcacgaaatttcattgtatttccatttgttttaaatgtttttatgcttctcatttacataaatatacaattcttataagagtgtcaggttactagagttaccagccaaaatcagactgaatttttaatgaaatgaatgaataaaaaatttaaatcaaacgcctagactttctttagcctatttggatgtttcctacggatattatcttaaaatccatgcgcaattgagagagaaaagcgaaataaaagaagtacagtatgtcgttagaggaatctggcagtataaataaacatttagattaattttattctcgtcgaagattttaagacgcattttcaaagtggtaaataaaaattatgctacaaagctaagatgtttttcaaactattttattgcccaaaagcaatatgagtataaataatacaaaataatattttttgaaaacaatttgcggagtggtaagggttagtttccagtatgaaaggtccactaatgattgcgtatattctactaaaaataaaggaaatacgatgaaattgtcagatgccgttaatagcaacgtaacaaataaaaaataccaatttttggtttaaacaaagtaggaacactgctttaagatcaatatattatatgaaatgttaaccagtcattcttagttcttataaaagtgtctgaattatgttctatccgcaataaagagaatttttgtttatttgaaatacaaaaaactaatattttcatttagtgcataatgtttttccgccattgcaatgagggctgtgtcatgtgatgtcacgatgaagacaaaaaaaaaagaaaaatattatgcacctatacattgcatactgtttaaaattgtttatatcttgagtatattgtttatttccgtagtccaatgactttgattttataggttttaaattaatatataggatctcacttatattgtaaaatgtaagggttttatctgggattttttctttaaaaaaatctgaaagtctttattttgcatttaataaagatgctccaaacttatggtctcaggaattatttattactctctgtttggtttttgtctatcttgatgccgacttcaaaagaccataagtttggatcatcctgtagatagtagtttaagacaaaagtattattaactaatcttcctttttgtttattgtatagcagactgttacataatgtatatgactctatagttaatataaatagtataaat

SEQ ID NO: 6332 - DNA, 4225 bp, Diabrotica virgifera
  SmartBlast Evalue=1E-22; Info=Probable JmjC domain-containing histone demethylation protein 3B n=1 Tax=Harpegnathos saltator RepID=E2BE51_9HYME
acgaactaccacctgacgagcagcagcttgaggttctggaggatatttggctgaaagctggtgaaatagaagcagaagacgcatcggtatgcgacgccggttataacgtgaagaaaggacgcaggttccagaagaaagttcgacgtggcaggaagaaattggaggatccctcgtggaagcccataatgcagaaagacggcgacatagcaagtaatgaacttacaggattgtatgcgccgtgtgacagcaaggataaaaaggtttgtggcaaaattgtgaaacccatcaaggatcaaatggatacttctgagttagtaaagactcttctacaacaagaaactgaaatgctgatgaatcaacggaagaaacacaagcacaaagataaagaaagaaaagacaaggatcatcagcctaagaaacataaaaaacataaaaatgaagttctgcctggaacaacaactactattactactgcctctactacacatcccttagtgaaatttgaagagcacaaattagcagattcacaggaaacagaccattcaacgtttgaaggggtaataggtaattctgaagacacacaaaaacccggtaacttagaaactagtaaaaaaatcgaagatattattcgtgcggcagccgaagaacatgaaagcaaccttcttaacgaaactcctcctcttcaacctattccaccaccttcaaccacttcaacaccttcaaccacttcaacaccacagccagtagcttcaacctcacaaactcaggaacctagagcagaaatcgccatggatgaacctcaaacttccagcttcaagagtgacttcctgaaaacatacagaagacctaaacaggggcctgtggttctacctaacaaaatagaaactataaaaacatcaagaggcgttataaccgttgtggagccagagcctgtaatccctaaaccaataccaaagactgtaccaacttatacgcctcccgaaccagagcccaaaccagttcttgccaaacctgccgggtttggtcctaataagtttgaaggagctttcttggactttttgaaaaagcaaaattttcaagagccgaaacctcccaagaaaaatgccacacccagaggacctagaacacctaaaaatactaataaaagtgcaaaggtggatgataaaacattacctacgaatatttcgcagacgatatcgtcacttccaaaagacattaggataactccgacaaatggacctgcgacagtttcaagcaacctaaatacaaatacaatccagaatatttcaactgcgcaggttcctacacttgaaagtcagcaacctatagtcagtgcacaaataccattaatggtagatgcacagcaagtggctagtaccaaacaagtttccatgactaatgctaaccaggttttattagctctacaacagaatttttcacaagagacaattcaaccaaataccagggttcaagaaccctcactacgaccgaatgttcaatgcacgataacaaacagtcaacaaaacaagtcctggaccaacgtttccttaaatggaacgcaacagaaaaaatccgtggaccaacttgtgccacttcggcaggtaaacgaccaaaaccttcagccaacatcacatgtgcctccattagcgtcacatgcgtctcaaacaacgtcacatgcccctcaagcgacgtcacatgcccctcaagcgacgtcacatgcgcctcaaatgacgtcacatgcacctcacatgacgtcacaagcgcctcaaatgacgtcacatgcgcctcaagtaacgtcacatgcgcctcaaataacgacacatacatctcagctgctgggaactatacaacagttacttgtaaatcggtctcagtcagcggaagcttctggacgagtcgtcattaatactatcgaaccagtgaagacaattccagtgactaccgaggtggcatccgtgaaaaatgttattttaaatcgcttcatcaatacagaagtgactcccgttgtaattcaagtgcaaaatccggtggcagtacctacgatattgaactcgaattttgttcccgaagcatctatggagccgacccatggtactgcaggtcgatctttggtattccagtcagacatctcaggttctgaggtggttctgcaacccatgcacaacatggagattcctgccgacaccactgtaatgaagatgccagagttgtcagttccaggaccggaaccatacaccgaatacgaggatatgccgaagttgggatcgccagcagttgccacaaaggttaaccttacggaaatcgacaggcggcaagaagccgttaagggtttgctagatatgtactctgtgagtatagaaaagactgcatccccggttatagaaaaagagactattcccaccaacaaaaagtacaaaccaaatagtatttggaataattacaactactatactacttatagctgtacgcagactatttatgataacaaagatcggttttatccaatgagtgatgctcctataccagtcgctagtaatagtaaggtcatagttgaggcacttccgcctcttaatgatatagagacgtctttgagtgaggaacgtggagctacagatgaagataaaagtacaaatgtaggtgatggatacgttaagggtagagttagttcttcgtctgtagattccataaacaatttaaattcttttttatgcgaaggtaaagataaagttaagtcagtggggaagagcaataaagacaaagattgttctgcagtagaaggtaatccaaaatcttcaaaaaacggaaaaatcggaggagacgatagtctcctccgaaataatgtaactgcagaaatagaggaaaaaaataataagcaaaactgtggaggctcaagcaatccccagacagattgtagtactaagaaaagaaacatattgtgtcattccagtggcaatacaaacgaacctgaagatataagtgacgcagtggctgatttcgacaaaaaaactacagctagtgaagtgacaacctctatagactacagtgaggaggtcaaagaaaacgttaataaatctaaggatagtgcaatgcaaaaatttaagaaccgggcaaagcagtcgttcaacaaaagaagatctaacttgaagaagatagtcaaaatgttccaaaataacaaacgaacggggatgaggaagcgacagtccaaaggtaaacccagggcgtacctgtcgagggtaatgctcggtgtgaaaaagaagaagaaatccagaaagatcgagcagtcgcaattcacgatcgtgaggaacatgtgcgatagcctgaagaagaaattcaaattggttccatccaagaagaaacagttggacaacgaagagccgagtgaaaacctcgactaccaaaaagctgttttgactcctcgcgagtgttatgtagaggctaaggatatttttagtgatttaagtgaggacattcagcagtacttgaagtctggtttgacgctgttcaatgctagttctattccgctggacgagtgtgccagttcgatgtgcagcataatggcaggcactgatgcaagcagagagataaagtctttcgacgagggagaaatcgtctgggcaagacacaaaaacggaagatactacaacgccaaggttatagagaccaaacccgagactcgcctatgtgttttctttccaatagaccagagtttttccaaagacatcagactgagcgacgtcgttggattcgaaacgatgacttctccgaggttgggcgaacggatacagatccgttgggtcgacggcaaattgtatgatgccgattatttgggcagatacgaaattaccacgtttacggtattattcgaagatgaatcgaaaaatcatcttcaacaggattgtatgtttggtctaagagaacaaaacgtcccaaagcgaatacaatcgaaaatgtcttacgccagcgctatgagtcaccgagaacatctatacgatttagagcgacaattgccagaaaaaggcccgttaaacggaagcccgttaaaagtatttattaaagaaaattagttttagggataaagtaaagaaaattaaaattttgttttgaagactgacgttcaacattaataaatacactttttacatacttttccgaatcgtggtgaaagaactcttagataaaattttagtaggtacattctcattaaagttaaagttcttatacataa

SEQ ID NO: 6333 - DNA, 4205 bp, Diabrotica virgifera
gccgccgacacttttaatgtttacatgtctataaattaaaatttataataataccgcatatatagggtgtcaatttaaaaagttgccacactgtatgtagcttattgcatatggtaagccggcagtattgccattttaagtccctatatctaatccaaaagtaaacgtagtatattataaatttagtcgttctaaaaatctttcctcaatctcaaaaatctaagctcacttaccgaatataccgcgttttttacttttcgcgacactattaccattttgcacatcactcatttctggcacagtctctttgttttgtcggaaatacacttttttatccataggaacaggaggaaggggcctggaaggggcaacatctctatgtacaggaatcacatggttgggatatctgttatccacgttttggtaccgcttgtacatgtcattggcacttgcggttagtctagaattacgcacaaagttctgaggagggggatgggaaggtggtacaggctggagctgccccagcatcaccccagatcttcgtacgttcaaagaggggctgttttgatcgtgtatctggccatacatgtcgcaaactttgtccctgactgtaatttgtctaggtactcccctagaataaccatatacaggctcgacaatactttgtcttgaggcgtacacaacattctgctgatcattaggtacatagcctcccatataaccataaatgtcatctttgataaatatctgtcttcgttgctgtatttgtggcttaggaatatacgtctgcgaattatcgaaagacattctcctggaaactcgttgatgttggccatatattggctccaccagctgtactgaattatacctggtaagatgggcaggttcttcaggaatattatctcttacaggacctctgtatccataagttggttcctggtgcacctgcctcgagaaattttgataataaggaggatcttgtcgtacagtttggttactgtacggtctatttgcatatccgtagatctctttcccgtctacgataagtttactagtttgttgtgggtttggcaagaatacgtcgtcgtctatactgtcaagtcttctagcttcctctttccgctgtggcggattttgagtataaccattctttgtaggccaaacatcagcagcaccattaccaaaactaactttcttatattgctgatcatccattaactcccttgaaggagtcgtaaggctgcctctcttgaaaattggtctataaagagcgttatcacctctttgcaccacatctacagttcttctttcaggggcgtttctcctaaactgttgtggatactgattctggtagtgttgattgacaacagctctaccttctggaataggagtaggttgaaacctaccgtaagtctcgacttctactaccggtatctgcgatttcggctctcttggtaaactaaggcttctcctaccatttctttgagatggtgaagagcttctcgaccttctaaagctgataggatcttcggcataaccgaagggcatcacctgcatttgatagtaatacaaatctacgttctcctgctcttttaacttcttaatttctttccagtagtaagcctctacgctctttctcatttcttcttttatcggcgaatgtttgtttgatggtggctgtcgcatttcaacgggagtggatgacctggagctgccttgccttacggaagaaaggtctggattagctagaatcatgctgggagtgggggatctcattgtactgttcaacagtttttcttgtgaacctagtctatttctcatatcgtaaacgggagatccttggacatttctcacgtcataaccaggagatccttgaagattcctgacatcataaacgggagaactttgaacatttctctggatcacaagatgatcaggggttgctcgatgtaccagcctctcctgcgatccaacattcatatttctgttgtcgtaattaggagaaatttgattggctcttggcataactggttctggtgattttacggatagtttttcttgggaactgatcagtcgcattctattttcgtagtttggtgaataatggccacctttttgcagatccaaaagtctctcctgtgaaccaacaatcgcattaacagtcctgttatcaaaatttggggatctttggttatttctttggatattcacatattctgatggcctcggttcttgtgatttagcataaatcatcatattattcttattttcatagttaggggataattggttattcctaacatattcaggtattctcgatataggaggtttgctggtgacaacgaaattacttcttacattatcatttctttgaacgccaatattgtctgggtaatcaatactgatctctaacttctgatgactcgagttgagttgactatttttcttttttgttggagttggagatcgggagccccttaacagctctgtagctatcagcttttcagcactaacgtgatgttgaggtataggagacctcattcgaggtgacataggaccaatatctctatttggtggcagtcttagcttcgtctgttccaacgaaggtgatctgggtggcttctgaactaagttatattgaactgaagcctcctttttaacctccagactgtccagaactgtaccatatgtatcgttcaacgtaggttgggggaatgtttttgctttgggcgaagagatagattttggaaggggtaattgcggtttgggactaatttttggtttggtcaaagagttctggtagggattgggtaaaggcctctctgagtttataggaatcaaagctttgggattcactaatcgtacatcttggatctgtcgcagttcttgtgctctaggtggagtgttcctattggtgtctgcaaatcgaagagacttgtagggactttctgaatcactactatattttttaaaggaattttcccgatcagactccatggtactagctgaagaactagtatcgataaatttgtttatattagctaccttcttgaagtccattggaccggggtttgttactttaactggctgttccttgtgtacaggactgtcaggattttcgaaagtttgttttatattgttaaattcttttacgtgttgttgtgcatatttatgttccatttcttgtattacttttaaaggaggaggaggaattttttcttccatctgtggtatcctagttggctttggaatagaagaattgcctccgctctgtctataaggcgactgtctggtaaaggcactggtctcgttttgtagattttcattatttacattctttttttgttgcaaactctcagtttcttcttttttcttcttttctttgctcccaaataacttcccagaaaatattttccggaaactgttggcgcgtttcttgtctttgggctttccagaatccatcgtgaacaagtctaattcttttcccagcttgtctacagtttctatcgattctgatcttgtaactacggtgatgaattccccagagctagagctgttctttctgaaaacttcgttagaattttcatccctcttcttcgtccttctatccaggtttaggctgtttctgtacttgtatttctcgttggttttcttattgggcaagatgatttcgctcttcacactttgtcttggtttggctaatggaagcttggacttgtttctaatgaactcctgttcttgcttggtcaacttaggaggtggtacgtgctttagtttgggtgtttctgcatcacttttgccactttcgttttctgaattttcgtatttggcttttattgagtctagttgtctcgttggtgacagggatctatgcagcttcgcataagcagtcttgttgatgatttttctatcggtttctgggtctctttgtagtattagtaagtcgttatcgattctcacttgtgttgtgactattgtcgtagtggttagtgattcttcgattgatttggtcgtgctcgtttcacagccgctgtctgtttggttcgctgaactgtcctgcgtggatttttcttcttcgttgacactttcaacggcattttgtcgaactaagatgtccatgctgaagatggatgcagtgtctgactgttagattctccagttctttcctaaacacataatattattttcacactgctgattgaact

SEQ ID NO: 6334 - DNA, 4193 bp, Diabrotica virgifera
  SmartBlast Evalue=0; Info=Iron regulatory protein 1 n=1 Tax= Manduca sexta RepID=Q95UT2_MANSE
aaacaattgcatatattaagttactttttattataaagtacgtcacatagcatttaggcacaaccaaaatattatttaagtaattttattataaataaacatatatagtgtattccacgaatatacgactgttttgcattatcgcgacaacgaacatcttagggtgcaacataagaagtacgaaagtattttgctctaataattactccaataaacaacaatataatttgcaatttactttcgttcttcatattttgcacagtaaaatattcgttgtcgcgacaatccaagagggtcgtatattcgtggaatggggtataagcaacatttctttcaattaatattgaaactagatgaaaaattttattttccatccaaataattttgacctgcctaaagccttacaggtttaactaaaaacaaagtataaaaagtaataaaatatttattaagtcgctaataaaaagatatatattgcctttttcaaaaaccgttacagtcactaataagttcatctatataaatcgtacgtagacagaaacaaaaaccgttctaaaatatattgaatgatggattttaataaaaaaaaatgatcgttcgtatcgacaaacgtatgaagagatgcagtaaacattgaaatataccaaaatagtgacataacaattgttttgtttcagtttcagtatacaacttttacttcaagttaacaaaagacagataatcaacaaaacagcttgttacactgtgtgaccagaagggaggctaaagaaatgatgcaagtgaagtgaagtcaacgtacactcaacatattattggagtcaaaacttacagatgagtggtgtacgaacatcaatgttgaaggcagaaattacagtagcccaatgaccaatttgggatgtagcacctttagaagaagtacagagaaaaaggattatttaccgaagttattaaaatttaaaaataaaatactttaaacctattttgtttagtctatatatctttgattcttattagtacctgtgattttcatgttcagttttcagtttatattgctatagaagtatatatatttttaagatttccgaaccatgttcctaaccatgtaatttagaattcctccgtgttgataaaacaataaatctacttctgtgtcgaaccttaagatgacgtcgaaagcctttcccgtgtcggtggttactttgatgagttgacctggtttgatatctttgggcaaatcgaagctgtagttttctttgccagtcagacctaaagattcggctccttggttcggtaggaactggagtggtatgagacccatgcctaccaagttcgagcgatggatacgttcaaatgattcggcgattactgctttcacacccaataaaaatggacctttcgccgcccaatctctactggaccctgacccgtagtccttaccagcgataatgatcaggggtgtattattcttcttatacctttcggcagcatcaaatacatccatctcttcgttagttggtaaatatatagttctaggacctgccttactcatgaatttatttactaatctgatgttagcgaaagttcctctggccattacgtcatcattacctcttcttgatccataagaattgaaatcttttggtgttaaacctcgttgtgctaagtatctagcagcaggacttgttcttccaattgatcctgcaggactaatatggtcagtggtgacagagtctcctaaatatagtaaaaccttggcgttctgcagaggttttctttcgggtaggttgtgagtcataccatcaaagaatggaggtttcttaatataggtggaagaagtatcccaaggatataccattgcctcaggagcctcgagtttttgccagtttgtagatccaagttgaatttttgcgtagacttccttaaacatagcaggaataacatgtttttgttcgacagcatgaatttcctttctagtgggccaaatatccctcaagaatacatttgaaccatctggtctttgacctaatggttcagtttcgaaatctatatctactctgcctgcgatagcgtacgcgattaccaataaaggactggctaaataattggctctagtattaggatggatacgtccttcaaagtttcgatttcctgaaaggacaccacaacagactagttcgttgtgttcgatggcatttactagattttcgtcgattccaccactgttgccgatacaagtcatacaaccataacctacaatgtcaaatcctaacttttcaagtggaggaataacccccgattcattaagatagtaagtaacgactccggatccaggagacaaactggtcttgatgtatggagcgacgctcaaaccagcagcaactgcattcttagccaacatgccagctcctaacataacacttgggttgcttgtgttagtacacgaagtgattgctgcaatgacaacgctgccgtggcgtaactcatattgtttaccatcaaacatgaattttccaactgcgttgagtttttctggttttagcccgaaacctttgaatccgatcttattggacaagcattctgcgaaatccctcttcatatcaactactgaaactctgtcattgggtctcttgggtccgctgacagaggaaacgacagtcgacaaatccaatccaacggtctgactaaaaactggatcagtagattcctgtgtataatttctgagttgtttggtagctcttaggtaagactctatgacctgaatttgttcctcggagcgatttgtctgccttaagtaatccaaagagttggaatcgacggggaaatgccctacagtagctccatattcgggacacatatttgcaatggtggctctatcggctaaagacaaagcagcgacacctggaccataaaattcaacgaattttcccactactcccaactgacgtagatgctttgtaattgtaaggacaagatcagtagaagtagcatattcgttcaattctccatataacttgtaaccaacaactttaggcaacaacatagtgatagactgtcccagcataacagcctctgcttcaataccgcctactccccaacctacaatacccaaaccgttgatcatggtagtgtgggaatctgtaccaaccacagtatcaggatataaaagggaattttcagtaaaaacaaccctggctaaatactccaagttgacctgatggacgataccgctacccggtggaacgatgagcatgttatcgaaggcttttgcaccccactttaaaaatgtaaatctttcatggtttcgttcaaactccagatcttgatttttttctaaggcatcagccgatcttacaaagtcgacctgaatagaatgatcaataaccaaatcagcgggacatcttggattaatttttttaggatctcctcccaattccttgactttgtccctcataactgcgaaatcgactacggcgggtacaccggtaagatcctgtaatataactctcgccggtttaaaagggatttcaataccgccctcgacatcttgattttctttccaatttaaaatgttttgaacatcggcttctttaatagtaaagttatcgcagtttctgacagctgattctaatagaattctcatagagtagggtagttgatcataatttggatgtagttgagcgatgtcataatattgataagattttcctgctacttgtaatgttttccggtagttgttaaaaggatttggtccgccttccatggtgtcccgacgctttgtcacgtaacactggaaaaattaaaaaacagatcaaacactgaaccttaacctcaccgtttgattaaaataacgacaataaattagatattcctcgagtcgcactaggtaatactcaacctaatggatatttgcatacattaagcgctattatagttgttttatcggtattttcgtgagagtggtgtgggtactgtttcttttcctttatcaaaatattttcaatctggttcaaggttcttgcagctgttgttaatgaaaagtaatctgctgaaatggtttgcctcgatcttgaatgagatgttaatcaattattaattaactgttagtccccactaaaacaactaatggaaaatattttatttataataaattttcatgttggggaaaaggaaaatatactttagaaaggatggat

SEQ ID NO: 6335 - DNA, 4169 bp, Diabrotica virgifera
  SmartBlast Evalue=1E-114; Info=Calcium-binding mitochondrial carrier protein SCaMC-2 n=1 Tax=Camponotus floridanus RepID= E2A480_9HYME
ttcgcgaatatctgtgggcttgtctcacgaaccccactcgaaaaacaccagcacttcgctggcgatggcagctaggtgatcggcaattcggcattgctcgacaaaccggtagatcaagcggtcgcatatcagtcaaacgcggtggccgatttgtacaaagcgcgaatctctttcggctttggcaaaaacgtgctctggtttcgcgtgggcagtgcttccatcttctcaaccgtgcaataattgtataattttttctgtgatagtaatttaataaaacatcaagatgagtttcgaggaaaccccaggagccgttccggacatcctggaagacttggttttcgtctttagggaattaattaagtacctggacatcggggaggatatgaacgttcctgatgacttcactcagaaggaaatgcaaaccggtatgtggtggaggcatttagctgctggtggagtcgctggagcggtatctagaacttgtacggcgcccttagatagactaaaagtatttctgcaggtaaatcccagcagagaaaaaatagctgtttgttttaacaacatgctgaaagaaggcggcattaaaggtttatggagaggaaacggaatcaacgtgttgaagattgccccggaatctgctatcaagtttgcggcgtacgagcaggtgaaaagactgatcaaaggcgattctcagcatgcgttgagcatttatgaaagattttgtgctggcgctctagccggtggtattagtcagacggccatttatccactagaagtactcaaaactagactagcattaagaaaaactggccagtataagagcatagcggacgcagcttacaagatttacataaccgaaggatctaggagcttttataggggctacattccaaatatattaggtattattccatatgctggtatcgacctcgccgtatatgagacattaaaaaagaagtatttcatgacgcattcgagtaacgaacagcccagtttttggatgcttcttgcgtgcggtagcgctagcagcaccttgggtcaaatgtgttcctatcctttggcgttggttagaacgagattgcaagcacaagttaaccatccgtcttcagatccagcgggagcgacgatgaccggcgtcttccggacgatactggagcgcgaaggcgtatgcggactgtaccggggaatcacaccgaacttcatcaaagtcatgccggccgtcagtatcagctacgtggtgtacgaatactccagtcgactattgggcgtcaacatgacgtgatggcgcttaggcgacgtagcaaggaatttttttattttcacgcggctacgcctcacaagctggtggggcggagtccagaagacctgccgaatagaaatgcgattctctgtcggtggacacttaagttgttagacgaaaatcattccaaacacctttttagacttaccttttatagaatcgacattttccaaaagattttttaacgcatttaatgtattttcacgatatttattaatacatacgttacatcaactagtacttttatttcatggaattacaaacatcaaaatttcgactgctataacggtccaaactgatctgattactttaccaccttagacatttgtctatacttaccagtgacacattccactcatcttcttcgattctacgtgccagtatcgtaagaatacataattttcatttgcatgcacagtcacatcgaagttattttctaaaatatatctacaattgatgtgtacctttgtacgttagtaactacgtgaaattatctaagtgtttaagaaacgtagtttagtatatttaagcgttatcgacatagaagagggaataatataggaaaactgaaagaactttagataccaatccaacaaacattggcccaagaaattaaagaaccaatggaagaatcctaaaaacgtaaaaacgaatgaaaaggtacattaaggaagaatatttgaaaaaaagacttgaaagagcagaggctcagtacaagtaccaaataataacatagatggcgtaggtgacacgagcgtagaacggctacagaatgaataacatgacaaatgatacagtacaggtacacagtatagacatcacacgacagaacagaaaaccacagaacgatgacgtaaaaacagacatgatatgacagcagacaattgacaaatgatgtcagcctcgccatcttgaaagggggagtggctaataataggtaccatcgaaatagttacagtgtggttccttgatttcttggcaattcctttttcacggcaaaaatgccctatctttttttcaaaaaatgtgtttggaatatttttgttgaacttatttatttttttgacggtttccgtcatctagtttaatttatttatttttttaatatattaaatagatataggctttaactacgatggctgtatagccgttatttttttttataattgttgttatattgtaagggtgtagtctgaagagtatgtttttgttaaatcttagtttaagaactaaaacggagacaacaaggataagtacacctttttatgaaatcattcgactacatgagatcatagttgttgctaatatggattatcgtgccaaaatttatgtatttaaaaattatgggcaaatattatttgtataaggctgtgagacatatgctttcgagatatatcatttcccaagcataaatgaacctctgctacacacatacacatgtcatgtgtcatcatactcatacgatgaaacataaaatcgtccaccattttgtgaccaagattataatcttactatgattataatgcttacctattttagtccaagatccatattatagtcgctactgaacatgcggagagggcgtggtttacaatgctgttaagagagagagagagagaaaattttgattttaaaatcaattgtgaaacaatttactatctctcttacaacaagcttatttaggtattacctaaggcaaccaatttatttccagtaaaaatatgtaccatttatgtctcataacatactttttgtacagaaaaccccaaataattgagtttactgccccacgttgggcgccgaatgcgtaatatgttaaccatttgacatatttgcagcgaaatagttttcatgttcactcgcacagtgttgccaaattctaagaagaaagtatatttggtaaattgtaactcgacagcttcaaattctgccaaaaaataaattgcagatagtaagttgtttccttggttcaataattaagtatgttaaaacggtttaatatttgatgaataattcgacttctgcacactatttgatattcatatttattttaaaatattctgattgctttaaaacctaattgtatcaaccatggtatcaactgtgctttaactgcttaggcaacttaaaaatttgaaaataattaaaatagaagaaatcgtttaaaatagcagctacatttcaagttttcccgttggtcatttggactcccagaatgaaacgtcaaataacaggaatattaatttaaaaaggtttcttaattttttttgtctcgttaattgagtctctctagtttttatgaaaaaaaatgtacacttcagaaaaccctacatactcgtgtatttgacacaaaaatgttttgagctagacgcgcatggatggttttgacaccttcccatgtgacgatccaccgatacggtggctcattgcgcatgatcggtgtatcagtgttccatgcgcggttgactttacctcttcgtgcctactatttccatggacgtgacgtttttgtgtcgaatacatcagcttgtttttagtaaaagaaaaatgtttaataaattcattctcaaatgttcgatcccaacaccttgaaaatgccgcttcgttaaggattcttgtagtttttgaaattattctcaaccgtttttgatgtcgctgttttcaatctacctttttgtggatttttgctccagttttaatctttgaatgtattacacgagaaagttatatttatgaatatattatataaaattccagagagaaaacaagggaaatgtgatgtacttaatattttaataaagtgaaattatggtattatactgtagaatgtatttgtacaaaaaaattgaaaaataaaatgttattcatt

SEQ ID NO: 6336 - DNA, 4126 bp, Diabrotica virgifera
  SmartBlast Evalue=0; Info=Niemann-Pick C1 protein n=1 Tax= Camponotus floridanus RepID=E2AJ59_9HYME
aagttttattttaaaacaataaataggtataaaaaattaattctagtaacagtacatatatacacttcttaaacatcaataggcactttaaaattaaagtcctcacttaagaatccctgatatattcgctgacacaaatgtagaaaattggtatgacagatccgttcaaagtttgaagacgatacaaaaatgactcataatatcgtttatcttccaaaaaacagttttctacagttctttgtggaatccattttcctttacgtgtgtatccttttctgtatccttttctgctggtgtagaatattttagtgcccctaagaaactgagcagcgctggaaggtacaccaatccatgtagtgctcctattatcacgatgcctagatacattctgaataaaatatccgaaagacctgagaactagcaaacgctaaaatgataataccacagaattttgtcagggttattccgcttagtactttaattcctgtatgcgccaaggcatctgtcgctcgatccagggcattatgtttcgcagaattctcaaatgcgtaaaccatatgtccacaaaattcaattgctatacccacactcattactaaattgaccaaggagatagcatttaatgaaatgccccataagtacatcaatcccatcatgtgagaaatgatcataattgcagtggacgtcagtataagcgattgcatgatactgaatccagtaaatacaaaggttgtgcccaaaatagtcgccaaagatacagctaatgaccttagcgtgtcactccagatagtgaggtattgttcgaaatatacataaaatacactgtacggaaagatttcaacacctggtagatccagagtctttgttaaattttttgatatcgctcttgcatactttaaagcatcaatgtagtcctttgacttttttaagaacagtgtggtaccccataatgtttgaggcaattatatctgtatatccattttcatcggacaaataagtaatgccgttagcatatgctggatgtccggctttggcgcaacttggattcggattgtcattcaaaaagtgaggcagatactttcggtaataattgtactggcttaagccagtagttttatttattaaagtgaagtaacaaggatcgcaatcttcagagctgtatgaatgagggcagaagtagttggtgtccttaaagtacttgcaacagctctcggtttcgctccagtccttgaaatcgtctaaccaagagttggcctgagttgctattcgagttaagtctggctgaagttttgccataaatatctgagtactaatcgagtctggtgcgcagcccatgcctccgcaatatttataattaacttctgagttaaaatagtcgacttgaccttttgttacccaatacactggtggtccaatcattagcaggtcattcatgtattggaaatatttcaatacatgactgccttctggcatggagagttgttgttccagtccaacttctatcattggtgaaacaagaattgacattatagtcgttatggtgaaaaggcatatcacagccagtctaacaggatatttcattataataggtgtaacatgatctttccatgagttatacagaaagtctttagattctaaagttgcatccctcttaactttaatgcagtaagccagatctaaccgattagcctcatatcgctgttcatccaaagctaatagagccacaaacgctgttatttgtaatataaaatcaaacagaactgcaacagtagcatacagcgcaaatgtgtgtactgccggcatactagacagagtacctattgcaaaacaaaatatctcggaagagctagtaagcaacatgctgggtcccacctgagccatggtttccgctatattttctggaatgctcttgttgggatctctttctttcctctggtgagtttgcactataataaaaatgttatctactcctacagctagcaccaaaaacggtattacttcaatggttaacattgtggttactatcctaaaataaccacctagtccaacggcgcaaccaactgagctaaagacgattattattcctccaagacccagagaaaatttggattcaagcaaaatgttattgaatgaggtgaattttcccagagttagaataatgtagatgaacataacggtgtaacttataataactgtccacatggttgatttggaaagctcttcgatctcatcttgtatggacctttcggcactgaaagctattgacatgttaccaggtcgctcacttttgtcccagtcttttaaaaactcaatgaatttcttctcccacaccagcgtatcttggatctctgaagactcaacactattctttgtcaaaaatgttaatgacactccaactgcgtccatgtaatttttatcttttgttcctcctcccaaagcaatgccaggaagaattggtcctccataaggcgctaaacagttcatactatacggtgcctgtatacatccgataatggtatcatatgacttggttacattagttgaaaatgtatctatatcgttttcgaacaatcccaacaaagacataacagtacactcatttgtagttggtgttcctgaatagatcgttctcatgggagcataacatatatcttttagtcctttagttaccgttttgcctttagcgttagttgatacaaatgtaatgttttcaatctgttgctgtagcttgaatacttcaaccaaaaattcggcattaaaagcaggacccatggtaagattttcatcatactgagattcgtggataaatgaatttaatcccacagttttaataaaaatttgattggttctgtagaacggtccaaagtatgtgtcaaaaaaggtcttctcgattctgctttcactattcggtgcagcccaaagttcaacaggatccacagtaaccttaagcattccactgccagctgtcaaaatacctactgtggcagcgcacatgactagtactttgattctttccttggcaataatatatgcgacatgatagaaacaactttcaaagacatggtaaaccttatcatttgtactctttactttagctgcacagtttccgattttccataagcctttaggtaatataaatctcgtaagtataaccactgttattgagcaagagataacaacgaataaaaataagcatgccaccataaaggcataaatgttaaaaatattccaaatcagaggttcctcttccaatttttcatatttcacacctttgcaattagccgggcagtcactacaactgcaggcacttttattcggccatgcctggtcacaaggataagcagtgtaattgataggaatatattgttcgtatacttctgtatcaatttcaggattaacgatttcataatgtattgtgaacggagctaccatattgtctggattattcataaaatcgaaccatctttgcggagtacaccagagagcgccgtaatttccgcaagaacttcccattacactctcgccagtggcgggtaaagagacgtctttgcaagaatcaaaagtttggttgatatatttttcatctatatatacagtcacatcgtccgtgtatatttgccatgtctcaaaatcaatacgggtgttatgatcctttacaaattcaagttgcttcggtgaacatgaaaattgacagaatatagtttccaaatttgtaatgcaagtttcacacctcttaaacggggcagcacttgccaaattatcgcccaatgtcattacttgatctacatcacagcacaggtcgattggttctccattactatcaacataaaaagggcaatactctcttaggtaatcaacagctgacgtatattttgcatgcgatgtgtttaatggtttgggctcgttgtccatccactttacgcaattctgagcatgacccttgtcgtctttgtgacactgtccataaaataaacattttgctaaagtgtttggtattaaaactagaataaataggcttgatatggaattgtagaataatttactgtttctaaataatagctccataactgataagaaaactaagattcacattagagactggctcagatcacacacgacgatgatt

SEQ ID NO: 6337 - DNA, 4111 bp, Diabrotica virgifera
  SmartBlast Evalue=7E-82; Info=Novel protein (Zgc:85971) n=2 Tax= Danio rerio RepID=Q1L9A1_DANRE
aacaccagttaagtcaccagaaaagcctgtggctaaaactccagataaacctgctgctcagaagcctgaaacagtagttaaagtggaaaaacctgcaacaccagttaaatctccacagaaacctgtcgttaaaacaccagaaaaacaagctgctgaagttaaagttgaaaaacctactacaccagtggttaagtcaccagaaaaacctgttactgcaactgccaaatcaacagaaaaacctgcaactgttacgcaagcaacagcaaacaaaccatctgctgttgtttccaaggcgaatgataaattaagtgctgaaaaaactgtaaaaacacaagaaaaacttcagcctacacctaaaccaccagtagagattaaaacagaaaaatctgctgctgtaccaagcaagttgccagaaaagggagtagctgcagaaaaagcatctaagaaaacaccagaaacagttgttattaaaacacaagaaaaacttgacgacgctctgaaggctatagagaagaaaaaggcatccaaaggtgaagaacaagctgatgataaaccagatgaagagaatggagaacaggcagataaagaaacccccatggaagtacaagagggatcaaaatctcctgcaagatcagatatcagaaaatctaagacatatgaaaatgacaaaaggagtcacaaaagaagacgaagtagtaactcgccagaaagcaaaagagatgaaaaacgaagacgtggtgggtctccatctagagatggtaggagagcaaggtcaccacccaaagaggatgagcctgcattggatgctgatgtggttcagcttagttggtttgattccgatcttaatcttgaagtagacaaaggtacatttttgtcagcgaaacctttgaatgaaggcgtttttagttatgtgtgggcaggtgctagagccacgcatggtgtgtccaatggaaaggtttgctacgaagtaaaaattactgaaaaacttaagtgtgacacttttgaattagagagatctcatagggattacagaagagaaaggacaaacaaatctgatagtgacgaaaaacgtgatgaaagagataaatcatgtgaaaagaaagagaatgacacagaaaaagatactgccagtgaaaataaagaggctagcctagaaaagaaggaagagtccatggaagttactgagagtgaaaatgcagaaaacaaagagtctgcagctgataaaccgccggaaagtaccgataaaccaaaagaacccaaaggagaagaaaattctgatgagaagtcaaagaaagaaactgatgagaagtcaaacaaagaaactgatgaaaagccaaacaaagaaactgatgagaagtcaaacaaagaaactgatgaaaagttaaacaaagaaactgatgaaaagccaatggaagtagatgagaaagatgataaaagcagtgaaaaatcagaggctaccgttattccaacacactgtgttaggataggatggtcactatcaagttcttcattacaattaggcgaagaaaaacattcatttggctacgattcatctggaaaattcgttacagataagaaattttccgactatggagtaacttttgatactgatgctgtaattggagcttacttggatattacagaatcttccataattcttcgattttcagttaatggagaactacaacctcctactgaaatatccaagtcagaaatgcctgaagattttgtactctacccacacattgtttctagaaattatgcattcgaagtaaactttggggagaaggcagaaccttggtttgcagttccatcagaacttacaaattataagttcattagtaaagctgagaataaagtttctggacccaccagaccagaagctaaatcagaatgtgaggtacttttaatgtttggtttacctgcttgtggtaaaactcattgggtaaatgaacatgtagcacagaataaggataagaaatatacagtaataggaaacaccaccatgttagagagaatgacagtatttggggagccctttaaatccaaatataaaggcaaatggcgtatcctaatagacagaatgcagcggtgtataaaccgattactatctacagcacctacacgcagaagaaactacattatcgatcagagtaacgtgttcgcatcagcccaaagccgtaaaatgcggccgtttgagggcttcaagagaaaagcagtcgtaataatagttggagatgaagagcagacaaagcgacaagcgttgcaagaggaacaagagggtaaagagatccttgacagtacaatacttggaatgaaagccaatatgactttacccgaaactggagatttcatagaggaaatttgttacgtgtctacggaagaaaatgaagctaaagaaattgttaaaaagtaccacgaggagggaaaagcagcattgaaagatgagaggagggacagagaccgatccaattataacagaaatcaaggcaggaattaccaaagatcaggtggttataaccagtcctatgacagaagaaattggcaatcctccagacgagatgattggaaatatgatcagaggtcacgagattacagaggtggtagttacgatcaaagatcagggggtcactacggccaaggaggttatgacaggtatcgtagtggtggaagatcagattggggaggcaataactattcaggccgaggtcactctggtggttggaatcagcaaacttttggcggtaggagtcatggtcaatcatggggaagtcaaggctataattcaaattcaggtcaaagacacggagggtatggggaaagaaattggaattatcatggacaaagtaactggaaccagaagaagtaatccagtctgttactgcaaacatcttcgggggtataacattaaaaccaaattttattacagaacttcaatattgattctgataatttttatgttgttaaagtaaaaatgtttttaaagagggagccatttttaaaatagggatatcaacaaccgcacccataccaacaatcacaacagcaaccacattttccaatgcaaccaccgcatccgatgcgaccaccccatccgatgcgaccaccgcatccgatgcaaccaccgcatccgatgcaaccaccgcatccgattcgaccaccgcatccgatgcgaccaccgcatccgatgcaaccaccgcatccgatgcgaccaccgcatccgatgcaacaacagcagcagccacagcagcaacaacaagaacaaagcggtgctgttgcaagcccgtttgctcccagtctccaaccaatcgccccaacaaacagcggcagcagcactgaagaaacatgggcgaaatttgccagggaatatgctcaacaccaacaaatgagacaagctgcaacttttcagaatcaaagatactaaattaaatgtatggttagtgtattttctaaaataaactagaattatgcttttaatagtttaatcaaagctctccttgcttaggaattgctgctctttcctataccatttatgttctgtcatttttcttttgcccatttttttgcattaaattatacatataatgctatttctgtaagtaacaaatttaattttgttacataattacgttgttttgaatgattctttgtattttcaattattaatgttttaattattaaagttattttacaattatacatgtttagcagattaatgaatctttgctatatgcatggaatatgatttatatttgacttatgcctagttgcaccaacagatcttaagcttaagggagcgttcaagtattatgtaacgcgatttttgacccccctcccctctacgtaatgcactgtaatcggcgtttaactattacgtaacgcaatttttgaagatttttgacccccccaacctgcgttacgtgtacttgaacggtccctaagacgtgccttaagctcaacttacgatacatacatatttatgcgttgcaccattgggtattagatcaatttccagcttgccacaatggattgccaagtggattttgtcttcaacttagtctcagtcaagacgtgcttagataaggattgaaaattggacagcgttgtgcat

SEQ ID NO: 6338 - DNA, 4093 bp, Diabrotica virgifera
cacatattgttattgaagaaagttttaatttaaactgtatctttcattaatcctataattgcctcaactgataaatatactcattaagatgcatgattataaaatcgaaccgtagtaaattatagttcgctatttacatctttaaatgcatacatatcagtatatgagctagcaacgcccgaaaacacatgactttagcatgattttagttcgtcaaggttgcatttatcaccaacaccagagatatgaagaaaaataagataaatataaaattaaacgtagaagttaagaacgtcgtttgagatgtaggataggagtgaaaatataattttcgaaaataaagatactgaccaaatagataaaatgaagaaattatggagtgagtgctagatggatgagatgtataaaaatatgttcaaatagaaaaaagagcataaactaatttataatcttaatttattcttggcagaaaataaggaaaatacaatcagaatctaaaatagttttggatttagatatttataggaaaatgtgacaatcttgttccaggtagtaaacacaagatctctcatcagacatactttgcatatatcttactggtatttatcggaagatgtgatagtttgagccatgctaaaatcaagtgatgaaaactgtactaggtcttacgactatacatggaaaaaatttatgtgttatttctacctcttatagccaaacattgtaatgctttatgtggaacatacaccaggtagaaattccctatccagtaatttttaaattgtctatattaggtgactaaaaaaaaagataaattactttttacaaacaagtaaatatgattaatatgtagactaggtatgttttatataaataaattttggaaaatagataaatatattacaatatagatgtaacaattagtatcaaacaaaatatatacagtacatctaaaatctcgagtaaccattattaagaaaattaaaactgcacaaatcacatcatctgctcagcaagagaatcaataatttaggtatttatgaccaaaaaaacatttagaagaggaaaatgttattcttataccaaacacttttggctactactactcatctgaataaatattgctttatagattatacaacttgcaaatactttcattctagcttaaaacttcccaataatatcaaaataacttatccaagttctaaaaatcaccacaagcttgtgaactgcaacataatctctaagggttataattttttttttggaattttcctctttttatagtttgataccaaaaataacatatatggtgcgttacgttcaatggtacggagcctactcagaactcaaataaggctattaaaaatttctgcaaaattacggagtagcggctacaaattgaaatgatttagacatatacgaggagtgatcattaagtttcaggacgttatgaattgcgtggcaacgttgaagcggagaacagtgcggttcgaagcattgtgtagcatacctattctgatttttccatactcaattgctaaaaagtttagatttttaataagagttttgtgtgcttttcgcatatcttgcaagaaaaaaaaacatcgggtttgtctgtttgtcaggtaaaaaataacgtaaaagtgaaagttgctcgttttgtcgactggaacggtgtgaaatgaattcgtttcatgagttgacacaaggatccccaggtggaacgggatgcagcactatgacaacgcccaagtttatcttgtttcctgcacaaaacttcgaacttgtcatccttcagccactctacctaccacatgtagcccctgaacatggtcaagatattcaagcttttgatttgaaaatagcatttcacaatcagttcttagggtccttccatctgtgcaaaccacgttgcgagaagtgtaaacgttgcaaaaaacgagtaacctgaagagaataatgttgaatgatttataatatttataataatagttgaaagtttataagcattagtcggtcaatttttgatcaccccttgtaaatagtaatgcaaattcctgctttaacttacaattgaccaccattttatcattgctatacatcatagaaaaactattactttgaaatagacttatttactatttattttagatcgaaactccaaatacaaaataaacatgatgataaaaagtttagagaattaagaactattaaacgagttattaaaagttttaaattttgtattggtcaacttttattccgcaaataattaattacagacagttgcaaataatctacctaaaataggtatagggaattttaaaaaatggtaatatgtttaaaattaaaatcaaaagcaatccattaaaaaaagtataggtgaaaggattgatttatcttgagacatccgtgtttatatcgtgaataattttattattcttatttgttttctagtagacttctttccgttgagcatgacatatcctgtacgtgatgctcaacggtttcttcacagtaccctgtacattatgaatgctcaatcaaatatataaggataatattaaaatctatgaggcacaacattatttgatatcttaattgaagatatatgtatacaaaaaaatattacaataaatatgttattggttaaaagaagataaaacagtaagataaaacggtataaaagataaaatacagtgggtcaagccacggcagaataacgtaataacgagtgtcaaatttgaaataggggatcaaaaggatatgagtgcatttatgattgaaaaaattcagcttgagcaaaattaaaaattgctaatataagttttaagaggcatacagacgtgtatattagtaaaacattcttcaagaaaatggggagaaaactcatgaaaataagacaaaatgtgagaaaaaatagaagaaggtagcagaaagaagtaaacttgcaaacgcgtggaacggaataaggcagcatatgggtattggagttctatttttcacaactaaacaagaaaggatggctggtctacataatggatgcaactacattaagatggctacaaccaaacttatctaacaccgcacattgccgggaacactacaaatactaaggaacattttaaaaattttaataaaggtcaaaatatattaagattatattccagattaagatatttaaagcaccattaggagaatatagtatatattatacgtatatatgtttcaatggacactatttgatcagctctatggtacttacatttctgcagtgacttggcgaataatacaaatagtttttacaaagtagtttctaacaatagcatattcatagtttttaatgtctcagtatacaatttagcgtaaatttgaagaaaagatcttataaaagaagatttataccaatatttaaacaagattatgcacatagtttacttatatcaagctgactagtactgattgagtacgaaaaattatgttaatggaaggtgattaaaacgatcaaaaccaaatctaatactgtactaaaaacactttagtcttgatcgttttgttttatatttgaagtacaaattatgacatctaacagtcccatagttttaaaccatcctttattatgcaggtaaaaaagccaaataaaaaatataagttgtagtaaggtttaattgtagtggaccataaattattgttttcttcaataaaaccaaaataccaatactctcaagatccatttaaaacgttggcagatattttgaaggtaaaaatagaattataatttgccgatagagggaggtttagagtcattgacagatataattgcaataaattttgagaaacgatttaattttttttaagatactttgaaacaactgaagatatttggaaatgatattattcgctgtgagttttctctagctgatagataatgggtcctatcatatatcatctatatacaataattacatggtgtaatctcaaatttttgaagttgtacttctttaggcgcgatttcattgagggtgaaattgtattaatctgcgcgcatgcgcacaccgacagtatggtattggtcgttatacggactctgatt

SEQ ID NO: 6339 - DNA, 4086 bp, Diabrotica virgifera
  SmartBlast Evalue=5E-33; Info="Vacuolar ATP synthase subunit S1, putative n=1 Tax=Pediculus humanus corporis RepID=E0VV03_PEDHC"
acctccctgatctgtaataattcactcaataattttgaggaaatacaaaaaatttgtttcaaaactgacactttttgttaaaacaaaaaatttatacatatattaaagaaccagctcttaaaattctttctagaaaacattgctagctcttagactaatactacaaattaaaatttacctatccttaacatttcgttgaaggtgttggtaaatatgatttctggcaacactaagttattggatggtaggtatgtaactactgagtttagtactttgtacatatttattaccagttgtgaaatgttctaagaatctctaaacctaaaattttgtattttgtgttggtcaattttactattttactgcgcaagttaggatttcataactggtaaacatttgagtactgcagttttagggcagagttaatacattaaaatcgacttaatttcttcccacgaaataattaattactgccaaaaaacgtcattaaaaacaatgacaataagaaacaaatttcagtctctgttatttcgggggtgggacgtaaaatagaccaaaggtttatattatcgtcttcaatttttttgagctcatgtttaaaccttcaatataagtgctatattgaagtgttatacttagaagaaataaatatgataactacggagattagaaaacatttttaattaatacaaaaatttgtacgagagaaaatacacttaacgattgaaaaacacttgagatcttgaaatagaacaaaaggaatttgaaccaatggtgatattcaactattggggtggacgaaaatataattgaggcgatcagagcaacagtggcccaacccacaatccacaaccttaccaaaggcttttattaaattaaagttatcgtttattttcagattaagatgggctcaagcattggttgcttgagccactcttcttctgaaaatacttaagtgatagctttaaaataataaaagcgttttagtaaaattgtggaccgtgggccaggccactgctgctctgagcgcctcaattatgaaagcaatattagataatattagacagatattttaaagaaaaatttcaaataggaaatatggagccattctgtactacaagctgaaataattttgactctgaaagttgaacacctaaagaagttaattatttggaaaccacaagatagaataaagagcagaatatttagaagaagaaagtgaagatagaacaatcggaaaaagaggtctgagtgataatttcagcagaaaggtcaaaataggcagatgacaaattgaaatctgaaaatgtgaaaagttctaacccaatgtagtcaatggcatttacttttaggagaaatatgataatatactggatgtaatggcaattacttattagaacttttcaaattataccagcagatataaacgacatgtatatgctgcaaaaattgaggacactacttaaacctggttaaaaaatacgattttaatgaattagtgaagaggcaaatattcttaggtccaagggaaatagaagaagaataggcagttagatctacagcacaaaacccaaagagacccatatataagataagatgacatacataaaagccgaattatcacaatagcttatcatcctccaatatagatcttatcaggtgaaataccgagctaaatttggggaaggctaagagataagtcatcgcttacagcttatattgctaagcaagaaaggtgttaatataaaatacactacacttcagcggttacttgttcagaatactgttttcatttaataaagcttgtatgttgttccaataagtgtgcaggtcttctaactatgtatagaatacttaaatctttcagtctgtaatatttttcttcattgttttatttctggcgatttcatgattactacagatatgttatacatatatctaaaggtatgtatccattacgttggtgctccgtgtggatacacgcgctcctctacatataaaccgccaccgattcaaccaggcgatctcaacctcaagcgattgtttatatgtagaggagcgcatgccgtatccacacagagcaccaacgcaatggacatgtaccttaatactgaggctttggagctattgaggatatgtgagaatttcatataatttcatatttttcatgtatgaacacccatatatgttctgtgctgctcttacaaagtgcaggcacaaacatcccataatggacggatactcaaagaaaatgaagtactcaatgaatactctgccaggccagacctgaataaacactaatttaaataattattgaagtaaaaactagctaactttgtcatacctattttccatgtcaatatgacaccctgcacagcttattggaataaaatagattcgattaattgtgcacacattttgtcaggtactggaaattatacacacataataactgaaataggagatcaaactgtaataataactgacagtgaaaaatgtatgacaattcatttattgttaaatcaactttatacatgaaccacgggtacaattattaaactaaatggaatacattgtatacatatacacattattagagccatttttagtatagtgttcattgtggtaactttaatacaaatgtgtttaaagtaaactgtgacattactagtaaacgattcaggcttagcaaaatagctttataatcagcgattacaattattccgcatttatagtaatagttttgcccttagcatcatcaaatctatccatcgttctaatgtccatcatcattgtgatgccaatggacataatgatcaacaagattgttgtgacgaataaaccggaccaaattgggacagtcgtgaagccaacacagtcataggcgtcaccgaatttaccactggcaggtccatcaaagaaaagttgaatttgaaaatcttgtaattttatgctgaatccatcagtggagaagtactggtcaccacagtggtaggaaaatccactgacaggagcatagatgctggcagttgatttgagaaccaatggattctttttctgagtatcattagagaggaatgctgtaatattctcatattgctcccagtatccaaaactaacgttatttgcgaatttcatctcgagattaaaatcagggcatcctaggttaaggacaagtattcctgtatcgttcgtaactgttaaatttagattaacttctttgttttgtacatcacccattgtgtatgttgaatttgagatatatagatatgcatttgtatcattcctgaatttgtctgatacttcttcagctgtctctccggctttagcagcttcagcattttctgccaccattaatgatcttgcttgtctagatttaataacttcttcagatacaacccacgatgtgtggtgagcagtgtacattcccaatacattgtcgttagtgtttgcaagatcttcgtaaattttagatatagcagcatcatgccttttcaacatatctgttcggctttcagaatccttagcatcgttaaggttaacaataagtatatcagtctctggaatttcgaagtttttaccaaacttgtctagaggaacttcagtaactgtaacatccagatgttttaaagccttgatggggttttgtacatatggtaaataagaaactttaaatgattttgtaagttttgctaaattagagtatgtcaaacctctctcatccttttgagcaaaatcttctggacttaaagtttgttcagcaaataagactatcaatggatcatctttcaagtactgctctatattttctttaaaaatgtcttgactaactttatttaatgcaggaatatgctcgttggttcttttatttgaccaaatgaaacatgggacaaattctgtagactggactaaactaaatagaaaaaacgttgctagaaagaacaatccacttttactcgcactcatttttggaaaatttcttgtaattacggtgaaaagaggacaactagaattgatcacgtgaaaatttggagcagcccaacatttgacaatcagatgtgatggtgacggcctgcgcttgatttt

SEQ ID NO: 6340 - DNA, 4052 bp, Diabrotica virgifera
  SmartBlast Evalue=1E-167; Info="CG2930, isoform D n=2 Tax= melanogaster subgroup RepID=Q8IRT1_DROME"
tatatttacaacaatatatgtacacaatgtaaaaatatatttgttattacagtatttataaatgtatctgtatacagtaacagccgccctactagacacataggaacattgagctattacagtcccggatccttcacttgttgcaattttattttatgtctagttacgtttagaatgtcagaaaatgtatagaaactgaatactaacatggaaagttgacatttaatagatcagctgtatttgacatggtatttgaagtggtaaagtttgacgtgtatttgaagtggtaaaagttttgaagcattgtaatattcttggtgtttaaaaagttattttaaagcagagtaacaataatattaactaatgtattttttgtatggaaaaacaattattattttgaatagttctttgacagtagtaacatgatagagatgaaagtcacatctaagaacagaccgggttagcccataagcatagcaattaggtacctacccatgtgtcgagtagcgtggcgcttactgtttatgtatatataatatatacaaaacaaattgtggtattttaactgttttataaaaaaatatttttgttagagttccttaaaaacttacttttacttcggtaatactttcaacttatctttaaaaatttccaaaattgtttgataaaatattgttttaatctttttctcatgagcatctttcagtgcgtcacgcagtttttcgatttctttctaacgcattaaattgtatgtgacagaaaaaaaggcacgtctgttattagagacatttataacatttattctagttgtcgatagatggcgctataatctaaaaaaggtatttacgaatattatattattatctacgaatataatgtacaatttataagactatacaaatcaaagaaaacaccattttataaatgcaataaacaaaattgatttgtttttatgccaaattgcattaaaatgtgacaactgtcagatgtaactaaaatgtcgtgttagaataaatgttatgaatgtgtattatcacggacttacctttttttctatcatttgtgacgcactgaaaaatgctactgaaaagaactttatccaaaagaatttcatgttataaagtatttataaatctatttttatatatattttaacaaaattttcttaaattctataattttttatataggtacactttctttaatgcacataatgctattgttcagaatttacaaatgttttcaatctggaatattatataaatatagaaaatctccaattggaacctatatacagtcttttaaggtcttttaagaaataaagtaggtaccaacagtataccaaaattacacatcttaaaaagaaataaacatttttggattttttaaagatagtcatttagttgcattaacgtcaataaataaataaagtcagtcaacatatttacatttctctatttctttcaatactgggggtagtgtaaactgatatttatacaatatgtactaaggtgttctatattttatagtcaaatgcttttaactaataaataaaataaataactacaagaaaaattaagtgggataggtactataaagagggtaagctagataatctgttatcttgtacaagatcactccaattttatgttaacggtatgttatctaaatcttgatttcttgattattaaaagatcagtacacttgttgttaatgtggcccccaaacaaattaaattttctcaattgaaaattcgagttgtttttcttaagcattaacattattggaactttttacgaaggatggattgtcgatacccccgttttgattttccttagttgctataggctcgatttctgatattggaggtgattcttcttttttgatatacttgtacctcattgccatgaacgaaaagatcaacatatcggccaccatcagtccacaatataggaaaaagtcgttactcttcttctcaaaaatttccatggattctataataacaataattaagtttccaaatgcagtggtcaataaaaagcaagcttgcagtaaagacttcattgatgccggggcttgagagtacgaaaactctaatccagtgatggaaaacataatctctgcagcagttataataaaatattgaggaagtaaccaagctatatggactgaattaggttttgtcactatcgtataagccatttccatttggtttttattaagcattacggcatatgttccaccaagttccaagtttacagttttgttaaattgtttctttcctacatttattgaccaatgaccaggactggaaaattcttttgcagaagtgtttcctgagttgatattaattgatttccccttcaaggtatacttaacatctgtgtcagtataaggtagcgttctcactaaaggataaccagttttactcttagcaacgtcatctttataaaagcggatcgtcccatttgattggataaaaacaccataggcattcttttctaatagatcaaacgtttcttgaccacctgggcattctttactattagattcaaatgtaaacgttacagatttatttccactccagtcaatatccgtcatcacatatgaagatattggatccaaggaaaatgactttatttctgttacatcggtgcttaaagacatctgacagtttgacggattatacacccttaattgtaagttaccagctgatggcaacactggatcatttttttcaatagccatggtgacaaatgcagaaacggcaaaagcgacagctgctaaaagtcctccacaagccattcgctgcagagaagtcttcagtaagttgcattttcctagaagtggatatacgtagtaggtaaacagtggaataaaagccaaaatcaacaatggattgacgacttgcatctgatctggcaaaattgtgtagaatccaatgtttccatccattctcactgccatcaaagtccatcctgatccttgctggtcatagagagcccagaaaatcggcagcggaagaaagagaaccaaaacatggagtgttgccttaacctcgtttactagtttttctccgtatttttcttctgcataatcaagccaatgttcctttttatctttggacttgaacttattctttattccacacacaatacattttgtaacctgtactataacgtttccctctggttttttgattttatacgttggccgtcctaagccgaagatgactacagaaattatcattagaattccaggcactgcgaaagccaaaggaaagcagctctcattaccgaagcaatgtacatcatttcttaaaatgggagtaataaaagttgatatcaaacttccagcattgatggagaagtaaaataatgaaaaaaacctctctagatccttctcctgttggggtaggcgaaattggtctcctccaaaggctgcgacgcatggtttaataccaccagtgcccacggctatgagtaataggcccaatactgagaagccaactttgggtaaccctatgggatcactagctgttagtgcaagtaatatacttccactagcatatatcatcgaaacatagaggattgtattgaattttcctaaaaaactgtctgaaattatggcaccaatgattggaaaaaaatatacagccatggagaacgaatggtaagttactaaggattgtgattcactaaacagtagtatattcgtgagatacaggatgaggatagttcgcatgccatagtagctgaatcgttcgcaaaattcattactgactataaagaatactgatttcgggtaaggaattttcttttccgcaatttcattatcatattgatcttcattggattccttattttctttctccgtcatcgtttaatcacgtcgatcgtcgtcacttgatggtattaaagacttgaatgattaatcgcaaataaaatatagcagtcttagtacgtctatcttatctttgttaatcagggtacagacacaaagagtagctagataaatcctagccgaacaataaaaattttcaacgcttcggc

SEQ ID NO: 6341 - DNA, 4052 bp, Diabrotica virgifera
tgatgggttgtggggaaaattacaaaaatacaatacaaattatatacatcaattagatacaaaagtaagtagagtccaacaaggtatataaaggtattatgtatacatatgcgctccgctcgcgcgcagcatgtttgttagattagtacttgtcttcaagaggagcacaagcggcgcgcactgttaaaaacacatactaatctgacgaacattggcgcgcatatgtataggggagggtggggtagtttggtacactttttttcgggagcttatattttggtactggttctattaacaagtccagtaaacatggaaatagttagtatgaggtttaacgatattattttttgtgaaataggtataaatttttaaatagtttatgaaaaaaattgaaataaaattacatacatcattttcccaatgtgccccatggtggggcagtttggaacaaatattctcaagctgcccgaatggtgagaaacatggaactaataataaaattgatctttttgataaagttatttgtgattttcataaaacaatccaaagtttataccacagctcataaacgaaagaggaaagtttaaaataagatgccagccttctggtactctctggcatttcgttgggatatggcggtttagctacattgtcaagtttaagtatacctagagctgatatcattctgtatcagctagaaaaatccataattttgcttgaggggcagtttgatacactgtaccaatctgcccccgtctatttaatccaatctgcccccgtctatttaatccaatctgccccaaccgaccctgacgtataaaaaattaagtagtcagtttacaaagcagtctatacttcaacttaaatatggcattgagcctcttagctgtctacatagccgtcttagattactacattaatcacgaatagcagcactctttgttttgccgactttaataccatatgatgaaatgttaaaaaatttacttttgccgcctaaaattttcagttgaccacaaaatttttaaatgcactcctacacatacacgagttatgatggcttcatgtcgactaacggcgcgcccataaccgaaataccggaaataatggattgcgttaagatggtaaatttgaattgtcccatggtgccccacgtaccaatgtaccccacactaccctacgtaccttaatctgagttctgaaattatacaaacaagggatcatttcataaaacaggtcgttgattgggaagaatagtatgatatttcaaaaacattaagtttacaaaaaagacaattaaagattgagatcggttacgagatcggattacttaagcaatgcaatattaaatatccttttcatcagaataattaaaacttacagtattaactgacaatatgagttttacatccaatccatataccacccccaactcatatttttcatccccattttgagttataatacttttctttataaaaattttgtactatttcacaattataaggttattagggacaataaaacggaacagtttaaatgttttatgaaagtttaaacaacaatgaatgaaaaaaatcgcagttatagtacaataccaatataaaaaaacaaaaaatttgggctcccattaaaaaaaaatgaaagtttctacaagttagcgtaaaaatccctatattattgtgtggtattgtggtataaccgctacattttttttcttttcaaaaagagagagcaggcttttttcacttattcccactttcttcttgtaagcttgttttagagtaacgtcacgtgctgatggaagtcgtcgtttgctttgaagaacgtttatggtgttaaattcctgttttttacgacattttatatagcaggtgactaggattttctttggtaacttttaaaacgcatattcctgagagagggactggtccaccttcttctgtcttaaaagaatccttcatgcccatatcacttgatagttgttttagatcaaaaaaattctcatgacccatttcatgtacgttgaatggagttccatgcttctttacttgtctaaccaatgttacatatttatctggtacgtaaacgttctataatactataatatgttctataaattgaacgttctaataacagaatgaacgtggtctccctcgttctgagtatgaccactaattaaaaatttatgggtgatggacctaatattttccagaatagaaactgcatagatgtataaagcaaatacgaaggggttcttattttgtccgaaacagttgtcagtataaaatacaacatctaccatttcagtatttttggcgttcacagactgcaaataattccaaacgcacgaacccacttcatttgcacctctgtgagcaagaccttcgtgccaaataaagcacattgcttccgtacttttaagctcgtacaatgttaaattatacacacttagttttgatacataataaaaagaagacgtggacatggcaatgctgcctgcatatcataaacagcgtcaattttatccggagaattgttatccatgtacttctcttttcttgccagttctttgtcttcaatatggttattgtactgttcctgaagttcttgtttttttacctcggaggcattagtaaaaccctggcaaaaatcacacttatctttttttggaataaaaaaagataaattaaactctcctttgaatatattggagtacatcaagtagtatacgttaatttcccgagttctttacaacgctactcataatttctgtgcaggtcggcaatagtttttcctccttcaatgtattctttctttgattgagatcggcagtagtggctctcaattcgaggaatagatcgaatatgactacgcacttcttgtttcaactcttcaggaacactgctatgtttttcatgtctacctcgattatctgcctgtattattccatttacttcattattttgtttgcgtaaaatggtctcaattacttgagagttaatgcaaagagttgccataaagaaggatttgcaaacacaaattttttctcctgcgtatgtgaaaaaaaaatgggttattaagtatctagtaagaaaaagatattttaaggaatagaatgataaaacgaaataatttcttggatttgagttaaattatgttgaagacaatgttaactaaaaatatcacgctatacttagcgcaaaattatattcaaaactatgttaactcaaaatgaaataaagataaaattcccacaggtgtacttattttattcaagagtatcatattatttgtaatcatcatactgaccaaaattataataaaaataaatgcttacctgttaaagaagagtatgatattttgaaatataattctcttgctccaaaaatattcactaataagatgcaagcagtgttaatattttgacttataataagtattgattaaataaaaatgacctaagcttagcacgaactgtagacaactgagttacccgagtcttctccacaccggttgcgtggaagtgggagatgccatacttggtcacagagctctctagtgcttatcgtttaaactgcacttacaatacttttctccataatagatccattcattatgagcagtttgttgatatacactaaaaatcaaccatttttgacttatcatactattcttcccaatcaacgaggtagatcccgtgtttgtggaatttcacaactcggacaatagcaccccgctcagctgaatattaatgactctctttagtagtctagtaaaataaaattacactacatgtaaatcaaaatgtaaattcgtacaggtcaaaacaaattctatatcaaagttcaggtgggtacaaaaaatattttcaaaaaagtatccaaatcatacaaggggatcaccgttcaaacaattaaaaaggggtcatttttgcaaaaaaattactcctttaactgccgaggccattcaattactaaatgaatgtccatagtaatattttctgcaaagttgaagggtaaatctctcacacaagacttactaaatcaaat

SEQ ID NO: 6342 - DNA, 4049 bp, Diabrotica virgifera
  SmartBlast Evalue=1E-50; Info=U6 snRNA-specific terminal uridylyltransferase 1 n=1 Tax=Camponotus floridanus RepID= E2A721_9HYME
tatattggaagatactcacgtactgaatcacttagaaaatggagcttatctttcttcaaataacatccccgtaagtgaagtagtcgagaaggtttcagagttttccaattttctcaacagcaaaggaagattgtctttacttcatgcaaacccagcggaatcccaagaattggtgcctttaatgttgtcagtaaaaaagaatatcaaaagtgcattatcagaaatcggtcaatcacaaataaaaaaaatccgcagttacgtttgtccaaaatgcgacgaaacaattaaagttcctccctacgtcgataactggacatactttcaagatcatgaacattttgaagagttatatgtaagctttttggaaggatcattgactatttcgacagctatggagattgaaccaagagctagtaccagtggagaatatttggaggaaagcgatttgttggataatgaacacacagatagcggtattgattatgaagaaggcatacgtgaaactttatcggaagatgaggaagaacctcttggaagcaatacattcaggtttaactttaaaccccaatatgatcctgtcgtcgaatcaacgctgtatccggattcgttcaaatcgttaaaaaaattcgacagttgccaatatctgtgcatacaaaaagttaattcatacagagccttctgtcttctatgttgctgtgatttggttacgaaaaatgctgcaaagagaatttcagtaaaacattgtattaatcatgtcttgggccaacgtcataccaaggcgtgcagcgatgaactttgtgcgggatcattggaaaagtatcatcagttgttttataatttggaactcccttatcaagctcaccaggtatacttcacaccaaaaacacttggctctctcgagtgtcgactatgctgtacaaccgtacaacacaaaaatttaattgagcacgtacaggggagaatgcataagaatatcatattggatttatttaagagtcaaaagttatctgaatattatttgatggaacaccatttaagtatgtacggaataaatactgataaattaaaaccgaaagattctccagcaaaagataatcctgagaaaaaacctagggaacgaagggagaaaagcaaatcgacttcaggaaatgaagccgcggccgaagttgagcatatgtttgtacggacttttccctttcctccaacgggcaccccagcagattttattccaaacagatacgccgaacatattaaatactttaaggataaggacacacattttggttgtgaggcatgtaatgtttacattaaaatggacagagccgatgtgaagaaccacattttgtcagaacgccatcagaaatcttctcaaattaagacgccaaagtataaatatttatgcgaaccttgcagtgtacacctgagagacgaaaatgattgggacaaacatttcaaaaaacctgaacaacgacattccaaacaaccacaaagtcgactggataagtttgctgagtacgagtgcactacttgtaagtacgtaatatttggcgatgagatatccacaacgaggcataaagttaaagcaggaggaaaaagagaaaagccctccgaacccaaactcactgacgaaattaaaaacttgttcaaaagtacggaagatattgaagaggaatgtgagcggttgatggctaacaatgccttaatgtctttacagaaaactaaggattgtaccaaacggatagaagaagtgctattaaccgttctagctgagtgcaaagcttatccttttggttcaagagaatctggacttggaaatgataaaagtgacttggatttatatattgatgtaggaggtatgtattatggagccaagaatcaagatgctttatttcaagcgcacattgtaaaacaagttgagagtattctaagcaaacatagaactgaattttcaagaatcgttacggtacctggagctagaacccccattgttaaagtccatcatatttccacggggatcgactgcgatctatctttcaggcatggattgagcgttgaaaatactaaatttttaaagaaatgtttggaaattcaaccgattacccaaccgttcatcttgatcttgaagaaatggttacagtttacccaaatgtcagagcatgtaacgacttatgcattggcaatgttggtgatattttatttgcaagtaaatggatacttgttatccgttgaaaaactcaatgcattaaatccactaccggctccagttattagtggatggaaaactatcaaatatacagcgtctctagagcttttgaagagtaaagttactcagtatagtggttcagttgtacctcttttaaaagggttcttcaagtattatgcttcatttaactattttgatgatgcagtttgtccgttgttgggacataccatccaaagaaaattgttccaggatcccagaaggctaccgccagaaatgaaatcttatgtaaagcaactgcgagaaaaggagcccgaacaatttagatacctgtctccattttgtattcaggatccgttcgatctaagtcataaccttaccaaagcttgtcaaggagtcagtcttactgtgtttaaaaagtattgtaccttgactcatgaatatttgagcaaattagaataaggttttatcaaatactatagatagactataatacatacaactcttgacatttccatttcccattaattttgtggcagcaaacaaaatggcgccatctagcggtatgagttgataaccacaaactatgcatttaaaaagaaaggtatttttatactattaaatcaaaatacaagtttagttgtgagctgttttctttaattttatattgttactttttaatttacataatttttcctttttactatcgttgattttatttacatacgcttttattaaaagattaaaatatttatctataacagttttgtgacaatttgtacatacattttagagagtttcttgtaacattttaattttaattttaatttatatttaacattttcaacactctcttgtatataattttgaaaatatgtgccttttaaatataccattaattttatctgaagttacacctaaatttcacactatcaggtgtattattattaaaatcttcagtcctaataatagaaaatagcttttctatacagtcttgggttagccttcttgtaaaaagaaattgcagctaaacaccctcgcatcgaggtgaataagggggcaaagtaacacactttttagttaattttgttgccatcctaggcatttgttgagaatctattttaccgaacctattttataagacggtttgtgtagaaatacaaacacaagttaccaaaattagctagttatccaaaaattaacaaaattaaatttgtatgtttatattgagaacaagtagttatcaactcgagccggcagatgcgctagtggcaacgtgctgccagttttctgtgggagttggatgtattatagtctatagtatttgttagtaccaacaaatattgaatctttgaggatttttttagtttgtttttctttattcttggttctgatacttagatatactgaatacttgaataatttgaactacgttacattacttaataaaaattttaatgcccggtactttatgtctcgattaaaaccggggtttgatcgggacctctttggggtttcttgcgttgtaatggatgcaattacgagtgtcattataattataaataagtataataataattgtaattgcatttattgcaatgcaagagaccctaaagatgtcctgattaggaccccggttaactaaccggctgttaatcgagacataaagtaccgggcctaattgtgacatttaattaagagaatatgaactttaattgtgaatttgtttatttttgaaagcggtgtatgttttaatttgacagcggtatacatatatgttaatattgatgggaataagaagttattatttacttatgtgtataggttatttgataatttaggaatattt

SEQ ID NO: 6343 - DNA, 4041 bp, Diabrotica virgifera
  SmartBlast Evalue=1E-113; Info=Muscle-specific protein 300 n=1 Tax=Tribolium castaneum RepID=D6X2J9_TRICA
ttcaaaagctacccagatatacaacccctggttaaaactttactggaacaacttgaaaccgttattactatctttgaggaacaaaaaataataatagtcactagactcgaaacaacaaggactattttaacacaaataaaagaaagtagactaaaacttgaaacacctgatgtttctcttgaaaacacactagattcgacgtctatgccaatagaagaagctcctgttactgttgaaactaaacacgtaacggaaaccattgaaaagattgttccaataccagtagcttctattgaaacacaaacaggtcgaagtttatcttcccctgtagaagaaccattaactaaagattttactgtaacatacaaccagccagttgatgttcaaatacaaaccatgtctcagcctcaaagtgaagttgagcatgctcaaacaaaagagactataactatttcgaagaagacttctggaggtcaagaaaccatccagattgctacaaagcctgttacagatcctcagccaattattgaagaacctgatgatcttctggtagaagcagattacagaagaagacctcaatctgaaactagaactactgaattgaacataacaaatgtccaaccgaatcaaccgtttgagacagtatttgtcgaaccagatgaaaccacgaccgaggttattgttgatgctgatggtaccaagaggataatagttaagaaattgcatagaactgttgtcagacatcaacagtcttcccaacatcaacaattttctacgcttagtactctaacagagggaggagtacctgttacacaatctttctcccaaattacattgactggacagcagagtgctacttcagttgctaaaggcgatggaagcaaagccacagttagcagccaaaagtatggtggacgagttgtatccggagctccaggaggagatatcaacatccaggaatatgaaactgaaccagaaactcagttttcagcaacgggcccgactttcaaaccagaagaagtggaagtacaaggtgttaagctacatgaaggagatatcacttttgtagatggtcagaataaccagttaattccagctggttcctcacaagtggtgcttgaaggtaatgaaatccatacttctagttcaagcgttagagcagtcgtacagcaagtaactagaaggattattagaaaaacacgtagaatcatacgacgaacagttattatagacggaaaagagcatgttcaagaagaagtcatcgaagaaccagaagaaattgaggtaacggaagagggtatacctagggtaagcatcaacgtagtaagaactgaaaacggcaacgttgtgcagcagcaacagtttggtgaagaaccaatagtagaagaaccagatgttgtagtaactaaaaaggtaactacagtgactttagatgcccaaggaagaccaatggaaaccttacctgaagacgttactgtggttacacaaccaatgaaacaagaaattactataactgaattgaagcaaacagagttagatgagaaagaacctactgcacctactgtagtatcagatacaaaagtcgaggagcaaattcgtatttcatctgttgacgcaacatcaaaaccaaagactgaagttcatttaactgaaaaagtttccaaagtcactgcagaacaaccagaagagtcggttcttgtcggaggaactgaagagaggtatgtgataactcaaagcactgcaccacagcctgatactgcacaagtcactgaatttgtaaaaacaactgcaaccaaacaagttcctttggtatcagatttcttagataatgaaaggcttgctcatagtgaaattgaaagtagtcagattgatatagcacctagtgtcgacgcagcacgcattgatgaagacaaaaagactccagaggacgagtccattaaaccagctgttaaatatgatatttcacttactacagacgaactccatcctactgaacaaaaagaggctccgtctactgaatctgttgaagccgatatgcctccttcacattcagtaggcaattttgcagggcaatactagaagaactgaacaacattgttagaaccgtggaagcagctgtacctccaccaaaagaagtaaccaaaattgaagtaaaatcttcagaccacgacaaagacaccaaaattgtaagtgaacagaccgttacagtcaccgacattagaccttcatctgtagttgttaaagaagaaacaattaaggacgatactgacaatgctgtagttgtttctccaatagaagtcgaaatacctacagatattctaaagataactgaagatgtcattgataagactccacccattgaagttgaaccaaatactgatttacattcaccaagtgctcctccattggaggaattatcagatagtggttccactgaacgtcatctttcccaacagttcattctcacagaacaacagcaccatgctccagttgttcaagaattaaagaagtctccaaagaccaaaaagaaaagagaatttggaaaaactaaaaaggtatctggtactcctagaacacagagtcctcttacaccagctgatgatatatttgaagtagaaactggaaaaatatctcctggtgttacctccgatgagattgtagaggttgctcaaacagttcctaaagaggttactcaaggaacaacgccaccattcggtattataaagatacaagaaaccgaagcagtaacatatgtgactagagaagttggaggaaatgtagaagtggctttatctctcgaagagacgaaaccggagattactattattcgtcaacaaacacagatagttcaggagaagactcgacccaccactaccagtttagacttcatcgaaaacgaaaaacaatttagtgaagcaaagattgtacaagaaaaacctgaatctcaaacagaaccacttcaacctgtagaagtagaagcaattcctattaagccggatgaagtaattgtaaagaccgatgaaaagaacgtcaaagaatcttttcctgctccagtacaagaaagcaaagtggtagtaacagaatatatttctccaccaatacaagaaagcaaagtggtagtatcagaatctatctctccagcagtgcaagaaagcaaagaggtagtaccaaaatctatttctccactagtacaagaaagcaaaatggtagtatcagaatttatctctccaccagtgcaagaaagcaaagaggtagtaccaaaatctatttctccactaccacaagaaagcaaagtgttagtagcagaacctagtcttgcacaagtacaagaaagcaaaataaaagaaccgaaccaagaagttgatatagttctttctcttgaagaaaaatatgaagactcctcaatagctactcccaaagtttccatcgctatgaagattgaagaaacatctgatctgactaaaccttctgaaatcttacacaaagatattcacgttcagttgccaaaactggcaacagaaataactgagactagcgagtcagtcgtaccaaaattggaagttgagcaaacaaaaccatctactccaagcgatatcgaccacggaggcagaaagagtaaaaagaaaaagaaacacaaagacgttaagacgctaacgccagaaggaaaagatgaacccaaagaaattaaacctgtaaaagaatctccagtggaacaaccgctagaaccagaatctactgaagtagaagaaaagtctggatctgcgcagatcgaaactccagtcgaagaaaagcctgaatcaatgattcaagaaatagaggacgaaaaagttgagtctgttgtcacatctttagcagaatcggtagagatatcaattcctgaagaatctgtaagatcagaagaaactccaaagccatcgcaagatatatttgcctctgttagcgactctgatgatagtcttaaaggaaaagaaacaggatatgaagcagataaaactctagaagagagccttgctgaagaagaccaagataaaaagaaacgta

SEQ ID NO: 6344 - DNA, 4027 bp, Diabrotica virgifera
  SmartBlast Evalue=0; Info="E3 ubiquitin-protein ligase suppressor of deltex, putative n=1 Tax=Pediculus humanus corporis RepID=E0VJS3_PEDHC"
aaaaatccgtcttttataaaatattttagggagtttgactgtaattgaactaattttggtacgattgtgaagtgaaagaataatgaaaaatgtcggacaggttttgtgttgtcaatatattttcgtaaataattgttactgtgtaattttctcagaggttcgatccgaagtgcatatccaatgaattgccatacgtatttagaaagacaataaccctggagtaatattttatttgaaatcacgtatttttattgtgtaatgttcccctacgtcagcgcttggtctttaatttgattgttagaaatggatcaagctcaaggaaatgttgcaggggctgccttttaccagcttagtattactgttgagtctgccaacttaagacctagcatgctcctcaagccttacgtagagatcctagtagacgataggggcgctcaaaagactgagacggtaaaaacgagtagctgccaaccgaaatggaacgaaacatttacttgcttggtcacacctcgatcgaagatccttttccaagtcaaggatcattacagatataaaaaagacactgtcataggagagaaaaaagtcgatttgtttatgttattgtttcattttaacggaagatgtgataatttggatgttacgttagatctcatgggcgaagcgaaacagaacgatggtccacaaaaagttggtgaattaatttgtacatttaagggactaatcgttgatatgactcaatacatccgctcaaatgactctttaccactaggacagaacaatacagactctacgactagggcggttttaaatggcattcgagccaaaattaaaggccaaggagcagagaatgtaatgccgactcagaattcctcaacaacaccagctacaactagaaacagtacagaaaggatagaggctagaagaagccaggttgtgacaccagctgctacacccttgccgatgtccaccagcagcaacaatattcctaatggctgcatcggaccaccaataactgtgccaaatggtaacgtcgtacacagcgagtcggatgaaaccagagccgatgccgaacctttgccacctggttgggagcttcgatttgatacatacggccgaagatattatgtggaccacaatacgaggtcgacgtcttgggaacgaccacagcctttaccgcctggatgggagatgcggcgggatcccagaggtcgcgtctactatgtagatcacaacacgaggaccactacatggcagaggccgaattctgagagactgcagcactatcagcaatggcagggacagagacagcacatcgtttcacaaggtaatcaaagatttttgtatccccaacaccaacccgggcccataccaggtccctcggttgttgctgacgacgacgacggtctgggtcctcttccttctggatgggaaagacgcgtgcagccagaaggtcgtgtgtattttgtcaaccacaagaacaggaccacccaatgggaagacccgcggactcaaggacaggagatcagcgaagttgaggagttacctttaccgcctggctgggaaattagatatacggaggacaacaaaaggtacttcgtggatcacaatacgaaatcgacgactttcgacgatccaagaccaggggcgcctaaagggcccaaaggagtgtacggcgtaccgagggcgtatgaaaggtcgttcaaatggaaaattagtcagttcagatttttgtgtcaaagcaacgccctccccagccatataaagatccaagtcacccgccaaaccttattcgaagactctttccacaccatcatgaggttaccggcgtacgaactgcgcagacggctctacatcatcttcaaaggtgaagaaggcttagattatggcggcgttagcagagaatggttcttcctcgtctcccacgaagcgctcaaccctatgtattgtctgtttgaatacgcgaacaaaaacaactacagtctacagatcaatcctgcttcgtatgtgaacccagaacacttgacgtatttcaaatttataggtagatttatagcgatggcgctctaccacggtaggttcatctattccggattcacgatgcctttctacaagagaatgctgggcaagaaacttgtgatgaaggacatcgaaagtatagatccagaattttacaattcgcttgtgtggataaaaagagaacgacatcgacgattgcggtctggagttgtactacagtgtagattttgaagttttgggccagatagttcatcacgaattaaagaaaaacggggacaaagaaagagtcaccgaagaaaacaaagaggagtatttgacgttaatgactgactggaggatgacgagaggtatcgaagaacagacccaggcattcctcgatggttttaatgaagtagtaccgattgaatggctgaaatattttgacgaacgagaactggaacttttattatgtggaatgcaagagattgatgtcgaggactggcagaggcacacgatatacaggcattatacaagaaatagtaaacccgtagcctggttttggcagtttgtcaagcaatcagacaatgaaaaacgggctcgattactacaattcgtaactggtacttgtcgagtaccagtaggaggtttcgcggaactgatgggatccaacggtcctcaaaggttctgcatagaaaaagtaggcaaagaatcgtggctgccccgctcacacacctgcttcaacaggctggaccttcctccatacaaaagctacgaacaactcgtagagaaactgacgtacgctatagaagaaaccgatacttttggacaagaataataatcttcacttctaaatgtatttgtacctgattccgacatataagtctatttcctctagaagtttttgtttttgggtggtcttagatatgtagtaactgcatcgcaaaatgttgaaattgttccttatacggaagaatctgaaagtatttctgatgtttctataaaattacaaaaattggacgttttaataatactaagcgaaataaacaaacggtttattagcaatattcacaattcttcatcttattcttgtatcgtggtttttgttggtgagctatgtacttttttgctattttaaagtttaaattatcaatagtaatgattcatcccatctctatttttcaaaaatctcccatctatttcaagcaagaacgttactgtgacgtcttgttattgggaaagtcgtataatgtattgatattgtacaagagaccttgaatggttaagctgtaactttagcttgttttttgacagttaagttatgcattctaaccaattttcaagttgaaatcatcaaaagtaacgactcagttcaattgtggttcccatcactaacgtaggcaaaatttttctgatatagaagatattttaaaaatggaagagattctttcatctctgataaagattatatttttcccagcggtggttcttttgtgatttctggcgaaaacatacataccgaaatatacatttttgacagttcagtcacgccgtttagccaattttcaagttcgaatcatcaaaagtaacgactcagtacaattttgttcccatctctaatataggggaaatatttctggtatagaagaaattttaaaaatagaagagatactctcatcttttataaagattatgtttttcacagcggggggtcttttgtgatttctggcagaaacatacagtacaccgacattatacaagcaatagagctttagcttggtttgatagttttgtcacgccttttagccaattttcaagttcgaatcattaaaagtaatgactcagcaaaattttgtttagggattgggggggggggatactcacaattttactttttacccatttttgtccagtcgaaaacatttaagtcctaaaatcatataaaggagcgatttagtcaagtagtattttaaccatctctaatatgtatatacgggaggcctacgtgcaacagtggacaagtataggctgaatg

SEQ ID NO: 6345 - DNA, 3995 bp, Diabrotica virgifera
  SmartBlast Evalue=1E-140; Info=Gag-Pol n=1 Tax=Ipomoea batatas RepID=Q6BCY1_IPOBA
gtttatatttatgtttatagtatatcaaactcatagtaactgtgctttgaatatatctcaatactctttttattgctacccacaaatcgttacttgcacatgtttgatacctgcttaatatacctatagctatacacaaatctggtcttgagcataacattgcatacatcaaacatcctatagcaactctacatttcttttctatctctatgctctcagattttttctcgtttgagaaaatcgtggtgaaaattattatccattggtgttgttgatggtttgcagcttgacatgtcaaatttcttcaaaacattttttaagtaaacagtttgattaatttttattttgccttcagacaaattttgagttatgcacatacccaaaaaatgttttatttgacctaagtcgttcattttgaagtttttgtttaaaatgtattttattttctcaacttcttgatcatttgtacctgccaacagcaaatcatcaacatacagcaaaatgtatatcctacctttttcatttactttaatataaagacaatattcatattcagatcttgaaaaactcaaattttgcatcaaattatgaaatttgtcattccaatttttaggtgaacttttcaaaccatataaggattttcttaatttgcaaatagtgccctctttttctttaaatccctttgggagtgaaataaaaacattttctttaatatccccatttagaaatgcactacaaacatctacttgatgaattttcatatcaaaagtattacacatggctaagaaaatccttattgatggtaattttgctactggactataaatatcattaaaaaacataccaatttgttgaaaacctctagctaccacacgagctttatatttcactactttaccattttcatttttctttttcttgaacacccacttgcactcaatgactttttgaccatcactactttgcacaaactcccatgtttcattttctagcaacgcatttatttctgattgcatagctttcttccaatttttacactcactactggccactgcatcatcatacgtctggggttcttcatcatcactaaaagtcaacaaactcatttcgtcatcatccagaacataatcatcatatcttgagggtctttttatatgtcttctcaggtcatatccatgctcctgctctatttcattcacatcttcaacactgctatcagtttcgaggtcactctcactgctttcttctctattattttgaggttcttctgcttcactgtcatcttcttctgactttatctcctcacatatcatctgtatgtttttattcatgtctgtctccccattttttatttctatggttttctcgggcaaaaatatgacatctcgatgaatttcaactttatttttgtctgggacaaatattttgtaaccttttacatcctcactgtagccaataaagaaaccaagcatattttttgcatcccattttaatctcttctcttttgggacatgcactgatactctagaaccaaaactcttgagtgtagaaatattattgactttctttttgtaccataattcataaggtgtcacattttttatgctactagggcctgttcggtttaaaacatacactgctgtatgtatggcctctgcccacaagtttttattcaacttttgcccttgtatcatagttcgggctgattcaactagggttctattttccctctcagccctaccgttctgctgaggcgtatacactactgatctctgatgttttatgccttgatagtcaagcatctcctttatttcttggttcataaactctaaaccgttatctgatcgtaaatttttcatcttgcagcctgtctctctctcggctaatgatataaaatttttaaggtgtttcttaacttctgatttatttttcatgaaatacgcgtacctataatttgtatagtcatcctttaacaacaggaaatacctatttccccctaaagactcttcttccatagggccacatacgtctgtatgcactaattgtaatggctcacttgctcttgattcacttaacttgaatggtattctgtgttgtttacctgttaaacactgttcacacacgaatttttcgtctataaaatcaatgttattttgccttaaaaagtttctcacatatgtagtattttgatgtgctagtctgcagtgccaaactctcaaactttctgttgtttttgcagaattacactctgataaaaatacatctactaaacagctgttttcttgaacttgaccgtcagacaagttttcgttaggggtgcgttccgaaattaaaatatttgcaaaggtttcagtgttttgttcttgtgagaataacattttgtataatttgttatcccgtgttgccaatgctcttatttctcctttgtcattataaaattcacatttttcattgtttgaaaacatcttataacctttatctaaggcacatccagctgagaataaattaaattgtaaatctggcacaaataatacatctgacagggttgactttataaatttcttaccattaaatgcccatagagttatttttccaatacctttaactggtaatttttctccatttccgacttttacttgttttttatagcttatctctatcaattcttcaaacagatcttgattccagcacatatgttcgctagctcctgtgtccaagcaccattcatttttatttttcttactcccagtatataccatgaatgcattactgtcaattttattttcttctctgcttgtctgttgtttttcatttttatttttattaaaccaacactcttgtaagttgtgtcctcgtcttttacattgactgcatacttttatgtctttctggctattattatctctctctttcttcttgaaaaagcaatttttcgcaatatggccacctctgccacaaaaatggcactttaatctggttttcttttgccctttaaattctctgcttgtatcacttttcatcgccaatgctgtgctgccctgtgctgacttacttctttcttcttcgataagtagtcttgatgtaagttcatctagggtttgtttatcagatggtacggattcccatgcggatcgaaaatgcttatattcctctggcaatgccataagtatttttgtcatgatcattttatcggacagctcttcaccagcttgctttagcttattttttatctcttcaagctgtgatatgaatgaggcaacatttttacctgatgaaaactccaagagaaaaaacttttgttgcattaaatgaatgctcacctctgactctttgtcgtagacagacttcaactttgtccacatatctttcgaggtctcacaggataaaatgtgtgtcatagggccttgctctattctggttactataaattcttgtgcttttgaatcactagcatcccatttcttttggtcatctccagtagtgctcggtctcacagactttcctattactatgtcataataaccacggctttttagcactacccttgtttgaaatttccaggctacccagttgtcaccaccactaagtttcaacgcagccgatgaattttccatttttcggatttatgttttctttttttatgtatatatactcgagcttctttttcacctttttttcagcttttctttttttattttcgttggccgcggcaaactaccgacacaggctcttcaacactgactttttttactggcgaaatactcacgaaacaagtgatctgggccataacctgatgttttgcagaattgcgtggatgttaattaaacaccgaagtacttctagtcagttttattttaaaagaaaactcaataattctacaaataacttaaacatcaaaatcaacatttatttttctttgacacttatttttgcttacagttgacatctgacacttatataacattgtttccaactacatcatacaataacaaaaa

SEQ ID NO: 6346 - DNA, 3996 bp, Diabrotica virgifera
  SmartBlast Evalue=0; Info=Dosage compensation regulator n=1 Tax= Camponotus floridanus RepID=E2AJX4_9HYME
ttaaacactaaatcttaaattaactgatacactgtcatactaatacattgcaaaacattgtttggaaacagtcatttttaaaatgcaataaatacctaagaaacattagtaattaagttatatctatatatattataagatatctaatatcttccaccacgggaaccgccaaagccaccaccgcctcctccaaatccgcctcgaccacctcggaatccacctctgccgccgccaaaaccgcccccatttctatcgccacggaatccacctctgaaacctccaccaccacctcgactattaaagccacctctgaagaatttgggagaaggtccactgaaccctccgagagtgtgtcctctgggaggcctatttgattgaagcaggctacctttggctctttctagttcaaaacttcctgcgtgcaatctgcatatttctttaatcgttgacacaaccttaacgtcagtttctcccatttccaagattgcttctggagactgagaagttctaataactaaactttccaacgcaggtcttagagccactatcatggaagctacctcgggatccatgtccaaattgatccagttgtccaacctaaccacgttatcaacccattctacttttcgggaaccgaacagcagaagatgaaggggtgtaaccatagtcatctgtttgcaagatacagctctggttctgattttttctccaaatacaaagaatgggtatggaaatccttgatcctggttactgcagttgacggaagttttgtggataagtgcggctttgctttctgttgttaatacctttcttttgtccttgtggaaacaaacgtttggatataatccgtaacacataagagacattacaacatcaagtctgggatctggaccaacagtttccataggaaatagcgccatagtttcttctggaaaacctacattattcaagatttgttgtagttgatgtttagcttcccaagttactctcatagtcggcatactgatgcctttgaaatcgcaaaaccttaattctgcttcttctccaccttgtctggcttgatcccacagctcaaatgctgttaacatcgcaacatgatcggagtgcctgtccccagataaggctctttgatgatagcttaaccgtctttggcccatgtctagtgtgaatatttcagggaatgtagaagagtttgcagccatcgtagccaatggtcctccacacataaatacacaacccaaaaccatcattttccccaatctcggttcaatgggaagcttggcgatgattctacccagaggagtcaactcatcgttttgatccagacatttcatttctcttaatagcacttccgcttcgatgacggcatctaatggtggaggttcaatagcctttgacaggaaatgacctatcgagcccaaacgtaacagctttatgctcaaagccagctcgtgtaagggagttctaaacatctctggtgtcatatgttcgtcaagtttgtcgaatctggccttggaacacaaatggaaacaaatacctggcctaacacgaccagctcgaccttttctctgttccaagtttgtcctggaagcccaaaccgtagcataactagtcatattgttgtgagaagtaaacatcttcatttttgctttgcaactgtcaatcacaaacactacgtcgtttatggtgatggaagtttcggcgatatttgttgcaagaatgacttttgttacgtggtcaggaacaggttgaaagacccttttctgatcttctctagggatttgggaatgtaagggtaaaatactgtactgacttcctccataaacggggtgattttgaagatgtttcatcatagcgaagattaaattccagccaggaaggaaaactaatacagctccaggtatagattgtgttttgatgtagtctaaaagagcttccagaagctcaaaactcacttctttttcattcagtctagacatgacgtttctggtcagatctgaataatttcctcctacaaccttgtttaaattttcgtcaggttcttcaacgcctgtactttcttcttcgtcatcatctttaccacctttattttttctttttctggtatcagtgggtggcacgaacttcgtgagttcaatagcatcttccaagaaatactgtttaacaggaaaagctcttcctggaatttcgataacggggcagttgttgaaatatttagagaataaagttgtatcgatggtagcagacataagaattactctcaaatcgggatatgtgtggatcatatctctcaaaacaaccataataaagtcactattgacatctcgttcgtgaatctcatctacaataacgtggctgactcctctaagaccattttccaactttttcaacaacactcctactgtacagaacattactgatccgtacggtttaggtaaagctgattcaaaacgcactgagtaaccgatagactgaccgagctcttcacatcgttcggcagccactctttctgataccgaaacggctgatatacgtctgggttgtgtgacgcagatgttggcccaggctccttgcccagacattacataatcttccaaaataaactggcatacctgagttgttttaccgcaaccagtatttccccttatgataataacaggatgttcgttgatagcttccataatctctgatttcttcgtatataccggcaaaatcattctgtcttgcatactagtgatcagcgaagaatcattcgctgttctgtgtttccaatcagtaagcatctgttcacttaaatcatccaacgtagcactagctaaatacccttcgtctatattacaacctgtccagcagttccagtttggttgaggtggcgaccacggaaccacaccagccgctgtgggttttgcgggatgaaagtcgtctaaaacgtggctgcttagtagagacacgggtacaggttcgcctttatcgtccacttgattagaggtgactggagtgggagtcacgtttaatgacctcaaacagtcagaaatttgatccttcaatttaggacttagtcttacttggaaaggaggcatttctgttgctgacttcttttctttttttaatgttcctgaaaaagcttcaatgactttcaagtgaaaaagttgtcgcacaactgatagggcacaacttttacttgcagtctgtttattagatccagtatcccttccatgaatagttcttccaagttgtttaacatagaaactgagttctgcgacgaatgttctagagtgatctggcccaacttgtgtatatttataatccgtgttaatcttattggcttgcatgaattgatgtagcttagatttggcattctctacagtccaatttccatgaatttgagcattcacatctaaatcttctgcttcttccattcgtttctgttcttgagctctgtccatataatgccattctccatcttctcgaccacgaggacggtatgcttcaccaaaattggcaggacccatacctttctcaaacacttgatgttgcggcccgccacctgtcatttcttgttggccgtggtgaatggcaggtgtaggagcagcatcaatatcagctggtacctcatttttgttaatcattccttgccgaaccaagaaagagatgaaatcctttgaagcattagattgtgcatcctttttgttggttgaatttcctgctccaacatagttgtagccatcaattcttagttcacagagaaatctctgcctatgcttgggtcccgtgggtctcacttcataagctggttcctttttattcttctgacaccattggtttagaaaggattttagatcagacatgatgaattcaaaatacgtttaccacgattgtaaatgttttattaatatttggtaattattttttatgcttgtttaaacgaaaaaatagattttttctgaatttttctaccggaaccaaatcccggcgtgtcgctttagcttgtgcttg

SEQ ID NO: 6347 - DNA, 3986 bp, Diabrotica virgifera
ggggttttatgttcatttctaataaaggttctgagaagaaactcttgaggggaatgcttatttttggtcttctgaagtgttctagtaccttaagcgttttcttctaatttatttatgtgctcattgctcagacttccgcaattcctaacaaatttatttttcttctccctttattgcaccatttagataatatctattaaacagggtcgcggacatacagcatacttgtggcaggcctctatgcatttctgttagttcctttttaatgccattcttgtgtttgcatagaatttaaggtaaaagttggcacataaatttagcaacttagagaacagtgttttgtgtgttacacaaacagcagtaaatctgcggtttatgatcaaatatattgagatccagtgacaaaaatttgaagttttacatacttatgtgaattatacgtagctttataccgtctatttttatttcattcaagatttgagatgtgcaattgatgttttaatttgtccaaatttcaaagtgtaagtcaacatatttacacatagaacaataattgttaaacaaaagtttttgtggatgtactgaatgttttcctagttttaattttaagccacaaatcaactgtttttgggttatagaaaattcaattttctagaacattgtaagaatgataaattttgaataatcctgtaacttatatagtttttaattcattttcattgctatcagcaatgataaaatactgtacgaggattaattataatttattacttgatttgtaaacatccaacagtttctatatgctgcttctgcagtaaatagtttagtatttattggagaactgtatgaatttcttttacacacgttagctttacacgaaatattagtaaaattgtaataattaaccctgtaactaaaatgcattcgtaatttcatttaatttaggtcccagctcttcacacattctgatcaagagatcgcttcagtattttttcttcctagtgtaaatcaagtactaacgttatttttaacaataaattagattggttaaatttcaacaattagaataagttcacaaagttaaatctatgctgtatgtgccactcagaagtaacgagtaacgtaacatgtttaaaacacaaagttgtctttattgcccttaataaataagttttttttacaatgtagtgagaactttatacagttaatttggaattttgcttaagattattcaatctactattctataaatcactgaatatgaaataccatttcttattttaaagagtttttaaggggtgctatataaattatgatccccatgctggtcttgtgagtcattgtttcagaacaccagtccaaaaagaaatgttaatatatctttaacatcatgaacctacatatgttccaaatgcctattggaaaatagatgtccatacatttggaataacttttgggtggtttttcaatgttaaaatactattcttcttaaagtctttagtacgatcccgagacagtataaatgtaacaaggttctgaagctactttcttgtggcacgtttaatttacatattgtgtttacgtatatgggattaagctacaatttttgattgtaatatattgattgattgtaaacataatatttaaagtataaatgtagttttaataaatataaaactatactccctgctcatattattaaactcacttagtaaattgtggttttctttgttttataattaattgtaattagaactgttaggtgtatataagaggatcacctaaatgatagtattaacttttttcggtatatttatatacataattttactacaatactaatattttgttaagccaaccttggctttaagaaaagtgcaaccactctcccaggtatatttatgcatcttgctatttcttttaaatggtcattacggtttcattgaaaaatgattctagcaactgaaccttgtttgttactattttctcggcaaatttcctttttaggcactcccagacatttttgggcttcatgtctggtgaattgccgaggcatgctaatagagaaattttttgtcctatcaaaaaacttttatcgtttttagccatatggcaaggttctccatcctgaacttgcgaccattatcgaactgttcgtttatttgtgcaaccaatattgtctgcaagactcttttatactggtccttccgcgtggttccttctaccacctgtgagtgtcccattcttgtgactcattacaaaccagatcattattgtttttattacacgtcccttgtcatattttatttaaatgggctcatattttatttctttaaacaccatgcttcttccaatgtacatattccttttatctcgatgggtatctatttcgtgtttacaaccaaattttttaaaattcgttgccctttggggtgactgaaaactttcttccacaccgacccttccgaaccgatgtaacaggatatttctctttaaggttttgactcacttttgagttgatgattgagatacaccacattttctagctttgacgatatgtagtagtttctattagagcattaatagaagagatttgctaaacagaaagatttttacatttaccatatgaaaaagtccagtccagagattaaatgtcctctttttatgattagaaattaaccaaattcaaaacataacattactatatagtcttatcaacactcaccactgaaaattttacagaattcgaacattaatcactaattaaagtaaaagactagttgggaaaagtcggattactgcacacttcttagtacattctattgccatctgtcaagttttgacaattcaattaaaaagtgtcaccctttgtaacttgattgtgtaccatgattattcactaattattatgcaacccattcagcagctctgtatcactatgaagatactttcaaggcgcttgaaattaaaagaaactgaaattgctaggatgcgtctaataatttgagcagtgactgtataattatgttatttttggtattagtgaaatactgttccaatgttttgagtaaattcttactcaaaattccgcactgtgcaaaagaaataagtttaattaatttatttattgtagtctgttttcatattatggcttcctttagccggttcagcgaagatttattaacttatagtactttatattttattgtataagccttcactcaataagtctctgagctaactaataaaataataactttttactgaaacacactgatttctacgtttctctacggaattttaatagaacagtatgtctttgctgctcagttttctcagtaaaatcctcatttctggaggctgccagtaacctctttatttatttgttttctgacatgttctttcttcgagcgagcgcatcaataacgaaaattatgattcttcggtaattttttaaggtaatagatacatcacgcatccctaaatacacaagttaaaatcatacaactgttgagtctttagtcgttttgaacatcttgaatctactgttatccactcagctgattgccgatatgactacgaagtgaaatgtttgatccatgtttcatcccttggcacaaaaaggtaaagaacatatgcttattgtgccaaaacagttgaaaatatcgctctgaattgatgacacgttgttttgatagactgtaagcaagcataacatcgactttgaatgatgataaacttattaatacatattttccatcgcgaaatgtttctgtaaagtctatatttagaccagggtgcatttgtaaaaatattagtacatttggatgttgagaggtgactcatatttttttgcagaaattgcttgaaagtgactcatataataatgtttgagttgtcttcccactcggaaaggtccggaacattgtttaatcatcaaagcgtcaaaaaatgaaggaatattcgattttttcttcgctttttga

SEQ ID NO: 6348 - DNA, 3953 bp, Diabrotica virgifera
  SmartBlast Evalue=4E-32; Info=Zinc finger protein 808 n=4 Tax= Homininae RepID=ZN808_HUMAN
ccttcagcgacgctgtgcatcgttgctggtttacaacagtcgttgtagttcttcccaccttttcaatcgctaactcaacggttgaaaaccgacgatatatcctgcctctgcctttgcctcatcgagtggggagaaatacgggcagacaacgatctgtgtaatggcaatggcgttgtacagactatcagaactgaaatcatggcctagttccctttaaaagttcagaaaacagtgaattcgcgtggatagtgaaactggtgtaaatgagtgataaaaatttaataattctacgatggctgaagcagaaaacatcgatttccaagcatgttgcagactgtgtctcagcgaaatggtggattctttaaagtccattttcgacgaaactcctgaagatgaaagtctctcccaaaagattttacaatcagtggctattgaggtcagttcggcagacaaattatccaccaagatctgcaaagagtgcgtagaaaaagtaactgactggtcttcgtacaaagaacgatgtctccaaaaccaaaagaaattaacggagttgttagttgcgaaagaaggtccagaagttttggttgtacctgaaattatacccgaacccgacgcaccacttcctgtaaatggaattgaatcagaaactccttctgatgacgacattcatgaaaaccaagtggatcctgcctctttgttggaccttagcttgcaaattaaagaagaaccagcagaccacactgaacagaacgaacacgataacccaaatatgctagatatgggtcaaatgaatcaccaccaacttgatcaaccaaatgacatgataccaggtcatgtgatggtaaagtcggaaccagttgatatggacggactggacgaagtttatagcgagtttcctccacaattatctcctcaacaggtggaaactgatgatttgaatcaacccttagttgttagtgttcctgctaataatagaacgtgtggcgtgtgtggcaaactgtttagtagcgcaggaaataagagaaagcatgaaaagatgcagcatggtcttcataataacatttctgttgttacgcctattacaagtgacgctttgacgaacggagaggtacaccaagaacccaattcggatcaacaaaagattctcttcgccatgggattaaaactgttacagaccagcgcgacccccatttcttcagaagagctatccaaaatcgagataagctacatcgaaaaatgcaaggccatggttaacatgcacaagtctttaacttgcgcttgtcacaacgtaccacatcagaatcttaaggggttgttgtcccacttgagggctttgagaatatggttcccagttttcacttgttacaactgtatgattacgtttactgatagatctacatttacaagacatatttcaagatgtcaaagctccccactcgactccattacgaagcttagcaatctcaaacaccgtagcgaagtcaaaaccagactgtaccaaaacttcaaatgcaccatctgcaagttcatgttcagttttcacgaagatttttgcacccacgttgacctggaccattccatgttacagttccctgtacactgcccatgtggaaggattttcgagaatatggaagactacaaggaccatgtttacgtcagttgtcttgtggacttctactgcgacatttgttttgttactactaagacgctggatgatttccagaagcatgcgaaggaggtgcacgacgattctgaaggatttatattgctgcaggacgacaactataaagttcgaaagccttccatgcacgtcagtcccagtgttatagacgagggagtcattttaacaggcaaacgagaacgcaagtcatcctaccgcttcgtagaagatgaattggacgaagtcattccactcgactccaatacgaatttgtacactccaagaaccaacaacagaagctgtccgatctgtaccaaagaatattcttcgtacaagaacatgatgcgacactacaaaacccacagacctgaagagatcgaggagcatagacagcaacaacaattcgactacgattcacaagatatgcaagacatggatttggaggatgaagaatcgatgtattcgtgccccgactgcggcggaatgtttaagtctttagagtggaagatacatttgacagagcagcatcagcagaaaccttgtggggaatgcggcaagtttttccaattccagacggaacttgatcaacatcgaaccactcatttgaacttgaagatatccagggactcgaaaacacaatcatacacgagtactatgataagtcctggaggagaagatgacgtggaaggaggagaagaaccgggtgaccgagtattcgcttgtgaagtctgcgaattcgtgttcagtacacaagatgaattaatgaaccacaagcttgaacaagaccacggcgaactagagcctatggataacgtggacggtatggaaaacatggacgataacatggacttagaagtaatggaaccattgcaaactatggaaattttagaaccacagatcgagactacttcaaagaaatctaagtgcgatgtttgcgatcaggagtttaataactacaacggcctgtgggaacacaacagaagcaaacatccagaaagaaaaacaccacacgtggatacataccctaaaaaatgtaaggagtgcgacaaggtgtgtactactggagctgcttactacagacacattcaaatccattctaaagtaccagcagatgctggtgccaataagatgactttattgaaaccaaagaaagaaattgaggaagaatcctatcatacatgtaagagatgctttaaagtattttccagcaaatataacttgaagaaccacttaaaatgccatggaattaatattaatcctgttgcgaagaagatggtgaggaaggcagtatgcagagtgtgccaacaagtgttcgaaaccaatgaagagttgattagacacaaacaagaccatcataactcggtcgaaactccatatgataatggggatagatccagtttggtcttcccttgcgatgtttgcgtgatgacatttggaagcaagattgctctgaagaaacacaaagacaagcatattctcgagtcaaaaccaccctctcgatcagtattctgcaaatactgcaaaattccatttgatacctatgcagctctctccctgcacatgtcgagagaacacgatgaaagaggtaagaagcaaataaaagaagtttacaaacctgaagagtacagttgtactatttgcggtaaatcattccaatctgctggagctctaacaacccacatcggctggcacaaacgtgcccaaaacgacggaactggcaagttactgaagcacgttccaccagctaaacctaaattgcttaaagtgcaaccgattcaaatcaaagaggaaccttctgatgagccaaggcaccagtgcagtacgtgcttggcagaactacccaacgatacagctttacaggttcacattttggagaagcatagaagcgtcagtgccattatgttgattccccgttgcaatacatgcaacaaagactttacgacacaagatgaatacgaaacccacaaaagacttcatgatttcttggaacgccagaaacagcacgagcagaagatgctaatacaacaacaagatggccctcaatcgaagatggcacctaacaaaccaaagtttccctgtaaatactgtaacgccgccttcagcaggtctgatacacttggtggtcatattagacagtaccataaggagcacgttcagactgaattcagatgcaaccagtgcgacagagtattcgagaagcaaaattccttgaccatccatttaaaaactcatgacaagcaaagaagcttcccaaatccagcatcccaaagcaaaccaatgttctcttgttcta

SEQ ID NO: 6349 - DNA, 3952 bp, Diabrotica virgifera
  SmartBlast Evalue=0; Info="Coatomer alpha subunit, putative n=1 Tax=Pediculus humanus corporis RepID=E0VQA8_PEDHC"
agattatcaaacatatatttttacaaataaaataaaatttataataaaacattatctctaacctgagaataagatctcaaatatatcaatacttaatcatttccaaatacaaaatgcatttaacctatctaaattgatgtacacttattctgagtccaatacaatcctttccaacttcagctacccggcaaacattgcacaatgttcccttatatttaggtaagtaagaagttccacacaacggacacttttcttcggcttttcctctataaatcggtgtatacgaatgaccacacaggttgaaaggattatgttcatcatactgcatctgtaattcatcggtcagattggtatcacaggcttgaatgatctttctagcttgttgagctacttcaggtcttgggccgagctcaagaagtcttttagcaaatgatgctgctgttttgtaattttttagcttaaagaacatatttagagcagtcctgagtgttaaaatttgatgtataggctgaagtttacaatgtgtgaagtaagccgccatctcgcattgacgtttttgttcttcatgtgaagcttttggtaaagtttttcttaaagtttccatctgaagaccacaaatgtattcactacatatcctcaacaactgttgtgcttccgatatttcttgtttattctctactactactaacgttactgagagaagaagagtttgaaatttttctatggcttccgtgaatttgcctcctgtagtgagttgatagcaagcctgtaatttggcgactagttcattcaatttcacgccagaagcaggcaactggttcttaacattggcatccttccaatttctcaacggatagctaaatgatggcggtatattttgctgccaagaataaactgttctggaactgctatacaaactaataaataagctttcgtatggtttaaaatcgactactcctaactgatcatgaagcaatctcgcagctgattcaaatgaaccggcagcgatgtggtcggcaactaactgcgaatttttggtccatgtaaccagtggggatggaccttgcgtaggcaaatgaacaaaattgccctccgcttcaacaggaaccgatggacctaaatcaggtatttccaatccttcatcttcaacgtcccagcctccttccccatcaccaccacctgcagcagcttcagctttcttctcttctggatccagctccagttcgtcgtcgtctccccaacctggtgcctcttccattcccatatcggccacaggttccgccataagagatttcatgttagcagaagctgtagcaactgcggccgtattttcgaaaaagcccctactaactgtcaacaaaggccaattggattctgcttgttgaattggaggaggtggcttcaaaaattttgcatttggatctacatctggaaaacctttcttttctccaatttgttccttcagctgttcagcttcatctaccattccgtgagtagcagctgtcaagtaggccaaagaaagttgattggaagccttcaaaattttaacacgctcttcaagatcaccaagcaaaagtgcagcatgatattgagatgatttagcttttctaatttccgcaattttcatcatttttctcaatttgtccaggttgccggtaatcagatataggaatgataatttttcgaaactcttggtcctttgataacacatctcaactacttgatggtttccttgccatagagcagcatgtgctagttgatcccaacaagctttgtcattcaaagatttcgcagcatctagagcaatctcaatatttccacattccagagccaaagtaaatcgagttttgtcgtcttttacaaaatgtaaggctacttcaggataacctttttgttgtaagtaagaaatcatagattgtcccaccaattttgaatttctaaccatatacaaaacttcttcatatttgtgattaattaatgcaagtttgaatttgtattccattgaatccactgtcaatacccgtggtttgcattcacgatcaaggcaaaagatctggtttcctcttactctggtgatgtatattggaagatcgagggttctaataattccttggtcaccgtttttaagtgtatatttcaaatggttgcttgtagtataaataaaaactcctgtatcatcccaagctccagatttcactctagtattttcgtgtaaacaacataaaacatccaatttcctattacaaatagtcacgttgtgtttggaaaggagagccaagtgggacatatcagacgaccagacaacgtatctgcatttgttaattttcacttgtgctaaagttctcttctgttgaacgtcaaacagagtaacatgttcagaatctcttaataacagcattccagtaccagcataaaatacttcatcacatgtaggagtttgtaccttcttggtgacttcgtttttcaagttcttgataattagttgatgagtcctgtccaaaacggcaaatctgtttcttgcaacccataatgccgtaagtccagaagaccttttgctttcagcttctggtacttgatcatctctctcctgctcttttggaatcacatataaatcgtatgtgctattatccaagtttgaagttcttgtagaaagaagaacagcattttcagctggattaaaggacatcttataaactggtatttttcctccaccacgaatctgaatgactggaacatctttagatgtggtaaaatcaagttttcgtaagtaacgttctttaacataatacaggaggttgccatgtactgtgtaagctggacgttcacgctcaagcttgaatataaccattccaccatcatgtccagcagcaaacaagttgaggtttggatgtgatgccattatccagaatctttcattttcccttttaaatgtatgtaggcaagttcttttagttgtatcccaaactctaatagttttatcttcactgtttgagagaatcagttcctgtctaggatggaataaaacacaagaaacattatgccagtggcctcggcatgtatcaacttcccatgctttagaatcattcattctccataattttacttgtctgtcatcagcaccagaggcaataagaggcagagttggatggaaagatgcccagtttacacctctatcatgaccctctaacacatgttttacaactgcatctgcttgaccaaaaagatcagttgctcctggattcttcaaatgttcctctagtcctgctggacctggagctacatttttctttcttaagcctgaaatgtcccaaactctgacagtggaatccaatgaagctgacaccagcaaatcttcagaaggatgaaaacttacacacataacatagtgattgtgtccagttaaaacacaaatgcaagttctgctctgccaattccagatcctgatagtttgatcatcagatgcggaaactatccatggatattcatggtggaacaatgttgtacgaatataatctaaatgacccaatagagtaaaaatgcatcgtttttgtttgtaattccatactttgatcttgtaatcatcaccaccagaaacaaataagggctgttgattgtggaagcaaatgcctcttacagggccatcatgctcatcaaatttctctaggagggtgcacatacggtagtcccataattggatacaaccattgtgaagactagttaagatccagggacgtttagggtgaaaagacagcccttttacccgggcggatttcgtttcaaacttagttaacatgatagtttttaaaacacaatgattaggctcagttataactctatacaatacttatcgcattattagcacatttcaacaaaaaaccgtcttttactacaagaaaatatatacttttaacaaatttaccactattgacgtggaaatcaaacctttaaaacc

SEQ ID NO: 6350 - DNA, 3927 bp, Diabrotica virgifera
  SmartBlast Evalue=0; Info=Piwi n=1 Tax=Tribolium castaneum RepID=D6WSL8_TRICA
ttttagttcagctcaagaccaagaagaaatatttttggaaggtgaatacaaataaaaattgggattttaaaatatggaatcccgtggtggtaagggcagagcacgtggaagggctcgtggtgctccacagggaggtggaccaccaggaggagctcctcgacctggtcctcctggtcaacaagggcctggtgcccagggacctccgcaacaaaaccgcccacctggtgacccatggagtagagcggcagctcctcctcaacaacaaggtcctcctgccgcccagatgggtccgtgggtaagaccacagatgcctactccagcagccccagttgtaggtgctggaaggggatcacgctttggaggtggtgaaacaggtgaagtgtctgcacctgcagaacatgccagagctgttcaaggagcaggggatggggagaaatctcgtgctacaagtagtggtgtgagaggcagaaacctaaaatatgagataatccgtacgaagccggctgatatgcagtctaaaaagggtacatctggacagcctattaatttgatatcaaactatttcccaatgatacaggcaggaaaattcctgttgttccagtatcgtgttgattttaacccagacgttgatcacactggtgctcgcaagaagtttatgcatatagccctgaaagataccttaaatggatatctgtttgatggaaccgtgctatacacagctgcacgtatccagcctgatccattggagaagtttgtggaaaatgaagcaggagaaaaagtaagaattagcatccggatggtcagtgaactggcgtggggtgatttccactacatccaactatttaatatcttaattaggaaatgtttatcagcaatgaagctcactttgttacaaagagactactatgacccccagagccaagtaaatatccatgagcataaattgtctctttggccgggatattttacatccatacgccagcatgaaaaccaagtcatgatgaacatcgaattggctttcaaagtactccgggacgacacttgctacaacatgtttttggactgtagaggtccggaacctaaaaaagagttccagagtaaaattataggatcgagcgtattgactttttataataatagaacatacagaatagatgatgttgacttctcgcaaaatgctgatagtacattcccgttgagagatggctcacaaatgagctatgctcaatattattcagagaaatataagatccatattagggagaagcgtcaaccccttctagtgtcccgtagtaagcccagagaaatacgagctggaatgcccgaggtggtttacttgattccagagttatgtaaaccaacaggtttaacggatcgcatgagggaaaacttcagactcatgcaagcgctagccgagcatacacgagttggaccagttgacaggatgagaaagttacaagagttctgcaagcggttcctggggtgcgccgaagcagtgacggaactcaaaaagtgggatttcaagttggcagatcgcctagtacagtttcaaggaagagttcttcctatggagaccatcgttgccgccaataacgcaaggtatgcagctggaccgaaagcagattggacccgtgacttacgggcccaacgaatgttcaactctgcaaatatgacccgactagttacgatttgtccatcgagacaaaagaatgaatgccaggactttttacaaaccttacaaaaagctgctagaggcatgcaatgggatattggccggccagaaatctttgatatacctgacgacagaacaaatacgttctgtaccgctattgaaaatgtggcggcaagaatggatcccactcttatcatgtgtgttttgcctaccaatcaggcagaccgatatggttcaataaagaaaaagtgctatgtagatcgaggaatcccgagccaaatagtactaagaaaaaatctgacatcaaaaggtgtcatgtcaattgctactaaggtagcaattcaactgaactgcaagatcggaggagccccatggagtattgtaatgcctctgtcaaatgtgatggtagtgggttacgacgtttgtcgtgataccctaaagaagcagagtagtttcgctgcaatggtggctaccttggacagagcgatgactcgttactacaaccatgttacggagcatcaattgcaggaagagttatctgagaacattagtgcgtttttgattgttgcttgtcaaaagtacaaagaagttaatggtagataccctgaaaggatattgatctacagagatggtgtaggtgatgggcaacttccatttgtgttcacaatggaagtcgagagaataaaagaaaaactgacgagtgaaatttataaaaatggggatttaaagatgtcgttcattgttgtctccaaaagaatcaacacccgattctttactccaaattcaaatccacccccaggaaccgttgtagacgatatcgttaccctacctgagaggtttgacttctttgtagtaagtcaatgtgtcaaccagggaacagtagctccgaccagctacaatgttttatcagacaatatgggattatcacctgaccgtttacaaatgttaacatataaactgtgccatatgtattacaattggagtggtaccgtccgagtacccgcaccgtgtcaatatgcgcacaaacttgcgtttatgacggctcagcatttacatcgtcctgccaatagggcgttggaaaccctcctatactatttgtaaactggtgttaacccatgatttgggttttcacgaaagaatttttgttttttgttacttttatatttacgttagtttataaaatagttttaaaatttgacaaaaaaattttcataatatttcctttttaaaacattgcattattgcattttgacactgaagagccagaaaactacatatttgaggatctaagaagcaagtttcaccaagtcactaagttaaatgtaaaaatgattgctaactactgcagtataacagaatgtttctcaaataggtaacatgattacaagaaagatatacaagcctattgaatgagtcctccgaataacgtaagtgctagattattcgtttttaaaagtagaacaaaaattttaaaattataatattggtaaattgttggctgcgtttagagatatttataaacttcgttgggtgcgttacgaggcgtatatctcccgtataccccatttaccactgtgcattatgacacagtcaacgcgcaacgcagccaactgttagtgtagtattatgagacggtaaaagtaaattacgataaacgccaaaccttgagttcataaaaaatgtattcgatttttgaattaacataacgattcatatttacttggacttagtgtattttttgttaacgtaaagctttaggtttagagctttttttttgttcttttctagttttaagcaactttgtaactttttttaagtgacatgccatgtgaacagggccttaggtcaagatataaacgctttttaagattgtctttgaacgggatcttgaaattaaaaaaaaatattctgtaactcggtagaggtccagtatattactgtacggagacgggtcagtcagttacataatttgttggtactagttttaatgaaagtaatttcaagatgtgaataaacgaagtaagcggttatttttatatattgttcaaaataaaattgccatggatattcagcttcttttttcccatttatgcgaaacattacattacaagaaaaaagtaaataatgtacttatacattttgacaatataacgatttgaattagaatctgcagcaaaatttattttgactatatgttttactataaagaacaagtcccagtcttttaacatgtgacaaaaatgtgacttggtaag

SEQ ID NO: 6351 - DNA, 3923 bp, Diabrotica virgifera
  SmartBlast Evalue=1E-88; Info="Lethal (1) G0193, isoform B n=2 Tax=melanogaster subgroup RepID=Q7KVT8_DROME"
gacagcgtgtgtcaggggaatttaagacaaataaaaaaagagcaatatcggtcggttattctattcttgtttttggaagggaaattgcgcattggaatcaatgagagcttggtacggcaactcttctcctttgatggcgaaaattggtttaacaattttcaacgtagttgcacgtaggcttttgaaaagtcacaccaaggtgctcataaaaggattatcatggagaataacgtaaaaaaatccacgatctcgtattgtctgaacgccgactgaaggtgcgcgagatagttgaaacaatctgcatctcaaaagatcgcgtgtgccatatcctgcatgaaattttgtgcatgagaaagctgtcagagcgatggttgccacgtttgaacactcagggcagcaagcgcaatcatgaaaccacttccaagcagtgtttgaagctgtttaagggtaatccgaacgagtttctacgttgcttcatcattgtcgacgaaacatggatccactggtgcataccagagaccaaagaacagtcgaaacagtggacgacaccctgcaaatgtcctccgaaaaaggcgaaaacaatcctatcagccagaaaagaaaatggtcaccgttttctgggattcacaaagtgtgatttacattagcttcctgaaaagggacaaaacggtaacagggatttattatgccgcattattgagtcgattcgacgtcgacttgaagaaaaaacagccccatttgggggaaaaagtgctcttccaccattacaacgcgccggctcacacctcctccgtcaccatggtcaaattggtcgaattacgctacgaactactgttccatccaccgttttctccagatttggccatgtgggactactttttgtttccaaacttgaaaaagttactcgccgggcagaaatttaagtcgaatgagaagttcatcgccgccacagaagcctactttgcagacctcgagaaaacgtatttttcggacgggttaaccttccgatgaccaactttttttgttacatggatgaccaacgggggtaaaaaatgaccccaggtcaaaaatgacctggaatgaatgatttcagcatttaaatcttgatctaacaatacatcctcgttttctgatactatttcatcttctatatcattatcaaaatcgttagcagtaataatttcctgtaattcagcctcagtaagatatttgcgagccatatcttatatgtacacaaaatactaagaaactataataatatacgccaggaaatattaataatgactaactgtagcagacaggaatgtcatgattcgtacctacataacaggcaccacagtctaaaaatagattttgataacgcgcagtgtaaaactacttggaattccacataatagacggtattttaccaaacatcaactttagaatatattttttattcgtaaaatatagggatttttttttatttcaaaatatgaggatatctagaatgatataaaagtcaaataaaaaaataatgagcaaaaaattgaaatttgaatttattaaagaaaaacatacgccggggttcaaatttacccccttggtcatccgaaggttaaagaagttgaagcatcgctgcatcaagtgtattgagctaaaagagactatggtcagaaataaatcaccacctttcccaaaatgtccgtttttcttttgtaggcaaagtgcttatcggtccgccctagtactgagaaataatttgttcttaaaaattgttctctttgtcatcttcgggaaatgcagccttcagatgtttactaaagttatatgatatggtcttgagagtaataaatcctccgaagaatctccttcccttgtggaagataccggcgccactgagaggtactggttggagggactcgactctctgggcatcccagaacggtaccgtggtctgcgctgcgtccctgtctatgtccgtgtgggtaagctcgatgtaactgtctggagatgatgtagggatcgatggggatgttgttctggttgggatgtcgggggaaactagccatacttttttccttgggttcttggtggctgaatcagtgttggcgttgtctttccagatacttgtactagtagggttgataagttttccagtgtcgaaatcgaattttgtacagtatatttcgaaattaagatgagaaccaatttctttaaatcgtacacctgtgaatacatatccatcgtcagcttctaaatcatccagatcaacagctctcttctcccaactgaaagtatgatagtcttgtccactatagatttttctatcggttattttatagtcttcaactggtacccatcgcacggtagcggcatctatattacctcgtggaagtagtttaccctcctgtatttgtacatggaggatacggtttttctttataaatcttaagccgaccaccaaccatattgtcagaaatgtttgcaattgttggtctcatgttaacgtatctgtcagaggcgcttccttgttcgtcacagaggcagaagcagtacgagcaatgccagaacagccatctccaccagctgtcaactttcgtagtgcctctactgcatccttgctttcttcccaagacttttccattctcgtattcgatgtattcgtagcgtctaccgctcaaaggatccgcaggacaaatccacatatcagaatcgtagtatctacaatcgattatttttccattacaacgcctctgttgtctgcagtataagttttggaagcatccatggctttttgtgtaagtatattcggcgcagttttctctgcaggttccatctggatttaggtctacttcattttgtacataaccttgtagcagttgggtagtttcttcatatgttactcctttaacatgattcttaggatcacaattccagaactcgcgagatgattgagccatgaccttcttcacgatttcgatagcgttattggtcctttcttcaaatctatcacgcattacttgagcctctgtcgtgaaattacctttattatacagcctcaaaagcatatacgagaactggatcatggagtatcctttaagctctgtaagagctatagcgttatacaggttgtaaataacctgctgaggtgactgtctagaattgcataacatgtctccttccacttccataatatccttgcgcaacaattccagaatcccagtatccgatattcctataccagacggcactataaacgcatgtatcctttccaaaatactgacgacggagttgctgtcgtgcgatacgaccattcgtgcaaaatcttctaaagttaacctttcgaagtctttcgtacggtctgcatatcgcaagaagcttttgaaattgacatctgtactggtcatgtactttaagagatcgtttagcctgagttccaatcgaactcggtctggaagattgttgagaactacagttatcgtactggtacctactccctccaagttcacagcaagttcatctagcttctgcgaaatcacattaatttttccgaaaagtttttcttcagtcttatccaagagcggtagaggcaagtgggaaaaatcaacattctgatcgactatattccaggctttcgcaattcctcccacaacttcacccgcgattttaataatactaacagcacctacgagagttatttcgaaaggatcactctttggcacaaagaaacctgagatcactacgaggatgaaaaaataccggaggtgcgacattgttgcaacggaagtagcaccaagtatgtacttaaaactaatactactgttaaagattgttgaggtttacgacattgtttctcgatttgattgtctcgcgattgattaattttagtttattgtttcagtaaaaacgacgcgcggatccaactcagttgttgtcaatcc

SEQ ID NO: 6352 - DNA, 3914 bp, Diabrotica virgifera
  SmartBlast Evalue=0; Info="Alpha-aminoadipic semialdehyde synthase, mitochondrial n=1 Tax=Camponotus floridanus RepID= E2AAL3_9HYME"
gcaccaataacaagtattaatagtatttatttgtcatttaaaaactagtttgtttaattatgaaactgatatcgtaatttattgataaacgtggacaagttcaaaagaatcgcgtctaatttagtgcaattttttaaaatgtggaggactagtagaatcgtggagaagtgtccgagagttgctactcggacttatgctagttcgaaaaaaaagattattgccatcagacgggaagatcaaagtatttgggaaagaagagcaccttttgctcccagtcatgttcggaagctagtcaaacgtggagtaaaagttatcgtccagcccagtaatcgaagggcgtatcccatgccggcctacctcaatgccggagcaactgtacaagaagatatttctgaagcatctgtgatatttggagtcaaacaagtaccagtagaccagttaatacccgaaaagacttactgtatattttcacacacaatcaaagctcaagaaggaaatttaccgttgttggacgccatcttggaaaagagaatcagattgatcgactatgagaaacttacggatgacaaaggtaacagagtggtggcgtttggtaaaatggctggtattgctgggacgatcaatattttgcacggacttggattaaggttgttagcccttggtcaccatactccttttatgcatataggacctgcccataactataggaactctagtatggcacgacaagcggtcagagatgcaggttacgaaatatccctaggtctaatgcccaaatccataggacctttaacttttgtcttcacaggatctggaaacgtatcgcaagggtcgcaagaagtcttccaagaattgccccatgagtacgtaacaccagagtttttgaaaaaggctgcggaacatggaagtctaaacaaagtttacagctgtgaagttcgaagaagtcactatctggaacgcgctgacggtggtggcttcgacccagtcgaatatgaagaacatcccgaaagatatgtttctacttttagcaaaaagattgccccatacgcatcggttataataaacggaatatactgggcagtaaacagtccaaagttactaacaataccagatgccaaacatctccttaaaccggcccacacaccttggttacctactgcacacggagctccagcattaccgcataggatgttgggtatttgtgacatttctgctgacccaggcggttccattgaattcatgaacgaatgtacaaccatagacacgccattctgtctatatgatgccgatagaaacaaagacaccaacagctttaatggtccaggtgttttggtatgcagtattgacaatatgccaacgcaaatacctagagagagtacagatttcttcggagatcttctgtttccatttgcctttgacatacttcaaagtgatgcacagaaaccattagaaaatcataatttttcgccagtaatacatggagcaatcatagcgagcaatggtaaattaacacctaactacgagtatatccaggagttaagaaaatcttcagttaaaagtagactaaagtcagatatgaacggaaacacttccaccaagaacgtcctaatcctaggagcaggaagagtagctgctcccctggtagaatacttaaacagagatcgatcagtaggattaaccgtcgccagtgagcaacgtgaattgggcgacgctatttccaagcaatacccaggcgtcgaaagcgtttacctaaatgcagctgaaaatactggtacattgcaggaattagtaaggaaagccaacgttgtggtatcgatcttaccagcaggtcttcatcctttggttgcgaaaacgtgcgttcaggaaggagttcatatggttacagcaagttacatgtcagatgaaattaagcaactgcacgaagcagcacaagatgccggaattacgattttgaacgaagtgggattagatccaggaatcgatcacttattagcattggagtgcattcaagaagttaaaaataatggaggcagaatcacttcattcgaatcctactgtggaggactgccagctcctgaattcagcgataatcctctaagatacaaattttcctggtcgccacgtggggctcttataaatactgttggagcagctaggtatcttagaagaggtcagattgttgaaattagtgaaggtggtgaattgatgagggcagccaaaccattagattttcttcctggattcaatctggaagggttcccgaatcgagacagtattaaatattctaaaatatatggcattgaagaagcaaatactgtgctacgaggcacgttaagatacagtggatttgcccaagcagccagacagctccagtttcttggactgctcgatactgctgatcatccaagcctacatcaacaaggcccagaagttacatggagaaaacttatctgcgatctattaggactggaagatgctaacatgttttatgacaatttaaagaataaaattagtgaaaggactggaacagattcagctgttgatattttagaggagttgggacttttggacaaccaaaatgttgttaaatgcggtacacctattgatacgcttacccattatctgtcaacaagattggctttagaaaaaaatgaacgggatttagtaatactaagacatgatgtaggcatcgtttggcctgatcacaaaatagaaaacaggggaattaatttagtcgtctacggagacagcaatggacactcagccatggcgaaaactgtaggctatcctactgctattgcaacgaagatgattttagatggtgaaattcaagaaagaggctgccttttgccgtttgctcaagaaatttacagacctatgttgcagcgactaagagcagaaggtttgacagctacggaaacatcaaagttcgcttaaaaacaacagtcaatacctacaatgatgggatgcaagttaccaaaagtaaagtgaaaaatacagagacatttgtttttgcttcttgtgcaaaagtgttttacttttgaattacttagtatttttaccgtcgatcacgagttaaagaggaggaaactgtttactgaatcaaatcagaggtagtcaaaatgcttaaagcaattacattgcgtaggctattacttacctaatattggttcaaatgcattaacatgaaaataagttgattttctaataacacactgtcgaacataaaattagtcaccagtaatttaaatttattttagaaattattattcttttttaactattttaataagtattttcgattgtaacatagtttactaacggattgcttaaaggaaacaacgtttctgtccttcaaagtttattgaaagtaatgaaaatgaacaactttcctttagtttactaaatattgaagagggaagattttaatttaattaagagcaaaggaagatttaatgattaagagcacattggtatacggatccgaaacatggagaataaaggtacaccaaaaacgaaaaatagaagctacggagatggacgccctaagaagagcaagtagaacatcgagattggaccgggttagaaatgaggaagtaaagcgaagaatgaatttacaggaaacggttgtagaatgcattgagaagaaacaattaacgtggtacgtaaatgttcagagaatgggggaggaaagaccgccaaagaaaattatgaaatggatacctacagaaaacaggaaaagaggaaggccaagaacgacatggatacaaggagtaagacgatcaatgagtgtacgaggattagaagatgaaaactgcaatgatagaagatattggcaacaaggcatcggacaacgtcggaggacgttttgaacccgaatttatatatatatatatatatatatatatatatat

SEQ ID NO: 6353 - DNA, 3833 bp, Diabrotica virgifera
  SmartBlast Evalue=0; Info=Isoleucyl tRNA synthetase n=1 Tax= Culex quinquefasciatus RepID=B0XAA0_CULQU
cttttaccgtatgtatttctcgtattcctgatgttcctgatgcaatattaaatatattgtgaattatttttatacaggacactaatttaaagatgactgaaaagaaacttcaacaaataccgagagttccagaatcggtaaattttcccgatgaagaagtaaaaatccttgcctactggaaacaaattgatgcctttaaatcatgcctgaagcaatcaaaaggaaaaccaaaatacacattttatgatggccctccctttgctactggtttaccacattatggccatatactagctggcactattaaagatgtagtcaccaggtatgctcatcaacaaggctttcatgtagaacgacggtttggatgggatacacatggtttaccagtggaatatgaaattgacaaaaaacttgggataaaaggacctgatgatgtaatgaaaatgggtattgcaaaatacaatgaagaatgtagaaagattgtaatgaggtacagtggtgattgggaaaaaattgttagtaggattggacgttggattgattttaaaaatgattacaagacattatatccgtggtttatggaaactgtttggtgggtatttaagcaactgtatgtcaaaggtttagtttacaaaggcaacaaagtaatgccatactctacaacatgtaatacacctttatcaaattttgagactggacaaaactacaaggatgttgttgatcctgctgtgacagtgagcctgccaattttagatgataaagaaggtgctgccttattagtatggaccactaccccttggactttaccaagtaatatggcagcttgtgtccatccagacttaatttatgcaagatttcagcaagttagcactcaaaagatttacgtaatgatggaatgccgcatagaatctatatttgctgctgatgatgttaaggttattaaaacctttcctggtaaagaattggaaggcctccgctatgaacctatattcaactacttcactcacttgaaagataaagcatttagagtgtttgtagacgattatgtgacgtcagagtcaggtactggcattgtacatcaggctccatattttggagaagatgataatagagtttgtttggcaaatggtgccataactagagatcaagaaccgatttgccctattgatgctaatggctgttttgttgaacctgtaaaagaatttttgggacaatatgtaaaagatgctgataaaaatatcattgctaagctcaaagaaactggaagactgattcatcaatctcagattaaacacagttatccattttgttggaggtctgatactcctcttatatatcgcgcaatcccatcttggtttataagagttgagcatatgagagatcaacttcaggaagttatatccgatacctattgggtaccagaatttgttagggacaagagattcgccaattggttaaaagaagctagagattgggctgtcagtagaaacagatattggggtacacccattcccatctggatgtctgctgatggcagtgaagttgtttgcattggcagtatagctgaattggaagaacttagtggaaagaaagttgccgatttgcacagggaaactgtggacaccattgaaattccaagtcgtataccaggaaatcctccattaaaaagaatatccgaagtttttgattgttggtttgaatctggctccatgccttacgcccaagttcattatccgtttgaaaatgtaaaagaatttgaagacaatttcccagctaactttatagcagaaggtatcgatcaaacaagaggatggttctacactcttaccgtaatatccacagctctctttggcaaggctccgttcaaaaaatttagtttgcaatggattagttttggctgcagatgggtttaagatgtccaaaagcaagaagaactatccagatccgatggatatagttaataaattcggtgctgatgctttaagattgtatttaatcaattctccagtagttagagctgaaaatttacggtttaaagaagaaggtgtgagagatgttataaaagacgtatttttgccgtggtacaatgcttttaggtttctgcttcaaaacattgagatatacgttcaaaattacaataaagatttcgtatacgacgaaaataatgttaaaagcgacaatataatggacaaatgggtattatcatttacccaatctctgcttctttacatcagaaaggaaatggagttgtatcatttgtacaatgttattccacgattaacaaaattctttgactatcttaccaactggtacgttagaatgaacaggaaacgtctaaaaggagaaaacggcgaggaagactgctacgcagctcttacgactttgtttaatatccttcttaatataatcaagatgatggcacctttctcaccgttcctcaccgaaactatgtatcagtatttgaagcaactactagataccaaagcggacagcatccactatttaatgttaccacaaccgaatcaaactttaatacatgtagatatagaacgagctgttgctcgtatgcagagtgtgatagaactgggaagagtaatcagggacagaaaaacaataccaataaagtatcccttaccagaaataatcgtagtacatcgagatcaacagtatttagatgacattatacaattgcaaggctatattttatcagaattaaatgtaaggaaaataagcacaactactgataaaagtaaatttggcatcactctgagagctgaacctgatcataaagtgctgggtgctagactgaagcaagagtttaaggctgtgacacaaggacttaagtcgttaactgatgctgaaattaacgaaatggtggaaaaaggacatcgggatatcgctggacaacgcattgacatttctgaagttagattaatatttaaatccgagagtttaaatagcgaccagtatgaagtaaatagcgataacgatgttctggtgttaatggacgttaccccggattcgtctatgcaagacgaaggcaccgcaagagaaattattaatagagtacagaaactaagaaagaaggcacatttggttcccactgacgaaattgcggtattttataaaacatctggtgacttaagtcgagttgctacagaatatactgagtttatagaaaatacactcaaaacaccatttaaatgtctccaaagcaaaaaagcttcagatgaaactatcatagaagaaaacaaaagttaaaagactttgacattcaaatacttttgactaaaaacagtaatattcagctgcctgttgttaaatgggtaaaccttcaattagtaggactaaaatcgaagtactgtaaagatgctacaaaaggattagttttgttagaagctggaagtaaatctttaagttcggaaaacctaaaagaagaagcctctcggctgtttaacatcgacaaattcagtttggttttaaaggatggatttcctgttaacggacaaaacatcgataagttaagcagtcaagttgtttttgtggtaccggtagaccaaaagccagagttgcctagtggatcatcggcacctttctgtaagtttttaaactttgaggaaaagggtgtgaaaggaactatcatcttagaaaatcccgtaggaaacccaacgaagtatgtttatcaagacgtgttaaaactttgggctaaaaaggcataaagaaggttaatctgggcctgtttttagttatgtcgaaagtggtgatatccagtttttcttattttgataatttattgtgtattaagatctaaaaaaatatatacgacttgtgtt

SEQ ID NO: 6354 - DNA, 3820 bp, Diabrotica virgifera
catgaccaaaataagggaactgtgctgagcacgttttgtacatttcttaacttactaaatacaagttcaccatgtttaagactattagaacgttagtgtgtatgatattcgtcagttatgagtctaattgcatagtgcctgtcctgttatctatatttgtacatcatacacattgtttttacatttgtagtgcaggtatagtatcgcactaagctatattgctatttgcatggctttgtatattaaattttttcttcaacggtctggacatgtgtatccattgctgatcattattcgtattacaattaagtatcaacccttgacgaggagggtttgtttatatttataaaacgattaaatctaatccataaatactattacttgccctgcacttataaatggtttaagcaaatttattgtaatttgaataatttctggtaagataataccaaccagatatttgagttgaagaggagagttttaagaatgaaacaaggaatattttaacacgcaatgaaactagcgattttaaaaacatcattcaggaaaagctttaaagaaattaaataattttcatgtaagcaattggaataattctataatgatttattatgagggaaagctaataaataattctctacaaaagaaatattgctagcataccaatgtgctttcaaaaatctgaagataatacattaagtaggtacttacattcctggttggaagtacagtttctgtgttgaatctaccactataaaaagtaaacaaacatattaatgtattcaactgaaatatctacctttgactaccagtggcgcagtttttctttatacggtacgtatataataactgttgtacaaacttataaaacaaaagaacgtatttgcaattttacttgatattcccatttatcttttaatttcattttacttattttattataaactggccagacgtcacactataaaacaagttgtctgatcagatgtgggcaaatggatagggtaacttcatacataacatgggaacatttaaaaattaaatggcttttattcaagctgattgtcgaataattcccgaatttgtctattaacttaccgttatcaacttcaagatgattgaaaatctatgttcacgttatatttttggtcttataatttattatatagtcagataatttataaagaaaaatttgttaatatacaacagacaccgcagcatccaagtaccaaattgacaaaacatttaaattgattattataatagttactataatatatttctcaaaacggtcataaaaaattcacatttaatattcaaatcagatgctaagaagttttacgaaacgaaatgtatccctacccatatgtttttggtgtgttcagtttaacaaactgaattccccataaataaattaccttatcagactttatgtcaataacgcactttggaaatgcattcgaagacgtttcttaaaactacagaaaggttctaagcttttaaaacgccagatgtagtaatttattgccttttctagccatattgtaaaaccgcaaacatgatgaccgtgttgtggtctcagcagtatcgtcacgacaggtaggcagttcagacgcaccctcgctgccctaaaacaataaacaaccctcttacgagataaataagcacgcctttttaccaaaaataaaataaatattactgttcgttgtttacacttatttttaattgattccgtcaacacacccaccatcggaacatatataaggatctgttcacttgtaattgtttaagcatactttctcttgattgtgaatagattctagttttagaattggtaggtcaactatgttatctagattatgacgctaccgtcagtttataataaaccaggtacacttaaagaaacgttaaacattcttaataattttaaatcatacttaaacatatacatatgtccggcacattaaaacgtgtcatgttatatgtgatgttttatagttcaaaagcacgcaaatttttgttttaatcgttgtttaagttttaaagtggttttttaatatacatactctgttaatgaatgtaatctgtttttattcctatttcttttagcacgctaaggaaaaatttagtgttaatagaaattttaaggttcaacattgaagaggttataataaacataaaatagaagagcagactagttctatggtattttgttggaagctagtgtcattttagaatatgaaattctttgctattaacttactatagatttaagcaaagttttatgtcaaaattgtttagattatcatgtaagagagttttcattgattagaatactagcactgataccataaaaatggtatcagttcctaccaaaacgtcacagaaaactataacaaagctagaagtctgatattgaaaacgacaatttactctttcaaagtattttcaaattttctacataatctagtaatatcagtgcttacagagcgatgttatcccctctttgcagtgtttttctggaagtgcagcattagataaaattcgttgaccggcaaggaagatcttcagttggaagaatataatataaaatctcaagagagccaaatctgattacaatacattgtctgattgaaaatcatttttttcctgtaggcctatttgttttcgccagtttcactagaagtttagaacaatattctccagttatgattctatccatttcaagatagtcaaccagcaaacaattacagtcaactgctatatcgtgtgatctggaattttacgtgacgtcaacatgtgtcaatgtaaggggaaaaactacccgagtttttctgaaatctgtggacgagaccgacaacttatcaggctgctttcgtactaaattactaatatgacaactcattgttgccttttgttgtaaacaattaacactaaattttccgctagccctttctatatttgactttattagtcaagatgactcacatcgttgtaatatgtgtttaatatgctctattaacattttattttaaaattaatgctacaaacgtctttctaaaactcattattatagtttagttcaaatacataatattcatatccattctgcaaacattttaaactgttctgaactttaactctaaattaaatgttaagggtttcagatacattgatgacgggcagtctactgacgctgtatacagtagaaatagtatgtcattaataagataaaacaatattatgtagtcgggtatcaaaattgttcaatgctttgctcgatacaagattatgtgacgtatatttctgctctgtacagttattagaatgaaccttatgaatcaatctatgcagcagataaatttaaacaataatgctctgtaagttatgtattttttcaattatatagtgtaagctgtacgtgtgaacgcattttaaaaaatggattggaaataccaaaaagggaaagaaaatctaatttatttgtatattctagatattgtatggccttacttttaaatgagattatttataaaatagtataagatgagtgcaattgattgtgttaaaaaagcgaaatacaatgtagaaacaacatttactttttcgattgcaaagaatttgcatataatgaaacttttgtccttgtcgttatcgaagattatattataactcttcctaggctacaatttatacttttaaagaaattttatgaggttattatatatgtgaaaaaacgagaatttttatttaaactgttgcatacttttatatagctttgtatttgcttttgagattatcaataaattgtttatatctg

SEQ ID NO: 6355 - DNA, 3814 bp, Diabrotica virgifera
  SmartBlast Evalue=5E-66; Info=Novel protein similar to vertebrate nucleoporin 153kDa (NUP153) n=1 Tax=Danio rerio RepID=B8JIZ8_DANRE
aaatgactaccgctgggtagttctgcgcactgccttctttatttttctagggggtgcagcgtcacctggtgcacttgtaaatactggtgtagttcctgcactgaagttaaatgttggtttagcatttgcgtcaaagaagttgaatcctcctgaaggcgctgcatgtgctgctggttgtgttggtgtcatattaaacgctggcgtcggggtcgtggaagaagctccaaaattaaatcccgccttctgggtatcagcattctggctactaccaccaaaattaaaaggtccatttttgccagctgcactaaacatattcgtagtggatccactgtctgtcttagctccagtgaaactgaaaactggcgctttcgcagcctggccaaagctgaagcctgacgattgggtagtggctgcgctgacggcttgactggcggactgcccgaagttgaatactggggcattagtcgccggttccacgttgggtttggtgaaagagaatgatttcgagactgttgtattggtaggcggaaggtcaactgctggtttagcaggaattccaaaggctggagcaggcttagcatcaataccattattaccacttgtactactagatgacttattttgtccaaacagtgttatgcctgttgaactgttttgtccaaatgtcgattgagatgtcgctgtatcttgaccaaacacgggagtagcagatggagtattctgtccaaacacaggtgcagtactggcaccagcggaattgactgctttcccaaaagaaaatcctggattaagcgacgacttgattactttgtttggtggaggctcaactgaattggttgccgcaggtacagccggtttagaaaattcaaatttggcaataggcttggatttatccgcagcaaaactaaatgcaggcttatgactcgccgaattcaaatcatttacagcagcagtgggtgctgtacttaattcctttgcagcagcaactgttggaagagcagttttctcttccggcttagcaaaggtggaaatggtacttgatgttttttctggtaaaacagttccactaacaacagcaactgctttgctaccaccaggttgtggaggttccacttcaggctttttctctgtactaggtttaacaccaaatgaaaaagtaggcgttgtactactgtttagtttagtttctgtaccaacaggcgtgggtactttcgttaaagtagattctcctgtagctatcggctgaattccaaatttgaactgcgtagttgctgtcttgtccaaaccaaagttgtactttgttgtagacaattttccagtttcttgagcagttggttttggagctcctggtttcagagcttcacagcattgacatttactacgatccatttgattccttaccatacatacctcacaagtccattcgtctgccttctttttaaacgaatccatcacatctatttttgctacccttggattctcacaagcaacacatttttcatgttctgctttattccttacaagacaagtcgaacattcccaactgtttgtcggaggcttgaactttcctagggaattcgaagatgaagtaaccaatgacccagcttttggattaggtgtttcacacgctacacatttggcacaatcacttgcgttcctaatcatacaggtgggacattcccacatattctccggcatcttgaacttatccccaaacgaagttttcgtactctcgatctgtgctggtttcactttgggagtttcgcatgctatgcatttcgtcttatcttgactgttcctaatcagacacgtgctgcattcccaagttccacttgctggtttaaacttatctaataatgaagtattcgatgaaatatctttggaattactttgaccgttgttcttctctttaaaactcttcgagctcttttcagttttgtttagattagtcaaaggttcgctaaatttgaaattgtttatggctatgatgctgttcagattctcagcaactactaacggatctgaaaatttaaattgagtggttagtgtctgttctttttgattggtttttttgatacctccaatacccaaagacgtctgcgaattttgaggcttcattggggtagtagtaacagagatttctggcactttttcaactgttttcttaatggctgaagaagtaagcgaatcagatttatttaaaggtgttgttattggaagactgggcaaaatgttcgacttttcttttgtcgtattttctactttttgaatgtttgtgtttttttgaggtatcacttcagttttcttagaagtttctggcttagaaacagcttttgttactttaggagtttctgtcagcttaggagcctctatgctttgagaaattttagatgtaacaacagtttctatttttttagacgaatcaaatttctgaagtgttgttgcaaaagttttaggagtatccactacttttggtggagtttctactttagaggtgttagttggtgaaggttgttgcactgtatttaggtctgatttggacgttgtggcaatttgtctaaccgcctcagtactactttgaagctttgccttttgcttcatttttagtaactcagatactgtaggaacctgtaattctctttttgaggcattttctggtattaaagtgtatggttttgcaccgatgtgctgcccaagcaagctactatctaatctagccctttttgaagctacaggtattttcttagcatcgttaacaggtgtagtatattgttctatagtttctaaaattttccttgcagttttccctaacactaaatttccattctcactagtcttcttaataggtttgatatgaaccgatctcttcagattagctctaaaatcttttactctcctaccgaacttattcccataagctgaagctcccccgtacattgtacttccactgtaaaatggtgaactaattactttttctgtggataacgtttgatcgaaaaagtttggcgaaccaaaagttgatgcgttaaattggggtcttcttaagctcatcgatgtgctgagctgtggacttgcagtcctatccacaaacagggaacggtttgccatatttacagttggggtttcaaagagagatctcctatttggcgaggtggtttgccgaggggaaggctgctttgagcttccttcgctttgacaaacatgctctttgctcccaatcctagctaccgaagaataaccacttgtggattcctcactatcagagtctttatgtccatttaaaaagtcactactaaacaactgtacatttatatcactatttatagaagaattaacattgttaagtaaatttcgtgtttgtaaaccagatggacctgctactggctccagaaaactataattcctatttatcaataatttgtctttgatactatcactggattttatgtgtgaaacactgacgtcttcgcgactgaccacaaattttgctctttttgctgggggtcgaaactgttctgtgtcgtcttcggaatcgtcttcttcacgtctccttattgttggcttaacactatcgtcttgtcttccgaaccaccttctcagtggtgtattactaataattgatttgacttttccaacgaatgactgttcagtatcttcttgatttgaatacggagaaccctggtcaccactactattgtagtctttcgccataattgcactataatatatgattagaaataaacttgataatttttatcactttacatttttgcaatttactgacaactttcaccacacgaggattaaatatggc

SEQ ID NO: 6356 - DNA, 3797 bp, Diabrotica virgifera
  SmartBlast Evalue=1E-23; Info=Transposase n=1 Tax=Agrilus planipennis RepID=D2WLV0_AGRPL
agatacgatattttatacatgccgaacttttatattggtcgactatttcaagtgtagttcatatacaccgtattaactgcatgtgtcccgtttttatttggtttattctgtatgtaatgctgattatacgagtatgtagccctgattgtatactttcggtaattgttctatttttttactttaagaattgtttagatacaagtcatccacacatagcgcttagctatgcatgcttcaagacctttgttcctgaacgtaatccactacaatttagaagaaattctggttcatagaagacagcaggtgtctgaaaatttcctgaatactaagattaacagatccttctttggcacttaaatacttcttctaaagatctattttattcttaacaatgtatatgagtatcgaactacaatatctagaattactaaaataggcaaggagcacagctgtcatatatttaaaacagtaatcaaaaagtctttaatgatttatttgttcttcgaagttaatgccatatgcaatttaaaaattataatcgttaatgtgtaaaagatataatcacaaaatggtttatttaaagatacgataatttgatatctaactaattctgtcgcaagcatacctactatattgctggtaattttctttatttatacaggggtagccagctagcaaatttgcaaaaaatattaatttatgtatttacaacaagtgttcaaaatgttgaattcatcttaatacatttcaaatatcgtttttcgatcaaattaataatgtgaacaagcatcgtgatatctaactccatggttatccaatgttcgagatagtcaacattttcgatcttcgtgcaactctgttcttaagtatgtcccaaattgagaaatccataggagtaatatctggcgaccttgaaggccacagttcgtgaaggcgttcatctggcaaaggaaacagtaactaaccatgtcaccacgctctgacaaggagggctcaatgtggagggtatataatatatgaattaaaagccctgatgtagtaaaaaatcaactaaatgtgtccagttagctagacgtcaaaattgtagggtgtaaccaattgtaattataatcgaaacatgcactaaatgaattatcattgtcattattaaattgtgtacgtgtcattaagagcaatatgtactcaggatgttaattatatattgacagctttgctgacgtgttcctgattaatgatttctttatatattaataatattcatatgtttgtataagttgacgtcgtaacattatctatctacatataataattaatcataagttaaaatttttcacaaaatttatttgtttttctacaaagttttgtttaaaaaactatccaagtagttaataaaattaataaaatacggtgaggtgaccgggtcttgcttttattttctggtgttcagccagaattgtgcccaccattgttttattgctatgatttacttaatcaatgtcgctaaaaacagggcgtgtgaaaatcgaagtcgtatagggccaaatctggagaatacggtggattggacagcagttcgtagccaaattttaccatgtcgacggcggaggtatgagccggtgcgttgtcgtggtagaagagcacttttttcttcgccaaacgaggcagtccttcctgaaatctggcctcgaatcggtccaataattcggcatagtagagccttttgtgcttttccgggaagtctaggtagattacaccttgtgaatctcaaaaacagtggccatcactttttcaaccgatagaataatctttgccttcttcggaataagttcggagggtgacctccactatttcaactcttccttgtctctggtgtgtaccagtggatccatcgacagtgacaaaacaccgtagaaactccttcggattatgctttatcatcctcaaatactcctctgaagtggtcttacgattgcgcttgttgtccagagtgagcaaatgcggcacccatcgacagcttacgagatgcctatattatctcagctatctggcgcaccttcagtcggcggtctgccaatacgagatcgtggatttttttcaaattaaactctgtggtagcccatttcgaggttatcaaaaaccgacatgccaccacatcgaaactcattaaaccaatttttgactgttgccatcgaagaagaaaagtcactgtatacatagtgtgaccaactagccagaaaaatccgggacatggcccgaattacgaagtcgtgtcccggcgtcccggacaaggcttccgggccatccgaattttcaacattttggtaaaattctattttgaagttttggatacgttattcttctaattcacataaaattggtgggacgaaaaaaagtcaacaatttctagaatttaattctaataccacatccaaaacgcatgcattttatatcggtggacggtggactttttttcgtttctgtattttaattatcctcttctgaaaaaaaaaatggcccgattttcattgaaaagtcccggatttcacgtattttttttcagccttgtcccggattcgactgaattggagttggtcacactatgtatacagcatccaagtgctctttgatttcactgtgcgatttcacttccaaaaacaataatcgaatcaccggcagatattgctctatttcatgtttctaaaatccccagacaagcccgctttgcagatacgccgaatatattacatgatgattcttctagcgattgcagcgccgtcgggcggtgaggctaagtacttatgggaccgcctacgtattgatctacctcttatctttgttttctaaattgacaatatcatcatcgttatttctgttacggatttccgacttactcgtaagaagggaaaatacaacctaattatgtctgctttcaaatctttttcagtttttaggtatatattttaggttaggtttttcaattcatgtacgaagcacatttggagtacttcttttgaagaaggaaaacgacaatgcaaacttgaataaatcaacattacacatttgtgatctcacttcccggcacttagaaaaacaatgaatttttaaggaaacttaaaaaatgaactctaatatttacacacgatgatctacggtaaccagcatttataataattcaccaattttctcaaaaaaaaattagattgattgttcacttgataaaaatttttagtgtagttagtataattgttcttttacaatttgtcacttggaaatgttcatcaggatcacacacacataaaggtgcgtattgacaagagcattttctttcgaacgaaccaaacttgtcgaacgggctgggtgcgcaaaaacaagtaaatgctcaggtttagtcaagtgttcgttctgttcgccgcgttcctatgttctgctcattttatttcaatgtttgtccgaccacggtagctgagaatctagagtatgcccatacccactgagcgtcaacgaacaaatgatgatcatggtcaatgaacttgattttttcaacggttacggacacttatccgaaaatgatcgtcttgttcggttcggcagaattttgctcgcgaacgcgtatttactaagcaatgtgttacagtgcggttcgttcggagaaaaatgctcaagtcactacgcaccttaatacatatattactattttgttgtatttagaaaattgcagtcttgtttttaaaatggtctgtcgcatgctttatataaattgaatgtgttattgagtgtgaagacagcagttttcaacc

SEQ ID NO: 6357 - DNA, 3784 bp, Diabrotica virgifera
  SmartBlast Evalue=0; Info=ER degradation-enhancing alpha- mannosidase-like 3 n=1 Tax=Harpegnathos saltator RepID=E2BEA8_ 9HYME
gccagcatgtaatttttttagcaaatttagtattactgaatttatacaaaaatgcattttgcatatattcttattaatatgacaactaacgattttttttattttttatcttgaattatcactttaaagtagtaaaacaaagtgtaaaaaataatgaaataaataaaaacagtttaattaattattaattaatttactacacaaattttaaaaatttatttctgtatgaaatatgaaatgtgtcaaaaatttttatcttgatattggttcgttaaattgttaaacgtaatatcgattgtaactgtaatacaagttagtttccacgttaacaaaaacagagtaatcaaattttgacgttacgaattgtacagttacgaactgtcgccgttacgaattggcggcgttacattttgtggggttacgactgtcgcgtcacgagatgtcttgtcacggacaaattaatataccgcttcaatcaatcgatatcgcaactaaacacaatcttacattcatcataactcatcgatcgaatgcttacttttaactttattgttcctaattttttcttgtttgatttggttaacacttttagctaaatcaccaactatgatatcatcgtttactttgattttaagtttgttaaacacttcgtctatcttgttcatttcttcctccagaaacgaactgatttctttccgcctcttgttttcgttttcgttgaccagagcgtccttgtcggtttccgtcatctccgtgattatggttatttctggatctgattccaattgcaccaagtcgtcgtctttcttcttgagctctttggacaaatcctccagcaaccactccgtttgcttcacgatgtctactttagatacatctttagcggaaacaccacttagagtctggtaatagatccttaaaatattaagaggcactaacagttccttattttcagaggtgaggatcgacttcaagagaccttttctgattttactccattgctcgttgacggtggtctccttaatcggagtaaagtcttgctgatctccttcgtacgtaatcctcactttgttgtttcctatattcgctcgaaacccaccaagttctacagtcttcgtgaaagcaatacctgtgtgtttgttgaggaattcctggacggatattttcagtttctgaaacatactttcctcttcgttttgcgagaagttatctgagtctttgagctcccttatggtgatttcgacttggggatctttgtttacagctaacagaagtttggaagcttcttgagtaaataggaacactgcaggtattttgacatcatcgttaccgtcacctgacatggagaacatcggagagttggcagcactgctgccgggagcgttatctaaaatcacagccgctatcgcaccgtacttctgcatcgctctaactttatccacgaacatacactcacccctgtccacaatcgcgatttttcctttcaaagcactaggttcttgaggcggttcacatccccgagatggtctgactagcaccacctgagctgtgacgtgctggtttcctttgaggtttttgccgaattgggaggggccggcgtggaggactatgagttgttcgtcttctttggaacctaagactggaatactgatggcttgagctgatggttctggctgttgggattggagtttggatagttcgaccatctcttgcatgaacaagagtccctcttcggcgtctgctgcagatcgggctgctgaaaacgtatgcaacaactgaactcttccatcattcaacgctatgatatttatacccatatctttgattatcttcaaatgattgaggttggccgcggagaattctgaggcagtcagtcttctcttttgggaccttttcgggcacatgccgtccaccatattttgcagcggttttctaaatgattcaggaaacaaacgtaacgtgtttggacatgtacggtcgaattcgaatccatctatatccatgtccactgttttgcttccattaatagttcgtccagagagagtaagaggtagcaaatgtccttcagtcgtgaacagaaactcgtccaagtttaaaatgagatcatctttattggcgaacaataaaaagagatacttaaacgtttcggctagtacgaacgaatccattctgtcctctttcttaccggttctgacgtcattgacggcggcgtaaccgcaaggcactctggcgtatttctgtaagctttttaagacgtttttccctacctctaagtagtatggatccccggtggcgatgtaaagaaaatacgtagactctaaaaactcgggtcggagaggatggttgccccaatggacttggaaatcggtagtgaaagcttctggaatgaacttatgacgctgcatcacttggtatagcatctcgtgagtttccacggcaggtttaatgtctcctttgaggacttgaaggcctggccaaaacgccagtaacgcgtccatgtagtttcgggaattcgtatgtggtctgtgcatatgtacatccaacaacattggtccctgagaaatatatttcatgacagcattataatgcctgttaaacctattaaggtatttgttgtctcctagtagtatatacgcctttaaacaatattcgtagtaggaatctattccagctccaacgccagaatctctacgaacccagtcgccggaatggacgttcaaaacggtacccatgagatcagagctacgatgacgcatcttccacagctcatccatagctttttgggctttcatttcgaatatgggttctccggttaaccgtgacagtgctgccatctctaatatcatggatcccgcgcaagcagtgcatgtttccctagcggattccagtcgatcgcttttcaatccgtatttcatatttaccctagaatgaggtattccggtagttgtattaaaagctggtaacaaacggtatccaacatctttggccatgtttaagagttctcctttataccaaggcattatcccatctctttgttgcaaatattccgacaggatgtgtgctgacagtaatccgccaacgactctaatgttggtttcaaaaactgaaacaacgacatcgttatcaaaattaacatctttgataaccaatttgacagcgtgttcgaattcttcgagatctccaaaaatagcaagagtatctaatgtgtcgattaaagttaacgaaaaatttcctaatgaatcatcaatatctccacggtttggagatatccccctgtagcgtccagcacaacttaggggcatcaattcatcagctggatatgcgttatacatataggcattgtatgcatgataaaacatatccctggcttcttcccttaattgtattctttctttggaactcatatgtttttgttctttggatgagcatgtttgggtcgtcaagatcacaacactgagtaaaaaacttacgaaaaaattctcaaagtaaaacattttaattttaacgaaaaattcgcgagtaaaactgctttatatttattaacatattgctcagctgtcaactagaacttgataagaatcttatccttatcagcggagacaaggttcttgaggaaatgaggttctttcgcggaccatgttcactatatttaacaactaattactaggtacacttttcttaagggcgatagacgagattttgacattactcttagagaaaattttaatttgcagatcttcacaaaaactgacataaaattcataaaaatttcccagctccagct

SEQ ID NO: 6358 - DNA, 3781 bp, Diabrotica virgifera
  SmartBlast Evalue=0; Info=Chloride channel protein 3 n=1 Tax= Aedes aegypti RepID=Q17K86_AEDAE
tgtactttattacatataatatattattctgagcattatttaaaaaccacatacttacataaatatacatatttgcaagtttttaatttcaataaattctcaaagtatttttcaaagcaatttttagcccaaaatcaaatgaatttaatattaattaatacgccaatgtaaggtatatccaaaaaaatataagaagactttctgtattgttcattaatataatacaataatataatagaatactgattttttaagttagcttttgtttataccacattcttttttacttttagagccgtctgtaaagctattttatactattcctgctaaggacagtacatattattaaatttgaaattcctgcaacgtacctgagctcctagaattccaattgctacattgcgtcattaatttgagcttctactaaaccttatagggcgcaagatgtggacctttttatagcatccagtactagccacagaaacatgagccccacgttgggcaccatattactagggcaattactaaacgctataaaaagcttcaatcttgtcgcaagctccatactttcgttcatcaatgcttcaatagtgcccagatatgttgtgagctcaattctttagtgctttaaagatatggacatctttataacatccagtattttccacaggaacagcctgtggttattctacgttagtctatcggcacactacacggtgtagctcggacggtttcagaaactggaagaaagatacatttattgaagtttcctttttcttccatgatctagttttaaatattgtatcttgaaaattttcattctcttttcattcccaatatataattaacgaaaggccactttgtccaacccacttacctgtacttctcgggcaaaccacaagaaaaaattagctaaaatcggagcagaagaaaatactttgagaattcgctgaacaaacaaaattaattgcgtcaaaataaacacatgaacgtgactaaggaagacaactaacgttataaacaacgttaaataattacatgaatataatacataattattgcaataaaaatgggataaagataaatgattactctcttaaataaacgtatatactgaatgaaaatgattgtatacaaagggatattaatttaaaaattaattaaaaaggactgagttaggatcctcgttgtccatctgtttgatgtgcctgaggacatcttttttggttattactcctagtaagcgcccgttgtgtgtgacgagcgtttgccttaaacctaattttctaaacatatctacaacagtctccatgggtgtctggtcagttatggtgataggcgccatatcgagtattttcttgagatttagtggcggcggccccagagtttggggggcgtttccttgtgtgaaaagtaccaaggattggccgcatatgccgtccaccatcctcttcgcattggctattgccaaattaagatctctcctcacaacgaatcccacaagatactgagactctctcgatacgacaactggatagccgttatgttcagtctccttaagtagtgtttctacgtcatcgactgtcatcgaatcttgagtgagcacactcaatgtttcgttacgcttcggttgcataacatcagccgccagcgacgtatgttggaattcatccttggaatccaggaacggatatccgttcaacgctatgtgcgcgtcataaataccctgtctacctaaagcgtcccccacccacttactggccatagcagctgccatcaaaggtactatatacctaaccccgcccgtaagctcgaacattatgacgacgagcgacactgtcattctcgttacgcccccgaggactgctgccgcccccaccatggcatacagcccgggcgttatgcagtcctctcccgtcgaacactctccgctgaagaaccagatcttgggatatgtaaaggctaattgctccataccaatgccaacaagtcgtccgacgatggctcccaagcacaacgatggaataaagagaccgcaaggtaccttcatgccgaatgtgaatacggtcatgatgagtttcaaaatgagggctaagatgagaagccatacagctcggtgtactccttcgttggtctccgccatttctatggctttatttacgtcggtgaagttgcgtttataatcgcataaatcatcagaattagcaattccacattggctaaacaaaaggaagataagttgactggtgttcattcgtgtgtatggatttggataggcgataatagcagtcattacagtgactacgagtacttcggtgaccgggtattggcccaatttcgaagatttcctatatttacaccaatacaagttggcttttatgaaaatagtagctataacacccccaataattccaagtcctataaatggaatcaactcgaaaaatatccaaggcttgttgtattccacgtaaaataggacggaatgctcgtttccgaaaggatttatcgatctcagaatgaaagctgctatcaacgcgcagaaaaacgatctccaaagcgtcttcaagggaaaataatagctcacctcttctaaactgaacaaaactcctccaattggagctccaaaggctacggacacgccagccgctgcagaagctgacaagatttctctcttcttcgcctcattccttccatactttggaaaaagatatgagagaatgttaccaattgcgcatgctatgtgcaccatgggtccctcttttcctaaactgagaccagcagatactgacaggatcaaaccgacgcatttaatgataagagtccattttccaagatagcctcttatgataaatccacttagaatagtttttatctctggaataccagagccgcatgcgtaaggtgcgaacatgcgcactaaggaagctgataaagaggcaaataggagggcccatagtatataaaataaataagaaatgatataagctcctgctccatctctgctttggcccaatatttccgaccaagtctgccactgcgaacaattttccgcttcgaaactagtctcgttagacgaccaacagcattggacttggttcaaccagaaagcctgagggcaaatgccgaatttcaagtcggtcatccaactggcaccgatgtcgataacgccagcgactgcgccggtgaataaacctactagtaatacacacagccaacccgaccacgcgtcgtgagcgccctctaagagattccatagcgagtcttgtttctttttaactatatacctatgtctcatacgatctcttgcaatatcccgttgccaatcgattgtgtgaaaatcttcatactgtccaattccaggaatatcagctgattcatgtgatcctgcgtatgccacagagtagtgcgatactccgtcatcgtcttcgtcccccaatcttgtggtgcgatgcaggtctccgccccccacggatccagatgtttgaatgtccaccatatcctcatcgggggatgccacgaacgtagctcgattgtggccgttagcgtgctttttggtcattgactggtaagaaggtgatggtactgcagtggcaacactactcttcaagggaaatttttccataattacactccacacattttagaagaagtctttttactctaccaagtcccgttttgcagccattttgtcgaatctgcgttgataacttaaaaatttaatgtaattaattagttaattggagttttttatcagctcgcaaatgttgagattgcagacgag

SEQ ID NO: 6359 - DNA, 3779 bp, Diabrotica virgifera
  SmartBlast Evalue=1E-131; Info=Lipoma preferred partner/lpp n=1 Tax=Aedes aegypti RepID=Q171B9_AEDAE
tattcataacctttattgaatatcttagcttacattggcacaataataaaaaataactaacttaaaaatcacataatataatctgaccagatatttccctaaactaaaaacaagacataaaatatatttgcaataaagcgggtatcaaaaagctagtttaggaattacaagttcttaggtcatcacaagattaagaactctatataattgtttttcaggtctcaaatggatattccaaaactttgtttattgtttataaaaaattatgcgatagaagcgtggatatatatagtaaaacacaccaattttaaaaaatagttgaaaattcactcttccaaaaagcctcttgctagtaaataaacgtgtaaacgtaggcgtaaactctaggaatagagtacgcaatattttaaaattgtcccctataattaaaaatgtctaggtgcaattacatacctcaaaagtgcatgaaatcattagcgttatataaccgcggctgcacttcttttcttagacacactttggattgttcctgaatattaactagtctggcgatcagtaatatataggagccatcccccgatttgagttcaactcatagtttactgtcgcaatgtcggctgacgtgaatttaagttgaaattccttgccactctcgttaaaacataatatatagaaaaaatctcttatctttctagagtcctcccttgggccggcattcggttgaagtacctatcaacgtgtggccacctatgcagttttaacgcagggctacttacgtcaatatgtcaccaatttctgcgtgacgaaacttcaccctatttggactttaccctaagttgaatgtcaataagaaatatgctgtctgaagacttctttaagtaaaaaattagctcaagtttgcaagttcctttagcgaattcagcagacaacctcaggtgttactatcgctgctccagagtgtatcgagacaatgctgaatcgtaaacattacctaactttttttatcaattagaagagcattgcaagttctcagaatagcagaaaatgtaataaaataattattatgtagagttcttaaattcttattttttttttacttgaaacgtaaactgttttgttaacattttcggtactttctatgaaaagaaaaagtaagtcaaaatgggaactgtaaaacagcagtcgaaaatgtttcgtctttcagagtaaaaatatatgtatataaaaagcgtaagcattatagatctataaagtcttataaaaaagaaaatactatatatcaaaatttaataaaatggcaatctaaaattaatcgaataagatggaatgtcaaaacattttataaaatatatcatacaaaaacaacttgtccaaaaatcacaatctcttatgccgtaccactctagatattactttcttataattacaaaatgattgcattttattaagttgaaccatcaacaatttaaaataaaaggtaaatataagggagtagacgaaaaaatacttgtagttcgggtgtaaccattacagtggcgtaaccagggagtttgggggttataaccccccattgggatgtacattgagcttaaattggcggtattccatgcccccagaaaccctccagtagttgtaaaccccccttaggataatcctggttacgccgttgactcagattgattaaacccgaatacataatctttaagacataactccatagttatatgtttaaaccattgtagacattctgaacattcgtaacagttgtcaatatgagaatctatacaataagtgctaaaacagtaaaaaaactcacatccatatttaataactttgttcttcattgtttcgagggcagttttaaaaggtaaataaatggtgtcaccttataaatgtactttctaaaacgtcaagttgccaataatcaccttcattaactttgagctttataattattgtatatagattttacaattcggtggtcatgtgacttgtcaatgcttgtacacgtttagcgttacagcttttacaaagtacatgaccgtctagtgggtaacaacctcttccttctgcttctgaggagagaacaagtccgcaatcttcgcatttgtagcattgaatatggaaactgtgatccagtgctactaccctaactgtttcttcttctccgggttcaggcataatgggctgtttgcaaacccaacatcttggtgcaaatattttgtggaaatcttctatacagtggactctgttggtagcgtctacagtgaaaggtattccatcaaggctcttaccacagaccacacaacagaaacattttggatgatagggtttaccagtggctctcaaaattcgatctagaattggtttttgacatacacagcatttctcaagggtattcaaatagtcttcttcacagtaaggtttaccatcgagagcatagaagggttttccctgtaaatttattgcacaatggtgacaggtgaagcatttggtgtggtacaactggtccattgcagtacagccactattctcgcctatgatcttatctccacacttcacgcaaataccataaacatcttcctgatcaacgtcactcacttctccacctctcattccttggactagaagatcagtcaaactatccacctcttgttccttaggatgaccaatgcggctcaccgactggctgggaccagtggcagtgctgctagccccactgacgtacggagcgtacaatgagtagtttgaacgagacgacatctgacttggtgggcgagggttgatgggttcgtagatggactcgtatgtggaggaagattgagatcccatgctgtaattatgaaaatcttgtcctggttgggtagctctcctcagttcactataactcgaactgactggcgacggagggggcaataattcctttggcggagggggtaagctggtgttcacagtacatggtgcatagtcagctaaagcattagacatatcaagtggaggagggggtggtggtaaatcttcaccattggcgtacgcactgttgctgggaggcatattgctatagacagtgccttctcgttgaggatgaacaatattgctataaattaggccatcttggtttctggaaggacccatctgaatattactataagtcacattatccatttttgaatagcctttgggagttatatttgtggttctcggttgggtactctgttttatagcatattcgctaggttgttgtatgctagaaccataatttccttgtctagataaagaagaagtgttactcatagcagaggcacttctaggaagattcgcatactgaatggatggatcattctttgacaaattagcgtaattgttatccacaggtctttgatccacataattactgttgataggtaatgtcggagtgtttgaataatgggattggaaattgctaggaggaacattggagtaaagttgtgttgcttgtaaacgagatgaatagcttggctctacagctttatgtttcaaagaatatgactgaggtatctgtggttgtgtttttttaggttttggtggaaccgctggtccaactttctttcctgaagtccctacattcccagaccttaaatccatttggtttataagggctaactcagccaactgtttatctaactcgttcattgtcaatgttcacactgcttttaacactaaagaaaataaaatttttattgttaatagattaatttaaccactccacccaaacaaaaagaatattaaaggtacattaa

SEQ ID NO: 6360 - DNA, 3765 bp, Diabrotica virgifera
  SmartBlast Evalue=0; Info=Kinesin heavy chain n=1 Tax=Tribolium castaneum RepID=D6X1C8_TRICA
gtccatttcgtgtaaagtcacttttgaggaaaaagacatatttttcagtgcaaatatataattaataagttatgatttgatgtaattagtgctgtgagtaatttaaatttaggaaaaatgtcggtcgatcgggaaatacccgcagaggacagtattaaagtagtgtgcagatttcgacccttaaatgactccgaagaaaaggctgggtcgaaattcgtagtcaagtttccccaaggagcagatgaaaattgcatttcgatagcgggcaaagtatatttattcgataaagtttttaaaccaaatgcaacacaagaaaaagtatacaatgaagcagcgaaaagcatcgtcactgatgttctatccggattcaacggcaccatattcgcgtatgggcagacatcatctggtaaaacacatacgatggaaggtgtcttaggtgatccccagaaacagggaatcattccaagaatagtaaatgacatatttaatcacatctacgctatggaagaaaatttagaatttcacattaaagtatcatattttgaaatttacatggataaaattagagatttattagatgtctcaaaaattaatttaagtgttcacgaagacaaaaatcgggtacccttcgtcaaaggggcaactgaaaggtttgtctcaagccccgaagaagtattcgaagctatagaagaaggaaaatctaataggcacatcgctgtaacaaatatgaacgaacattcgtctaggtctcattcagtatttttaataaatgttaaacaagaaaatttagaaaaccaaaagaaactatcagggaaactttatttagtagatttggctggttccgaaaaagtgtcgaaaacaggcgccgaaggtactgttttggacgaagctaaaaatattaacaagtctctgtcggctttaggaaacgtaattagtgcattagcggatggtaacaaaactcacattccttacagagactctaaactaaccagaatccttcaggaatcgctcggaggaaacgccaggacgacgatcgttatttgttgttctcctgctagctttaacgaatctgaaactaaatcgacgttagaatttggtaaaagagcgaaaactgtaaagaacgttgtctgtgtcaacgaagaattaacagcagaagaatggaaacgaagatacgaaagggaaaaggaaaaggtagcgcgattgaagggaaaattagaaaaattagaggacgaactcaacaggtggcgaagtggagaaacagtgaaagtagaagaacaagtaaacctcaacgaaatatccgacgcagttaccccagtagcaatggaagagagcgtcatcgcggagaaaccttccggtcctcttcctgccactccggctctaatgatcggctccacgttaggtttagaagaaagaaccaaattggaattggaaagagaacgattataccaacagctggatgagaaagatgaagaaattaatcaacagagccagtatgtcgagaaactgaaggagcagatgttagaacaggacgaactcatcgccagtacgagaagggactatgaggccttgcaggctgaaatgaacaggatacaacaagaaaacgaaagcgccaaagaagaagtcaaagaagttttgcaagcgctcgaagaattggccgtcaactacgaccagaagagtcaagaagtcgaagctaaaaacaaagaaatggaatctctctctgaagaactcatgcaaaaacagactaaccttaactccactaccaccgaattgcaacaattgcgtgacatgaataaccaccagaagaagagaatcactgagatgctgagtaatctactgaaggagttaggagagataggcagttcgctgggaggaggggacggtcaagatattaagatatctaacgatgtggctaaattagaagaagaatttacggttgcacgattgtacatttcccgtatgaaaagtgaagtcacaagccttacacagcgattgcaagagatcgaaaacaaagaacaggacagcaacaaaaaagttactgaatacgagaaggaattggctgagtgtcgattgttgatttcccaacatgaagctaggatgaagagcttgcaggagtccatgagggaagctgagaacaagaagagattgttagaagagaatatcgacgcgctgagggaggaatgtgctaaattgaaagcagcagaacaggtgcaaagtgcgagtgagagtgaaaagaaggaagccaatgaacttcgtgtagctttggaacagcaaatggaccagttgagagatgtccaccagaaacaagttgcggcattgagggatgagatagcagaaaagcagagcttgataaacgatatcaaagattcaaaccaaaagctcactctggcccagcaacaactccaagcagattatgagaagatcaagtccgacgagaccgagaagtcgagcaaactgcaggaactcatcgctacgaacgagagacgcgaacaggcgagaaaagacctcaaaggactcgaagacactgtcgccaaagaactacagactctgcacaacctgagaaaattgttcgtgcaagatttgcaggcacgtatgaagaaaaatctttcgtcggaagacaatgaggaagacggcggctctctggctcaaaaacagaagatatcgttcctcgaaaacaatctcgatcaattgacaaaagtccacaagcagttggtacgagacaacgcggatctgcgctgtgaacttcccaaactcgaaaagagactacgagctacgatggaaagagtcaaagcactggaaactgcactgaaggaagccaaagaaggcgcgatgagagaccggaaaagataccaatacgaggttgaccgcattaaagaggctgtgaggcagaagaacctcgcaagaagaggcccagcagccacaatcgccaaaccaatcagggcagggcaacacaacacggttaacgtagctggtaaccccgtcattagaactggaggcatcaacatggccaacagatcgaccgacgaccagaaacgtaggtctgttattggtggagataaagattgagtcgccagccatcttgtcaggtgcttgagacgtttttagtaagcaaaatccataaaactgtaataccaaaaatattgccgatacttcgcgcgagtctgtcgccagcagtttttggaacagacaagaaaaaaaattgctcctccagactcgctcttcaatgtgcttacagcttagatatttctgtagtataaggtgcacttcattgcattgaaaatgaaacaaattaatcgagtattgtaacagattgttggcaaattgttttaataaatcgttcattttttgttttcgatcacttctagcttcctgtcgaattaagtgttaacactaaaaaacaatttgcttgctgttttatccttaaaacgttgcaacgtttacggcgattttttgagttaggtaattctaatttttgtaccgcgtttttaatttaactgaaggtactagaataataaggccttaaaggaccaatctttgtttaatctaggaaattttgttttctttgtgattcgatttagtttaattttacgaattttttttcccagtgtgtaattctaattgaattagttacacttaaacacataaaatgaataaatatagttagtgaaactgttttatttataaatgtactattaattttcatttcgatgaagcatccataaaactaggttgtgttcgcacatgtatttcctaactaagatcaaagga

SEQ ID NO: 6361 - DNA, 3725 bp, Diabrotica virgifera
  SmartBlast Evalue=1E-176; Info=Serine/threonine-protein phosphatase PP1-alpha catalytic subunit n=35 Tax=Eumetazoa RepID=PP1A_HUMAN
gcaaaaaagtgttgtttggtttgtagttaaaaggctctgtaaaaatcattaaaaatccgagccatcttttagttttaagtttcttaaatattgtcaaagagtatcacaaggatttctcaaatggcagaagcagataaattgaatatcgacagtataatagcccgtttattagaagtgcgtggagcaagaccaggcaaaaatgtacaactcacagaaaatgaaattagggggctctgtttaaaatctagagagatcttccttagccagccgattttgttggaacttgaagctcctctgaagatttgcggtgatatacatggtcagtactatgacttgcttcgtctctttgaatatggaggtttccctcccgaatcaaactacttatttttgggagattatgtagatcgtggtaaacaatcattggaaaccatctgcttacttctcgcttacaaaattaaatacccagaaaactttttcctactcagaggcaaccacgaatgcgcatcaattaatcgtatatatggattctatgatgaatgcaaaagaaggtataacatcaagttgtggaaaacttttacggactgtttcaattgcctacctgtagcagccatcgtcgatgaaaaaattttctgttgccatggtggtttaagtccggacctacaatcaatggaacaaattagaagaattatgagaccgactgatgtacctgaccaagggcttctttgtgaccttttatggtctgatccagacaaagaccagatgggatggggagaaaacgatagaggagttagttttacttttggtgctgaagttgtaggaaagttcttgcacaaacacgattttgatttgatatgtcgagcgcatcaagtcgtagaagatggatatgaattcttcgccaaaagacagttagtcacactgtttagtgcgccaaattattgtggagagtttgataacgcaggtgcgatgatgtcggtggatgagacactaatgtgtagttttcaaattttaaagccagcagacaagaggaaattccagtacaacatgaacgcaggcagacctgtgacgccgccaagaggcgcaacgaataaaaacaagaagaagtgaatgaataatatatttataaggttaggtttagtcgcaacataaacatgttcaaaacattttaaatactaaaattttctaaaggttacaaagattcaagataaattaagattttcttcatgtttttgttggttgttttataggttaggatagtaaactatataataataaagttctcaatattgttaaaaagaagtgaatgttagtatttaaaatgttcgattatttcggccgttttactttattttatatctgatattactagaaaagggtgatatctatgaacccagacaactaaacgttcgatttgaacaaatgaaaatttattgaaaacattaatcctcacaaccttgcttatttaattaaagaacaagatcagtaatacattaaagtctatcattaataatacttggtttgtataaactttggtgaattaattatttttctatttggtatataactattaatttctataaacttgctgaaaaaaattggtgaattatgggatagtttctacattgtcttgtgtcaatcctaagtaacaatgcaacaaacgcaggattgctgcggttctaaagacatgtggtgatgttgttaccccattcgctaggaaccgcaaagtgggcgacgtctggtggtaaatatcaaaagcatcaaaacatagggcatttcaacattctgtcaaaattaaatcaatatggctgctgggaggcaaacaaatgttattctgtcagttcttaatgtgtttcttaattcttaattgtaatcgcgcgtcatgtgaacgggttctaagtttccactgcatttagcaacagaattgggagacctagatgaagttcaacggttgattgaaggatgagcaataattaatgaagtatgtcccatgggctgctaccactattgaagatgatcctacatatctagagagtcagctttccacatcaacagatcttgctggtttgaagaatgaactaaaaggtagctcaggtaagacaataacaacttgtactaaacaatgtgatgtaattcgtatcttttattaactatggacgtaaaagctaaaattaaggaagattcacgttgcactattgtgtaggttaaccacactattttgtaaaaaacaaataaatttttaatgtatcagtgaaaataaattcacctttctatcttcgaaaatttataggtacaataagcaagaaattagaaaattagtgttgtttccactaatgatcttttggatgaatagatagtaagtcgtcccattgtaaatactaagttattttaaataatttatgcaaccgtttctagaataggcacatctatttgaatgtgataatatcttgaataggtatttaaaaaacaaaattgtttcattaataaagtcaaagcagtgttacacatatttttaaataggtctcagaataagttttcactacatttagcaacagaattaggagaccttgatgaagttcaacggttgattgaaggaggagcagaggaggagtttctttgtaatcttattttgtacaaggattaatttaacatttttactaaaagaattaatttaacaagataatatgcctcattgctgttgtgttttgaagtgtggaatgcaaagtaatcgtgataaagttcactcttatcggttaccatcagtgcttcattttaagcataaaactgaactgaataagttatcatctgagagacaaaaacaatggttaaatgctataaaacgtaaaggttttattagcgaaatgaaaattaagaatgattttctgtaggtactctaatcattttatatctgtatctttaaaaactacacaaaatcaacaacaaaatgttgggaaaatacacctaaaaactatagaggcacattgtggtacaaatataaacaaatacaatgcttgtctcccagcaatcatattggcgtcataaatgtcaaagtcttggaatgcccattgtcattttacccgttgacattgtgaaagtactgtcaggataaattacttttgtatcaaattatctttatccgcatcattgattggttatctatttacaataatgtaatcgtcaatcaattgtacatctatagtataaatcgctgtaatatacaaatacctgtcaacgaatacataattttcgaagttctatgtataataattatggacatacgtctttttctgtcactttgaacttaatcccttggagagaatttgacaaactatgaaacactgaaagaagggttcggtatgaacttatagactatattgtattgttgatctcattctttaattgaataagcaaagttgtgaagatgaatgtattgaataaattttcgtttgtcagaactttcagttggtagggctcgtatttatttaactagataaacaacatacttaggatattcaattcaaataatggaaacggcttctcttaatttacaaatcgatatttcttatttattttttctttcaattattttgttcggttcacatagaaacagttttatgttttacacagttcttttctgactctgtataaatatatttttatatacaatcgtttcagtttattttttttcaccgccattcgtgcgtttttgctacttaggaaatttttagtaa

SEQ ID NO: 6362 - DNA, 3714 bp, Diabrotica virgifera
  SmartBlast Evalue=1E-133; Info=Pol-like protein n=1 Tax= Biomphalaria glabrata RepID=A3FMR3_BIOGL
ctctcttatataataatgaatagattggtaatttgtcaatggaattgtagatcggctaactctaatagagaaaaccttatccacctattagaagaccagaaagttgatatcgcattattatcagaaactagatttaaaccagaaaagtattataactttcacgggtacaatattgtcagagacgaccgcttttcagtaactgttggcggtggctcagcaattttaataaattcaaacctatattacgaggaagtcaccatgaaagtagatttaataaacgtcaataaagtagcaataaaaataaagtttaagtcatatactgtcacatttatatctatgtatgttcccccaggaaccaagttattgttacaacaatggaacaatttcataacatctatagaaagaccatttataataggaggtgaccttaatgctcaccacattgcctggggcctagacaaccaaacagatatgaaaggtaaaatcttgatggactgtatagacgataataatttaatattcaaaaatgatggctctcctactttctttaggaacttctcgaaatcggcaatagacctgaccatttgtactcctgacttaaaccacctgatcacttggaaacacttcaagacctatttggttcagaccatacacctataagagtagagttagaggatcaaccaactcatacatataatccatattcacaaaagtggaatttaaagaatgccgactggaaattatatgaacagtattcggaagatgtattctctcaatttaaagatataaattcttatgaacaaattttgcacaatataaatacaactgcatcctactgcatccccaaatttaaaataaaaaaaacgacttccaggggaaaatactggtgggatttagaatgtgaagaagcagtcagaagaagacaggaaagtttttgtatattcaaagaaaatccaaaccatgaaaacctacttaagtataaaaaagatgatgcacatgtcaagaagatcactaaacaaactaaaagaaatagctggagagattatgtcggatccctaaataggtcagtccctattaaagatgtatggtcaaaagttaaccgaataaaaaatagaaaaacaaagaacaaagtccctgttattctgtcggaagcttcgtggatagaagagttccatcaaaatatcacaccgccgtctgcagaattagtaattcctgatttacaactaaatgctctgtacgactatccagaaccaatccgtttcctagtcaaaccattttctgccactgaactaaactttgcgttgaagaaaaactcaaattcagcaccaggtgccgataatatccattactcgatgctatcaaatctttcaagaattggtaaggctgcactactaaatatatataatgaaatttggatgcgccgcataaagattcctgacgattggcacgtttacactattatcccggttttaaaaccaggaaaatcatcaaagaattgggattcttaccgtccaatcggtctggcttcctgtatactaaaaacatatgagagacttattaaaaaccgtctggaattttggctagaaaagaacgacctattaccaagaagtcagtttggttttagaaaaggtaaatccacacaagatagcctctgccactttttaatagacatttatagttcctttacttataagaaagcagttagtgctttgttcttagatataaaaggggcttacgacaacgttaatcttcacatactatacgcgaaaatgttggaaataggaatacccgagatagtaacatggaacatcattaacttatacattaatcgagcagttcacgttagattaaatggagatcaatctaactcccgatacacatctttgggactacctcagggtagcatcctaagtcctatattatatatactgtatactgctgacttagaaactaaacttcctcaacacataaaaatcctacagtacgctgatgatgttgcgatatatgcagaaaataagtcaatagatagatgtaataactaccttaaatcgacattgaatattataaaaaatgggctaccgataataacttaacaatatcagagagtaaatcaaccattgttacctttactaaaaaacgatatgttcctcaaagccatctacaatttgataatactagtattccttataaaacttcaataaaatttcttggcgtatttttagactccaaattaaattggaaagaacacacaaattacatattacgaagaatggaaaatgcaatgaatatcatgaagactgtaagtgtcagtaactggggagctgatccaaacatatcaatattactatacagaaatttgataagatcaatcttagactatggatctattttttatggctcagcatcaaactctgtactccaaaaaatcgagaggatcaaaaataaggcacttaggttatgcactggttatcttcgtagcacacctatattggtcatggaatgtgagcttaatgaacctccactttcattacgcagggaatacctaagtgagaaatttatagttaaaacagcggttaacgataaactgctattaaataaaattgttcatttaaccacctcatacctaactcattattactgggaaaaaaagaaactgcttttagttgtggaaagcttcctcaacgtttctaattccattggcgacatacaccaaattgaacaaagctcgtctcgaaagctaaattatgaagattatttatctccagttaactgtcatttaagtaatattcgtgcgacagacttccttactaaaatagaccaccttcagtgtgtacaaaagaactgggggagttatcagaaattatatacggatggttcaaaaatggaaggaaaagttggatatgctatatattacccacaaaaaagtataaaaataaacaacagattacctgataaaatgacaattttcacagctgaactcattgcaatcaaagaagcatacaaaatatgtattaatcaaaaagaactcaattatgttatatttacagactgccaaagcattgtaaagacattgaaatataatgtacataattttgcagaaaattatatcatcagtgacatcatagcaatgaacagtgaagctttgaaatcgggcaaaaatataatattgtgttggataaaagcacacattggtataaaaaacaacgaaatagtagatgatctggctaaaaaagcaacaacgaaggaatccactctgcatacttatcaacttcctatgggagacataatttctattatgagatctatcaaacggacgaaatggcaggaacaatacaataattcagacaaaggaaattattacaaaaaaatccagcctacacttcccatcaagacatggtttaatcaagtttccaacaaaggctttatcaaaactatttgtcgaataagaagtaatcactgtctgactccagtctacaaaagagaaataggacttgtagataatgatgaatgtttatgtggagagctagctgatctacaacatatgctattagaatgtcctttacattttattgaaatatcaaactttttttgccaatctagttcaagttaatgtacaatttccttttaatcttatataccttttacaatcaaacaatctagatgtttataaaattttgtacaaccatgttaattgtttaaaattaaagctctgag

SEQ ID NO: 6363 - DNA, 3710 bp, Diabrotica virgifera
  SmartBlast Evalue=0; Info=CCR4-NOT transcription complex subunit 1 n=1 Tax=Camponotus floridanus RepID=E2AFR3_9HYME
aataatacccttgtgatttgctcttgaatggcctctgtattggcttcggcgaataaatagagcaaagtgcaagagaaataatgtgtatggctgttgggatacctcagttggttcgcgatagcgttaaggaataaatagcgaccttcggtgtccagatcgacagccagattttggtagatgtccatgtgggcgctgtgtgctattgtcgacatgttcggcgtgtggcccttgttccgtatgtaagttatcgcttgagtgcctacatacagtactaaggcgttcattaacgggatattgtaacgcacaccaggttcgtttgaaacctgtaagttacttctaagttccgacaaaaacgtaaccggtgcccttgccttcagatacgaatccacatcttttttaaattgagcaggtgtgatcatctgtgctaaatttgtaagtattctcggcccatacgatatttccggtagcatatcgacctttaagttaggtgtaaatggatctggcaacctcatgtttcttggaaacgcagagaggatgaggttcctcatttgaatacaattgggcggaattacgtcacaaaatccataatgataatcacatagaaactctggaaagtcgtgtaataacacgagcagtactcgtagtgttcctctatataacatcgtaactggtttggccagctctgcattcctcaaaaacggcgccaaatatttgaaaaggtcgatgaggagttgggcatacatcggccaacatttttgctgagggctactggctagcatccttcccataaagactcggtgagaaaccagttctaaccaagcgtaacaaaaacctgctgctttcgtaggccgtaagatgtgtaatgtatgacaaaaagcattcaaaacgtggaaattaatggcttccaggacgggttctggagcatttagttccaagaacaacatagtgaatatcctctgataaggcaactgttgaaattcaatagcacgagtgtcatggtcctgcataaggcaacctgctaaaataccaagaaccttatttagaagatgcactttggtggttgtattatttgcatcacctgaatgcttcaccaataaggccaccaatctcacgtaagcgtctaaggtttgatagcacttcggcctcaataatgatacatttgtggtcgatttttccgcaaggactctgtacacggtttcaacgcaaagttgcgtcgaaagtcgaaaaaacctcgtaattaagtcgtcagtctttaggatgccgtagacgttcatttggtggacgaaaacactaaaagctttggtagaatctcgaccctggttctggccgtgataaaaagaaatccattctcgaagaaggtgatcagttttctctactagacctggaggatcttcataattcggcgctctcacctgtaggattccgttatggatatgaacagtgggtcccattggcgcgcggtctccaaaaaatgagctcggttcgctctgtctcaatgcatccataatatttcctaatccttctggttgtggtctagaatgggtgttaattttggctaaaatctcaatcgtgttgcacaaatcactttcagtaacaagttgcccgtttctatcgtctactatatacaactgtagtaactgcgtagcaaaagtggtagccatgtagttatggccattctccatacattgtgtaagtgcaagatcgtactggggaacattgactaaaccatttttgattaatgtatcgacagcatcgaggttgtaacgtagttgatcgtctcggcattcggttaaacatctcgttaccaatttgttggtccattgttggccatataatcgtggatcttgaagggttttgagaattcttactatgatttctttaaaacggagagtaactgggtcattgtcattacttaaagttggaacaaggcaatcttgcaagctttctacacacttttgtacaatagcttggggaggagttgagtccctgttcctcgacatatgcaatagacaatccctaataagcaccatactgctactcatcagagcctgtgcttgccctaaaagttgcacaaattgttctacatcgatggccaacttttcgtataatatagctatatcgtcggtgggtaagatattctgtggaatcggaaatggagtcgaagagtgagattggacctcgatgggtgtttgtttttggattagcatagtagcatcacgttcgttcggtacaaaccccgggatgttttgtccaaattcttcatatacgcccatttgactctgtgaaatacctcctacttttagtcgtattggctcgggcatcctttctgcttgataagttaaagctatgggatcacagtaacgtcttccttcttgccgagccattttcctgagttcatattcgctgacgagtctcttatcgatttcgggtatagctttttcgacggcagttttctgtataaaagcacaacccagctccatgttatcactggcgacgacactacacgcctgatctatcatctctttttgctggaccgtaggtgacaccatattggttaaaagggcttgttttaaatgtgtgctgatagccgttatcaattgttcccggcatgtaatcatcgccataccagctgtgagggtgcgtaccatgtaatgggcggctagtcgcattcggttttcgtctggatcaagtgcaaaatccttccttatgagttgttcgcatgtttgaagggctattttaatggacctgtcaactactggtcctatccattcctgcacagccctttcaatggaagtgcgcacaagtgctttaagttgtggctgggtttgaaataacaaaattgaaggagagatgacagtgtgggtctgaaatgactgcattccgggtatttgaatgtctgagtatgcaaaacgaggctctgggggcgccgacaaagctgatgttggagttgtactattattctgaatgactggagaactggtttgttgacttggaatgatgtttgctaattcctggtccgttaaattacctccttggttgacaacactaggttgcatcaaaacttcttttttaagtggttgtgatagttggtattcgatttttctgatacgttctggatctttaaggtatagagaaggcttcaaatggctaacatctatatccaaatgcttacataaaacttctatttcaaactttaaagtcagcttaagatctgcttctgagtgcaattccgctaaaacgttcattaaagctattgtccatggattgggagatttgaaaactttacttttagcacatgactctagcactttagctacaaatggtaccacatataaaagttcttgttgtcctttatggtaagcttctactagaagtgacttcagatcaaggtctatttgtaaaatcggcttgtttctggctagagttaaaagcccaagccaatggcccaagtttttcaaaagagatctgtcagaaaaattagctactgccttgtcagaccttaagagaaccctaatatttctgaatgtttcccttgttactaattttagaatttcatttattcctagtgtatccaggaagttggaatacaacccatggaaattaaattcaatagatgctcttttcattacaagatattgtgcaagccacggataatattcatcagatactaattccttaagttcatcgcatttttgtttaagattcaattg

SEQ ID NO: 6364 - DNA, 3708 bp, Diabrotica virgifera
  SmartBlast Evalue=3E-19; Info=Transposase n=1 Tax=Beggiatoa sp. PS RepID=A7C285_9GAMM
cgccggtccacgaaataacgaatttactcctttcacctgcaccatactgtatagtatcaaaataaagctcattttttgacctaggtattttaattacggtactgtcttggcattttaattattcaagtgaaagtacttaattacccaaataggtgcaaaaccaaattagagaaagtatgacaaactaatgcaattttaataggtaatttaactaaatgggtcgacaaacaaatcaggaatgctataagaaactataaggacatttgttatcttccagttgaatttattctgtcgaattggtaacgccttatattgttaattttgtgagaatctgttcgtgctgtttaaccgaaaatgccaagacgtgttttagatgtagatactctaatttgtaacctacataagtactttattgcggaaaaaaacaatggtggtcctttaaaatcggtaacgtctgtacaacaacgcgtgtgcaatgctttagaaattagcgaatcaaaattaagatctacaattaaaaacgagaatagtgaagtgccggaaaacgatcaccaccatactcgcctgttattaaaaacgaacaatatgttagaaggacgaaaatttcaaattcgtaatatcatatatcaaattcgtgcaaataaggaacatgtgactttaggtacaattttacttaagttaaaagagaggaaatttggtgacatcggcagaacaagtttatggcaagtcctacataacataggattcaaatttaaaaaagaggataacagaaaagcgctttgtgaaagaagttctgttgtacacaagagaattgagtttctgagaaaataaatataacatatttaaagaagaagggtcaacttttgtatatttagacgaaacatggatattttctaagggtgctaccaagagaatatggcaagatgacaacataaaatcgatcaagcatgctagtggagaagggaagcgacatataattctgcacgcgggagggaagacaggctttatagaaggtgctgatttaatattttcgtctacatcaaaaaacagtgactatcgtgacaatatgaacacggaaatgtttgtgaaatggttgcgtgaaaaacttcttcccggattaagtgagcccagcgtaattattttagacaatgcgccttatcattcagaaatactaaacaaaagtccaacaaattcgtggaatgtagataagattaaagaatggctaacaaatgaacgcatatctattccacagcatatattaaagtctgagttgttacgtttggcaaaagaacatgcaaaaccaaaaatctttgtggtggatcaggttactgaaagttacgggcatcaagttttacgtcttccaccataccactgccagtttaatcccatcgaatatatatggggaatagcaaaataatattacgacaaccatattgggcctaatgggtatacagacgaagcggtttgggaaacttggcgagaagcactttcaattgcaactccagaagtatggcggaactgtatatacaagtgcgaaaaattaattgaggattggtggattcgtgaaaataaaattaacgaaataagcccaatcataataacaattaacggtgacgacagcgatgatgatgacagcgatggcgatgatagtgtgaacaataacgactaaatcattttagtaaaaaaaattggtacgtatattgacttaataatatttagcattttacttaaatatttgatgtttacataatgcgctgctgtaggatttccggatccttttcaaggcgtgatttgtttgaaatcgaaactatttgtagatattgtaggtacatacgtaatattataatattgtttttaataatttttattttcgggaaaataccccattatacatataaactataaaatatacatgactaacatagaaaacatgcgatctgataaaagaataaaacaagctcaaattagtttacaatgtcatataaacgctttttacacgcgtcaattgactttaatttaaaaacatccaacgtcaatatatcacttaaattgattgtgactttatagaaaaccattttagagattaaattaaaacatcaacaatacagcaacgtttagccttctaccttttataagttataatttgttttatttttattatattgatattcatgcaacaattaatattaggtatattgatttttggctacggataatgaactgttataaagaatcacgaaattatgtcgtttaggcttctgaggctatacaaacacctaaaatttaaaattatttgatttatataagaacctcctcaaataaaaaattactgcgcccatgtgtaaatagttaaactacagcggaccagtaaattcgttcatttctttcccaatccatgaccggtgtaagtctaccgaatagagtttactcttattattttggacaagttagtttatctttattttggtcaacttcgcacggtgctttcttacacacctggtttccatctgagtctacacatctacattttcctcttctacattgtttttgggaataatttccattagcatcacagctcggcttttcattactagacatagtaagtctggctcttgcacatttgcaatccatagttttcgccaaactgtcagtttgaagaacagcatttaaaatggatccttccttgtccacacaatatttatgtgttgaattctcttgaacagatttataagttccatctatgtcgcagttaggaaatgtaaatccgagcattatactaaaaccttcgtcctttagagccttataggctttataactttccagatactcactttcgcatttttcataaaatatacctggttctttgtttttataacactttaaagtgtctttggaaatgtcggtaatattgacctctttagcatcagggtaggtgggaacgccatcgtaagtgtccacacagaaacacttctcatccatgcattgaacaggatagtaatctccattgggcgagcacttgaagatctcaccagggttaagttctcttcctattatcaccaccgcctcttcgtagtcacgagaacatttgcacttaagttcactttccggtattgaagtaaaaactgcctctccaaaaattctgttgcctgttgaatctacacagtaacacgtttcacctggtatacacttatacggtacaaactctccttcactatcacaatcctgtcgcacttccatatatcctagagtaccattttctctttttccatcgtaatcatcttgctttttagtacaacttgtctccattcgactacatattccatcactttcgcctggagtagtatttttacaatataacccagctccacatatttctgtcacatcaggattgctaatgtcacccatactacactcttcgccttcatttaaattttctaaacaatattcgcaacaattacatgtcaccattgatggtaagattagtccattgtgagtggcattttgaatctggcattttgggggaagctcatcacatttaatatccttacaagtctcctctgtgcataaaatattatcttctccagccaatattgggccaaatatacaaaacagcattgcaaacaacaacattgtaattacaatttttttgtaaaatatcacagtcatacgaaaaacacaactattaacagaaaacaagcgacaaatatt

SEQ ID NO: 6365 - DNA, 3710 bp, Diabrotica virgifera
  SmartBlast Evalue=1E-159; Info=Lipase maturation factor 2 n=1 Tax=Harpegnathos saltator RepID=E2B8W4_9HYME
agaatcctcttaacactcacacacgacactgatagattctacgtattctaagacatataaaattttataaactcctctatatcattaaacagtgcaaataaagtacagaactgagatttacacagtataaattttgcttttccaacagttctattgcttagccatacttgatatgatgttggcattttaaataataaaaataaagatatatgtgaagcaaatctatccgtccgtcgacagaaagtagcattttttaaaagattacaaacatccactgttatgtatccgttatttgtgtcatgaatattaatcagtattgccaaccgatattatattaaagagaatacatacatttttcctcttaagcccgttgcacgtcatcaatgggatttctgcttcgtcacagtacaaccaactattcttatgggtttaagctaatattgttcacaatatcaacagaactaatccatgacagatgatgctgaggtctggaaggccaaatgaggcagttattcccgaagatatcaaaaaaatgctgaaaagtatgcaaagtgaaattgcaagagatagcaaacactctaaagttatcaaatggtagggttttcacgattacacacgaacattggagtgtgagaaagctgtttttcaaatgggcgccgcgcttgcttacaccagggcaaacaacaaagaatttatgagtctcggggctgtttggaaatgttaaattggaataagtcggagtttttctatcggcatatcacaatggataacacatggatccatcacttcactccggaatcaatcagccatcatctgagcggaccttttttccgatctaaaaaaatgctccgtggctaatatcgctctgatgaggaagtaatcactgaaactaaagcctattttgaaggcaaagataacccgttttccaagggcgccatcggaaaattaaaaaagcattggaatgattctattgccacatgaatagaaaatattttttggaaaaatgttgttttaataattaggtccggaacttattaaccgacgtaatatttgacgtatctatagtggtatgctggtatatttatattattatattatctataataatataaattcttggttagtttttatcgatgcaacttctggttctctgaataaatgaattaaaaagaataacctcacattcttagtatttcctaattctttacattctctaccattccgacaatatgacaatgctgtacgataatgacaacttgaaatctactgacgtgcaacggattcatgaaacattaataatgtatctcaaagaaaactcaaaaattagtttactaacgacagaattagtaattactgttcatgttagcatgctatttcacaaacttcggtgacgttataattatgtgaacattgaagtataatgagtccacaagaaaactcatcatctaaaacatttttattaggaagcaatatttcaaaagaaaaaaacacataattaaaaatatagataagatacgagtagtttttcagtaacaaaacacatgtttaaattcgcagatttaatacaagaaacaatgatataacataactgatcatcatttctgcaaatttgtatgtaatccatgtattttgtgactgaaagaaaaatctgatgtaaaatagtatttcagttctgtacatccagaccacacatgtacactcataaccaaacattgctttatttcttgccgtgagaaactgatgaagtcgtacaaatgacggcaaagccagcagaaactactgaccagaacaataatgttgcttccaaatggttaacgatatatctgataaaatctaaggcttgtgtccatagaggattcacgttaccttttgaagttaaaggtaatagacttcttgctttcaggtagtcagttaggaagggagagtccaaggaaacgactggcaagtattctgaaattttttctcttgtccaccaagctctctgactcctttgattccaacctgtatattgatatttatatacaagagctctaagatatttgggtggtacgttacgatatggcgaatctctaaaatctatgagggcaagaacggcaggtttgtgagccaggatcctatgggcgaatgacaccaaccatggctgttgatcgtaactcacataagctgcggtcgctaagtgccaatccagctgtggcgaatggggagcaacaaacggtaatgaagcattcgggtttcctggtttgtataaaaagttatattctttccagggcccatcaactttatcggccccctcaaatacaatttctcttctaccattaccagcgggaaatgtggtgaagggactgctataatgattaacgacatgtaacttgtgtaatctgttgtaaatagtacgaatggttggatctacagtggaatttgagactgggcgtaaagatgccaatggtactgtgcttgataagaaaatagcaacagcaatactagagtaaaatactgttgaaagaatggctaatactttatttcctgagccatggttgtcaaagagaatttgcgagagagcgtatagaactgtcacagccaaggaaatcaatccaaaatatatggtataaataagtccttggccaatatatttttcgaactgtgcctttgtaaatgcaatattggactccacttgaccattgtttaatttcaaattgaagagaacaatagatccatatataatacctataataatcacaaaagatgctacttttcccaatattgaccacttgcctgaagatttcttcttatagaaacactgatcatccaatagcactaataatagagccagcactagtatgttggcaaatccgaaattaccagttacaataacgcatatttgtaagaataactgtgctaagaatgcaaaatgtctggcgcatcttataggtacgaaaaacaggaaaggtaaaataatctcagcgacgttgacgaaaacttgtgtgagcttcagctgccattcaggaagggcatatgcataccaagacagaggcgtaggtaaaggtaatacttcataaacacgagatatacctttaaggttccaccatacaggatctccattgatgaacttctgtgtacctgacatgaacagaatccggaataagagccacttgactagccataatgatattaggtcttttggacatccttttgaaccccttcgacgccctggcaaaagtggagccacaaaaatggctaaaaatcctgtttctagaagcagttcatcaaaatttgttacaaacgcttgcccaacttggaatagagaaaagtacaaagaccacaatcctgcaaatagtggtattgtacaaaacttctgagagataattcctgtaaatgccaaaaaggctccaagaagagataacagatctagagcatagctggtatctagacctagataaggtgccagccacaacaaagtaggttgatagtgaacttttgctgataatgttttatgtttactgttttccagtacggatctagctggcagtactccattgtctccgtatagacccggtatttgtacgtaaaacgacaaaaacgctgctaaataaattacacacaaacatctcaaaaataaattccttgtatatctcacgcttatcatcctggtaaaattgtaaatttttaataacgaaattaaaactcggaagcatcaaatatcaacattctcc

SEQ ID NO: 6366 - DNA, 3709 bp, Diabrotica virgifera
  SmartBlast Evalue=0; Info="Eukaryotic translation initiation factor 5B, putative n=1 Tax=Pediculus humanus corporis RepID= E0VXY0_PEDHC"
attgcatgtggagaatttgccatttttcggtaacagattgttgagcaaaatatttatttttaaatacattatacacttatgataatatttagagaacttctacacctagaaagtatatatattaacaataaaaaatgggtaaatctaagaaaatccgcaaaggaggtgatgagagtgaatccgataatgaaaacagtacccaggaggtaattgacaaagccaaaacaaaaaagaccaagccagctaaatcccaatctaccagtgatgaaactaaagaggaaaaagcagatgccaagaaggcaaaaggtaagaaagaaaagaaacaagtggactctgaaggatcagacactgaagtggtttccaaagtgaaaaaatccttcgctcttcttcaaatcgatgatgaagactcagacgacaactctaaacccgcggtggaggacgacgatgatgaaagtgagacaaaaccagctaaaaaggacagtaaaaagaaatctagtgatgaaaggactacaaaaaaccaggggggtaaaaaggggaaaaagaatagaaaacgtgatgatagtgatgaagatatagagaaagtgttagctgaattagaaatggagtatgcaggtattaagaaggaacctgaaccgtccaatgaggagaagcctgtagaaaaagtgaaggaaaagaaaaaagacaaaatcgatgaaccaaaaggtgaggcagctgaagaagattcgaaacaagaagagaccagcactgtgaaaaccgcggcacaaaagaaaaaagaaaagaaagagagagaaaaacagaaaaaattagcacagaaaaagcaagacgtacctaaggagggttcagaagaacctgccgaacaccaggagcaatccaaaccagaaggagctgaaaagaaacctgaagcaaaagacaaagatgataagcaggaagatgatgagcaagatggtgataagaagagcaaaaagaagaagaagaagggcaaagaagatgatgagaaggatgccaaagacgcaaaagatgccaagaaaggtcccggtaagaaagccatagcagctatgcaagaggctctaaagaaaatgaaagaagaagaagaacgagtgaaaaaggaagaagaagaacgtttacaacgagaagaagaagcagaacaggccagattagaagcgctgaagttagaacaagaaagaaaggaaagaaagaagcagaaagaaaaagaacgcaaagaaagactgaaagccgaaggaaaactattgactgccaaacagaaggctgatagggctagggctcaagcattaatagatagtttgaaagcacaaggtgtagaattacctgatgtaggcgagaagaaaccaactagactgggaacgaggataaggccgaataagcagaagaaagagcaaactccagttcccaaacctgaagaacaagaagaaaaaatagaaaaagaagaatctcccaaagaagaagttgttgtaccaccagtagaaacaaaagaaccagaaccagaagatgatgtcaaagacgcttgggatgcatcgtccgaagaggaggaggaatctcaagaaactgatgttaaaccacaggaatcaggaaaaccatctgagtcgaaggaagcacatgacgaagaggaaagcagctctgacgatgaagacgaatcagacagtgacgaagaggagagtgattctgagtcagatgatgaagaggatgacggtagaactgctgcagaaaaggctcgtgatagagctctagagagaatcaaacttcggaaagaaaacgcagagaaggaaaaaaccgctgacaatttgagagctgctattgtttgtgtacttggacatgtagatacaggaaaaacgaagattttagataaactgaggaggacgaatgtgcaagatggagaagctggtggtattactcaacagatcggtgccacgaatgtgcctattgacgctattaaggaacaagtaaggattgttaaaggggtaaacgagaaagacatgagaatccccggacttttaatcatcgacacgcccggtcacgagtccttctccaatcttcgaaatcgtggttcttcactctgcgacatcgctatattggtcgtagatattatgcacggtcttgaaccccaaactatcgaatccattaatttattgaagactaagaagacgccttttattgtagccctgaacaaaatcgacaggttgtatgactggcagactatgagcaggaaagacattagagacgtcttgaaatctcaagctggaaatacacagatggagttcgaacagaggaccaaagaggtcgttgtacagtttgccgaacaaggattgaatgccgctctattctacgaaaaccctgatattcgcaactatgtctctctggttcctacgagtgcaatcacaggagaaggaatgggtaatttactggctttgatagtagaattttgtcaaacaaagttaacaaaacgtcttatgtattccgatgagcttcaagccacagttctggaagtaaaagccattcctggtttaggtactaccattgatgtaattttggtaaacggtactctaagggaaggagatacaatgctgtgcgctggtactgatggtcctattgagactcaaattaggtcgttgctgatgccgcaacctatgagggaactgcgtgtgaaaaacgcttatattgaatacaaagaaatcaaagcggctcaaggagtgaagatcgcagccaaagaactggaaaaggcaattgccggactgaacctctacgtggcccacaagtcggatgaaatcgatattgtgaaggaagaggtggctagggaacttaaatctgctttgtcgaacataaaattagccgagagaggagtgtatgtgcaggcatctacactgggatctcttgaggccttattagagttcttgaggactagcaaaataccgtactctggaatcaggataggaccggtagtgaagaaagacgtgatgaaagcatcgattatgttggaacacgaaagtcagtacgccacaatcctagcgtttgacgtaaaagtcgaacgagacgctcaagagctcgccgatagcgtgggtgtcaagatcttccaggcagacatcatttaccatctcttcgataagttcatggcgtaccgagaggaactcaagcagagaaaacgtgaagaattcaaacatatcgccgtgtttccgtgcaaactcaagatattgcctcagttcgtgttcaattcccgagatcccatcgttgctggtgttatggtggaagccgggattgtcagggaaggaactcccatctgtgttcctagtaaagagtttttagacattggtattgtgactagtatagaaagtaaccataaaaatgtggatagcgctaggaaaggaatggaagtatgtataaagatagaaccagttcctggagagtcacccaagatgttcggcaggcatttcgatgaaacagacttcctagtcagcaagatatccagacaatcaatcgacgcctgcaaggattatttcagagatgacttacagaagacagactggcaattgatggtggaactcaagaaaatgtttcaaattttgtaataactgtgcaatatacttcccaaatggatggactgtccattctcctcagtatttttcaaactgcttttatttttgaatcggacagattgttttaagctggtaatttttccactgagattcttgatatatga

SEQ ID NO: 6367 - DNA, 3689 bp, Diabrotica virgifera
gaattccaaatattttgcaaacatctgatgccaaataagtttgaagatttaaatggaaattctttatgcattcaactcttaaaacatgttccgaaaaatacaagatggaaattattgacccaatcattaaatactgtttttccacaaaattccattaacaatttctggaaattatcgatgagactattttaaagttgaatccaggtaaagatgtaatataccaatgggctagaatcaaatatgagaacagctccgatgacaactttttgcaatactatcctagttctgaatccattccagttatcaaggaaatgataaacctctgctctgatatgcgaaatagacaatcgttaataaaacatttgattagcacgtgtgctcacaacaacgatttgttatgtttggataaggttttggaatatatagtttccagacacaagaatgaagagcctcatgcttatatgagacaaatacagtttttactgacggctttcaaaacggaaaaatttactaaagagcactggaattttatacagcaacaacttgttttaatgcgtacaaaggatgttcttcattattcagagtatattgatatagaagtagcatttctagaatactcatacaaaaatgatcgtgatgcttttaagttagaagctaccgagtttatgaaacgtgcctgtgataactcgtggaattataaacgggattttgaaaattctaaattgaaatatgaactatttctagaattagtgtcgttgtttcttaaagaggtaccatcgacatctaagtattacaaagatgtccaagcttgtttaatacctgaattagttgatttgtgcaaaaaatatcccgaaaaatgtattaatatatcagactatccagaatttgtgtctgccattgaaaccatattggcaaaaaataaagaatttagctacagcgactttcaagtcataacatccatattaacttataacatcgagtttccccagtttgcgttgacttgtttaacagaagccaagatattggaagtattaaaaaatattacctatttatacagtatatggccttttatagagtctcttacttcaaagaaatgtctttcaatattggaaacaaacattctatattccttgattggccaatttgatgagaatgaatgggaattgaggtatatatttaaatccttaattgtacatcacccaaaaattattttgaaatatataaataaatttgtatactcggtgcaattttgcaaggaaatgaagcattattctcatctgaaactggatcaaaagatctgtgatcattttataaatgattggtcagaagcaacagacgaaagaaaagaaacagcattgaatattcttatacaactattagacgaggacgaatttactaaattttttaatgaacacttgaaaatgactctggctaaaaataaaaatgctgatgatatcgtcttcaataaaattcagaaccaaatactacgttcttttaaagatgtattgattccacagaattacatacctttattattaaatttatgtgacggaaatttacaggaagcagcactaccttctttttgcagtttatttgcacgatctcccgaaaaagttctttattcttacattgaaaatatgtttaagcaaaactcacaaatgcaagaatgtagtttaatattaagtaaccagtttttggagcaaaattatgttgttaaattactcaaacttataaaaccaaactcgtattctacgctcaagttcatatgtttgtttgctctaaaagtgtttgttaaaacagaatctgaagatgtattaactttatttataaactttacgaacatgtttgaagaatacgatagaggaatattttcttcttttgtaaaaacgaaagtatccaagaaatatgcttttcgatatattgaaacttgctggaaaatgatcgaacgtttcatgttaggaaagaagaaaagttacgactttttgaacaaattacttacacgagcattagatgaagaaattgtaaaatctctttcgtcaacatttgtcaaaaatataattataagctatttcgcagaaggtgataaacgtttgtctaatatcaactccttcgtcttgtattgtttagcctatcgagaagaagacaatgaaattaattataaaatgatatttcaaatgctcgccaaacagagcaaaggaaatatttgtttgttctgttacgatttcgtggaatttcaaaataatataaaccaacagttatttgttgataattttatacaacattggaaacagaacttcgttgctaaggatacaatcaatgaacacattttgctgaatctgctgtgcaaaagtatgaacgagtcaaaagaagattttgcaaaaagtgttgtagattatcttctacgatcaatttctgatgtaggcccttttgtttatgtagtttacgctagaaacttggatcagttactcagtaaaaccaaacggtataatatatatgatttactacatttaatgttactatacaaaccatcatcaacaatatatatttttgtacttaatcttttaaagcctgtggatgatgaagaaactgaagaggtgaaaactacttacaaaagtatattaggaatattaaaagactcaaaagaacctattgtcaaatgttcttatgaacagtatgtttataataataataatgctttctaataatcttaatagcattctcaacatacttacaccatgtgcaaaatttcatgcttcatttaacaatgtttgcatattcgtcactggcgttgctaaacacaaaactgcacaatgcatttactatccgaagaagacctaattcttcttttgttatcgtgaattacattatctactaataatgcagtcacttacttttcgaatagatgaaagctctactcgtgtagcttaccttgagtaaaactgatccaatgatttcagtctaatgctgaggtcacactaacgttaacgtttaatgttcattatcgtattaatttagacagcaaaaattatgcgcattaaagggactggacacacttattttagcgcgttttaaaccgacaagtgacgtactgaagtcctttgatgtgtcgaagcgaccgccactcgagctattgcctaatgcttaacgtgattaataaagacaataacaaattagcgcgctaagtcgtggctacacttccctttaatgtcaaataatgcgacaattaacggcattagacgttagtgtggccccagcgtaacaagcacaccaaaatataacagaatgaatcaaacttggtcgtaacatgcaactaataaagccgcatacacacttgaggcattggcctcgaatgagcgtaatggtcgacaattaaaagaaaattgaagacatttcaattttttgtttgtttattacggaataaatttatttagattgcccacatattgttaactcgctttccgattcattactaaaaagagagagttcagagtaaaaacgggatggctgtttggttattcggggcgtcctagtttttcctgtgctcacggagcacgaagcgaatgcgtgctcactttaaagtacggacaattttcgacttgttctgagcggtgcggatccatttggctattgatatgagtaaaacaggacaaacgaatgctttagggcgattactccagtgtgtacgcggc

SEQ ID NO: 6368 - DNA, 3706 bp, Diabrotica virgifera
  SmartBlast Evalue=0; Info=Aldehyde oxidase n=2 Tax=Culex quinquefasciatus RepID=B0X3W2_CULQU
ggaagtgaataggtgtttatcagtgaagtgtctatcattgtgtctaacaatggagcacacggaaacgataacgttaaccgttaacgaaaaacagtatacattaaatactagtgatgtaaaagcaggggactccctgaactcctaccttagggacgtgttgcaccttacaggcaccaaaagaatgtgctttgagggaggctgcggaacctgcacggtagctgtggaagaaacagtggatggtatacctaacatctattcggttatgtcctgtctaatgccactcttatcctgcgatggcaagacaattcacactgttgagggaattggtaatccaataaaaggctaccacaagatccagaaaacacttgctgaaaattatggcacgcaatgcggtttttgcacaccaggaatggtaatgaacatgtacgctctgagtgagtctggtgtcaaaactgaaagagaaattgaagattcttttggaggaaatatatgcaggtgtacaggatacagaccaatattaaaagctttcaaggaactaattgacaaagaacctattgctgacatagaagatttaaagatttgtcctagcaccgggaaaacttgcaacaatggttgtaaaaataagcaaactaaggttctggaacttggtgatgctaagtgggtccaagttaattctctgaaagatttattatctactttaaacagggtaacaactaccaactacatgttggtatctggaaatacggctaaaggtgtaaagcgcagccttggcaacgcagacttctatatagatattcagaacgtgcctgagattaacggctattccatcacagaaaaatgtctaactcttggtggaaatgtaaatctgacacagttgatgcacatatgccatgaaaattcccaaaaaacgaactattcatttttggatactattgaaaaacatcttgcttgggtagcgactgtgcaaatcagaaatgtcggcagcattgcaggaaatttaatgataaagtataaagacaatgagtttcagtcagatgtgttcattttgcttgaaacttttaaagcctcaattataacagttgatgttcatggtaaagaaacatccaccactgctcaagaatttttgaaactggatatgacaaaacgtgtaatcaagtccatagtattacattctttggctgataccttaaaatttggttcctataagattatgagaagagcacaaaacgcccatgctttggtaaacgctgcatttttggtggaactgaatagcaaaaatgttgtccaatcggcaacaattgtatacggttgtattaataaggactttatacatgcgagtgctacagaagctctactaaaagggaaaaccttatttagtaatgacactttacaacaagtttttgactccttaaataaagaacttgactgcgactatgctccacctgatccttctccagaattcagaaaaaatctagccatagctttgttttataagttcattttaaaaatatgtccagaagacattgtattggaaaagtataaaagtggtggaaccttactggatcgaccaatctcaactggaactcaagaatatggtactaatgaagatgaatggcctttaactcaacccattccaaagttggaatctctagtacaatgttctggtgaagcagaatacgtgatggacaaaccaattagaccacatgaagttttttgttcatttgtgacagcacaagctctccctggatcgaaaattgttaccattgatgcctccaaggccctagctcttccaggagttgtagccttctatgatatcaacgatataccaggaagcaacgtcttcacgccaacagacgtaagcgtattttccgtagaagaggagttattctgcagtggcacagtcaaatattacaatcaacccataggaataatcgtcacagaatcattaagtcttacctttacagctatccccttggtcagtgtaacgtatgaggctcctaccagtaaaccctacctagacgttagagatgtagttaaggataacgtggaatctagaattgaattacaagataccaatgagcgaactagaaccggtgatgacgtaaagaaagttgttaaaggagacatttacttaggagcacaataccatttccatatggaagttcaaagttgtaaagtcgtaccacatgaagatggtatcgacatttttcctgcttcacaatggacggatggcaaccatatcggagctgcagttgttttgaatttacctacaaataagatcaacgtgaaagtcaaacgtctaggtggaggttttggtggcaaaatgttcaggagtgcaattgtgtcatcggcaacagctctagcagcatacaaacttaaaagacctgccacgatgatcatgtccttcgaacaaaacatgaacataatcggcaagcgttatcctacgtatgtcacatatgaagtgggagtaaacgatgcaggtgttatacagtactgggattctaaagtatattccgactttggtctaggaggtaacgagcccttgggagatatgctgatggatggtgtaagaaactgttatgatgtgtccacttgggaattttctgcgtataaagtgacgacagataccgcaccaggtagctacacgagagctccaggaactttagaaggaatttgtacaacagaagttatatttgatgaaattgcgtacgccttaaatcttgatccaatggatgtcaggctagccaatatcactataccgcaaattcccaagtacttggaagatttaaaaagttgggctgatgttgaaaatagaaaaaccgcagttgctaaatttaataaagagaacaggtggaagaaacaaggtctctcaatagttccaatagagtggtacttggaggttgcagcaacttactctgtagttgtttcaattttccatgcagatggaggggttgccattacccatgcaggtatagaaatgggccaaggtattaacacaaaggcagctcaagtctgtgcctataaatttgggataccactggaaaaagtgtctgttaagcctacttacaatttcgttaatccgaatgccactaacacaggaggaagcttaaccagtgaagcaattgcttatagtgtcatcaaagcttgtgataagcttctggaacgcatgcagcccataaaagatcaattggaggataaatcttgggaaaaggttgttactgcgtcatttgctgcaaatattcaattaaacgccacaggattctttggtactgaagaccccatgatccaaaaatatcccatatatggtatttgttgcacaaccgttgaagtagatttgctgacaggcaaacatgaaatgctgcaagtggatattatcgaggatttaggagaaagtatgagcccgttggtagacataggccaaattgaaggagcatttgtaatgggtgtcggctattttacaaccgaagaattgatttttgataaagatggtcaactcttgactaacagaacatggacatacaaaccacctggtgcgaaagatattcctcagaaatttaatgtaaagttcgctgaaaacagtcccaatccagttggagttttgaagtccaaagctgtagctgaaccgcccttgtgtttaacagtatcagtcccacttgctattcggcatgcactggcttctgctaggcagaattctgacgcaaccaaa

SEQ ID NO: 6369 - DNA, 3692 bp, Diabrotica virgifera
  SmartBlast Evalue=4E-49; Info=PERQ amino acid-rich with GYF domain-containing protein 2 n=1 Tax=Camponotus floridanus RepID= E2AJJ5_9HYME
aaccaacaagaggatttatgttcaataattttatgtacatgtttctcaataaaacgagcctaatcggatgactgactcaatgaattttggtccagattggattcgtaacatgtcctccgaaggtattactggaggaggaactggtggaggaacaagatatcagcttgctgattatcgatatggtcgagaagagatgttggcgttatttgacaaaaatataaaacctcccgtctctctaaccaattttaaatgtctattctcggaaacttgtcttcaaccattagccttatcaccagcaaccgatgaagagatacagcaaagaggttggcagcccagaccgaatgcagctgtgtctggaccaatacgtgggagaggtgggtctttggaaagaggcggtcggatcagtagaggacggggataccaatatggcaggccgacgggtggatacgactcgggttggggcaatggggagcagcccgagtggagtccgagaaaagagtatattaatcagcgcaccacttcagacaattggaggagggcgagaatagatgaggatgatgggtggagaagtggcgtgggtgggccaggaagaagcggtggtcacgaaaaatgggggcgctccacaagttggcgaggggatggggactctgaagaaagaacaggacctccagaaagaggtggccgcacaagttggaatgacaatcgaggccctcctcgaaaatcttgggagagcgaggaccatctacctgaatgggcgatggagaatcctaccgaagggggaggtacttttgacgagaagggtgcctttcacggatcggatgatgaacagcctgagggtaaaccacctaataggagagaaataatcagtcttcaaaaatcaacttcacaacaacatatttcgacgaaatcacagcctccaccgatgccttcatccaaatcgacgttgtcccttgtaaaacccgaagatacctcacaaaaaaaggataccatagaagagaattcaatgaagaaaaaagaagaagacacacttcacaattcaaaacagaaagctccgtcagaagaaaggaaaaagttggttcccaacaatatacctgaaaaaatcgacaaagatgtccccctcgaacgggccaaattcagcgctcccccaaagttatcaattagtgagaaaccatcagtgatagcaaacggcccagttaacgataatccaaggcctgacgattcggagtttgaaaagttgcaagaagatttcgttttgaaattggtggtggacgaagacgtacctaaacaagtgcccagtagttttgaaattggtggtattcaacctcccccaaatttagctgcaccacccatactagacaaatggttttatcaggatccacagggtcaaatgcagggtccattttccaacatggagatggcagagtggttcaaagctggatacttcagtaaccaattgaaagtgcgaagggcgtgcgacgagaggttcgttttactgggcgatctgataggcctgagcggtggactgaaccccttccaagcgggcatccgtttccccgtcacgaagatgcccgcggcagaaccggatatgctgcaattgcagtatctgacgcagatggctttcaaacaggcgcagaccagacttctcaccgaaccatggaacgcgatatccctgcaacaacagcaagaacttgctgctcaaagactgattatgcaacagcaacaggtagcaccagatctccaatacctacagcaaccacaggcgaccaattctttaatgcacatgataaatcaaatgcaacaaggcaataaaattccaggacaaggattggtcgaaaaacaaccaaatttacctggtaccttagatcctcatatacaaatgcaaatgaataatcttctttctatgcaaaaccgtcttccgacgaccagtcacccaaccaatattcccgctggtctcagtaatactctacctgtaaatctgccacaaccagaaggattatcgtcaagtatgcccagtttacagacacccactcttaacacggccgcaatgcctataccaggtatgcagagcaatataccagtcagtattggaggaagtattaatctaccaagacctacttctcgaggttctgttgaacaaatctcttcgactcaagctagcgatcccataacgagcctacttaagcagcttcaacaacagcagcagcagcaacagcaacaacaaaagcaatcgactcctccacaggtggattcactgtggcaacaaaatacatttaccgccaacaacggtacttcgcaatggcaaccccaaaacgaagtccccatgtcgatgtgggatctacaaaataatcctgtacctgctgttccctcgcctcccttgactcaatcggaaaaactgcaacaagcgttacagccgaagacttcgaaagccgacaaagagaaggagcagaaacaaaaggaagaagcagcggcaaaagaattgaagaaaaagaaagaattggaagagaaactggcgaaaaaagaggctgaagaaaagaagaaactggaactaaagcgacaagaagcggaaaagaaagctctcgaggagaaaaggaggaaggaggacgagaggattaaaagggaattggaaaaggcaaaaaaagaagcagaggaaaaaaggctgagggagctagaggagaaaagaagacttaaggaactgaggaaagccgaagaagaggcgaaaaagaagagtgaagaccaaaagaaattagaagaagatagattgaggcaagagatcaaggaaagggagattagaaggttagaagaagagaagagattgcaacaggaacaattgagattagctaaagccgctccttggtctcaggcaaacgccaatatggggctgagtctcgcggagattcagaaagccgaacgagaaaaacgagcgttcgatgcagctttgcaacaacaaaggctacaagaaaaagaacaacaacaacaatttcaacaagagaaagcacctacctcacacttaaactgggcgaaaaagccggtagaaccgaggaaggttaagtcccttgccgaaattcaagcggaagaacaagaaaaattagcaaagcaagcagcagaaatgcgacaccagaaggataaagaaccatcaccggtgaccaataatactagcagtagtatttggagtagtcaaaatttgacgtgggcttctgcatcgtccgcaaattggtcctctagttcaggtggtttttgggatgaatcttccagtaagcaacaacaacagcagccgcaccagcagcaaggagcaaacaaaccgtccactgtaactaaaagtaattcgacaaatacgtttagtgcagctccaaagtctcaagcgaaaaaccctacaaagaacaccaacgccaaggtaaaaaaagaagaatcgaataaaacaaatcataataataataataacggaccgtcatcggacgaatttatgaattggtgctacaaagtgttatcaaatatatcaactaacgtagatattcctacttttgttactttcttacgagatatcgaatcagcgttcgacgttagggaatattgtaaggaatacttaggagataacaacgccacacaccaatttgccgtgaattttttggaaaaacggcgttcatttaaacctaagaataatgctcacaaagacgatatgtgttctccagctccag

SEQ ID NO: 6370 - DNA, 3666 bp, Diabrotica virgifera
  SmartBlast Evalue=2E-77; Info=Secretory carrier-associated membrane protein 1 n=1 Tax=Camponotus floridanus RepID=E2A062_ 9HYME
gaaatttcaacctcttttcgcaattataccaacaacaaatgagtgtattaaactttgcaatacgccactccaaagccctttccattctctcgacgatgtttgtactaagaaaaccataattcgtactgttttccattaatttggaaaaaaaggaaaaaatgtcgttttttgacactaaattgtttataaataaaaatggaaaaaatgaaaaaaaggaaaaaatgtcgttttttgacactaaactgtttacaaacaaaaatggccgccagatcctacgaaggaaatagttacaatttgctcccataggcatcacctatcgaaaaaacgcttcagcactctggtctgctgaagtgtcacgaacagggtatatttttgtcttattaccctggcctataattaaagaggccgagcgataacgtccaagcatacatattatttttcccatacctctcgagtttaaaacatacctcttacactagagcacaaaagatttaagtaaaaaagatgtatgtagtacgactgtactttatatagtttattacttgtattactgaaatgatgtatcaacaatatcgatagggggtgaggttttggtagcaaggcgttgtgcgaatatagcaaattttttagttttcatatcttcaaagaagtatcataatggtgtatttcaaagtgtaccccccgttatgatatgcaaagtgtcctcactcctagaattcaattggtttacgttctatgatattaaaaaataagactaggtgcaattttaagcctccacccaccaccaaaacgtaatttttcgttttatttttttttaggtggcatgcaatcaacttatcaagttcaaacaattgacacataggttgagtgttcgtacataaccccaaaatgcattttatttttttttgaaaaacttttttttgagatggcgctggtttattttttattctatgtattttatcaaaaactatacttctaatttcttttcagtaaggtgcgccaccttaaaaaatctgaaaaactgttttttaggagtttttcccattttataaactcaaaacagatcaaatcaaagtttttttataacttataaaacctccacgtttttttttgggggggggggggggggcttgaacgtgtttcttccatttttgaatgttcgaatggactcagttacttcaaattatatataagttataaaaaaaaccctgactgatctaatttgaagtctaccaaatgggaaacactcccaaaaaacaccctaaaaaccagtttttcggatttttgaacgtggtgcaccttcagaaaaatctgaaaaaaattcgaaatacaatttttgataaaatacacaaaacaaaaaaaaattagacttgcagccatcgccaaaaaagttacgcttttttcaaaaaataaataaataaataaactgcattttgaggttatgtacactacgtgcttaaacctgtggaataaaaaataaatatgttttgaaaaagccccgactacggaaattttgaaatttattgcctcccacctaaaaaaagtacaacgaaaaaatgaagtttttggtggaggtagagggggaacgaaaggagggttaaaactgagccgagtcttatttttttatcacatacaacaatgtaaaaaaatgaaaaaaattgaattctggaagtcagggcactttgcctatctttttaggggggggtacgctttgtttcctattattcagtatgctacaaaaacgtataaaagattgtgttgaacttcgtcgttaatttatgaaaattaaaatatttgttatatcctaattaacttttgataactcatgaacataataatagtgtattaagtatatattgacatcaaacaataagctttttccttgatgttttcaaactagtataagcagagtttacttgtgttatcaaatgggaatatcaaataaaaaatttatattgtctcaagagctcggatactattttccaagtaggtgatattttcagtaagatacacttcttattatcaaaatataattatgtaattgactttttaacatgcaatggtgggtaattatgatgaacatatttacaacctatatatttagtcgatgtaacaaaactatacatagatataccagtattcaacaatgagttcgatagaagggttttataacattaataagtgaaatgtaaataaattactacatgattaggatttgctgaaaataaaaaaaaaaatagtgaaataatattctttcatttgtcttacgatataacagtgtgctctcgtacaatttagtgtgaatcataatatatttagaagtaatgaaagcaatcaaaatcgataacaattttatcagcatgtcagaaatcataaaatatgtaataatactttacaaagtcatatacactatcaactcttatagttaagaattttatttatctatttggagctttaaacccaagctgatttctgatttaaatactgaaattaaccatagatgaagtattggttaactaatatctcggagtagtttgattttgatttatttgagagttaacagcagctactgcaacattagtggcagcatcgcgaacatgttgattgcgaaagaattctgtggtgaattcctgttgggcttttgccaaactggctccagtacttctatacatacgatggatcttagatatcaaaagtaaatcagcagttgctgctaatccaaatcctatggcgataattagagctattattccttggacaatactccatgctgtattcttaaatgtctcaagagcagtgataattcctattgtgcccgaatgagggatgcctatggtttgtattgtagttattacaaattgaaagaaaaatatgaagaaaaataccatgaaattgaatgaggaatccgaacgaaatgctttatatgctggtctgaaccaacacaagtatccgaatggagtaaataacaaacagtatagtatccctaaacccacgacggtaaaatcttctagaattattccacctattatatttaaaatcataacagaaccgtgatatatccaaagatagtaaagatttctcacaatcttttgaaattctagtgggatatcaacctgtatatcttgataaaagcatggttgaaagcaacactgctcaggcaaaggaggccaattgttacgtcgtacattgtatgtcgaatttctcatttcttcttccctgcgagctaattcttgctcttttctttctaattcttcttgtcttctctgtaattctgctgtatctatggtaggctttgggacattttgggcctgttggccacttctggtgtaagctggtggttcttgtgtaggttgcataattgccggaccactatttgcttgtccataatttaccggttttgggttttgtacttgattatcaaaagggttgtagtcatcaactcgaagttgagcatttgtgtttctagcaacttgttgcacagatggatctgcaaaagggttgtctatggtgggttcaccaaaaggattttcgtcaaatcctgacattttttacgaactctcttctagtttattttagaggcacaaatacactgttttatcttatctatatgtgtctatattaacttcataatcttagttgacaagacaccattattttgcatagctg

SEQ ID NO: 6371 - DNA, 3662 bp, Diabrotica virgifera
  SmartBlast Evalue=3E-66; Info=Ankyrin repeat protein (Fragment) n=1 Tax=Giardia lamblia P15 RepID=E1EYA4_GIAIN
ataattatgaatattattttaaattcaataaaagtgattcccagaatcacgcctatatatatacggattccatgaaaaatattgacattttgtgaataaagtttgtagttggatgaactggagtggttgatcaaggttgtctaaaaatattttcagtgcgtgaaaaccctgtgtaactaaactacattatcattatagtgttttatcaaattattaagaacggcgaacaaatatatatcttttattttgatttcaagaaagtatagcatcttttgaactataaggtttatattggtcagaaactcatagtctttcaatatggcggggtccaatatagaagataagatgaaaaatttaaactttaactctgacatcaacatactactattaggtcaatcaggtgttggcaaatcaacgttaatcaatgctttcgccaactatctaacttttactgatctgaaggaagcgaaaaaaaataaaccaatggtactaattcctagcaagttcactatatttgataaagagggggatatgcatgatattactacaggagatccagatcaaaacgaatatatacaaactggagaatctgctacccaagacgtgaaaacttatgtttttccaatatgggatggggcaataaaaatacgtctcattgacactccaggaatgattgataacagaggaatagatcaggatgatataaatgccgaaaatatcttaagatatattgccaatttacacgaactgcatgctatttgtttcctattaaaacctaacgaagccagatacacagtctttttccaatactgtatgaatcaaattttttcacgcttggataagacagcatgcgataatatcatcttttgttttacacatacgagaggatcagattatggagctggagaatccattaaaatattggaaaaggcaataaacgaaattgccagccgccctccttatgctaaaattagtatgaagagaaatattttttattttgataacgaaccttttaaatatctcacagccgttcagaaaggtattcgttttgactctaacatcaaagaaagaaataaagagagctgggacaagtctgctcaacagagttggaggttaattaaatatataactggagatagcaaaaataagccgctaaggcctcactatgtaaagagtacaaccgctattaacgaagcgagaagaatgatcactcaactgtcacaacctctggcagaaataacccaattaatacatcacaacatgagtgttttagacagacacaaggaagtattacgaaatgctaatgaatcattagaagaaatgagaagcaagctttatatgccagttattctttggaaagtacttccttaagccaacctgtaacagtttgtgcagcaagaaagtgttgtgaagtttactaaggtaggcggaaataatgtttttcattataaacagagatgtcacgatccgtgctacttaacaggagttcctaaagaaattattggcgcagcggaactaataggttgtgcggccatgaacggaacttcaacttgcattaagtgcatgtgtgactttaaagtgcacatgcacgtgtattatctaacaaaaactgtagaaaaacaagaagttgatgaaaatatccaaagaaacataaccagcaaagaggatttgatacaaagtaaacaacaagtaataagaaatatagaagtaaaacatagtgagttacataatgaacatcaagttgttgtagaagcttgtgctaaattcgctcacttcttacaaaacaatgctatcactccgttcaatgattcctacaaggaatatattgagtatctcgttaacagagaaaggtcattgggaagagactgtaacagagaaactgtcaaccatcttgaacagctcttgcgtcaatacgtagaaatcaaaaaacgtttcgacgaagctcttaagagtaacaaagccatcggcaaagatgctgtgattactgctcaagatgtaaatgaagctattaataaattgtataatttgaagcataatggcaaaaaaattaaagagctatacacttgccagaaaaattcaagaaccaaggaattcaaaaacacggaatatattcataaaatgacgagcaagctcaaagaaaaaaatgaagacaagaaaaagaaggaccagaaacaaaaatctgaaagagatgataaggatagtgataaagaaaagaaaaataaaagtagagataggagtcaaaccaggaaacccaataaagacagaaacagaaatgaaattagaaatcgtagtccaccaccaaattacaatgaagctactaacagaagaccacaaaatgctaatcaatcatacataccacctctattgcctccgggtccattcggaccccctccacaaggtgcatatggcccttatccacaaccatacggtcctccacaaggcggatatgggtatgggccgcaaggaggaaatgtcggtccttcccaatggcgatcggggaaccagttaggctctaacaatggcgcaccggaatacgatataaagatatccgttaaaaataacgatggtcctgaatccgggcccagaggtgcaaatagcccatcgtataatcagcaatggtttcctccccaattccctaatcaatatggccaacatccacccaattggaaccaacaacctccagcaaattggaattcgccaaactggaaccagcctcccgcgaactggaaccaacctcccgcgaactggaatcaacataattatcatcgtggagttaacagacaaggaccaagaaatcaacaaggtagagaacatcataacagaggaagaggaggtgtacagaaaaacaagacaggtccacgaggaaagaacaacgatcagagaaagtcagacaactccaaaaagtcttcaaaaggcaagccaagctcctcctccaaccgtagctcctccgactctagcaaatccgattcagattaaaactatcgttctttttttattgatatatttgtaagtgttttagtataagtaccgttcgctcacccgaaactctaattaataagattagtcattttattattatatttaccgaactttaaaatcatttgagtttagctgtagtaccaaagcttaagttttctagttatctatgtgaaacaaataaaataattgttaacagttgacaagtataataggacttttcatcgcttctcatttgtttcgggcacttgccatgcgtcatagaagcgatgaaaaagcctatggtgggtaatcaagatgttgatcagatcaaaaagtcgctacattatcttcaaaacgttatataatgcgttacaacatggcaacacgatgctcacatctccactatcgatggaatgaattaatttgattttgtgattttgcatctactcgtgcaacattctaaatctgtcccaacaacatcgtatctgtcgtaacatctcaactaacaaacatgaatgcaagactattattaacataagtatctacctcatatttcacggtacctccgtccttttcctgagtcttctttacaggccactcttcatcgccgtgcaccaacgcagacatcaccacactcttgtgtatctttcctttcggtccttccccgatttatcaatcacatagtatcccgttgattcgcaccc

SEQ ID NO: 6372 - DNA, 3662 bp, Diabrotica virgifera
  SmartBlast Evalue=0; Info="Bullous pemphigoid antigen 1, isoforms 6/9/10 n=1 Tax=Camponotus floridanus RepID=E2AVR2_ 9HYME"
aactaaaagaactccaagcattccgtaatgaagtttggaagaaatctggagattacgaaaacaccagatcactcggtgaaacattccttgcagcttgtgatattgacaaagacgatgttaagaatgaattgggtgatctgaaggatagatgggataggctgaataatgacttgattgctaaaacacaagctttggaagatcaagccagaaaactagcaaacttcagtgaaaatgttcgagatttacaacatggtttggaaagatgtgaagataaattaacttcacatgatgctttgggaggtgctgctaaagaccctaaactcctagaccgcattaaggcactccgggaagaaaccataaagctgaaaaaccattacaaggcgttcgtcaacaagctaacgatttgtgcaatgaagcatcacaacatcacattgatgctgatcatcttaaagatgaagtcgatggcataggtgatcgaattgatgatttatgtgctaaattagatgaccgctgttcagatttgcaatcggctgctacagctgtaacacagttcaacgatgaagtgaaagaaataactcaagatttatctgctttagaaacagaattagacgatatgaaacctcctggtagagaagtgaaggttgttagaggccaaatagatgatgtaaacaaattcctcaccaaggttaataaagcaagtgacaatcttaagcatgccattaattctggtgaaagattggtggatagtggatttgctcctgatactgtacttactagacaacagttggatacattaaagaaacaattaggaaaactagatgaccgagctcaaaacagagaaaaagatctagaaaacacgctaaagaaactggaaggtttctatatatcccacgcaagtgttttagacgatattcaagatgcctcaggagaattgcgtaaacttaagccagtaggttccgaagtcgatagcattagagctcaacagaaagatttcaagaaattcagagctaatacaattgaacctttgggtaagaatattgaagaagtcaataggttaggacaaggtctgattcaatctgcttcatctggtgtcaacactgctattctcgaaaaagatttagaaagaatgaatgctctatggaatgatcttaaagaaaagattaatgacagggaaaggaaacttgacattggtttattacaatctggtaaattccaagaagctttggacggtttatctaaatggttaacggatactgaagagatggtagctaaccaaaaaccaccatccgccgactacaaagtcgttaaagcacaattgcaagagcagaagttccttaaaaagatgcttcttgaccgacagaactccatgacatcactgtttaatatgggtaacgaaatcgccaaagaagctgagccatctgaacgcaaagctatcgaaaaacaacttaaagatcttattgctcgcttcgatgcattgacggaaggagcccaacaacgtaccatggatttggaacaagctatgagagtagcgaaagaattccaagacaaacttatacctctacaagattggttagatcgtgccgaaaagaaagtcaaagatatggaactggttcctactgacgaagaaaagatagagcaaagaatccgtgaacatgatgttctccacaacgatattcttggcaagaaagttgattttaaagaacttacagaaatcgcttcgaatttgatgtctcttgttggagaagacgaagcttctggattagctgacaaattacaagaggtcacagatcggtacggaaacttggtggaagccagtgagcacattggacaacttttaacagcttcaagacaaggtcttagacatcttgtcctcacttatcaagatttggctgcctggatggatcaaatggaacaacggttatctcgttataaagttcttgctgttcataacgacaaacttttggaacaaatggacgctctaacagatctttctgaaaatattgccagccgtcaaaatgacattgacggtacagttgatgcgggagtagaattaatgagacacatttcttctgatgaagccttagaacttaaagataagttggactccttgcaacgtagatacaatgatttaacaaccaaggcagcagatctttgaaacatgctgaaacaatactaccgctggtacagaagttccatactaatcacaaccgcttagttgattggatgcaaggtgctgagaacattttacaatcagctgaaccacatgaaggtgatattgcacgtttagaaatagacctacaagaactaagaccggtgctagaaactattaatgtactaggcccacaattatgccaagctagtcctggagaaggtgctgctacgatcgagggacttgttacgagagacaatagaagatttgatgccatcgccgaacaaattcaaagaagagcagagagaatccaacttggaaaacaaagagctttggaagttaccggtgatatagatgagctcttagaatggttcagggaagtagaaggacagctgagagatgccgagaaaccatctggagaacccgatttgatcagaattcaacttaaagaacataaagcgcttaatgacgatatttctagccagaagagtagagtacgtgacgtcttgtcatctgctaagaaagttttacgtgaaagtccaccaagcgaagacactagccttattagagagaaaatggaagatttaagagaagttatggatgttgtgtctggattaagttctgatagattgggaattttggaacaagcactaccactagctgagcacttccacgatacgcacaatgtacttgtatcttggttgaacgatatggaagaacaggtatctatgttaacaatgcctgctttaagacccgatctaatagctcaacaacaagatcgtaacgaaatgttcttacaatccataaacgaacacaaaccactcatagacaaactaaacaaaaccggagaagctcttattaacttgtgtaacgaagatgatggtagtaaagtacaggaattgcttgactctgataatgctagatacggcgctcttaaactagaactcagagaacgccaacaagccttggaacaagctttacaggaaagctccaaattttctgataaacttgaaggaatgctccgcgctttgtctaacacagcagatcaagtaaatcatttagagccaatatctgcacatgtacctaaaattaaagatcaaattgaggacaatgataatttagttgccgatttagataaacgaaaagaagcttatgcagctgtcaaacgcgctgctgacgacgttatcagtaaggcaggaaatagggctgatccagccattagggagatcaaggccaaattagagagactgaagagtttgtgggatgacgtgcaaaaagcgacacaaactagagggaaatcgctggaccatgctttggaagcagctcagaagttctggaaagaattacatgccatcatggcaacactcaaagaccttgaagattctctggtatgccaagaacctccagccgttgagcctaaggctattcaagagcaacaggttgctttacaagagatcagacaggagatcgatcagaccaaacccaacgttgatagagtgagaagttctgggga

SEQ ID NO: 6373 - DNA, 3656 bp, Diabrotica virgifera
  SmartBlast Evalue=0; Info=UDP-N-acetylglucosamine--peptide N- acetylglucosaminyltransferase 110 kDa subunit n=3 Tax=Apocrita RepID=E2AQU9_9HYME
ttttgccatagaaaagaaagtatccattatccatttttgaatagtgtagtgaaaaacaaattttgtgtcatttggtggtatatttacgtatattttttaagatgcaggaaaaactgattgttaatgttaatcaaacagtgggaagcaccttttcaacgaaaatgaatgattccattccgatgtcctcagtcggactgttagagcttgctcatcgtgagtaccaagctggagattacgaaaatgcagaaaggcactgcatgcagttgtggagacaagatcagacaaatacaggtgtcttattgttattgtctagcattcattttcaatgtaggagattagagaaatcagctcaatttagtagtttggcaattaaacaaaataccccttctagcagaagcctacagtaatcttggaaatgtatataaagaaagaggtcaactcagtgatgctttggaaaattacaggcatgctgtcagactaaaaccagatttcattgatgggtacattaatttggctgctgccttagtagcagccggtgatatggaacaagcagtacaagcatacattacagctttacaatacaaaccagatctctactgtgttcgtagcgatttgggtaatcttcttaaagctctaggccgtttagatgaagccaaggcctgttatttgaaagctattgagaccagacccgatttcgccgtggcctggagcaatctgggatgcgttttcaacgctcaaggagaaatctggttggccattcatcactttgagaaggcagttggtctagatcctaactttctggacgcctacatcaatcttgggaacgtattgaaagaagctagaatatttgatcgagcggtagcggcatatctgcgcgccctcaacttatcccccaacaatgccgtggtccacggaaacctcgcctgtgtctactatgaacaaggacttatcgatctggccattgatacttacagacgagcaatcgaacttcagcctaatttcccggacgcctactgtaacttagccaatgcactcaaagaaaaaggccaggtttccgaagccgaagaatgttacaacacggcattacgtttgtgtccttcacatgcggactctctcaacaatttggccaatatcaagagggaacagggttacatcgaagaagctacaaggttgtacttgaaggctttggaagtatttcccgaatttgctgcagctcacagcaatttagcatctgtacttcagcagcagggtaaactgaatgaagcactaatgcactacaaggaagctattaggattcagcctacctttgcagatgcatattccaatatgggaaataccttgaaagagatgcaagacgtatctggagcccttcaatgttacacacgcgccatccaaataaaccccgcatttgctgacgcgcacagtaatctagctagtatccataaagattcaggcaacattccagaagccatacagtcgtacagaaccgctttaaagctgaagccagattttcctgacgcatattgtaacctcgctcactgcttacaaattgtctgcgattggacagactatgattcaaggatgaagaagttggttaacattgtcgcagatcagctagagaagaaccgtttaccgtctgttcacccacatcattcgatgttgtatcctctttctcacgatttccgcaaagctattgctgctagacacgctaatttgtgtttagagaaaataaacgttttgcataaattcccgtacaagtttagcccggaccttaaaagtagattaagaatcggttacgtcagcagcgattttggaaatcacccaacgtcacacttaatgcagtcgattcctggaatgcacgacaaatcaaaagtggaaatattttgttacgctctaagccaagacgatggaactacatttagaagcaaaatctcgagggaagcggaacattttatcgatctttcttctttatcttgcaatggaaaagccgctgatcgaatttattcagataatatccacgtattagtaaacatgaatggatatacaaagggagcacgaaacgagatatttgctttaaggccagctcccattcaagtgatgtggctgggatatccaggtaccagcggtgccagtttcatggattaccttattaccgatgaaattacgtcaccgatagaagtagcagatcaatacagcgagaagttggcttacatgccatacacatactttgtcggtgatcataaacaaatgtttccccatttgaaagaaagattgattgtaagtgataggacgggacagaatttggctgataatgtagccatcatcaatgcaacagatttgtctcctcttgttgaaaatacagacgtcaaagaaatcaaagagatcataaaagcggcaaaaccagtggaaattagcttgaaagttgctgaactaccaactacgactccgatcgaaaatatgattgcgtctggacaaattcaaacttcgttgaatggagtagttgtccaaaacggactagcaacaacgcaaacgaataacaaagctgctaccggtgaagaagttccacagaatatcgttataacaaccagacagcaatacggcctaccagatgacgcagtagtgtactgcaattttaatcagttgtacaaaatcgatccagtgacgcttcacatgtgggtgaacattttgaaagcagtaccaaacgcagtgctctggctgttgaggttccccgcagtcggtgaaccgaatttattgaataccgtacagcatctgggtttacctacagagaaaattatctttagtaatgtagctgccaaagaagaacacgtaaggagaggtcaactcgcagatgtttgtctcgatactccgttgtgcaatggacacacgaccagcatggacgtgctttggacaggaactccagtggttactttacctggtgaaacgttggcgtcgagagtggcagccagtcagttgaatactttgggttgtccagagttgatagctaactcaaggcaggaatatcaagatattgccattagacttggaacagacaaagaatacttaaaagctatgcgacacaaagtatggacagcacgatcaacttcaccactatttaactgcaagatctatgcacaaggattggagttgttgtacggcaagatgtgggatcgcttcgcagctggtttgaaacccgatcacatcattgatacaactgccactgaatagtgtcatcgttgaacatgtgataaaatacgttaactttaatatcttctttttatagacaataatttgcaaaattgagaaaacatacatagtttcagttccaagttgatactaatgtagttttagtatgacattgacagttgacattgtatataaaagatttcagtgaagacagacgtattatgcaacagattattgagttgatgcgaattcttgttatgttattctcgcagtgaacattatttttatataattgatatcggctacggctatctgtgtgatttattattgtatatatttcttatagtatcaaaaatgtatatgtgcggtttaaatttaagttcaatatgatttatattatttaagttattaataaattatatgctgttcattttattactatgtaatacatttacttgacatgtgtaatttaa

SEQ ID NO: 6374 - DNA, 3640 bp, Diabrotica virgifera
  SmartBlast Evalue=2E-27; Info=Large proline-rich protein bat3-A n=2 Tax=Xenopus RepID=BAT3A_XENLA
cattatctttgagatttgactgaacagtcgagcgcagtagatttctgtaagcattttgaagttctgtcgatgcgcctgctgcttgaactactacatccaaaggtgctgccgaggaaagaccactcgaagatacagcttgtcttacactctctgtaataacgtgagggagatttccatgtggtttggaaccattgacaattttccgtcttttgcttggcataccggagagataagcgtcactaaaaggtccttgaggattctgtctcctttgtttctgggcatccctagtaattattggtacccaatcctctggtacttgattatgccaaggttcagatcctattactacattcggcaagggttcaggatcaggaattatggccgacggattattttcagttctagtctcttgagcgtctacttccatggactctacttcggtttcgttttctaccataggttccaaaatcggagtcatgggtctgtgaacgatgtacggctgcaatagactctctggtatgttcagatttgacaatatttgccgtaaacggacacgactcgtcataagtgtccaattttgcacatattggggaacatctctcataaaatatgacattacttgctcgtagacttgttcaactccgttccgacctgttgaactggcgagaagtgttaaagctagaagttgttttgctgtcgttatgcactgttcaaccaacaaacgtgtggcgccgccatttaaattaattccaatataaattatatttggtagtctctgtctgaataactgttccgccgatctaaccatgtctatattgttttgaactggcaagcttctgaaattttctaagaatggttgcaattcccttataattctatcgatgcctctatcaataccggacggtgtagtatctgactcacaaattctggtccggaaaaatgctttgagcacacgaacatgtctgtttataggttccacactgccaccgtatagtgacaatatatctacgattgaaaagttcctcacaaagagcattattaagtcaacaagaaggttttctcctgggatgtactgttcatcttgaaattgattaacgagttcttctaaagtcgaatccggacgtagtggatttgttgattcctgtaatagatcgccattcatgtcggtcaatgaaaatattgaagatatctgaggtaaattaaaggctcctatgctatcgatgctatttggcatattaatcgatgtagtactcgtagaggtacccgcttcattatttgcttgtagaggaccgattcttcttgacccgctgttccttacagaaagaaatgcgttaactaaactctgaaaatctggaggtcctccatcatcatcattgtttgctgtattgggttcattggttgcagcagtaggttgccagtttggtggtggggggagatgatcaatgttcactctacgtcttgtaatatggtgggaactacatggaaggaacggatcaaaaccacgtataccttgcatggcccgttgggccaaatgaacgtttgaccgtgaagtgggtctggtatgagttgaagtggtcgggtttgtttgagcacctccacgtggttgagaattctgccctctgttaggggtagctccttgtgcagctccagactgagcttgacttgattctgaagatgtagtagcaggggtgggacttgctgtagtagtggttgttgctatattgcgattcattatctgacctgccatttgcataagggagttcaacaattctggagggggtccgtttaacgctcctctgagtacttctggagtcacttccatgaagaactccacgtttggattgttaaagttgtggccggcaccttgttgttggccttcttgattgttaggtgtggtatctgcaccagtaccaccagtatcactaccggtaccagcatctgaagccgtagtggtaggagtttcattgccagtggaagcacgtaggtaagtgagttcgaaagtaggtgctgctgcggtgctgtcgggtgtgccgttctgagatctaggttgagctcttgaagctcgaacttcaacgggaattgattggactctcgtacctgcgttggccataaatggcatacctaccatacctggtggaacttgtatcggtctggcatttggtacgctgacaggtgtggcgtgaagagtgtacgtcggtggttctggaggtgctgaagggtctgcgtttgacgaagagttgcgttcagctgtcaagttaatctgtgcctcaacttgtataggaataccagtttgtagtacggccgaatgttgtatgaggatgggacgacacaataaaggccttggacgcgaaggaagtccaggaggagtccttactcttataattagatcactgagtgaatgataggcgtggcctagtaaatgcatcacttctgaaaccctattcagcatgttctgagttgttcttacgtcatctcctgtaacatctgggtcatccctagtgaactgctgatatctttccaaaaagggagcaaatctaatttgtatctgtgtcaacatagtcagaagttcgctgagatctccaattctggaggcgttttctggtaatcggctgctaggcgcgggtctggaatcagaagccaaattctcagttgaagatcttggggaagtacctgttgctgatgcttctgaggtactaggtgttgctgcagcgtcgtcagcaatttgttcaaagggagcagtatttcctccattgtttgcagcattcaataaagtgtcgtgaactgcgcttaatacgtcctcgataggttcgacaccactgtttgggtttggaacaataactcttgcttctataaccggagtaacttcttcctcctcttctggattttcttctgcagcttgttcttgtgacctgccagatggattttgttctaacacccgtatgagattttctgctcgcctcagcattcttcttgcaacatttaaacgactacgagataaactggatgttggaggaggtggttctattccttgggattccataaaggatcctggaaaagcaactgaacctaggtacattgcatttccttgctccaaatttctgaatcctctgaaacctctcctttgcggttgtggagaagtcgagcgactgtttgatcttggagtagttccaggtggaggtctttgaaccaaatgcacaactttgccgttgacatcataatcagctaattttgagttgtcttgcaaaactctgccacagtaaattatacgctgagtctcagcagaaatgttcacagtttctgctatcttgactttaaactgctgtactgtaatgtcatcctcaactgtgaattgatggttttgggaatccaaagtcttcactgttaactcaatcatcttgtcccttaaaacaagagatataaaaagttcgataaggcaaaggcggacatatactttgtatacttcaagttaatcactctacaaacgtgggttgtccgttgtccttctaagccgatattcgtatattagtattagaagcacagagatgaagacgtatatttcaacgtgttctcttcatcaaaaacctaaacctattttacaccttaaaaaccttttttggtgagtcaggaatatcaaaatggc

SEQ ID NO: 6375 - DNA, 3621 bp, Diabrotica virgifera
  SmartBlast Evalue=0; Info=Glycogen phosphorylase n=11 Tax= Drosophila RepID=PYG_DROME
gccggctcaagaaaaggtgtttcgcgaatttacagtttttacatttgaacagtaccggctatagccttctgtcaacattatggccactccacagtctgatatcgagagaaggaaacaaatcagtgttaggggcatagccgagttagacgacgtaaacgaaatcaaaaaaacattcaacagacacctgcattatacccttgtaaaggacagaaatgttgccactacccgggactactactttgccttggcccatacagtcaagtcccaccttgtctctagatggattaggacccagcaatattattatgagaaggatcctaagagggtgtattacctttcacttgagttctacatgggccgttccctacaaaacacaatgatcaatttgggaatccagacccccgtagacgaggctctctatcaactagggttagatattgaagaactggaagatgttgaagaagacgctggtctaggaaatggcggtcttgggaggttggctgcttgctttttggactccatggccactttgggtatggctgcttatggttacggtatcagatacgaatacggtatttttgcacaaaaaatcgtcaacggcgaacaacaagaagaacctgacgattggttgagatacggtaacccatgggaaaaggccaggcccgaatacatgcttccagtaaacttctacggcaatgtcatcgacacacccgagggtaaaaaatgggtgaacactcaagtagttttcgctcttccctacgacaatcccatccctggataccaaaacaacgtggttaacactttaaggctgtggtctgctaagtcacctgttgattttaacttgaaattctttaacgatggtgactatattcaagctgtgctcgatagaaatctcgctgaaaacatatcaagagtattgtaccctaatgataacttcttcgaaggcaaagaactcagattgaagcaagagtactttatgtgtgctgcaacactgcaagacatcatccgaagattcaaatcggccaagttcggtacacgggaagctaccagaaccaacttcgatttgttacctagcaaagttgctattcagttgaacgatactcatccttcattggccattccggagttgatgagaattttggttgacattgagggtcttccatgggagaaagcctgggacataactgtcaagacttgtgcttacaccaaccacactgttcttccagaagctctcgagagatggccagtatccatgttagaaagtatccttccaagacacttgcagatcatctaccatattaacttcctccatatgcaagcagtcgaaaaacgttggccaaaagatatggacaggatgaggcgtatgtcgctcatcgaagaagacggagaaaagagagtaaatatggcccatctctccattgttggttcacatgccgtcaacggtgttgccagaatccattctgatattattaaggccgatttattcaaagatttctacgaattatcaccagaaaaattccaaaacaaaacaaacggcatcaccccaaggagatggttgcttctgtgcaacccaggactgagcgacttgatttcagacaaaattggggaagactggactgtacatctcgaccagctacaaaaactcaagaaatgggccaaagaccccaacttccagagagcagtgatgaaagtcaaacaagaaaacaagctgagactcgcacaacttttggaaaaagattacggtgttaaaattaacccatcatcaatgtttgacatccaagtcaagagaatccacgaatataagagacagcttctcaactgtctccatataataactctatacaatagaataaagaagaatccttcagccaagttcaccccaagaactatcatgatcggaggaaaggcagcccctggttactatactgctaagaagataatcaaacttatcaatatggtcggaaatgtcgtcaataacgatccaattgttggtgataaacttaaagttatctacttagagaattacagagtcacgttggccgagaaaatcatgccagctgccgatttaagtgaacaaatttccactgccggtactgaagcttctggaacaggtaacatgaaattccaattgaacggtgctctcactatcggcactctagatggagctaacgttgaaatggcagaagaaatgggaaatgaaaacattttcatcttcggtatgacagtagacgaagtggaagcacttcacaagaaaggctacaacgcaatggactactacaacgccattcctgagcttaagcaagtcgtcgatcaaatccaaaacggcttcttcagtcccggtaaccccgatgagttcaaagacattgcagatatattacttaaatatgataggttcttgttacttgccgattacgaggcttacattaagaaacaggacgaagttagtgctgtatatcaaaatcaagctaaatggttggaaatggccatcaacaacatcgctagctccggaaagttctcgagcgatcgcacaatcatcgaatacggtaaagacatctggggagtaacacccaactacgagaaactgcctgacccctccgttcctagggaattagctttaaaagataattaaatttgatttttttattgttgtactcatgcaacttttgtaaagttgtacgcttagtatgaatattagggagaaagtattctttaaaacgtgtatttagaaacaaaagtttatttgggtgttcgtttttgtttttatcttaaaaaagagactactagcattgactgtagttttagatacaattacagtattatgaataaacttatttcaaaaccatacaaatttaaaatgagaggttttcctttatattgtcacatttgttatttcagaaagcgagaaaatcaaggaataaaattggacgatgaagtggagataaactacatattatgtttttatattttaataataaaacagatctgcaggatatattgtaatgcaaatattctagctcaagaatctctaattactgtacttcctaatttttttgagagtgactgtatcaaaaaatttaaaactgtggtcttgttcttcttattccaccgtattagacgtagaatagtatcgtaacagtatttttgacattttacaatatatgttgaataatatcttctaaaaagtttctgtcttagcacgaaatgagcacacaaatactctacgcaatttataggatagattgtaaaatctatagatatttgcgaaacattatttgaggaatactttggataattgcagaaatgaaacccaaatagacattttttttatatttcagatttctgaaattctatttactaaattaagagtgccattttatcgtatattttaagcaatatagtcaagtgatatttcagaatgttaaatgtttaaaagagtacaaaattatcatcacaaagattaataatttttttgagaaaaagaaacagatgtttataaagtttatttgttgtaaaactatggtagagaaatattttttatattatttactgaaattatgtatacaactggcatgtcctacattgtttttcttgttatacagtaataaatatatgtatcatatt

SEQ ID NO: 6376 - DNA, 3619 bp, Diabrotica virgifera
tgggattcggcagaaaaccggaaaaaaggtgaagcgttgtaaaccgctttaattatcgatttttattgtgtattaaacttttcggtagacaccatggagcccatatgtgcagttcctgataatgttctttcattgcttaagtgctcattatgtgagagctatttgtctgtcctgccaataacattaatttccgaagatggaagtcaatacaaatgtggacgttgtagtactgtcaaaaccattattaacactagagcccttatttatgaacatctcgctaaacttatgaccttttcgtgtaactacagcggatgtggaaagaaggttccctttactgatgttaaggatcatgaaaaagtttgtgaccaaaaaactgtagtttgtccaaaagacaagtgtaacgaagttgttaaggtatctaaatttggagctcattttaaagaaaagcatgctgacgctcaccatgtcaattcctttttgattaagaacatctacatcaattctaatatagatgtattggaaaaaaatggaaagacatatttagctatcttcgattttgatgaggttaattttggattgagtgtttgcgctcttgatcctgcagaaaatatccagtatgaagtaaaactcagaaatgagaagagcaactataccatcaatatagctagccaaaatgttatcacttttaatgaacgtgaacactgtattaaatgtgtaggtggcacatgcaaggctaaatctcacatgtatcgagaaaatcgcagagatattttaaagcggatgactactcggataaaccgagactgcatcaagagaatgattggaactggaaacttgtcctataccatcaacgtttatgaggaaggtgagaaacccaaggatgactcgaagattgaggttaaggatgccataatcagaaaagccaagaaaatctttttgcaattgctggaatgtccgtgttgcaaggagtacatgtctccacctatctatcagtgtttggcagggcacacagtctgcaatgtgtgtaaaccaacctacgagaaatgcccatcttgtgaagagctcatccagaaaacccgtaacttcaccctggaggaattgtcaaagaaagtggagctgccggctgatgataagaaagtcaaatctgacacgagcttaaagagagctgccgaagaaaacggcaatgccgaaaatcaagcaaaagttgcaaagaattaattttcaattgacctccaataggccaaggtgaaatttttttttaattatttagtgttatggctggaataaatgtttttgtattatatgactacaagaaatgtgtacaacatttggcagatcgttttaacgaagttaattaaagaattcatttttggtacaattaaattaaagaattcgttttgatgcacacgattttggggctaagtttgtccattgaaagatttgcatattaagcatgtattaatgttaaacaagagattcggtgttaaaattgatattttttaccaagctgtattttggtattatttttgcaaccagggtgtgtttactgcaagctgaacacagaataatcagtgattgtatgtcagttttgagtacatgttcaatttgcgtgtatttaatttctatcaaaaactagactataagctacatcccaaaaaaaattttttttacgttttttcaatatttgtatgacgtgaacaaaagtttaaatgttaatgtgaatttgtatctgacagagtacgaatcagttatatgtataaatgttatgtggtgttcatgactatttggtagtattcaaaattttaataattttatttttgtctggactgtaaacttatagaaccaatacagttgaacccgcttattagaataccggttatagaaatattccggcttaagcaatagaaatttgaggtcccaaaacagttttactagccactaatgatcggttattagaaaataccggttataggaatactttcgcttggcatgaaggctattccaataagcgggttcgattgtatcactaggaagcacccgtaaagtgcctgtgaatgacatctcaaaaacatctgcagaaagtattggaaatgtttttatagatagcggtacatactactaatttcagtgtgtgaatcaaatggtatgtcatggtggcgtaggaaccatttgacaccgtgacaatattgttaaattgacaaatggatgaaaacgaaatttttaacgcttgttgtaatgcttttcatctacttttctgctttctgtccgtcaaggtgcaattttcgtaatcaaaatatctacctacctagtagtgatagagagtgacaaaagtcatcaaatgagatgatgtataattatataaagcatacatagtttttgtgtaatatttcatctagtgtgcgctgcagttcttgaacaaatagccgacaaattattttcaaaaccttaactttaaaatcatcatctcatgtaatttgttggggtgccctatcctttctagacgttggcagtcatcagcgcaatacagactttgttccactgaaataattcagctggttttgtttcaaactaccttcgcaagtttggattcttcttccgggacctctcttgtcgtcagtccttcattggataacctataatatcgtgtaatttagaatatcaaaaaaatattgatgttagtcgaaagtttgtctgaatttttcataattaccattttcgatagtgacagatgaaaacttgaatgtatcatttgtaaaagcaatgatgctatgtcctatgtctagataattcttcactgtgatggtaaccgcagtagacacttacatcataagacagtcgtcttggtacgctccttgaataaggctatttatcgcttctcatttgtttcgggcacttgtcatgggtcatatagtattatatgacatatgccaagtgcctgaaacaaattagaagcgataaatagctctatcgctacatacaaggacatttaataaaataaccagtttgctaagaaaccctaacttaattgacatatttatcagctcaggcaaataaaagatattaggtatagtcggttctctaaactcatacacagctggctagtgattttagtaagtaattttgccaattttgcaaaattgacaaaaaaaaataattaataaatagttggtaattttgccaatgttggcaaaattggcaaaaaacaaacaaattaccaactaaaatcattagcccgttgtgtctgagtttagcgaactgactatatatgggtagtaccaagggatcttaaacttgtaacagagattattatcataacgcctgtttaactacaaactttctagctcaataaaaaattatttttgtgattattatagaattcaaaataaaagaaactatgattggaaataacagttgataagattagaaatttttttaaataaaaacacagccattttcatttgttttgagtcattgtgtgtccccatattttttactcaaaaaaaattatgtataccaaatgtttgctaaaaaagagctcaaccgacatgattgattgtacagttgaaaagttttgtgtgcacatacccaatttgtattttttgatcaagagttttcttag

SEQ ID NO: 6377 - DNA, 3606 bp, Diabrotica virgifera
  SmartBlast Evalue=1E-148; Info=Probable RNA-directed DNA polymerase from transposon BS n=1 Tax=Drosophila melanogaster RepID=RTBS_DROME
ataatgtaatctttcattctgcgtttggatttttcaaaaatatttattagttttctcgggattcgaaggatatgaatacatttaaaacacagagaacattttgacaggcgacattttgcgcctatgctcttaagctattttctgcatcctgttctattttaattgaatgcctctatcattcctcttcatttcatttctcgtcatcatcacctggcgcttatgtcaacaggtctcagcaaacgttagtatttgcacacttattaatcattgctcctcgagtattcacatctctttgacgtaatccctttttgacatctatagtttcattaattcgttttgtgcagattttacttcatactttttgattcacatatttttgttcaccctattttaatttatttgggatacgtagctaaggatgaactccagcaaatctggatttctttatatagtgaggagcaaaattatggaataaattcattttcgagataaatcccgaaataggtctatttttattttaatatgtttaattatgatttgttggcatacatatcatactagtgacgtcatccatctgggcgtgatgaagtaattgataattttttacatgagaataggggctgcgttgtggctcatttgaaaggctgttcaatgttctattcagtgatataaacattaatatcaatatttatacagggtggcaagaaaaataattttttgattaaattggcgcaaaaataagaatgtatataatttatttaactgaaatatattttactgctgtcagaaaataaaaggtgcttgttttagaagtaaacaccgatttttgcttaaattaaataatgtgaaacagcctcccacatgcctcttgacagttagaagctttagtttaagcgaaaagcaatgtttattttgaaaataaacatttttttctattttctgacagccgtaaaacgtattttaagttaaataaataacaatttataaattcttctttttgcgtcaattaatttaattaaaaaattatttgtttagccaccctgtttaaatttatgttaatatttggattactgaatagagaattgaacagcctttctaatgagctgccacacgacacatattcccattttcgaaaaatcatcgattacatcatcacttgtgccttatatccgaaacacattttactagagaatcatatatcagattccgtggctacaaaatataccaaacaatacacccagataatgtagcaaaagggggtagtgcggttattataaaagaaaccattagacattatcaagacactggataccaaacagcagagattcaagccacagctgtcaacgtaaccataagagattataacgttatcatagtagcgttgtactgtcctcctcgacatgcattaaaagaagaaaattataccaacttcttgatgaattacggtaaaaggttcattataggaggcgattttaatgcaaaacatgtccattggggttccagattaaccacaaataaaggtaaagagctactcaaagcaaccaaacacttaaagtgtgatgttctgagcacaggcaccccaacctattggccaaaggacccaaacaagatacctgatttaatagattttttatcataaaaggccttgcgtctaattttgtacacgtggaagaagcattggacatggattcggatcattctccaattcctcttactctcagtgacactctcatacagaaagaaaatccaccacgattaacaaataagtgtacagactggactagtttccaattacaattagaaaggataactgatctctctggctcattaaaaaccccctaggaattagatgaagctgtagaaaaaattacgaataagatccagcaagcagcttgggataattcaccaactattatccaaagaactaaaggcaacaattatcctaaaggaataagggatatgatagccgaaaagagaaaactacgacgaaactggcacatgactagaaatcctgcagataaaactgttttaaacaatgcgacacaaaaattaaagcgagaaatcgaacgcatacaacaagagtccataggggagtacctcagtgaactaagcgctgataaaacgacagactactctctgtggaaagcagctaaacggtttaaaagaccaattatacaaaatcctcctattaggaatagcaatggtacctgggctcgtagcaatgaacaaaaagctacaatatttgcagatcatttagaaaatacattcaaaccacatgatggagaagatcttgaagaaccaattgaactaaatgatgaaaacataaaaatcaaccctgttactcctaatgaattagagacagaaataaagcacaatttgaatccgaaaaaagcgcctggctttgatcttattactggtgagattttaaagcagctgccgaagaaaaccattataaaactaacccaccttttcaacgcttcatatagacttaaatatgtttcgaagttgtggaaagtggcagaggtgataatgataactaaacctggaaaacaacctcaccaagtaacgtcgtacagaccaatatcactcatcccggtgatagcaaaactctatggaaaaatgctcctaaaaaggctaaagccaataattgaagagagacagctaatcccatcctaccaatttggttttagagagagccattctactattgagcaagtgcataggatcactgacatcatagaaatggcactggaagaaaagaaagtttgcaccactgtcttcttggatgtggcccaagcattcgacaaggtgtggcacaaaggattaatacataaactgcgctatcacctaccagaacagttcgcccaactcttagaatcatacatatcagacagatgcttcagagtaaagcaggaggaagcatactctgatttgagacagattagagctggtgttccacaaggaagtgtccttggaccagttctgtacattttatacaccagagatatccctcaactacgtcaagatactattgctacatttgcagatgacacagcaattatctcagttggaaataatcatgaagaagcggtacataacttacagaactccataaatcagatatataaatggactaaagcatggagaatcaagttgaatgaaaccaaatccatacatattgattctaccaataaaaggaggcaatacataccaatcagaataaatgatatccagattccatatgagaatactgcaaaatacctgggtatcactcttgatgcaagacttaggtggaaagcacatattaaaaagaaaagacaagagcttggaatcagatataaaaaaatgtattggctgcttggacgtcactccaaattatcaatccataataagttgctactctacaatcaaatcctcaagcctgtctggagctatggcatacaactatgggggtgtgccagcgaaagtaatatacaaataattcaacgcttccaaaacaaggtactaaggaacatggtagatgccccctggtatattagaaacagtatcatccacaatgatctggggatcgacaccgttagacagactatatctagatttgcccgg

SEQ ID NO: 6378 - DNA, 3573 bp, Diabrotica virgifera
  SmartBlast Evalue=1E-176; Info=Sterol regulatory element- binding protein 1 n=1 Tax=Culex quinquefasciatus RepID=B0XGW8_ CULQU
tgatttttcaatgaaggaggatttttctaaatcaaaaataaataattttgcgaaaaatgaacgaagatattacaaattttgcgtcgcatggcgacttcggtcaaatacctgacctgtcaggaatagacgacatactggatcattgcgaaaatgaacttttaaaaagtgaactatttgatgacgatgcctttatgacattagatgaccatgaccctatggatttgatgaatttcaatgatttagaacagagttcattaataaaaaattcacctacattctcttctaattatagtaacagttctttatttgattcgtcacagtcaccgttgtcccaatcctacccttctccactactagacaatagttctctaaatacccctatcagccctaagtatagtccagttcagccacaacccattgttcagaatgtacagattaaaaatgtgtcagttcccgtacagaatttacaaaactctgtcattatttcatcagccaatttgcaacaaactactcaaccggttgtatacacaacaaatattccagttcagaatcagcatataattttacagcaagataatagtaaagggcatggtgggagacagaaagggcagagaggggtattggtgcagaatattcaacagattccagtagatcaaatgcagccagtagttttgcaagcaaaaatattgaaaactgattctcaggtcatcactcctacagttatgtacacaacagcagtctcaaatacaacttcccaacctcttcaaaccctattaagtaccaatagaattttaactacaggaattcccttggtattagatggtgaaagtaaggttgctataaatcgtgtccaacctatcaaagaacccaaagttaaagaagtaaaaagaagtgctcacaatgctattgaaagaaaatacaggacaagtattaatgacaaaatcgttgagttgaaaaatattgttgtcggggaagatgctaagctcaacaaatctgctattcttcgccgaaccatagactacatccgatttcttcaaaactccaacagtcgcctcaaacaggaaaatatggctctaaaaatggccgccagtcaaaacacactcaaagatcttttgactactggcgacaaataccgcccggaagatacacctcctcgttcggatcattcgttatcacccgaacattctcttccttcaagtcccgaatattgtgctacgattaaggacgaaagtgaagatgaggctataggaacagtgcgccaaggaatgctggatagttccaggttaacgctgtgcatggttatgatggttatgttggtttttaatcctttcagagtagctttggataaatatgcgaatgtggaagacagcagaggattcgaaagaagaggaatattatggtcagaaccggcttcggtatcattttcaccatctacactaattctatggatggtaaattttgtcatcttaggcttttgtttaataaaaatgtttgtttacggcgatccaatgatcccttcgaagtcaaaagaatctcaaattttttggagacacagaagacaggcgaatgtatttctaaaaaagggtgaaaaattggaagcgaaacaagaacttttacgttgtttacaaacatatggtatatcattaccttccagtaagtttgatttatctctctgtttctgctggcaagtgtttagacaattattgcatcggttgtggattggaaggtggttatccaaacatacgggcggatttttcgttgatgcaatgacaagatacgaagcacaatcatcttgcaaggaattagctttggtattcaacgatttacacaaaatacaactagttggaggacaggaagaaggaaatcatttaattggtataataacgtgtttaaatgctttaaatctcgccgaagctgccaaagatagaattaaaccaaccgatttggttgacatttatgttggagtggcccttagaattaaagctagtttgcccaacttcgtccattatatacaaaggtattacttaggattggcacgactatcgtcagtgaattcggttgatgcaatacccaaaagattacaatggttaatgactccctacggttacaaatttttcgtatcacacaactttaatagcgaccttggtaaaactagaaatttacaatttagttgtattggaaccagcatagatccacttgctgttcaaatgaaaatatacagggaacatcttttagagaaggctttgcaaattttgttaacacctggacaaaaaaatgacacacaagataaaaaggcagatattaatgatgctttaatatatctcgaacttctaaaagataacgttgctgttgacgctcgtactgtatttggagcctcctcagaacaatgtcatcaagataaggtagctcaatggtggatgacgattctatctatcgcctgttattggattttaggcgatcaagaagcggaaatactttacaagaaaattgagatggtaccggaacccttagtatcactcagtgatccactaccaaaagcaatcgtggcagccttcatagccagaagagattatttaactcagaattcaagtataagccctaagaagattttattacaatgcgactacgccagccatcttttgacggatagtttgactttcactgtttgtaagaaaagggaccaaacagttatgctggctcatttactggtctgcgattggcttttggaaaccagaacttcactttgggaagattgtgtagataatggtttgaaaaatccagtttccagttgtgtcctatcatcatttcaagtagacctggcttctttgaggtctcttgcagaacatatacccagtgccttatcgagagtcttcctttatgaagctacagccagattgatggcaggtgctgctccaggaagaactcagcaacttttagatagaagtctaagacaaagacatgctaaatcttcgattatctgtggcaaaggtgataaaaaccaacatgagttaggcggtcagcgacagcacgccacagcgctttacatggcatgcaaacacctaccagggccccttctgtcgtctccgggagagagagcaggaatgttagttgaggcagccaaaactttagaaaaaataggggataagaaaagactgcaagattgttacgaactaatgaaaacccttggaaccagcgctgtgaataattaaggctcctatagacttactagtctgctaaaagtatcgagagcaacagtataactatagtttttatgatatatttttctagaaaaaaaaacgttggatgagtgtccctcgtgaacgttgttcatcttgggcatgttcctcgctcgtttttgagtagttttctggaatagtaaatggaagtaagctgtttagttatcttataataatttatttgtaatttattagagatatgatatttattagatgataaattttcctaacttaaggtaaatcattaatgtattaaagtagaaatatttttttagttttagctttacaaaaatatgggtgtaaatattataagtatgttttttaatacacttagttt

SEQ ID NO: 6379 - DNA, 3553 bp, Diabrotica virgifera
  SmartBlast Evalue=0; Info=Peroxidasin n=1 Tax=Tribolium castaneum RepID=D6WFS4_TRICA
caaatctcagttggcggctcccatacgtatcagcttacttaatatattacaagcacaagccttccagtgtagaaagtaagagtggacagtgtcatgtgttaagttgttttgggctgctttcggtacttgtacttaatcaaaatgcggtggaattacggacttgtagtactactggccgtggtttttctaggagaagctacgcaatgcccttctaagtgtcaatgttacaagaaatcagtaaaatgtattaagcaagagttgaccaatgtgccaaacacttctgcacaaaccacatttctggacgtccggtttaacaaaatagcagagatcccttcacaaacgttcagcgaaaacaacaaattggttactttacttcttaattcaaatcggcttacatcactgcaagaaggcgttttcgatggacttgacaatttacaacatctgtatctttactataataagattagatttatccatccgaacgccttccaaggactcacaaaattggaaagattgtatttgcaccataatcaactagaggagatatatcccggaacttttcaaatcttccttcacttaaaagattaaacctctaccacaaccgtttgaagcatctcccagaagaaggtttccaacatttaccaagtctggaaagacttcgtttggatcataatgccttggtttgcaattgcgatatgttatggttgtcgcacatgtttgcttctaattccgtggaaggttcggcacattgcaaatatcccatagaaatgcaaggaatgcctttaaaggaagcagacgcggaacaccgacactgtgagtctggtttgataaaggaaggaccacgagatatcaaaatatcctggggccaaaatgccgtcttcacctgtaaagtctacgatccatcagtatcaatcttttggatgagagacgaacaggaattgcctccggatcaccaaaaatatattatcatggataacggaacacttcttatccaaaacgccaatgaaaacgacgatggatactatgagtgcattgcgaaaacccccgaaaaggaagaaacatctgccccagctaagatggtggtagaaaaaccagaagaactgcacgaaaagtattttggatctcccagatttacacaatcaccagcaaacacttacgcttccaccggagaccccgaaatcatattgaggtgcaatgctgaaggaaatcccagtcctgtcataaagtgggctaaaaatggcgtcaggataccaccatctaacaagcatatctacctgcaagatggttcgttagtggtaaaagatatcgaagcaacagatcatggtagttaccaatgtgaagcgatcaataataagggtagagtcaaagctgaagccaacattatcattagagctccgccagtgttcagcatacaacctgaaaacataaacacccaagttggaaacaacatcaagctggaatgcgtcgcttcaggtactcccatcccggaaataacttggttcaaaaacgacgaagaagttcttcccaatgatgctggtggtagaattaagctcagcgaagacagaactctactagaaattggcaatgttcaagaatctgacacggctacatacgtttgcgaagcttggaatgaagttgggatgcgtgaagtcagcgcttatgttcgagtggaaaacacttcgtacaaaccggcgaagttggtgtataaaccgattaatattgaagtatttgttggtagtaccatcgaattgccctgcaaagcaacaggcgatcccaaacctggaattacctggcaaaaagacggatcatctatgcaaagaaccggtcgatttaaggttgctttgagcggtaatttgtatatctacaaagtgggtccagaagaccaaggaagatatgaatgcacagctcttaatgattatggtagagactccgcttctggttatgtcaccgttaagaaattaaaggatcctactggtgttggtatcggtgatcaatacgtcaaactagcatttgccgaagctactgaagaggtagaccgtgctatcaatcgaactttggacaaccttgtcaaaaataaggacacccgcaaccctggagaccttttcaggcttatcagatacccagatgcaccagccagagaactggctagagcttctgaaatatacgaaaggacattaactaacatcagaaagtacgtgcaagctggcaatttgaccttgaattccacagccgactttgattataaagaacttctgtcgtcagagcatttggacatgattgctagattgtcaggttgtacttcccacaggcttttcagaaactgttccaatatgtgcttccattccaaataccgttctgtggacggaacgtgcaacaatttgcagcatccaacttggggagcatctctaactgaattcaggcgtgttttaagaccaatttacgaagacggtcttcaaaaaccagttggttggattaaggataagaaatatcatggatatacgaagccaagttctagattagtttccacaactttgattactaccaccaagattactcctgatcctgaaataactcatatggttatgcaatggggtcaattcctggatcacgatttggaccatgctttaccgtctgtaacgtctgaaagttgggatggaatcgattgtaagaaatcgtgtgattatagggcgccctgttatcccatggacgtaccacaaaacgacccgagagtgacaaaccgacgatgcatagattttatccgaacctcatccatatgcggatctggaatgacttccgctttttcgattccatacaacctagagaacagatcaaccagttaacctcttacattgacgcttcacaagtatacggattttcagaagagttggctagtaatttaagagaccacaacactaactggggacgattgagggaaggacccatctttccaggcaaaaaggcgttgttaccatacgccgaaaatcaaggaattgattgcagacgcaatctcacagaaagcactttaaactgcttcgtagctggagatataagagccaacgagcaagtagggcttctagcaatgcacaccatctggctgcgagagcataacaggatagccaaagaacttaaaattatgaacccccactgggatacagatcagctctaccacgaggctcgtaagatagtaggagcttccatgcaacacgttacttacaaacagtggttgcctattatcataggaaaaaagggatggagaagctgggcgagtaccaaggttacaatcccaatattaacccttctatttctaatgtgttcgctaccgccgctttacgttttggccacactctgataaatccggttttgcacagattgaacagcgattttaaaccgatcagggaaggaaatttgccgctttccaaggcgtttttctcgccttggaggctcgttgaagagggaggaatcgatcctttacttcgaggtttcttcactgtcgccgcgaaaataaaaaatcagacgaaaatctaaactcagaactgacggagacactcttcca

SEQ ID NO: 6380 - DNA, 3549 bp, Diabrotica virgifera
  SmartBlast Evalue=1E-158; Info="Serine/threonine-protein kinase PINK1, mitochondrial n=1 Tax=Camponotus floridanus RepID=E1ZWG4_ 9HYME"
agtctttataagcattgaccatttgatattttattttcaatagtaatatattgtattttcgttaacctaaaaccgtgtagtatgatgttagtattataatatataataatgttccattaagatattgtaataatgtaccttctttggttaagaatagataaaaaataattattgtattgttttcatgaaattaaagagttatttaacgcaatgaatgcagtgaattaattattaaaggcaattacagcacgcttcaaccaataagaaccagcgcaaattatcattttcgtactgactgaagggtgttgacaccgatcacgacacaccaatttcttcattatatcacccatcaaaattttcagcaacattaacagtccgaaatactagagatgctcggttcttcctagcttataacgtttaaaaaaaaattaattccatttgattcagaacgcaacttctatgcgaccctgtatatcataaggatttttatagttatttattataagccatacacgttttgcgttttagatttttcaacgaaaatccattgtttgtttattcagtcttaattgcatcgaataacgcatcctcttagaatgtcatacgtggctgtgagcaatttgtttctgcattacgtctaacttttttttttggcttaattaaatagttcgataagtaaagctctctaggcatgggaacgctgagaaatattagtcattaccgtttgggtttctgaagaggacggtggtcgggcaaattttcgcaaggtactggggtttgtccttcaagtatcatcaatttccagtttattccattagaacaagtaaaaattcctgtcttcgaataaaggtatacgttttttgtgttcttttacaaacatgaatagatgttagagaagagattatcaaagaagttaagaggaaacacgatcgctcagaaatcagctcttctagttaaaaaaagaaaacacaaaattacgccttgttcgagcattaaaatttcctatgccatctaggcttcagaaacatgaatcatgaaaaaagccgattagaaacgtataaagccgtttgaaatgtgggcctgaaataaaccgtgggcgtttgaaataaaatgtttcgcataccatggaccgctcatcgcactaataattcaataggagaaaaacaacatcaaaactagactgaccaaaaccacagatactgtcaaccaacagatactgagatattttggacatataactagacgaagagaaagcttgggacgaatgaaagttgaaagctacatagatccagaggaagatctccagcatgatggtcggaccaaataaaggacatgactgattactcattcctgcacaggaagagataattggaccgaaatagtcaatcaaattacataacgccacttcatccttacggatgagaaaagatacaggaagacttaaaagagtatccattgcagcattaaataagggatttaacatttcttattgcaagctttaaagtaagttgctctacttcatagttttatttccatcttattaaccaaagaaggtgcaactaaattatacactggaaggataaaatatcacttatacattgtattactagaactaactcaaaaatcaacgcagtttacctcctggatccaagccagagcggattttatgttcgataacttagcccttactaagaaactggatatcagaagatattcagggtaagttcgcctgccacctttttccatgttagcttgctccgagtctggctgggcagattgggaaaagcgtctattagcaatcctgccttcgcagagtattttggtcgtgaggcttaagagccactgcaaaatctcggcactagaaggcaactttctggcttctgcctttagccatgaacttggcgcccataagtacaactggcaaacattcgcagccacctctggattaagacgcttattaggttttcgttgtagtagatttttgattaacatctttataatatatggcgcttcagttggcagagcgggcagatcttcttctttgtaaccagaactttttaagtaaatttgatcgttgcttttataaaatggattcctagctccaaatatttcgtatgctattgttgcagcagcccacagatccgatttggtgtaatttaagacactaaaagtaccaggcacctgacacaatatctctggtgccatcaaggccgtattgccacctttatcaacgtcgtagcttgtataaggtagcattaaaccattagctttatcagcaagacaacagccgaaatcgcttatcaccaacatcggagcttctggttcagaagtatccagcaacaaattgtcgctcttcaagtcgcgatgtgctattccgtgcgcatttatatgagctataccttcaaggagttgagtaaagataagtacagatgatctcacggacggtggagatgttcgtaggaagttttctagattggtgctgtatcttttcatcagcagaaacagtgacatatttcttccttctccatctggatgaatccgtcttggaagtgccgcagggtacagaccacggcagtcttgcaattcaggtacatagtcggtgaataccgaaaaaatggcgactacgtttgggtggggtggtaaatgtctattcctttttgataaatcaatttcccaatctgatataccaatgttactgtaatacagtctagctggtacagtttctcggtacatagcatttaatatggccatcgcattagattgaatgtcatagttaaacatcatcttcagagcgagtggaaatttattagtatcatcgctttctgtgtctttaatatcaattacagcagtactctgttcagaaacgttcgaatcgcagctttttagatttgcagcatacacaacagcatttgcccccttggccaagggtttgccgaaagaaagatcgtctaggttaacgggagaagtttcgaatcgggtttcatcgaggtcgatatcttgatggtgccattttaattttgaaacagcttctcttatttcccagcataccccttccagttcttcctctttggtaagaatgcctgttccagaagctaagctaactccaactaaagcaaaaaatggtccagaatctccaaacaggatccttctagctgcccgttttctaagatccgcagctaagctattagttactcgatttagaacattgtcaattaatattcttcgagcttgaagaccaatttgcacgccgacatttcgtaaagcgaagcttcgaggtactacctgactgctggtgaagttactgggaggagtatgtgaagcagcagcattaattttgtcggcaatagttttggtgttgaattctcttttgtttcgtgtgttacgaataagtacactaccatgtttaaataaacgactacctaaggctcttaacgacattttgcactatcaatcaagttttacaccccgaagggcgatattctatttaaactgaataaattttcttgtgtaagtattacgtttttattattttatttttacctatgacac

SEQ ID NO: 6381 - DNA, 3544 bp, Diabrotica virgifera
  SmartBlast Evalue=0; Info=Probable phospholipid-transporting ATPase IIB n=2 Tax=Aculeata RepID=E2BT68_9HYME
taaatatgtaaatgtaaagttagattaggcgtaaaatagtgttgatagtggttaaactaaatcttaataaacagacattatttttaacaaatagtgatggataacatggaatctcagagtaatattctgaaaacatcaaaagaagatattccattgataagcagatcccgtgtagattccaattggggatgttggtgctcattctttgcaaaatgttgtgcaccgagggagttaagatctcgcactttattactgggaaaacctactcctggtcaatttcctgcaaatgcgatcaggaatcaaaaatacaatattataaccttcttaccccttgtcctttaccaacaattcaaattcttcttgaatctttattttttgataatggcaaccagtcaatttgtgcctgatattcgtataggatatttatatacatattggggaccattgtgttttgttcttttggttacaatctcaagagaagctattgacgatttaagaagacataaaagagatcaagaagtcaacaatcagaaatgtaagagattactaaatgatcccaataaaccatacgagacagttgcagcctataaactaaaagttggtgatcttatcattgtcgataaagatgaaagggttccagcagatctagtactacttcgaacttcagaaagtagcggtgaagtatttgtgagaacggatcaactggatggagaaacagattggaaattgagattggccgtaccagtcactcagaaattagcttcagatcgtcaattatttgaaattaatgcaagtatatatgccgaaaaaccacagagagatatacattcatttatcggaacattcagtaggcttgattctcttaatggcgatgaaagtttagatctaaacaacactctatggacaaactgtgttattgcttcaggacaagctacaggagttgtcatttatacaggacccgaaacaagatctgtaatgaacaattccgcgcccagatctaaagttgggctattggatatcgaagtcaataccattactaaactactattcgcagcagtgataggtcttgctttaattatgatggctttgaaaggatttagcggtccatggtacagatacatgttcagattcatattattgttttcatacatcattccaattagtttgcgagtgaatttggacatgggcaaatcgttttattcatgggcaataggaaaggatcctgctatgaaagggactgcagtacgttgcaccacaatcccagaagagttgggtagaatctcttaccttctttccgacaaaactggtactctaacacaaaattctatggttctaaaaaggctacacatgggaaccgtcagttttgcaactgacagcttcgacgaggtcggcacattattacgcagttcttataataacgaaaatgtaaaagtaaactctgacaaatttagacgaagtgaaaatacaagaatcaaagatgcagtacaggcgttggccttatgtcacaatgttactcctatgtatgaaaccaatgaaaagaaggatactgattctggatcttttacttctgaaactgaagcagatcaacatttacaaatgccagataaggatgtcacgtaccaagcttccagtccagacgaagtagctttggtccattggactcatcaagttggacttacattgagcaacagagatttgaactcgatgcaacttagaacccctaatggtagatttatgaactatgccattttacagatatttccttttaccagcgaaactaaaagaatgggaattattgttaagagcttgtatacgggagaaattattttctacctgaaaggtgccgatatggtcatgtccgcaatcgtccaatatacagattggctagacgaagaagttggaaatatggctagggatggtttgagaacattagttgttgctaagaaaaatcttacagaagagcaatatttggaatttgaggcccgttataatgctgccaagtgttcaacaactgacagagtggcccaagtggctcaagtggttgaatctttggagagagaaatggaactgttgtgcattactggcgtagaagacaaattacaggataatgtacgtgctactctggaattattgcgcaatgcaggtattaaaatatggatgcttactggtgacaaactagaaactgctacttgtatcgctaaaagttcaagtttggtgtctagaacgcaaggtttgcatattttgaaaaaggttgtgacaaggtctgatgcacatttagaactgaacgcctttaggaggaaacaggattgtgcattggttataagcggagaaagtttggaagtatgcctttcttactatcaaccggaattcatggaattagctacagcagcacctgcggttgtatgttgccgttgttcgccaacacaaaaagctcaagtggtccatctaatccaaaaacatacaggtaaacgtacagcagctgtaggcgatggtggaaacgatgtcagcatgattcaacaagccgatgccggtattggtattgaaggtagagaaggtaaacaggcgagtcttgcaggcgacttcagcatacctcagttctcacatctggcccgtctgttgttagtgcacggaagaaaatcttacaaaagatcagcttccttggctcagtttgtgatacatagaggattgataatttccacaatgcaagcagtattcagcagtgtattttacttgagctcagtggctttgtatcagggcttcctaatggttggatatgctacagtatataccatgttccctgtatttagtttagttctcgaccaagatgttagtcctgagatagctttgacttatccagaattatataaagatctagcgaaaggaagaagcttatcctataaaactttctttatgtgggttctcatcagtatttaccaaggtggtgtaataatgtatggtgctttactcttattcgaagacgaatttatacacattgtagccatcagttttacttcacttatattaaccgaattaattatggttgccttaaatattagaacatggcactatcttatggtattagcagaactcttctcattaggtctatatgcgctgtctctgatcatacttcacgattatttcgattctgaatttataaggacgacagatttcttctggaaagtagttctaataactctgatatcatgccttcccttatacatcctcaagttcttaaggaagaaattctcacctcccagttacagcaaattatcataaaacacttcaaaaaacgaatatgtgatatatagaagcactattactagttttccataataaatatgaaatgtgattagctttgtcgcaaagaagaaaaacaagaaaaatgtgataaagtcgtgacaaaacttgcacgtttaacagtaccccgatttcctgtatagattcaagatgtctcaaaacttgtaaggttggtgaaaagaagtcttctataataagggatgttttgaaacatgtgttatgtaactgattaataccgaatttccaa

SEQ ID NO: 6382 - DNA, 3529 bp, Diabrotica virgifera
  SmartBlast Evalue=1E-152; Info=Proliferation-associated protein 2G4 n=2 Tax=Formicidae RepID=E2B845_9HYME
acattattacagaataaaaaatcttatcaatgctaggagactgagtataaataacatccgataaattttactgccagattgttgaaattaaattagttacaaaattagtataaactaaatacgaaattttatttacagaaaccaaagactaatattaaattaatcaaaatgtagataattttaattgaaataaaaaagaagcggaagtaaatgttaaatggcttgtttacgaaaataaattctttgtttgacatttcgacctccaaatctaaagctattcagcgttaaataaggggaagaaaatttcaactaaagaatattttttatttccaacagaatattaaaaaatcatccaacattcaaatatatgttataatatattttatattcaaatataaaatatacttataaatatataatatattttacaaaataggatgagtatatatttttgcactttctacttaaaaatgattaaattgtatttttagattaaaacgtaaacaagttaaataatataacctaatcttaacatatcctaacttttatcaaacaaaaaattggaagttacggttcattacaacagataaacagcagtgtttctttgatgtattcagatgaagctaaaagaaaaagttctactgaattcattccatatttatgatgattcttcaagataattcattttacagattggtcaaacttcaagaatattatgtattaaaatcctggaaaaaatactatctttagtatggttctgcaactgtttcttgtggcatgtctaaatttctgaagtgaaaaacaaaacatcaatatttttagacaacaatgtaattcatcattacaatcaactgtggctaatcccatataaacaatatttaactgtccttggtaataaggagctatcttcttcaagtgccatctctgtgacagatcagcaatctggattttagagatagctgctctgaaacagtttatttgatatacagtaatccctcgttatccgcggactcatcaaccgcggttgcgatatctgttgaatctttaatgagaatcttttattatttttataatttgaacagtcgcgttaaattactcatgatacgccactggcgcttgttcttagtagtaatactacggcaatttgtttatagttcggaaggtttaaaatacccaaaagtgtagacgcgatctcagcgcctttatttttgttgatatgataatactatttcacagatacgcaatttcatcatatttctttctatgtatgtagtaatatacgtattcaaattgggattatatgtcatattcttctttgaatcatggatccctcgccaaccccggtttcaccaaccgcacctttctcttcagaacgtaacccctgtggttgaagagagattactgtacatccctaccatttaatcataaactacatcctcatcttcacattagtctcagtctcaacttcttttatttctattttgttggatactatatgaattatgaatatggcttaacacttttaagtccgccgacatggcttccgttttaagactgttatcaatgaggtgccattgacatggctaccatgtttacatttcaacaattttccaatcactgtataaaagtgccacatgagataagtatgtatattggccccgagctgaaagtgttaagggagcgttcaagtattatgtaacgcgatttttgaagatttttaacccccctacccccctccgtaacgcactcttatgggagtttaactattgcgtaacgcaatttttgaagatttttgaccccccccccccccaaccggcgttacgtaatacttgaacggtccctaagtacaactatgtgtatactttaacttgaacttgagctccctttcttcttgagacaatatcttattttgatcattatgatctataattcgcttgctgttccgatccttatgagtaacagtgctgtattgataataaaattttagctgacatcggttctccttaactgtataattgacaatcaaaataaccactactgtctatttggtatattgggataaaacatgatttaaagacagaaaacgagaaactttttgaattattttagtaggtgtaaaacgttacaaaactgcccgtggtttgttagtaaatagtaactgtacaaaaaggacacagtcctttgacaaataaggcatttggccagtgagatttagagtagatgacacctttggtttctgtgtaaccaaaccatttggtaatcgaaatgtgaaatgaaaaagcatttataaaaatctgaaattcatttatttttgtagtgatccttctaagcagctgcttcgacttccattggttgtggatccgaggaactttcagacttcttctttttctttttggcagctttagggttggcagaactgttgaggatcgatttaagttctgggtcgactattgaatgttctgatttgtacaattcagggtccaagggcagtcctgtgattttatggggcccgtttggcattaacagaactgtgaatttgaagtgtgccacaatttctcctggtttttcatataagacttggaaaggttctatcaacttattctttacacattcaacaactcccatttttgcttttgtctcatcttggaaattccttaaattgaaaggcatatttccatacttcgtcctcacttcagtatagaacattcttgatgctttgagtttcaattgatagatttcatctgttttcttatagacagaaactctagtgtcagcttcttttcctactccttcgcctgtactgattaaaacatccatagcatatacttcatgtttgtctaattcaaatttctcatgttcttttttctgtgcatcgttggggttttgaattatggtcttctcaccatcaattttaaattgtttcagttgatgactcaacataccttcgactggcttgcacttatatgattcagcaactttttgtacagcttcggtgatggcataggtttcatttccaggctttagaagcctaagagcagcttgtgaagcataatgtgctgcgaggatgacatctgcttttcttccagtgacctttttgttgttagatgaacctacaattattgtgtgagccactactgctatgaaaccatctatctgagctcccaaatcaacttttgccacatcttcttcctttagaactaaatcagattcgcttggaacaggagaaaagtgacatatacagttgtttacagatacacaagtgggaaaagcaatgcctttcttcaattccttttcttttttaaaaaccttattggtttcatcaagcagtagctggtctccgtattcacaaatttcccttatggatgcaccgggtatacatttgtctataacttgttttaaaactctgttaacaatttctcctgccattttatacttggtaaccaccaagtcttcggcaatcgttttttcgaccacatctttttcgtccgccataatttacctgtatacgactagtcagtggtgccatcac

SEQ ID NO: 6383 - DNA, 3523 bp, Diabrotica virgifera
  SmartBlast Evalue=1E-158; Info=Ero1-like protein n=1 Tax= Harpegnathos saltator RepID=E2BCF6_9HYME
acgtgtacattggcagtaggtcaatcaaattccgaaaatgaattaaaacacctcatatcttaacaagagctccgttaattcagttaaatttcttccgaaatgcttatccataatgtttacaaatagtgtaataaaattaatagtcgttgttttagtactaggacagtgtgtggcttactttaatgttgataaacaagaagaatgtttttgccaattatccggtaacattgatgaatgcacctgtaatattgatacagtggatcattttaataatatcaaagtgtaccccaggctgaagagtttgctactaaaagattattttaggttttataaggtaaatttaaaaaggccatgtccgttttggacagacgatagtaaatgcgctatgagagactgtcacgtgaagccttgtcctccagaggagattccagaaggactcaaaggaaattcgcaacagaaagtagtacctgtaggtccacatcctagtgataaatattccaagcagcaaaacgaaggctgtgcagcacatcacaatgaactagattacttaaataaaacaattccggaaaaacttcaaaaagacatgcaattgtgggaagcgtacgatgacgccctcgataatttttgtgatatagacaacaacgacgaaaatgccgaatatgtagatttgttacttaatcccgagagatatacaggatattccggtgaatcagcccataggatatggaagagtatatatttagaaaactgttttagaccaaaaaaatctttcagttttaatccatatatacaaagcaacaagctaaatgaactttgcctagaagaaagagtgttctacagatcaatatccggccttcatgccagtatcaatgtacacctgtgcgcgaattatcttctttctaaagacaacggctttggactgggcaaaccgggagcaaaatggggacccaatttggatgaatttcaaaagagattctctccggaaaatactaatggagaaggaccgaactggctaagaaatttgtattttatttatctggtagagttaagggctctggcaaaagcggcaccgtacttagaaaaagaagggtattatacaggtgatgagcaaaatgactgggatacacaaatggcgataaaagacctcctgaaagtaatcaagttgttcccggatcatttcgatgagactacgatgttcaggaacagtgaacaggcagaaaaactgaaacatgaattcaaacaacacttccgaaatattacgagaatcatggactgcgtcgggtgcgataagtgccgcttatggggcaaactgcaaacccagggtttaggtactgctttgaaaatactcttcagtgggcatttcgacaaggtagaaggcaagagaactttagactctcataataagaaagaattccagctacagagaaacgaaattgtatcactagtgaacgcgttcggcaggttatccaatagtttgtacagaatagacgattttaggcaaatgctcagcatgagataacatttgagcaaatcttggaagtttagtaaatgggttgaaatattatttgtcactaaaaggaggaacgttacattctgggatacagtattagaatcttcaaaagtgttgccaatatttttattaaattcaaatacaatatgaaaaatttgtctgcctagtaagagttgtacacatatttttttaaaacatattcaaaaattttatttaaaaaacaaaaatatatagtagtcaattcaagtagaataaaaagtctaattatactgcaagaaagaaaggtctaaagcacaaaatgtttggagtatgtagtaatggcaacagtttattaggtatttatatatttgtaaatatattatctccgaaacagcaacctagctcttttattaataacatgagcatattaataaaatataaattctattcacatgaatctgcttgtttgttccatatacatatatccgaaaaaagacgacaatgttcatatatttagaatttgatagctttttaaaaaattagaaatatcattttatttattgttctgaagctattttcttgtggcatcttatccaaatttactattttaattggaaataagccacaaatattagtttgacattaaatctatatagtttacaagatggcttttcgataaaatctaaagtcaatcttgcaaagactaaattattattgtgatacttatatttaaaaacatatttgttacatctacatatttggctttctatatctttccacaatttgcatattactagatgtagaggtcgcgtcatttgggaaggcactaatttgcatattattgcacttatatagaagttaaaatttgaagtttttcccaagccacatcttagaaataaataatttcaatactcaatagcaaaattcaatgtcagtaacgcatcaccaactttaaagatggttcttagaccatctttaccattcaccattcacaaatgacgggaactctatatgccaaaacaattccacgtatctgaaattataagccgcatttttaacagttaatggtcaatgtgcgaaacatagaaacaccatgttgagtccgtaaacttctgatgattgaccttgcgatttgtttatcgtcattattgcaatagccaaacgcacgggaacttgtagatgcttaaaatcaaatcctaagtcctttggaatcatcggaatacgcgggatcgagacttcctctcctttgtattttcctttgaatagtcttcggcttttttacagtcagtttcgttccattcgacagtcgaggttgattacccttatccgggaaacacattttacttacgtaaccgggcaactcgggtccgttgggaccaccactgttcttgaatatgtactattcatatttacccatatatttctaatattctttttttgattttttattcaagttaaatttaaattgtctagattaagtatgctactatagtatgtggtctacctcgagggtgcgatctacctgaaggatttgcaaaaaataatgaaatgcaagaaaacttttgtagaaaaaatatttattcacaagtaataaacatttggaaggttatgttttttcctgataaatagtatttctgaaagtttttgttgacttgattccacacatcgcgtattgctgctaatttgtcgttccttcttcgttcagacctctagtccttatcatcaaatcgaataaatcttagaaaattcttgaatcgttttaacatggtagttttaaatatagtaggtccataaaatttactccaaagtatatctacattatggatattggcactcaggtgccctgcagttagtagtagtccaataaaggcatatagctctgtagagtcgcaatatttccagttctctatccccaggactttttcggcttctttattttgtacacttctctatttcgttcacaattttttcgtccacaaacaaacaaaaggaattaaaaacaaaaggaatcaacaggatcatccacactttgac

SEQ ID NO: 6384 - DNA, 3528 bp, Diabrotica virgifera
  SmartBlast Evalue=0; Info=Pyrroline-5-carboxylate dehydrogenase n=2 Tax=Culicini RepID=B0WKF4_CULQU
gaattttggaggtcattctgtatttgttaaatgttagggattagtttctatttttatgtgttgaattggtgattttattaaaggaagtgttaaaaaagctcaagctataaacgatgttatctctatgtaaacagagcttgtcttcgagcttccaaagagtgggtgtacgatgtataggttcggtgctacctgatatgaaaatcaaagatttcgacgtcaagaacgaacctgtgctagagtacttgaaagggtccaaagaaaggtcagaattagagaaagcattaaaagaagcttcatcacagactgaggatgttcccattgtaatcggcgatgaagaaattagaaataacgatgttagatatcaggtaatgccacatgaccacaagaagaaattagccaaattttattacgctgataaaactcttgttcaaaaagctatagatgtagcatgtcaagcccagaaaaaatgggatgctgtacctatttcagaaaggataaagatttgggacaaagcagcaaacttgatggcaaatcaatacagagccaagttgaacgctgctactatgctaggacaagcaaaaactatgatacaggctgaaattgattcggctgcggaactaattgactttttcagactgaatgcctatttcttaaaagaagcaactaaatatcaacccatatcagaaaacccaagagttacaaagaattccatgaggtatcgcgggattgacggtttcatagcagcggtatcaccatttaattttacagctatcggaggaaatttggcatacactccagcccttatgggcaacgctgttttatggaaacccagtgacacagctttactctcgaattgggtaatctttaaaatctgccgagaagctggagtacctcctggcgtagtcaattttgtacctgcagatggaccagtatttggagatacgattaccgcatctccacatttggctggaattaatttcactggaagtgttccgacttttacaaggttatggaagcaagtaggagataatataaacatttacagaaatttcccacgattaattggggaatgcggtggcaaaaactatcacttcgttcatcccacggcagatgtacaaagtgttgtcaatggtactattcgtagtgctttcgaattctgcggacagaagtgcagcgcctgttcgagaatgtacgttccagaatcactttggcctaagattaaggaaggactgatcgaaaaaagaaatcaactaaaaattggcgatccaacggatcctgctagctttacctcagctgttatcgatgataaggctttcaacaggattaaaggttacatagaacatggtaagaagtcatctaatacagaaatcgttgctggaggtaaatgcgatgatagtgttggctattacattgagcccacgattatccagagcaaggatcctaaggacaaattgatggtagaagaaatctttgggcccgttctcactgtatatgtgtacaaagatgacaaagtgaaagacaccctcaacctaatagaatcatcaacatcctttgccctcacaggagctatttttgcccaagatgagaaattccttaagagtgctgtcgaagaactgaaaatgactgcaggaaacttttatgttaacgacaaatcgactggcagcgttgttggacaacaaccatttggaggtgctagattatcaggtacgaacgataaggctggtggtccacattacgtccttagatggggaaatccacaagctatcaaagaaacatttgttcctttaacagatatcgaatatccatatatgaaacagtagataaaactatctatataaatatatttttttaggtttcaaaaattagcatattgcttttaatgtgataaatataagagtcagatgtaatagttgttgttatatacaggatctttctggacttataagttgttacaaggcatttataggtatataatatgggggagacgattttttataaatattttttaatggtatacagaaatgccaagggattgggagaggataaattaacaacaggacaaaagcagctggaatgctatttcacaactaaccaaaagatttctttgttgtaaagaagttttttcaatagctgattcaagaataatttttgaagttcaagctatagaatgttctattttgttttcatattaattaatagtttgtacattgcgtcaaaaaacgtaatttgatctcatattagaagtagagatggcataaataaccgtgtgtactgaaaagaataataagtaaggaatcgtgaagacttttactgaattttaattttaacatcattcgtcaaaactcatttcatccaacagacatttaaacagagttgagaaaataattgataaatcttttttgcgataaagcaaaaattagcgagactatttcacctacccccaaaattcatcaccactgccattttcttttagtaacgtaagagagtgtcaaatggtttttctcaatggaatttataagtttgcaaatatcttgtatataactatttaacgtaggaaattttctaccacggatttagtcttagggtacgaacataccgaagatgcatggatgtgcgcggtgaaggtcgagatcgctacatcgatgtcaaaacaaaccttcgttttcttatcagatcgtacataccaagaatgtttcatccgtttaccctcgcgacctatcatcgcggtttacagcggtgtcaataccagaacaaaatagtttgttgtacatcgcgatagagctattgattgcctggtaaattacaacttaattggtagtttttaaaccacgtgacattcgccggagattagcataaatatgctgaaatttatccacacttattctcttaaaagcataaaatctgtctgagtggtgtttcttaagctctttgaataggtgatggcattcttccagatactgcctttttgatttaaaggatgagccgaaaactggcgatttgaagaattacaaatgatccaccacttttcacttcaagacatgtaattactgtcgtcaatactgttgctcatgtacataagtgtgaacagccgtagcgcagcggcatgatactggcctcagaagccagagcgcccgggttcgagccccggaacagacaatccatctttcatttctaaaaatgatacgaactgttcaccgtgcctcggagagtacatgttaagccgttggtccccctgggctagtacatcgacactgcccaggcaatcaagcgacgtcaagaacgtcgaggaaacgtcagtttttagttgaatatatatacgtgtttgaatattatgtcgtataaacgtcttttgtaggtgattttaaatacgtaacattattgacgttaaaatacgcctaaaaacacgttttcatttcagacagccttgtctgacagtttgacgtcacaaaattgggaggagcttaaagacttaatgcttatgacttcaaacaatttccattaagaagtgtttcatttattgtttaggtg

SEQ ID NO: 6385 - DNA, 3528 bp, Diabrotica virgifera
  SmartBlast Evalue=1E-149; Info="DNA double-strand break repair Rad50 ATPase, putative n=1 Tax=Pediculus humanus corporis RepID= E0VJ11_PEDHC"
caatcatcttccttataaacaggactgattacgctatctgaattttgttgggattacacaattttgaaaatccccattttttgtcttggtttacaaacggtccattgtggactatatgaaccagcatattaggcacgtatcgcagatgaggcactagctttggtgttattagaaaatactgtgacgaagaattgttacaggtggtatccacgaccaattcgaagattcttctctcgttgcttgcgtccataccttgattgatctcatcaacacatctaaagggcacaggcgtgagttcttgtaacgacaacataaacgcagcagtagccacagccctttctcccccactctgtatgttggaattcagctcctgcaaaggttctccattgcgatatgtcaccttgatactaatgccatactgcgcatagtcttgatcgtcgttatcaccagtatagacagaaatttccccggcacaacccatacgttgaaaggccgaggcaaacttcaaattaatatcactcagaagttgtttcaaaggtacaagccactcctgttcgcatctctccattctcgtcgtcatcttatttaaatcagtattgctcctttcgatttctttctgtaagttatctatttccttaagtctattctcgtattcttccatttcgccgtcgtctgcgacgtttaagcaagctatccggttatgaaactggtcacgctgaacgttcagtccttctatatctgccgctaacgcttcgtattcctctcgaaattcatcgaacccatcgtcacctggagtaaaacctttagagagcgatttggctttcgacaacaaagctttggcctcttccataaattcgctatatcgttcttttattctcttcaacgtatcttctgcttcttggcattggcgcctcttttcgctgacatcattttctaaaaacttgattgctttactaacctcttctactttcctaatattcagcatactcctcttctccaactcaaccatttcaccaacacttttctgtattaagctgtggatgtttggtatgctttttaaaaactgttcccctttcttcttgtacccgttacgaatctcgtcaggactcttcttcaactgttccatctctaccaacttcttctgcaaagtgttcactctagccgcaatggtttcagcgtgctgtttgtgttggtgaagctcctttaactttgctcgtttttcaaccatttggtcgttcaggactgacagtttcttattgacgccttcggtttgagcgtcgtacgtcgaaacttttctttttgcttcttctatttcgcctcgtatctgattcattttaacaacgtctaatgttaacgacaagctaccgtcagacctcactgctacttgtcgaatgctcttctgtcccgaatacttcgatatgcttacactatatctgtattcctcgctaaaaaacgatctaatttctttagggactttctcgtagacattgtctgtagttttatctcctaatggaatgttatgcaaacggtaggttttgcacagatagttcataatcggttccggagcggtaaacaggttactcatgtacgtatagaaaccgtactgccttaaatgctcgatgggcatagaaggttgaaattgagaagaattttgctgcttgtctgagtgaactacgttcacgctcaactgtttttcttgtcttagagatttcaacaacttattcatgtcgtctttgttaacacaagtgaaggcaatcctatccctaagcggtatcacattctctatatacttagcatgtcgattttctgttacgtttagttctagcataattggttcatagatttctcctctaaaaaggtgtttgttgtttctgagccaatcgacagcagcgtaggcatccgagttgattcttctaagatgttctaaacggttctgtttgacattttccaatttttgtgtttcgttttcgagataacgtatccttctaacgctttcttgttttatttgtaagagctcgtctgtattggtttggagtgtttggtaagttttggttatttttgttagctcatttgtatactgttgctttaactgttcactttcactggatttagccgatgcttctttttgcaatttcttcatgtcctctaatttattcgaagcatttttaatctcttcattccactgctcaatttcggccaacttggacagtagttcatcgttaagtttcctcactgatccatttataccatcaattttttccaaattagtatctatagatgcctccacgtttcgtaaagcttttgttgttttactgttctcttgttgtatatccgagatttctttctttttggatgttatctctttctcaatgggtttcatgctggtcttgtatttgtcatacacttcttgagctttatttttgtctttttttatttcatcaagttcacccctcttttcttcgtatgttctccacgctatcttcctttctatatgttggatcttttctgtatattctttctttttgttgaaactttgtactcttccttctaacctaacatttaagtcaacagactcttgaagtttttgttgagatttggctatgctattatgtaactgcttatggtgttccctattttgtactaacaagtcttgtttttcaattaaatcaaatcgacacaaggccttctgtgtttctcttaagagctcctgcttgttcaattttgcaaaatcctgtactctatcttgaggaagaaactggcacagattgtcaacttgaatattgaaaggcttaatacattccaaaacgtcatttagtttaacttttctgttattaattttccatgtggttctatcatgaagatcaaactctctagtcactttaataaacttattatcttctttgtcttgaagataggtatttataacagcatgttcacaattgtgtttcacatactctgaaacctttgttcctcttccaacaactttggggtttccaccaagacctagaatgatagccgctaccatggtagattttccagtaccattgggtcctattatcatgtttaagtttggtcctggataaaattctacatgggagtaagttacaaagttcgttacttcgatttttctaattgatccgggctgatacatcttgaattttgtttattggtaaataaataacttacaaattaatattgtatgcaaatattgatgatatcggcacaaaattccgccacacaaaatttttaattaagtttgacaatttataactttactattttgtgctctgattttcaagattcttgcaccagtttgtaggtacatagtacatgcataggtacatgtattaatctccgtctaccaggcggagtaatgacgtgaataaatcacaatacatcttcaaaacaccctaaatcacgccctgtacacaataccaataacaaggtattcggtactggtgttatctgtattgtgtacaagggcgtaagttaaggcatcttgaagaaacattgtgacttattcacgtg

SEQ ID NO: 6386 - DNA, 3505 bp, Diabrotica virgifera
aaacaccttgtcgactagttcggacagacaaaaaataatagagtggtttcaagtctaatcaaaaaatttgttaaaaaaaaacaaccaaaaaaatgttttcgctgataacctctccttttagtggtatttatccaataggtacttggactttaatttaagacaatttattaatcaaaaaactgaacagaggattttatcaagaatataatagtgtatatagtttaacagtttaaacagcacaatgctcaatatcaatatttgttttcctgttcagttttaatttacgttttatgtatattattatactagctggaaaaggttcttatttcataaagtggtttcttttttaagctttttttagtatcgaactctgtgcgtatacacatgtaccatatccgtgaatcctactccgtctagaatttacatgtagcatcttttttagcggcgttggttaagtaaatagtgataaaaaaataatactaatagttgattctattagttaatctaattaatagacgtaacacctcaaagatacgctactgaatgcatgcctacattccgatcagttcgttggtcggaggcatccagtaacttgacgcgagaatgcgtcattctaccttccgatcggtccgctggtcgaaggtgtcattctgccctcctatcagatctccggtcgggagtgtctggaaatttgacgcaaaaatgcgtcagtcacttgttgggttcgtctggtaacttgacgcaaaactgcgtcattctatcttccgattggttcgctggtcggtatccagacacttttgtgcacctcacggggcccctccctgataagcgtctgctgtaattaggatttgatactttaacagtcagcattaaatggaacgaattactacagaatttctgcttctttaacgtttacctcgatgcttaaaagataagcgtcgacgtaggattcgccgacttgttgcatctaacatttattgctgccgaatcatctgctatttcattggccttaaagtgtaaaaatattagatgtatttttggcactacaagaaactaccaaaatactggatttgttgtggaaggtgtattttaaaataccctaaaagagggtcacaagacaaaacgttttcggattaagaaatccatcatcagtgttctaaaagccaaaaaatagcatgcttgagccagcatccaaaaatggcatcccattttttttactttttttagggtattttaaatataccttttgcaacaaatttagtatttttgtgatttatggtatacagccagctacaggaagtttagtttcctcgtggattaagaaactaccgacaaaagtttgcaaacatcttagcgatgcgatttatgactgcatctgctgcaaagactgctagaattttaaaaactcgagacaactcgaaagactatgtgatatatgcactgttcgaacggcaatattttgattggtaaaaattatccaatcaacagtaattgtagttcaaaaacagttttgcacgcctcattggtgacgtgaccgaaaattcgcagatatgggaaaatttggtttgcacaagtggtacaaaatcgaacgaggaaggtaattgtgggtaaaaaatcgtcttacatacctacagtaggaaaaatgaagaaaacctatgaacgaacatgtagggcacgctgtgttttcctgtcaccgtgtcatacaaaaggttggccggcgcaagtacatgtaataattattattactggtacttgcgctgggcagttttctttgtgacacggtgacaggaaggtgcagcgtgttttgtatgttcctgcatggctattctttcatttttcctactgtacataatatgtaggtatgtaagtacatatttcgtatgtatgtacatattatgtagctcaccccttattttacaggggtcgatgttcgaaagtgtacatgtcgaagattggtctccgcaccgatatcctttgcatatacacaccttaataagctgcgcatttgagaagccttagaagacgaaaatagtgaaacttgacgcgaaaatgcgtcattgaccttccgataggttcgctggttatcgcatttcccatctctaataagtgacaatccttgtccaaatagagacattctactgtcattataaacttttgtggaccttaactactaaaactgtaaaaagtctaaaacagcttgctgttttatcggtgtagatattttatcccgctactagaagtcggatgtttatttagcgaattattttggtctccattttcttctagtcatgcaaaccttaaggctatttatttaagcaattatcaaatcgcaataacgtggagttttaaagtttgaaaaagaaatttcactaaactagatgtttgtacagatataagaccttattcttatccgatatgtatatctaaataaaaaaaatgaaaacaaaagagaaaccttagttttagcattgtttctaaataacaaggtcctcacgggaccgatacgtaggtatataaaactattttttatcggaaaaaagtatatcagagtttgcttttgtaaacaaaaaatttaagaccttgtaaggtgtgtggtgagtgctgaatattttatcaaatattttctaggtattgttacggttagagtatttgtaaagattgcatatttctttttaaaagaaattcacttactcgcacagtatggtctgcaaatttttaaagcacaaaaaaatcaattaagacgggcgatttgcgtagtaccgttcttggcatttgtcgaggtgctgtatattttttccaacaatgtagttgatttttctggccgattttttatcgttaggtgttgtgtcaaataacaatgtttttatatttgttatttttgcaacatttatgtttaaaaaattcgtttattttaacaaaaagtgatcacaatccagttttatttatgtgtggcgtaaaataaattgttttgtatatttggtttaaccacatgaaagtttattttattgcgcgtgcgcactttaacttgaacgtaatggggcagtatcaactatgaagtatgttctttctctctcactttctctagttccattcctctttatggagtattaggcgcttatgcgtgtcttagccaaaagtgttaagattgctgtctggccgggtaagcgtatgtcctataccaggggttctcaatcggtggtacatgtaccactgatggtacatttcactaggtgcggtggtacacaaaacgcgaaaccacagccaaaatccagcatatttgtagttaattaaattacctacctccatagattcttcagttaggtggtaccaaaaataattataagcattttggtggtacatggctcaaaaacattgaaaaccactgtcctatactaaatttaaaatcaagatgcagtagaaataaacaaaccaagacacgttaaatgctactaggagcactcccgaatcatacgtatgtcctgtactaaatttaaaatcaagaggc

SEQ ID NO: 6387 - DNA, 3500 bp, Diabrotica virgifera
  SmartBlast Evalue=0; Info="Valyl-tRNA synthetase, isoform A n=8 Tax=Sophophora RepID=Q0E993_DROME"
cttcaaggtaaagtattcggaaagcgaggaattgggagaagaatatcttgtttaaaaaacctgaggaaatggttgcaatttatgcacttacgcaactatgcatttccacccatttttctatagtacacttttttcctgacataatcctgaacaaaatgcaaaaacgtgttagtctctaggtgctctatttaaaaatcaatttattttgagctaaatgccctgatctatgtagcgggttaaagaaaatacaatattctttgtgcaatattgttcattatgctacaaataaataaaaacatataacaagctttgtataaaacggtataaaaaactttacattaatctcagcgaactgagcgcggcctctagtcggctaatttctgcgctagtctggctaagtttgtcctcgttggagtgtctcacttctgaggcaccttcgattcgtaatctggagcttccatggttttattcagccgctctctcgtcgtctgtaagaagtctagttttttctggatcttcgtgatttccttggaaggctcgatgagaccttttaatagtaaattgacttcacatttgtcggaaacggtgattatggtacagccagggggcgcggtttcatttaccggtgatttcgagcagtacgctaaggtttgaagggctgattcgtagttgaggatgatttcggctgtcatttcgtcgttacactgaatatatacttcagtttttgttttattctgaagattataatcccccctgatggacctaatgctcttcaccacacgctgtacaaagtccacttcgtcttcgatatcttcgttcttccacctgtaatactccttctcgctcggatacgaagctacacaaatactcggcactatctgggcaacctctttcggcctgggtagtctctggtacaattcctcggtgatgaacggcatgaagggagatagaagacgtagacctatttctaaagctctgtatagggtaatctgagcggtctttttagcttcatcgtcatcactggcaaacacgggtttcaagatttccaaatatacatcacagagttcatatagccatacgttatatatagctgtggtaactgcagcaaaatcgtaagcagcgaaacttctattggcatcagtaattgcagtggctagtctactaagcatccacaaatccatcaaactttcatttccgatcagtttattatccagtggcgcttcgaaatcggcggcaaaatatgtcaaggcgaatcttgtagcattccagatcttattacagaaaaatctgtatccttgaacacgcataatatccagatttatgtctcttccagaacacatagcacacaacgcgaaccgaagagcgtcagtaccacactcaggtattccatcagggtagtcttgtttctgtccttgttgagccttctctacttctttagcgtctagattgccgtcgatcagttgttggtgaagaccttccagtgacatccccgttatgacgtccatgggatcaattacgttgccaagggatttgctcatttttcttccgtgggcatcacgtactataggatgcaagtaaacttctttaaacggcagttttcctaacaactttttgcccaagaagaccattctagctacccagaagaacaaaatatcgtggccagtttccaataaagaagtaggataaaaggcttgcagatcttgagtttcgtcaggccatccgaagatcgaaaacgggaacaaaccagaagaaaaccaggtgtccaacacgtcttcatcttgagtcaagattaagtcatcttctttagcgttgaattttttcacagccttctttaatgcctcttctttggttcttccggatacccaaaattctccatcatcgcttcctggcaaaagcttttgttgtggtttgctcttcatagtgacgaaatacgcaggaattcgatgaccccaccacagctgtcttgatatacaccaatcgcggataccttccatccagtgatgccagatttttacgtgcacttcaggaattaatttcaggtcaccgttgttaacggcatttacggcttcctgagccatctcaccacatcgtacataccactgaggcttcagcataggttccacaatatctttgctacgattacaaatgggcaccaccatagggttgttcttcgtgtctatataaagacccttttcttttaaagctgttacaatttcttttctggcatggaatcgtttcattcctgtgaactttccataatctccaacaatgattccctcgtcatcaaagatgttaataaaaggtaagttgtgccttttccccacttcgtaatcattaggatcgtgggcaggtgtaattttaacagctccagtaccgaatcctaactctacgaaatcatccacaactattggtagttttctatcacagaatgggtgggtcacatattttccgtgtaagtgtgtatacctttcatcatctggatgcacagcaacagccgtatcacccaacattgtttccacacgagttgtggctactatcagtttttcatcagatccttccacttggtatgcgaagtgaactaaaacaccaaactctaccttttcatcatatcccggtactgagaggaaagttcgaccaggcagttctactttgtccacctcaatatcagaaatggcagatttcagcgtacaggaccaattgaccaatctgtttgatctgtaaatggtgccatcatcgtgaagtctcacgaatgcttccactacggctttacataattttgggtccatggtaaatgcagctctgtcccaatcgtaagatgctcccatttttttcaactggtgataaatccttacacctttttcatccttccatttccaaattttttggacaaaattctctcttcctatgtcatgacgggttttcttttcttctctccataacttcttttccacaactacctgagtagcaattccagcatgatcacagcctggattccacaaagttgtctctcctttcatcctatgccaccttactagagaatcctgtattgaactagtcaaagcatgtcccaaatgtagagccccagttacattaggtggaggaataataataacaaacttcccgttggcatttggctctagtattgactttctcccatattcaggtttaaagaactgtttcttttcccaccaactataccacgcggcttctacatatttgggactataggcatcaggtaaagccactgtggtgtctttcttctctccttctggtgttgagatactgtaggttgcagcctcttttacttctttctttttctcttttttctcttctttatccttcttgggagctgcattttgctgtttctctaatttctgtttcagtttatccaatttagcttgtttggcggcttctttggcaagctgtttagctgtcttgggaggcgcatcgcccccattttccactacattttttatttcatcagccatggtcaaatgcac

SEQ ID NO: 6388 - DNA, 3497 bp, Diabrotica virgifera
  SmartBlast Evalue=0; Info=Importin-7 n=2 Tax=Formicidae RepID= E2A3H4_9HYME
taaacttatgtccaaaattatatagaagccgctgctgcccaggggcgtagatagtaccagtttctttttaatgaatttgaaaacgggtgtacatacttaattactaataaaaaggcacttaatcaaaaaatgaaaaagattgttttatatataatcaaactgtacaaataactacttcactggtcagtagagtcaattttacattcagtcacagagaggttacttttaaacacagatttattcatgagttgccgtcgccgaatttaaaagatgttggcaccgcttgttgagtgaagatataacctccttgctgttcaattcttttactttccctagctgcggctctttgttctgccaaaacacaaacttcgcttaaagacttcagttgggtttcgttcagattattcgtcagggcgttataccattctgggtcttgaccttgcaaagctgtcatcacttgcttaaatgcttgatattcgtctacgtcgcagtcttcttcatctaaaggtgtcgtgtatgtttccaaaacagtttcttcatttggttcaaaattggaatcatcatcttctgaagcatcattgatgtcattaattgtggctgttacattcatgccttgctgagttaaagctgtagttgctctctttgataaattctcgagatactcctgtccctgatcgtctatttcgtcttcatcagaacttaaaatatcttctaattccccgtcggaactttcgctttcctcttcttcagcagcttctgcagctttggctgcgtaagctctcttaagtccttcgaatagcaatatcaaagatggtaccactttcggagctacttcgatcaatactggaggcttgtttggcatcgatattaatgtacataatcctaatacgcataattttctatcgtgaatacctaagaagcaatctgtgtcatgaagccattgtttaataaaatgattagtgaaatcaggcatttttgaaagtacagaaaacagcaactgtgggtcgtaatacaaagccgctatcagaacctgcagacacatcgtccttaattcgcttgtcttgacttctctcagcaatcttgcagctgccaattctatcagcatgggagcggccgtgtcgatcttctttcgacattgcaaaagaacgacttcgagaagtttggcggcgtgagattctggatcttcgcctgagtcttcagtgagtatttgtttacacatgttgtagatggctagcagtctttgttcgtccgaaaggaatgcgttggtatcgatagttatgtagttgtgtagagcaggcatcatgtctgtgaaatgatctataccgttcttcataaatacccgatataataattcaaagactttccacatatctggagaaatttgtttactagttaggtcgtatattagtgccagcacctcttcataaaactcttgaacttcgttttgtaagacattagctataacttgtagtacagttggttctaacaatctcataacttcgggttgttcgtccatcacagtcaaaagagtttctatggtgttcagtaagcccattgctgttatggctttttcgtcagatccttcgtcagtgtccagaacctggttgaaagtcgtagctaagtgttggcatatttccactgctatcggtattagttgttgtgtatatacacaaactaatttttgcataacacctgtaacatcctcattttctgtttccctaataatagacaataattcgagggctaattgttttacttgtggttcaatatacttttgggctctttcttggtaattgagcaaagactgtaaagctatggctgcctccactttcacgggtaaatctttgtcgaaaagaagagcacgaaccgtcagattaatggcttccatcaaaatattttcctgcttaaagttgaactctgcaaaatagtgtagaacccagcatgctctagctcgcatgtgtcccctgtcgctgttgaattcgggaaacacgtactttatgaagagttgatccaactggtccctgtacattttctttcttaaaaatatatctgctaaggaaccgaccatgtgcaaagctccatccttttgtgcaggttcagttgccgtgttcgttaggatagttgtcaacattaccatagttttttgcaacatttcttttcgttttttacatgaagaatgtaataatgtttgagcagctgttaccggagatacaaaatcttcaaagacgtcaaacttaactctgatatattcatgtgcatcaacggtccaaagttcgtgatcttcagccgagtaactcataagagggaacaaaacatcctgaatgatagcgggcatatgtggctttagtattttccacgtatgtccatgggacactgcctgattgaggtagtttaatgtctgctgtagaactctaggaggtacccaattaccaccacgatagccatctaacactctcagtaaaacttccaaaatgcctgcactgaacgtttgcaaataccactcggcaaattcattgtactctttagtcacatgtcctggtgaaccatatctttcaaacatacggtacaggatgtgaagggcccactttttgcatttccaccacggtaagtctgggcgttcatcttcatctggttgaagggctgcaggaggtacaggtctttcaacgacctgtctgcagacttccatccattgagcaaaagcatctttactaatcaaatctaaaggcaaaatatactgtgtaagggcaaaatagacctttaatccttctttctgtagaagtactgactgttcagatgtgtcaggtaataatctaacttctaattggtagagctgaggaagtaggaggttcatagcttcatggagaggccctctttcttcagcttttttatattcgaagttctttactagttgataaagacataggaaagctccttgccaaccgtttgggtctggatttgataagtagacgctgattttgtcaacaatctgtgtccatcttcctggaaagtcatgcttgaccatgtgattaacacaagtgcacagttgagttctaatcaaatctggtgcatggactacagcatccactatactgtctctaataagcgctcggtcttgttcatgtagagcaaaaggtatcggttgtcccgcttctgcttctctatcctgccaattagttgagatgaggtttttgagataaatggcgccagcttgacgaacaggcatatcacagtcagacatcattatgacttgaaggagggatggggcgaagccgataattttgtgtatctggtctaattgagcttcagcttgctgtcgttgatttgggtctatagttgcccgaagtaggtctattaacttcctgatttccatttttaattttctgcagtcttttcgacaatttaacttaaattttagctgtaccgagacagaaatttaatgcctttttatacttcaagatgctcggtatttgctcttcgcgcacgatgcacgatagctt

SEQ ID NO: 6389 - DNA, 3491 bp, Diabrotica virgifera
  SmartBlast Evalue=0; Info=ATP-dependent RNA helicase n=1 Tax= Aedes aegypti RepID=Q16JX7_AEDAE
gtcgcaattattttttctcctctatcgtgatgaagcaaatttaagagaggatctcgaattttttcctccaaaagattgaacagctccatcctaatgaatttgatcatttcagctattttgtgttcatctacctggaacacgatccaaccatcttccaagacgatgaaagtgttgccgccttgaacgttgatgttcaagtcatacgaggagaatagtatgagaggtagaaccggaaccatcgtacattctctgaagaatactttgctggtttggattttttcttggtagactagatatggactgggaaagttcctcacggtgtagtttatagagcttggatgcatgaatactgtttcttgcactgttgtaaatttcaaatctttggcttcgttttctttgggtactgctcctgccgagctcatgatatacgacttggatggtgttaggatcttcacaacgttcggatataatgcagcgcacaatattgatgataacaaacggatgttttctccattcctgttaaactctggaccagtaatttcgtatacatcatcccaacctaatcttcttctcgtacttaaattgactggtacaaaacctatatcgactaaaagttccaaaaattgtttttttatatcggcgatagttgttaaggttcggtacgaaaggaagttttctacagcgaagtgtcttgcggctacagaagattttttgtagatttgaagaaatttcttataggccattaatgtagttacatgatcgctcatgccaacggcgaaggattttttctttttgttggcttcttcccgtttaccaaatggagatacaaacggagattttgaacttaaacatgccgccattgttaaagcagcatcgacacagccaaatattgcaccataaagtattaattttcctattcttacgtccactggtaaagtcgccaaatgatgccctaaaggtgtcaaattttcatgtttatccaacgcacccacattttctaaccttttcacagccgtaactatattttctagtgtgggtggttcaataaaggaccctaaaacctgcactacgtccctgttttcaaagttttgtaacactttgatatttaatattaattgctccaagggtattcgattgatttctggaattggttgaggtaatatattatgtctaaacctgtgactggtataaagatgtatacacactccgctcattactcttccagccctaccctttctctggagagcgttcgctctggtcacccacgttgtttctaaactttccatattcctattagggtcgaaacgtttttccttcatttttccggaatctataacgaagacgcaatcgtcgatggtaatggaagtttctgccaagttggtagacaagacgatttttctttggccggggttgggcttcctgaatatagctgattgttcttcactagacaatgacgaatggagaggcaaaatgagatactttccccgtctcttgccaagttcgggatgaacgtttagttgatcatacagagtcgttatctcaccaattcctggcagaaataccagaatagttcctactttcggatagtcatgatcacctgctacaatccattccaagacatgctcgatgagatcgtagtttatcttatccggatccattatgaatatatttttacacgttgttatactataatcttgatacctagccataacctgaattgcgtttaaactttcatccttaacgttatccctgggcttctgattactataaccaacttcattggcgctcatcattatttccaaatagtcttcgtcttttttcaactttctgcaatactccgaaccatcttccatgacatatccagtcgtttccaaaatgtcttctagaaagtattgctctactggaaaagttcttccagggatatcaatcaccggaatatcaccaaagtactgggagaataaggaagcgtttacagttgcactcattaagataacttttagatctggacgaatttgaagaagttctttcaagatcaaaaggagaaaatcgctttcttcactacgttcgtgaacttcatcaactattatatgggtaacattcggtaatgtcggttcaccttctaatctccttagcaatattcctgtggtacaaaaacttagcctggtactggaagacattttgctttctaaccttatttgataaccgacagtgtttcctattttgtcgaccctttcatcggccactctttccgccacgcctattgcagatatccttctgggctgagtacaaacgatctctacatgtctattgtcgttgccataattctttatccattcgtcaagaataaattggggtacctgagtactttttccacatcccgtttctccactaactacgatcactggtgactgattaatactattcaaaatatctttttgcaaactccacgcaggcagatttttcctaacattcaacatcttcttgtacttttcgtctttaattcttgtgtaaaacgattctacaacccttttgtcgtctttttgtaattgttctaacgataaaaactttttgttggatctattattgctacctttttgataatgactcggttttatttcccttttttcaatatatttcttttctgcaaacagtttttgatttggatgtaaaaagtttacttcttccttgaggtgctgttttatttcttcttcgttttgtaaaagttccgtgattgtatatacacaaggtataccatcttcggctagtagtttagcttcttcgtataacctcttacaaagatgaagattgactaagggaggtagtattgcgttagtttttaaaaatattaaaggaggttcatagggatattgggtaatgctaggaaatcgaaattccaactcaaatgtaaaatcttctaaatgagagttgacctttttttcttctttcggttctatttcgtgtgaaaaccgacacttggcaccaaatttacaattacccctaagcaaattcctgcatttttccctcttatctttcacgacaggtttcttttttacgatatctttattgtgaaatatatctacgagatactccagtttcaaattcagaatccaaacatcatcagttttaacattaaatgatttttcataaattgattctaaggaacttttttcgtcatccctttgctctgtgagttcttttttagatagtccgtgttcgatttctttaggtgctgcatcaaaattgaaatatttttggtagagcaagtatattgagtcttcaacatcacctttgcaatattcgaaggcttccaaacagtgatttttgtgaaatccatagctttctaatctcatcagaccaaactgtttcaatcgttcagcttcttctgctggttgatccctactttgtgaaaaatctacacctccttttactactagagatccttgtccaacccagtaccttttaagaagattagagtttgattcttcatagtc

SEQ ID NO: 6390 - DNA, 3493 bp, Diabrotica virgifera
  SmartBlast Evalue=0; Info=Megator n=2 Tax=Tribolium castaneum RepID=D6WGQ0_TRICA
gcatgttggcgtcagaatgttttctcgttcattttgatctacgttaggccgttgcattttcaaagcgtaaattctaatcaatcccatagtttcagtgaccagtgaattatgttctaaaggttctttaataacatttcaaactctacaatggaagactctttcgtttttggtagtgttcttagtgaagaagaatggaaagtagttccagtagatctaggaaaaaaaatcataaagtttgtgactgaaaatttcgatgacttaatcaaaggcaaagcgttattggaaacaaaatgttgtaatttggaaaaaaatgataaggatttacatgatgtcctagaaaaagcagaattagaaaataaaacacttaaatcaaaattagaagtagctgcaaacactataaatgaacatgaaacccaattgtctaatctagctgcagaactaaccaaattacatgcaaaatgcaatgcttttgaagccgaaacggccgaatttcgtcatcagaggaacaaagctgttgacgaaaaagatgaacatcttagaatgataaatagacgaaatggagaaatcgagagactccaagccgatttaaaagattccacaaagaagttggaatctgctatttcagcgaaatgtgaagcattagctcagattgaagaagttgcttcaatgaaaacaaatatagaatatcgtgaaaaaagaatggaacaagaaaaggcactatataacagccaaatagaaagtctacaagaagaactaaataagaaaactgaagaactacttaactcgaaacgtgacaactcatcaacttgtgttcaactggaaactaaacttattcagaagacacaggaactgactgtagcaacagaacagattaaatctctcaacgatattaacactaacttgaccgcgagaattgaagaactttctcaaaaaattgcgaatctaagggatgaagaagctaaggttaatgagtcatatgtatttgaaattgaagctaaaactaaaatggctaatgcctttaagtctagatatgaggaactagaacaccattctaaaacgctggaagatgctgttacagagttacaacaagtattgaaaaatgccactgagcaatatggagaattggaaacaaaacataaagagtctgagttggctaaagaggagattattgcaaagaagaatgaatgccttgagttattgaaaaaggaattagagacagccaatgaattattagataattcaagaccaatgctcgatagtgaaggtatttcaccaaaccaatcctcatcgaagcttgtgaagcctggtatgacctattcagagttatattcacgatatgtaaatgtttctaacagattaactgaaaaggaagaagagtgtgctagatcaaacaactacgtagatgcaatcgtcaaagaaatggatttcaatttaccaaaagtacgaaaaatgcaagaagactattcagaaagtttaacaactatagataccttaaaggatgccaatgaccaattatgcagtgaaatacaattacttcgtgatacaaatgctgagtgcaaaaaagctgagggaattcgaacacgagaaaatgaaagattgagaaatgaagtctctgatttatcacgacaagttgttgttttgttaaatgaggttgagaactccagagttgggtcgtcttcaacatcgactgataatgatttaagtgatagtgtcaattcagcggacattataagcaagaaattagttactttcaatgatatctctgaattgcagactaacaatttaaaacttctggctttggttagagaattatcggctcgccaagaagaagtggagagcctcgacccagctgcgattgccgcactcaaacttaaagtagaagaacttatgcaatcacaagatgaactactcgaagaacgtgaaaagcaaacaaaaatgatggtcaccctccgaaatcaaaaagacatgtataagaacttatacactcaagttgttaagggtgctggtgaagaaatccatatgtctgatgtttctgaaaatggggaacccaaaatccgcacggaaaccgaaacgcagctggaagaaaaggttcaagaatatgaagctaaagttgaaaaattaaagcgagatgttgaacatttgaaagaagaaaacgatatttatcgtaaagaaaagtcagccaatgaaaagattttgattgatcaattagacaatatgcgcggtgaggttaaggaactgacaagattaaattgtaaactgagcgctcgtgctgaacatgacgaagaaaagttcaaagtattcaacaacaacgttgacatttacaagaaacaaataacagcattagaaaagcagaataagatttatagtgagtcgataattaagcatgaacaagcagctacttatttgaaaaatgaaacaatacaaagccaaacgaagctttcacgagcagaagttatgctgggcaatttgcaaaaagaaaatgctttgctaaaggacgccgaacaacgtcttctcaaggaaagagattcgctgaaggtaaacttccatcaacaaaatcttatgaagacaaatatagagcttattaaagcttctctcgaacgcgcggacgcggaaggcaaacttaaattggaaaatagacttgatgaagctcatagagaatgtgctactctacgcagaagactacaagaagaacaagatcattttagacaattgtccgatcatttatcagctcaaaataaaaccatcgagaagagagcagaagaagaacgggagattgcggagaaattgcgcaaagaagttgcggaagtaagggaagatctgatggctaaagtagcccaaaatgaagagttgggtaaaaacttaagagtgaaatgtttatggtacctgacggtagcgctgagacaagaagagtaagagaattagaacagcagatcgctgatctacaagctgaaaatgaatcgttaaagaagaaaataaaaactgctaaagaagcttctgatgaatatttcaaggttgcagaggcgtcggaaaaacaagttaaagatgccatggagagaaatgaatcgttgatgcaagaagtagataagcataaagctcgcatacgagaactagaagaaaaatgcgctgaactggaaggcgaaatttctatacagttagatgatcaagatattacgaatgcaggaaagagcaagtccatgcagcttcaagaggaactgaatatcagaaatatggatttaaggacagcaaaacaacaattagaaactgctagatctgaaaatagacagttaattgaacaaatgaaagctgttgaaaataaatatgcacgagaggttaccttacactctgttgatttgcagtctcttactgctatgaaagaggatcttgataatgccttaggagaaattaataaattacaaagcgaaagacagaaggctactgaagctctcgaacaatttaaggagaattgggaaaaacaagaacatttgttccaaaa

SEQ ID NO: 6391 - DNA, 3463 bp, Diabrotica virgifera
  SmartBlast Evalue=0; Info=Phospholipid-transporting atpase 1 (Aminophospholipid flippase 1) n=2 Tax=Aedes aegypti RepID= Q17N94_AEDAE
cgtaaaaatgaatttggtatcttcaagtttccgtaaagtgttttctaagtaaatctgctgattgtttcgttaagatattgttcagatttgtatggtttaccttattagaacacctttatcactttatctgacaaggtgtccagtgaatcgagggacgaatgcagagagagcagagtttcgagctcggccaggtgacccccgtcagtccaaccaacggctctaccagaaaccgagatgaccatcgtggacctccccccgcagatgaggaagatggaaaactatcatctgcactggacagggacactgagacctcagctgaccctagagttagtgccgagcaacgtgtgatatttatcaataggacgcaaccgccagttaccaaatttgttaataatagggtatcaacagccaaatacagtattgtaagattcatacccctgttcctgttcgaacagttccgaagatgggccaacgtgttttttcttatgatagcgatgttacaacagatccccgacgtttcgcccactggccgatacaccactttagtgcctctaatttttatattatctgtatctgccatcaaggaaatcatagaggacgtcaaaagacatagagccgatgacgaaacgaaccatagggaagtagaggtgttgaggggggacaactggatacatgtgcggtggaagaacgtagtggtgggagatatagtgaaggtttggaacaacgatttttttccggcagatctggtccttttatcttcaagtgagcctcaaggaatgagttttatcgaaacggcaaatttagacggagagaccaacttgaaaatcaggcaagctctgtctagtacctccactttgacgagcatacaagacctggtgcagctgttcggtaccatcgagtgtgagccgcccaataaacacttgtatgaattcaacggtgtcatcagacaatctggacgatctcccgaacctcttggaccggaccagatccttcttcgcggcgctatcttgcgaaacaccgcttgggtcttcggaatcgtgatatacaccggccacgagaccaaactgatgaagaactctgccaccccacccttaaagcgttcgacagtcgataagatgaccaatgtccagatccttcttctgttcggtgtgctgttcgtgatgtgcttgatctgttccatttttaacgttttgtggaccaaaagtcatgctgatagtgactggtatattggtttagaagatcattcctataattttttctacaacttacttacatttttgattctttttaacaatttgataccaatatcgcttcaagtaacattggaagtcgtcaggttcgtacaggctatatttatcaacatggatgcagaaatgtaccacgcagagacaaacacccctgcgatggcgagaacttccaatctgaacgaagagctggggcaagttaagtatgttttttccgataagactggcaccctaacaagaaacattatggaatttaagaagctagccatcggtagggatgtctttgggacaacagagaacgtagaagactcggtcttagtaaagagtcttcgcgacggccacaaaaatgcccacttgatgcgcgaaatgctggttcttctgtctgtctgtcatacagttatcccagagaagacgccagagggcgaagtgatttaccatgcagcatctccagacgagagggcgctagtgtatggagctgccaaatacggatacgtcttcgaaagccgaactccagatcatgtagaaatcgatgccttaggcaccagggaaagatatgagatactgactgtacttgagtttacttcggctagaaagaggatgagcgttatagtgagagatcctaaaggtaaaataaagctgttctgtaaaggcgcagattcggttatatacgaaagactagacaacaactccggtagagaacattgcgacatgattcttcaacatttggagcatttcgctagcgaaggattgagaactttatgtttagcagtggcagaattgaaagaagctgattttgagcactggaaagagatgtatcataaagccagcatatctttacaacatagagaagaaaaaatagaggaagctgcaaacttgatagaacgtaaattgaaattggtcggagctactgccatagaagacaaattacaggaaggggtgcctgatacgatagcagctctacttcaagctgatattaacgtttgggtattgacgggtgataaacaagaaactgccataaacattggatactcttgtagacttctatcccaagggatgcagctgcttattcttaatgaagacggattggacaaaagtagggaagcaattttaagacattgtgaagacattggcgtaaatttggaaaagcaaaacgagctggcactgataattgacggcaaaacattgacgtattgtttgacgtgtgaactaaggaacgattttctcagattatgcgtttcctgcaaagtcgtgatctgctgtagggtgtcgccgatgcaaaaagccgaagtggtagaatatgtaactaaatacacgaagacagttacgctcgccattggagacggcgcaaacgacgtagctatgatccagaaagcacacgttggagtgggaatctcaggagtggaaggtcttcaagctgcttgcgcttcagactacagtatagcgcaattcaggttcctgttgagattattgttggtacatggggcctggaactactcaagaatgtgtaagatcatcctgtacagtttctacaagaacatttgtctctacgtcatcgaactgtggttcgcaatctactccggctggtccgggcagatcctctttgagcggtggaccatcggtctctacaacgtcatcttcacagcgctaccacctctagctatgggtctgttcgacaaaccttgcagctctgacaagatgatgcagttcccgaagctgtacaaaccgtcccagagtggagagctgttcaacattaaggtcttttgggtgtggatcataaatggaatggtccattcggctcttttgttctggttgcctttactggcttaccaacacgacattctgtggctaaatggacacgacggaggatatttggttctaggaaattgtgtatatacatacgtcgtgatcacagtctgcctaaaagctggacttgtgacgaactcctggacgtggttgacccattgcgctatatggggatctatagttttatggtttctctttattattgtttacagtatgttttggcctaccataccgtttggttcagttatgtcgggaatgtacatcatggtgttttcttcgactctgttctggttaggcctgtttgttgtgccaattgttactgcgttgcctgattttacaattaaaattatccacggaaccatttttaaatctctaacggatctcatacgggagagcgagatcaagaaaagcgaccc

SEQ ID NO: 6392 - DNA, 3448 bp, Diabrotica virgifera
  SmartBlast Evalue=2E-10; Info=Zinc finger CCCH domain- containing protein 13 n=1 Tax=Camponotus floridanus RepID= E2APG7_9HYME
cgacgtgtttgtcggtgatgggtaagttgcagagatgtcttcgaatcgtcaaatctcttctggctgccagagctcttctatgggatccaacactagtgaaaagactctttcgaatggctaatttctccctatcagcaacttggataactgctattggatggggcacttgtatttcttcagtgtccattggttccatttttatttcacagatttgctccatttgtgtttcctcagtaggctctgactttattttcacctccactccattcataatcagttcttggggttcttttttaattacaatgctcgatatttccgttttaacaactacttcttctttttggtgttctaacttagctgcggcgtgttgttttagtatatctttaactaaagtctcccctgctaattgtacagaaacgcctaaattaaccaatacattatgggcttcccatctgattttagcacagctgaatggttttgttctaggtttagattcagcaactaaacttgaccaatcaacccccaaagcgtcaactaaacctctcatcttcgattcttcctccaattcatcctccgatatctcctcaaaatctaactccatattatcttcgtcgatcgatcctcctttgttgtttggagcagctacacctgcaggagatttgggtgcagtttgctgttcaggaggtggtgattgggatttttgtgacgttgccgaagtattaacctcgagagcagctacagaagttgttgcagcagcctcctgtatttctggagcttctgttgattcttcttttattggactatctggaacatcttcaaccatatttagaatatcgtcggcatcatcactaatttcgctgagatcatcttcgagaggtggttggacggtctcttgttttacacagatcttctttgcactacccggactatctacggcttcatccgcggcacgtttaactggtggcggagaggattgcttcatggtttcttcttctgaagattcgggtttaacgccaggttcttctgcagctggtgccggttgcaacaatggcggaatttcctttttgcgattcgattccagattggaatcttctgaaggtggcacattcacaggttccacttgatgtgaagtggcacttctcggtctcgatcgatccctccactcctgcggccatcttctcctgtcgtcattagtccaagaatccaccggcctgttataatgtctccaatcgtcttccccttgcccggcgcccgtttgtttgtgctgatcaatatcccagttttctctggcgtcccattctgaatttaccggacgcctgttcctatcccagtcgtgattggaatattcaccatgttgaagatcgccccaatctccgccacggttgtttttcagattgtgatcgtctctcggtgcgtatcgagatctgtgatctatgttttctctgtcatcaactcctctttcgtcccacatatctctcctgcttcttctatcatcaacaggggcaccatacatcctatcatctctgacaccttctccgtagtgttcgtccacatctaaataccttctgtcgtcaagtggacgtcccctctcgtaaggactatcataatccttgtctctatgccctgggatgtagtctctctcgggatcaggtcggcttctattatcgtagcccctatcatatgatcgatccttatccatgtcgccacgtctatcgggagactttcgtggacggtcggtactacgatctcgtccacgaacatctcgtcctctatcgcgatctctttcagtggagtgtcccttccgggatggcggaactcgctcttcaattggaggaagaagacgttccacacgatcacctgaaggtttatctaaccctctatcgtccctcctagtcctctctctcctcctctgttcttcttctttcttgagccgctccctttctctttgtctttcttgacatctcgccagtgcttcttctcgttccttttcccgcgcctcctccctttctcttgctagtcgtcgttctctgtctctctcacgttctctttccctatcacgggaatcccgtttggtcgtctctttacgagctggacccctgtccgtcgatcttatgtctttacctctgcctcgatcatcccttcgatctgttctcctctcatctttcatgggactcttgtgatctcttcttccaccacccttacttcttccaggcgacaacttcctatctttaggatgagcagaatctggcgtatctctttttctgatgtcttttatcgatctattgtcccgtttcggcgatcttgctatctcttttttcttgtgttccttctctttttctcgttctctttctttagcgcgttctttagctcgctctctttctttctcccgttctctctctcgttctttttccttttctctctcgcgttccctttctttgtccttttctttctctcgttcgcgttctctttcccgttctttttcgcgttctttgtctttggatggttttggcgacggagtgcgatgtttctctttaatacttgtacggctaagaggacgaggagacttctcagaactcaactttttaaaactagatatggctttggattttattggtggtgtttcagatttctttcgttgtcgagttggtgagacagatttagtctttatcattttactacctttttttgatttatcccttattgttgatttagatgttctcttgatttttgacttgtgtttacttctacctctttcctcggaagaagtggagctactccttttagtctttatctttttcaatttcctccttcttgcttcagcagagctagagcttgtgctacttgaatcatcacttgaagttgaagaatctgtagtagtactagaagtatcagtacttggactgctttctttcttcttttcttttttcttggctttgctctccatcttcatttgcagttcaagttctctctgcaactcttgtctttttctctctagatcatctggatctgcatcttccagttcatctgggtcccactgatcccactcttcatgttgtgatctcttatgtccatcttttacatgccttctctgtgttttggctgctctctgctttgatggacttataagagtgtgagtgctggaatatttgcagcctttgccatatgggcaagagccactctgggcccagggatggcaatattcttttcctgtatttgttgctttggtcccaagtctttcaaatacactaggtcttgtcttcaggacgccgcttttgccttttgtactcaaattcacagttatcttacgcttgattttagacattttctttacaaataaatataacaaacgtacttagagcggttgtagttaccatatttacaagcgtttcacttttctattttctatccactttttggatttagaaattacaacacaacacagggcttt

SEQ ID NO: 6393 - DNA, 3439 bp, Diabrotica virgifera
  SmartBlast Evalue=0; Info="GPI ethanolamine phosphate transferase, putative n=1 Tax=Pediculus humanus corporis RepID= E0VLL7_PEDHC"
taaaattttatctagtttttaataatatttaatttattgatgatagcagggtggtggcggagaaatgggcgatgggcaataactcttatttatactttttgtttttattatggttaagttatttaatagtttcgtcagtattactcttcactcgagggttcttgttaacgagaaccgttcaacgaaagaattcaacatgcctatcacatagagaaataccttgtggtgaaaattcagcatttgaagtaaattatggagaccaagagcaatgttcagtggaagacaagattggttcatttattacaaaataccatagtgcctcttctgtgtgtctaccatctcgaactcgcgtggttttactaatcgtagatgccttacggtacgattttaccgtttataataagaaacatgaaagtccactgccttttcaaaataagctacctgttattcataatcttctcgaagaatacccagaacgtacaaggctctacaagttcattgctgatccaccgacaactactatgcaaagattgaaagctctaacaactggaagccttccaacgtttattgatgcaggctcaaattttgctacttcagagataaatgaggacaacattatagatcagctactaagacacaatcatggagttgtgtttatgggggatgatacttggaatggtttgtatcctcaccgatttaccaggaatttcccttatccttcttttaacgtttgggacttagatactgtcgataatggcgtgaaagaaaatttgtatcccgaacttgataataatgattggagtttacttattggtcactttctgggtgtagatcattgtggacatagatatggtccaaatcaccctgagatggcgagaaaattaggagaaatagatgatgtaattagacatgtagtttccaagataaacaaaacagaaaacatgatgctttttgtaattggagatcatggaatgacatctacaggtgatcacggaggagaaagtgctgacgagataacagctgcaatgtttgtttattcaaatcaaatcctgtcaaaatctgataagtcagaatcagtgaaacaaatagacttggtgccaactctctgtacactattagggattcccgtaccgtttcaaaatttaggcgtcctaattttggacagtttgccaatttttacgaaacatatagaactagaaaattggaaatttagtctttattcattgtgggctaatgtccagcaagtattcgagtatattaaagaatatgctgagaatgaaggaacatttgatgaaaatgatttaaagacttttcaacagagatattccgtgctaaatgctaaaataatatctattgatactgaagagaaatttcaatccttctccaaagaactgatgaagtttttgacagatttacgtcaactatgtgaagttctttggattcaatttgactcatactcaatgaccagaggactactttttatatttttaacaaccttctttgcatttgttataacagatggcataccaacagataccttgtccaaggtattttctagttcttatatactgtgttcttatgttctcgtgattttaggcggcaccattgcttctctcatgtattattttggtctagttgatgatttagctaaaacagcctttttcgttacaggtttctgttcccaaataatgctagctttgttggttgtacagaattgggacgtcataactcaaaattggtattccaaaagtaaaataaaaaatatatcaaacttaattgcccgtttcgtattgatatttaatgtctgtgggttattttcaaacagttacattatagaagagtctttcgttcttctctttttattagtcactgttgtactgataggtgcaatcggtgtagcttctaaaaaagctgacgccaataaaaagaagacagtttccaagttttggagctggtcgaaattaaaattcataattcttgctgttttggtcgctatctttgttagaggctcagcctatttttggcgatgccgtcaagagcaacagtggtgctttggttcttaccatgaggttggatctggttctaaatcggaaactactaagctacaatggactgtaactgtcatcttcttgggaatgtttgtgttttccacaaaagaatggttgagaaatgcgggaaatatgaatggctactctttgactgttacagcagtaaaatttttacccactaccatagtagtatgcatgtcaggctattgggcaatgagaagggtgtcttcaaacaagaaatccataggatccttacattctattaactctttggcttggagtgtttatggcttgataggtttaggtatactagtttgtattttgaaacctctgtatacttacgttctgcctaccacgaactttcatcaggaggtaaatagtattccagctctatttaagaagattaaaaataatattactgcacaagacaaaccagataaagacgatattccagttgtgtatggcatgggaaccgtatatagtgcagctttcgtgacaattggaatctatttaactcttctgttcgctttacttttgggagatgcagtagctccatcttcagtgattatgttcctagcagctgcgtttgttctcatagtaacatccgtattacgaattgagaaggcgacagatatagaacaactgtttgacgttccgaatatatcgatactcatatggatcattttggcacaatatttcttctacgccacaggacaccaaccgtcgtttcctaacatttcttgggaagctgcatttataggcacaactggaacattttccaataacgttattcccggaaccttgattatcctgaacacattttgttcgtatattttaatgggagtattgctgccattattgttaatcacgccgttcacagtatttgtaatgatcccttccgtttgcgagaaaaaacaggagtttagagtagaggcttctagaggagaagttattttgtttgaaagagatagactgatgttaacgtcgatgtttaaattagctgcgaaatatattttaggacatgcaatacgggtatttgcaagtatgctagctgccacgatccattgtcgccatttgatggtatggaacatatttgcaccgaaactaattttcgaatcgataggaatgttcataacgttaggctcagtaattgtcggttacctcatacttgtacgaatcaataataaaaccgaatccttaatccagactcttaataagatgagttgatttgttttatgtcgtaagttgttattagttatttataataatttttttaaagacatttgggcatttttgtgctaatttatttgtacacaagcgttgaccacatacataaaatgccttgatatgaacaatgttgttataatcttgaattaataaatagattttat

SEQ ID NO: 6394 - DNA, 3412 bp, Diabrotica virgifera
  SmartBlast Evalue=0; Info="Translational activator GCN1, putative n=1 Tax=Pediculus humanus corporis RepID=E0V8V7_PEDHC"
caaccaagaaatattccaatgagtttcttataaataaaaaccattctatccatcgatacacggatagaatgagggaatttggattgcgttttgacgtcggcacgtcttaatgatcaggtcaatagggtgtcgtcgagttcttcttccttgccttcgggctgtgacatgatcttctttaatactttgctcaccacgtccgagagggactctctggcgccggcgtcgagaataccaaggcatttctggagcatagaatcaccgtcttttaacctcaataacgcgattaaagctatctctgagttggcttttacgtatgtattcttttctttcgttccatttaccaaagtcggtatcaacatctttaacatatccgcagacatcttttctgggggaattattttggccaagtggaatgataccctcgctagaagttgttttacgtcgttgctattgttgttcatagccctaacgaatggtaccagtaggttgctgggaatgggttcttcgctcatcaacaaaaactgtaagagataaccacaggatcgtatggcgatttgattgataacgactgattgagaagataattgacttagtaacgtttgaatcaactttgctctgtattgctcgtcccataaacttacagcagcttcttttaaagccaccgttagtgctgaacctctgccttctttcagggtattgttagctgaactatcatcacatagaatatgttcgaatagagtggactccaactgatcgggtggtagatacttgcatagggcacccaaacaaccggcagcacacttcctgacagtatcgtctggtactcccagatatgaaactagagtagcatggatctgcttcttcaaaggctctgatattttgtcgcctgcaggagttattatacctctcagtgcgtgcatggtcgtttctctaatagagatatcctcggtattcttaatagtattgtgcagctccatgaagagtgggtctgccctttgatggattactatgagatatcctaaagccgtcgcagatttcaatcgaacagctcgattggggtcgttcagagctttcacgaacgtcgtttgtaattgtggcaagaattgtttagcattattccaaccttggctaataaagtagctagcgcatctagaacagcagtcttgacattagcactgaacctatcacccaaaatcctaatcagaggtccagtgatggcgaccacgctgggctgcaaagctgcggcgctggtgactttgatgatctcaccaagaccttgagctgcagcttctttttcgtcgccgtctccgttgaggatcgcttctcggaagatgggcaggatcggagcgatacctttgggtatgcagaaacctggcagcaggtctgaggtgcccttcatgtcggacatggcgtagcgcacggcttgtcggacgtctgagacgtatgtggcttgttgtttgggttctagagtcttagtaacagcattcagagcttcccaagacatctgcaaaacttcccgatctgagtcgatacagagatgtatgagtcctctgagcaactgcggaacgtggctggtgtattgcgctttggagttggcacaaaatccgcagagcaaggtggctgccgctcttctctgatcagcgttttcgttcctagtgttttctaagagggtatctattacagttcgaattcctacttcatcgactacagagagaacgacagcttggcagtattccatttgctgtgcttcttctggagtacctcgtgaagaacccagagtcgtttgaagggccggtaagatccttgggaggtatttgttcaaggcctcgcctgctactgaagccagaattgacaaggctttggtattggcagggggagctgttaactgaggtactaaataaggcagtactacgcgcgatttgattgccatcacttgccttaaaccgtcgagggtccattctacaacctctggattttcatcattcaattgattcaataacgtaggtagaatatcatccaacgctcgggcgccgacagtgaagtgcaaactgtcaaacgtcttagccgcagcttgtctaacttcgggcaatggatcacagagggctttccgaacagttggtaccaatgaattgacgaaagtgagcaccatttctttggaagtcgacgccataatttccgacaatccgatacagactccttgacgttgatccgcttgaggagactgcagacctcgttctaggatcggaatgatctctggaaggactctttcgccgagttttctgaccagatctccgagcgttctagctgcgacttgacgtttgtcgtagctatcgcttgcaagacagccaagaagaagtccaaaaagcgtgggcaaaatttctctcagagttctcggcgtatttgtaacgactaccttccaaacgtgcagagctgcttgtcgtaccatgagggccacatcagatctacccatgtatagcccagccaagactctattacgtctttctgcgccgagggctttgataattgcggtgtgagattgttcggtaccgaagttgtcgtcttcgctggccgtttctgtactcatctttccagtaactccggatattctgtagaggaggtctccgagaagctgtacggaactgtatctaattctccaattttcatcaaagagtcctttttccaactctggtagaagcaacaaaatcgccgaatctgcatagagggtgacaattctttgcccagctttcaaggccgtatctcttacatactcattttcatcagcgagcgctttcagaattggaatgatgatctgcccgatataaggagtaaactcgttggtgaacactactggcatgtagatgaacatcatgatgtatccgtctttgacgtgaggagcaatgtcagtgcgttcggcagtgctgataatctccggcatgagtttgtggagtttttcgacgcccaaacctcctacaacttcagaaagaccttgagcagctcccgatctatctactgagctggtttccgatgttaaagtagtcatcaaccaaggtaagagatcttcgaagctgctttcacccattcctctcaccatagcacctagagctctcgcactgacagatcttacttccggtacaggatccagtaaagaagtcttcaatccagggatgatcgttggcagataaggcatcaaatccttttggtcagtcaaggaatacatgtttccgatgatttgagccgccatcttacgagtctctgtggatctatcgatgaaggctcgttggacaaccggcattatcaaagctagagatggagcgtcgatgaagtggacaaactgagtgtccaaaagagtctgcaaacacaccgacgtttatagaaggatcttgcagcgctttaaggagtacaggtacgatag

SEQ ID NO: 6395 - DNA, 3419 bp, Diabrotica virgifera
  SmartBlast Evalue=0; Info=Vacuolar proton translocating ATPase 116 kDa subunit a isoform 1 n=1 Tax=Harpegnathos saltator RepID= E2B564_9HYME
cggctacgggccaataggggatgtatgtttgagtatttttagtgctagttaaattttactaaattttatcccaatttgattatagtttaaaggtccagtgtttaaaaagatcggcgaaatgggctcgttatttcgaagtgcggaaatgactttgtgccaactgttcttgcagagtgaggctgcttacgcctgtgtctcggaactgggagaactaggattggtacaattcagagatctaaatcctgacgtaaatgctttccaacgtaagttcgttaatgaagttcgccgatgcgatgaaatggaaaggaaactcaggtatctcgaaaaagagattaaaaaggatggaatccccatgctggatactggggaaaatcccgaagctccacagccaagagagatgattgatttggaggccacgtttgaaaaacttgaaaacgaactccgggaggtgaaccaaaatgccgaagctctcaaaagaaacttcttggaactgactgaactcaaacaaatcctacgtaagacgcaagttttctttgacgagatggccgatccctcgcgagaagaagaacaggtcaccctattgggcgaagaaggccttcgggctggcgggcaggccctgaaactaggcttcgtcgctggagttattctgagagaaaggatcccggcgttcgaaagaatgttgtggagagcgtgcagaggaaacgtcttcttgagacaagctgagatcgagactcccctagaagatccagccagtggggatcaagcttacaaatccgtattcataattttcttccaaggagatcagttgaaaattagagtgaagaaaatctgcgaaggattcagggctactctctacccttgcccagacgcccctgccgatcgcagagagatggctatgggtgtcatgacaagaattgaagatctcaatacggttttgggccaaactcaggaccatcgtcacagagttcttgtagccgctgctaagaatattaaaaattggttcgttaaagtcagaaaaataaaggccatctaccacacgttaaacttatttaatttggatgttactcagaaatgtttgattgcagaatgttgggtgccagtactcgatttggagaatatccaattggctttgaggcgtggaactgaacgaagtggcagttccgtgcctcctattctaaatcgaatggacaccgccgaagacccgccaacatacaatcatacgaacaaattcacaagtggtttccaaactcttatagacgcttatggtatcgcttcatatagagaaatgaatccaacgccgtacacgattatcactttcccatttttgtttgctgtgatgttcggtgatttgggtcatggtcttctaatggccgtctttggcgcatggatggtattcaaagagaaacctctggctgcgaaaaagtcagataatgagatatggaacatcttcttcggcggtcgttatataattcttcttatgggttgcttctcgatgtatacgggtttcatctacaacgattgtttcgcaaaatcattaaacgtatttggatccagttgggaaattcgaaacatatcgaaatattttgaccctggtctgtacgttctagatcctaaaactacagagaactatggaggaactccttatccaatcggaatggatcccgtttggcagttggccaagaacaaaattattttccagaattcgtttaaaatgaagatttccatcatcttgggaattctgcacatgttgttcggtgtagtaatgagtctcttaaacaacatgtattttaaggacaagctcagcacactagcagaatttatacctcaaataatctttctcgttttcttgttcttctacatggttatcttgatgttcattaaatggttcctttattatgctaatgaagttgatactgacgaagccttccgattgggtacacgatgcgctccaaatgttctgattacgtttatcaacatgattcttcaaaaagaaactcctttcgagccgcgttgtggaacttacaacatgtattctggacagttaggtttccagaagttcctatttgcttgtgctatgttttgtgtaccatggatgttgttggcgaaaccaatagtcatcatgcgagaacgcaaacgaacacaacagtattctgtaactcaccaacagatgcaatcagctacagaaaacggagacgccgagcaaccaatgcacaacaacacctcacagccaccagcaatgggaggaggcggacatggtgagcacgaagaagaaccaatgagcgaaatctttattcaccaagccatccataccatcgaatatgttttgggatctgtttcacacactgcttcctatcttcggttgtgggctttgtctcttgctcattcacaactttcggaagtgttatggatcatggtattgagcaaggggctgaaagttgatgggtgggccggaggagtagccctatatgtaatattcgctttctgggctgttctcactgtctctatattggtactcatggaaggactgtcagcattcctgcacactcttcgtttgcattgggtggaattccagagcaagttctacaaaggtactggttatggtttccagccgttctctttcgaaatcattctcgattctgcttctcaagccaaggaggaagtttaagaaaactatactatataaatccatgtttccatgtttggtgtgtacttatccaaaaatataccctcaatataatacataagcatgtgctgtagcataccttaagtctaatagaataatgtaatatctcattttatctaaaaaaacagttattgaagttttctttaaagtattaatggctgattttaaaaattctttgaaaattcttcttctcacataaaatcctatacgttttccaattaatttattaattatactgagattatctaatgagtaagatatttagaaaaatttgaaagggctcagtttataatttccaagagtaacgttaatgtttgtctagtgtcttcttttggcatcataatcctggacggatctttgcctgtctagttatgtccttccatttagttctctcttgtgtccttctccatctgtctagtaaaatgtggaattaagaaattacactatgtagttgattacattttaaaagaaacgtgatccgtattataataaacattagtcatgaaatttaatctaataataataaaaaccaatttaaataaggttgccaattttgtgtggcaacaacctaggataatgtttaaaaacatatatatgacgtctcgttttttaggttttaaatcagttttatcagtgtatgctacatttctgtaaacaaacatctagatgttaatctttttttataaattattaactagttcttattaatgcttcaaataaactgtacaattttaaa

SEQ ID NO: 6396 - DNA, 3408 bp, Diabrotica virgifera
  SmartBlast Evalue=0; Info=ATP-dependent transporter n=1 Tax= Aedes aegypti RepID=Q17M52_AEDAE
ttaacatattgttaccaattttaatataataatttagaaatgtcgaaaaaacgtggggccaagaagggaaaaaatttggatgatgattttgaagaaacctccagtattattagcgaaaaagaaaaaataaattcgaaaactcccaaaaataagactactaaaaaagggaaaaaaggaaaggatgactggagtgatgacgaggaaattgaacaaggcaaagaagttaatcaatctgaaccagcggaaagtaaaccagtagccaagaaaaagggcaaaaagggcaaaggcaataagaatgatgactggtcagacaaggaagaagcggatataaaactttcagacagtgaaactgagtcaatgccagtagcagtgaaaaaatccgctaagaaaaataagaaaaagaaagatgattggtcagataaagaggttgacatacaattatctgaaagtgatattgaagaggcacctaaaattgttaaaaagtcagctaagaaaaataagaaaaaagatgattggtctgataaagaagatatagaaatagaaactaaattatctgatagtgaagaagaactagcaccagctattgttaaaaagtctgctaagaaaaataaaaagaataaaaatcaggtacgtgatgaatctccagatattgaggaaatggaagcacacgatgaaggttttaaggaggatgacgtaagcgaggaagaaattgtaaaacctgttaaacaagacaaaaagaaaagcaaaggcaaagaatcaaagaaggatgaaagtaaagttgatgtagaagttaaagaagaaattaaggaatctaaagaagattcccctatagtagaagacaaagtaatagaaaatggcaaacctgaaaaacaaaacaaggagctagaaaataaaaaggataatgatgtagaagaattaacagaaaaaataagtactacgcaaataagtgatgataaattagatgaatctaaagaaaagaaactcacgcataaagaaaagaaaaaaatgaaaaaactacaggaatacgaaaaacaaatggaaaccatgttgaaaaagggtggacaggggcattctgaattagatagtaattttactgtatcacaaactcaaaagactgctggacaattggctgcatttgagaatgcagtagatataaaagttgaaaattttagtatttctgctaaaggtaatgatttatttgtgaatgccaatttattgatagcccagggcagacattatggtttagttggacctaatggccatggtaaaacaacactgctgagacacgtagcacaacgtgcatttgatattcccccaaatatcgatattctctattgtgaacaagaagtcgtggcagatgataatactgctgttgaaaccgtcctagcagccgatgtcaaacgtaatgatttattagccgaatgtaaaaaattagaagccgctgctaatagtggagatttagaaattcaggagaggcttaacgaagtttacagtgaacttaaagctataggggccgattctgctgaacctagggctaggagaattttagctggtttaggattcgataaggaaatgcaggatcgtgctaccaaaaatttctctggaggttggagaatgagagtatctttagcaagagcattgtatattgaaccaacgttacttttgcttgatgaaccgactaaccatttagatttaaatgctgtaatttggcttgacaattacttgcaagcttggaaaaagactctgttgatcgtttcccacgaccagtctttcttagacaacgtctgcaatgaaattattcatttggataacaagaaattatactattataaaggaaattattccatgtttaagaagatgcatgtgcaaaagaagagggagatgatcaaagagtatgagaagcaagaaaagaggataaaggaattgaagtcgtcaggttcttccaaaaaacaggcggaaaagaaacaaaaagaagcccttactagaaagcaggagaagaatagaactaagattcagaaacaagaagaggatacaactcccacagaactattacaaagacctaaagactatttggtcaaatttcgcttcccagaacctccacctttgcagccacctgttttaggattacacaatacaagatttgcctatcctggacaaaaacctctatttgtagatacagattttggtattgatatgagcagtagagtcgcaatcgtaggtccaaacggtgttggcaaatcaacattcttgaagttattaacaggagatctatctcctgataaaggagaaaataggaaaaaccatagattgcgaattggtagattcgatcagcactctggtgaacacttaacggctgaagaaacacctagtgaatatctgatgcgtcttttcgaccttccctatgaaaaggctcgtaaacaattaggaacattcggattagctagtcacgcacataccattaagatgaaagatttatccggtggtcaaaaagcaagagtggccttggcagaactctgtttgaatgctcccgatgtattaattttggatgaaccgacgaacaatttagatatagaatccatagatgccttagctgaagcaattaacgaatataccggaggagtcataattgtgtctcacgacgagcgacttatcagggaaaccaattgctctttatatgtcatagaagatcaaaccatcaacgaattagaaggagacttcgatgattacaggaaggaattattggaaagtttgggagaagtcatcaacagtcccagtatagcagccaatgcagcggttgcccaataataaatataattttgtccttgaaatatgatttttttaaattctgcgatcatgattcgaccttgttttccaaaaacttaaaacatattaaggcttgtcacgcacagggagctatactataatatacacacaccttatatggaatcatctgatatttcttactatttcgtacgaatttaaaaaaacgaacacacgaagtcaaacaatatttattttaaagcaatttaataacaaatacataacaattaaataaaacaataaagtatctaacaaacaaattgaaagtagttgttttaaagtcaatagcatacaaaatttcaatgtaaaacgcataatgtttaaattgtttttattttttttgtattttgtggtagtgtgttatcacctctagttcttatgcaagattcagtttgcgtgggcacgctcctaatcaaattatcaacattttgttgtggtaggttgctccatcttttaagagcagcttgtactagccgtgcggtgttttgtggattatcccggccagctctaattttcttttaagcatatcccacaaatactctataggataaagctcgggtgagcaagcaggccactccaaacaaggga

SEQ ID NO: 6397 - DNA, 3408 bp, Diabrotica virgifera
  SmartBlast Evalue=0; Info=Dihydropyrimidine dehydrogenase n=2 Tax=Aedes aegypti RepID=Q16TK6_AEDAE
aggagttggttcgtatggattttagaaatcactttgtattaatttaatactgttccttatctaaattatttaaatagtataagtcgatatcttggatgttaccataaagttaagtcaaatagaagtacattgtttattgcttgtacattgagattattttgtggacgtgtttttgtgacctacgtatttattatggcgaaagtgagtgtagatttgccggatattgagaatatcttggccctcaatccacgagttagagaatactccaatttcgttccttccagtgccaccaaaaagaacaaggctcattggaaaagaaatttggacaagaaatgtaacagttgttcgtctctggataacaacttttctgatgtcaaacccactactttgagcgagagagcagctctaagagaagcagccagatgtttaaagtgcgctgatgcaccgtgccaaaaatcttgcccaactcaactggatatcaagtccttcataactagcatagcaaataagaattattatggagcagctaaagctatattttccgataatccattgggtattacatgtggtatggtatgtcccaccagtgacctctgtgttggtggatgtaacttacaagcttcagaagaaggacccattaatattggtggattacaacaatttgcaactgagatatttagtaaaatgggtgttaaacagacccgagatccaagaacccctagaccgaaaaatcccgattctaaaatagttttggtaggtgcaggacctgcgtctttgtcatgtgcttcgttccttggccgtttagggtacgatgacgttacaatttttgaaaagaacgatgtcattggtggtttaagtaccactgaaatcccccaataccgacttccagcatctgtagtaaacttcgaaataagcttggtacaagatttaggagtaaagatccaaactggcagatccctttccaccaaagacctcacagtagatagactcctaaaagacgccaaagctgtgttcctaggaataggtcttccccaacccaaaatagaccccctcttcaaagatttaaccgcagaaatgggtttctacagctccaaatcgtttttgcccaaggttgcgcgagctagcaagaatacggacaatgccagttgtccttgcaagcaaagtgccgagatgttgccaaaattacatggaaatgtgattgttttgggagcaggtgacactgcttttgactgcgccacttcagctttgagatgcggagccaagaaagtctttgtggtgtttaggagaggatttactaatattagagccgtaccagaggaggtgtcagtagcagttgaagagaaatgtgaattgataggatttttggctcctcattctgttaatgttaaaaatggaaaaattgtttccgttacattcagtagaactgaagaaactgaagatggcaagtgggtacaagatactgaacagctaaataccatcaaatcaagcttcttaatatcagcgtttggatcaggagtagaagatcaggaagtcatcgatgctttagctcctctgaaactaggacctaaaaacctgccagtagttgatgttaatactatgcagacatctcatccttcggtgtggtgtggtggagatctcgctggagtcgctgaaactacagtggaagctgtgaatgatggaaaaatagcagcctggtacatgcactgtgctttagagggtttaccatcaactacaaaaccaaaactacccttgttccacacggatatagatgaggtagatatttctgtagatatttgcggggtaaaattcgaaaatcccttcgggttggcttcagctcctccagtaaccagtgctccgatggttagaagagcctttgaacaaggatggggctttatcgtgacgaagacattttgcttagacaagaacgaagtgacgaatatatctcctcgaatcgtccggggatctacttcgggtaataattatggaccgcaacagggatcgttcttaaatatcgaagttatatctgaaaaatgtctggactattggctacaaggaataagagagttgaagaaggatcatcctaccaagatcattattgctagcgctatgtgtgaatatatcgaaaaagattggagggaaataacaaaacgagtagaagaagctggagctgatatgttggagctgaacttgagctgtcctcatggagtcaaagaatctggaatgggattggcttgcggacaaaatgcagaaatggtaaagaatatttccagctgggtgagaagtaccgtaaagataccatttttcatcaaattgacaccaaatattaccgatattacagttttagcacaagctgcaaaagatggaggagcctggggtgtctcagctatcaatactatatctggtttaatgcacatgaatccagacggtactgcatggccagccgttggtgtagataaaagaaccacgtatggtggcgtcagtggtaatgcaactagacctgtaggacttagagcagtgtctgcaatagcagagaaaataccagatttggctatattaggggttggaggtgtagaatctgcagaaacaacattgcaatacctgcagtgtggagcgtctgcagtacagatctgtagtgcagttcaaaaccaggactttactcttatcgacgactattgcaccggtcttaaagctctcctatacttagatggaaagctaaatggctggcaaggacagagtcctcctacgtacaagcaccaaaaaggaaaaaatgttgttccagtttatgatgcaaatggaaagaaattaccacacttcggcaactaccaaaagaagagggaagagatacttagcacactctacaaggaatccaaatataacgatgaccaactgctgaaccatgaagacgaagccaagaaagatcttgctaatggaaatggtttacagaatggaaccaatggttttacagtaaagagcgtcaaggatgtagttggacgagctttaccaaaaattggggattacatgttgttgaacaataaggagcaagttgttgcattaattgatgacgatatgtgtatcaattgcggaaaatgttacatggcttgcaacgattctggttatcaagctatccatttcgacccagaaactcacattcctcgtgtcaatgatgactgcaccggctgcacaatgtgtctttccgtttgtcctatcatagattgtattacgatggtaccaaaaaccataccgcacgtgattaaaagaggtaaaattggtactccagtcaaattagttcacgcgttgagctaatctagtctatggtgtcggattatagttttatatttagcaaattataatcaatttatgattatatattatttttgtgtgctgttgtttatgttaataaatgaagta

SEQ ID NO: 6398 - DNA, 3378 bp, Diabrotica virgifera
  SmartBlast Evalue=2E-54; Info=Choline/ethanolamine kinase n=1 Tax=Camponotus floridanus RepID=E2AJ33_9HYME
cacaagccattccactttctttagattaagttgatcgagaaacattgaacccacatatactgagttttaagattccctttcattcatccatctttaaaaaagcttccaataaattcaacaagacatttttgcagaaaacacgtagtttaaactaagataatcaagtatttttgctacaccgacaccaaatttcaactggttttcaacggttttcaggtacctctacacaaagctcccgaatggatctggaacactctcgataggtggttgaacagtttgaagaacatgcaactgaccaacatgccagaaagcaccaaacacatcctggaaaaggtgaatttcgggtcggaaatcgaatggctgagaaccagattggagggcgagaacagtcctgttgttttttgtcacaacgacatgcaagtagggaatatattgttgcccagagatgctgagctggaaaataataatgacgaagaaccaaaactcgtaataatagatttcgaatactgctcctacaactacagatctttcgacatcgcgaatcacttcctagaatgggtctacgactacaccctcaaagaataccccttctacagcgaggatcacagcaaatatcccacagaaaaacaaagactggcgtttattagagcctatttgcgtgaaaggggttcacgagagaacccgaagaagattcttagagaagtggaggtgttcaccttggcaccgcatctcttctggagtgtgtgggcgttaattaatgccgaaacttcaagtattcctttcggatattgggaattcgcaaacaccagactgaacagctatttccagctcaaacagaaactcagcagccagcagctaaagaggaagatggatgaactaatagtgtaaccctaagaaagaccgtcaagaagctttcaaaaaatttttctttggcttcgtccgaggaagaatttctcaaaacatgactgtgaatttgtgaagaaagaagcagaggcggatatagacaaatttcaaaagggggaattaaataatcgtcatcttagatcctcttagactagattccagtcaaatcacatcaatcaaagccttaaacaaatattctaaaccagtcaaacgtttaacgtaaacaacagtagtaaaagactttctgcctacagaaatgtgtacagggtaaacgaaagtttagatgaatgtaacgaagggagggagttgtaggcccccttctcctgcccctctatccgccgctggtaagaagtcacatattgtgatatttttgtggatacattaataatctctaatagtattatattaataattaacataagtacaatgcatattctcccaccaccgtttatcgaatcatgcacctgcaataatctgcatataaactaagcattaggaaaaatgccaaaaatgtgtaattttaatatttgttagttcgtctttccagttttatagtaaaagtaacgtcgagttttaattttgtgttttttatttgttattgtattaataaacaatgttaaaatatatcaaatggaaaaaaaaacaaaatattgtttacgagtataccatatcgtacttagttccgaccaatggtatagtagagatagtaatatcaaagtaaatagactcacaatcacatttattttaccatggacgaccggtttcgctttctataacttagcttcatcaggtctcgggtacagcaaaattaaatgctaaaattactaatactggttgttgtaataaaatttaaagtaaaacgattcgcgattacaatatttacagtcgataattgatatatttggaatcttgtttgtgcattaatctagcattagaaacagttcccaattcaaatagaaaaaatgaaaatatttgttttttatatttataaccataacaatattttgtttttttttcttccattttagtcatattgcgacttaactcaatcgaattgtcacatacaaaagtattataattaaaaaacaattagttaccactagaaaatgttaacttaattatcatgatagtttatcattaatgaggttcgaagtttcattgctaattacacttttactgccaaaatattcaaaaatttatgtgatttaattatttttgacaaaacaacaaacttatttacttgaaatagttgttttattagatttatattcagtattgtgtcattgtattgttttagtcagtcaaagattaggttaacaaaatcttttttccctttattttattcccttgtgactttttggttttaccctactcttcctatctcacatatcattaaaatttaatattaaacgggatttacaacaattttccacaaccaatttctgttacagtcctacaatatatctaagagactcaataatattgttcgaggtgtgaaattccctaaacaagggatcttcctgttttatggaattatcccttgctcatgtaagtacacatttcaaacaatagggccccgctgagctaaatattaatgcctcttagattgtagaactatatattttattttatcctttgagatggagttgttacctacttattttatttgattagaggtcttttgccaaagatatttattttttctcctcacttgtcgtacattgatgtccacaatgaaatccatatacgtttgcacttttacaaaatttagactcaaaatttcattacatttagtcaaagaatttctcgaacgttataatatgttaaaatataataaaaaactcatgggatgagctggttctccaatccgtagtctaaaattactttattctttgcctattacatatgcctaatatctcttttattatctatattagagattttttatttagtttgtgacatggtacattcttgaaccaatcccattaacactttgtacagattttgtgttaacctaaataataatgaatgtataaaataataatagtcgtactgtgttaaatttttttttaaatttgatttaactacacctttttggcaagtttaaatcaaagaaaaagcctcatgataatctagtaccgagttattttttagttcagtacttgacatatagagcatgctccattttggagccgagaatgtttttttatacctttttgttatgtatttaatagtattttttagttttttaacttacgtagatcttgaagaaatgtgcttatatattcgagactgattttactaagttagtagttgacgagttctgattttcaggtagtaaaaaatgattttaatattgtacagttattgtaaataaacatgaaaatctgaacgcatcgactatgatgtctggattataattgcatttttatacatgttttaaatgtattaatgttgtaaaatgaatcctattta

SEQ ID NO: 6399 - DNA, 3365 bp, Diabrotica virgifera
  SmartBlast Evalue=0; Info=Protein purity of essence n=2 Tax= Formicidae RepID=E2AZ34_9HYME
tgactatgagctaatccagttaaaaatctcaagatgtacttcaaagccggtttggatatgaaatctttcaactcgtcgctgtctacccttaataaagtcggtttgacacaaggtgcgtgcatagttatgtattctaaggcatttttgactatttccaaagcgattatgtaatcttttaacgtgctgccgatggcattcttctcgatgctgttggttaaaacacagaacatctcgagtttttgttgatcgtctgagttatgttccatgtcatatttgttgaaatccaggacggaactgaaatggtcaagtaaaatcttcattttctctttgttgccgtaaaccaaagcggctaataccctggttaaatggactagaacggaactgttcttcactacctgctgattagtacatgacagtaaagatttgacgtattcggcactacctagagtttgtgagaactcggtgaagttttcttcggattcactcgttgctttcgacaagatcgtttccataatatctaatagttgttcggtaacgccagtttgactagaatctttatcgctatctaaacaaagttgcaacgtgcgtaaaaatacttccatggacttcaactccggctttattaaaacctcttgacaacgattaactttcacacataacctaaataattttaataacacttgtaacaacggtctagctctggtgacgctcggtatcgctcccaatctagttaccataacctgaagtcctccacaatcggctaactcattggccattttatagacctcttcattatctacatcactttgggatttattactaagactttctacaaattcttcggtagcatcaccaaggagccccctcattctgtacacaatcctcatcggttcatggtcacttccttctgccaaccagatctttttatatacatctttcacttgtaaatctaaactcatgattttgttgttgaccaagagctccataccattgtcgtcctcaagaagagccaccaattcgcaatcttgacagatcttgttcttgacatccctcatcaaaggccccaatccagcttccagactgcaataaggattgcctaacattcggccttgaaggaaatcttcctgttgaggatctttttccagagtcaagaagaactctcctacatcattctcctcgggatatataatggaacaaagacgttcaaagatgaacaccggagttaaaatgtcttgaagactgtatcgttctactgtttgaatgcacactgacataaaagctttggtttcctcttccgtacctgtagtcatttcttccagtagttccaataatttttcctgtgtatcatctatcaacctagttctctgtacaacaagcctccttaaagacaggtatccattcaacaccgctccaacaagtctgcttttgtattgtcttctaatagccacgtcatctaagaaatatgacagcaactccgtaatctgattcaatgcatatccttgtgcaagatctgacgtcaaagttgtctcttcgagcctgtgaagttgctctatctcgatggtgataaggtgcgcgagcactgtaagtacgccgttaacagttaaatactgtttccaaggcgtctccgcgataagttcttggtaaatggcaaggaactcggcagcactttcgcctgcagtatttaactctgctaagaaatgagttagcagatcgagcatgtcgcgcttgcgttcgaaactgctgcacatgatttctatgatgttacatgcgacttgtcgggctaatcgagaacttgggttgaaaatgacggctttgagccatgaggtatcgtcgaaattgagtccgtcgcggatatataggttcttaatgtgtcttctccatttgcggcagtatttttcagccaaatagtattttctgttctcctctttgctgagtttggccgaggcagaggcctcttgtgccttagggaatcttgatttccacccattaaaagtatgagcatcgtctttatccaaaaatttattgaggtcaaccatcgcaccatacggagattcaagttgcacgcttagttgcaaggaaggagctggtttttccttagttttcttagatccaggttccggaattttcattaaactttgcagtatttttaaacatggtaaaatgatagattccatcaccaagggacttctcgatccttcacatgctttcaggaacagattcatcatacacctgagtttcagctcccagcagtcatcttctttttgaaccatcgctgccaagagagcaatttcatgcctaacactcgtacccaagtctgcagaactgatgtggccattcaaactcaaacttatcctctccattaaaaggttgcagagttcttccgtggcagtcctgttatccttagtcagaacgcaaagtaattgtctcacctcctcttgactgtgaatgcttccatttcttagattgttccatactagttcttggatgagtccttgtgaacatagaacttctctggttgtaggattgtgtgccaatgctcttagcaaagtcaagcagtgttctgtggcagcggtggaacaaccgtaacaacgattgttaacgcaaggaaaattgaccagattttcgctaaggaccggtgtagatttcggcaattccatatctctgtgtttcctgtcataagccaccaattctttccgcgacaccaacaccttctgtataattttgctgagctcctcaaacgaagtcttgcactcattacagtattgttgagccagcatttgtattgttttgttcactttcaactgggctccagcaccagcagctgctgctgcagcgccacctgcagtcggtgccgacgaagtcgaaacagcatcttcttttttatcgggtctgtgctctgtaatcttaacaaccagcgattccaaagtaggtttattcgcgatgagttgtttgtaaactctatcggctttttccaaaaaagaatttatactagaaacggtctttttgcgatcttcgtcgctttctataggctccacagcgcaacaaggtttcgccagtaagctaaagtcgaacttagcatatttgcagaatccacatgcatggcacaggaaaggatccttttcgtcgtagttgatagcacgacatttgtgacattggaaaacattttcaccacagttcgcgcatactcctgggttagccggtaccgaagcactacatctaggacactgtaacgtttctgacgaagcctggatgttttcataaaaatctgcgtactcaccattaaattgcaggctacaattggtagaggaaactcgattttaacttcagtttgaccagattgtaaagtaaccttctttgctttatgc

SEQ ID NO: 6400 - DNA, 3361 bp, Diabrotica virgifera
  SmartBlast Evalue=4E-41; Info=DNA-binding protein smubp-2 n=1 Tax=Aedes aegypti RepID=Q17AK8_AEDAE
tgctttgccaactgcattaaaaaatttagattcgtgtacatttttcttgctgttatcgttacacacggcttccgtgtgttcgtgatcaataaaaaaatagtgaatgttcattcctaaaatactttggtcgatcaagtaccgattcgtgatcatgtagaactgggtaaatggtaggtctaattaagttggcaatttctggtctcattctatgctgtatattcaatgtatgacattccacgttattgtcaaccattctttggaaaagacttatatttaatttatactttgtttctatatgataactagctgtactaggttttaactgctgatgatcacctattaaaattaaatgttgacaatgtggtgtaagagcggttattatatgggattctaatacttcggcagcttcttctactataactattggactttttagaacttttaatgacgtattaagacgagctgctccggttgttgtcattccgacaactaaagcttctttcataacgttggtatcttctatgtcacgcatttctgaatacacagcgtactcttctctgaacttagcactcagcacagctttttggttaagcaaatatatttcataaatgtaaatccattgaaaatacaatttccatctatcatcagcagacataaaatgaggattttccaaattaatgtaatctggtgggcctaatttctgtgcctttgcttcttgtaaccgaaactttaaatactccaattggttttctattgtatatagtttcatttcatattcggctttccgcatttctctttcatattgactaaaaccatctttttccattaaatcatggacctcactaccgatcaacatcatttgtttagacagatcgtctttgcttacaagcgcacgtaaaggttctacttctaggttttgaaaaatatcgtctacaatttcatcgggttccctctcattattttcattttcttcgttttgtagaggattatcttcgttatttatattattctgattattttgaacatcatttactggtctctgtctaaattgtctattatcacctccaaataaccagtcaataatatgttctttttgggcttttgcaaaccaagatgtcgcatattctggtaccacacctgaaaatgcaccaaaatcgaccacagtgtcatactttgcgattatgtttagatatccatttattgatccgatatctcgcataaggttccttactacgaaatgcctttcagagacagctcgatttggagaagctcgaactctttttctattccgaagattgtaatcgtttagtttttcactttttgattgtccacctacacggacgatctcatctgttgttggcagcaatccttccaagaactggtccaacgcgtgatttgtaaaacaaattactaacatgggagagtcgctataccatgcttcgctatttttttaacattgttctagcaatttttaatcccagaaatgttttgccagttcctggaggtccttgtatgattgcgaattccctggttagcgcagattgaaaagctttattttgggcttcattcaaaccataaaattgtcggtcaccccaattcagaggccaaaatctggtacgctctatggtataaaaaactggatctattttcaagagatactggggaggtcttgtgtctgtaagcacttgtatgatatatctttccataggaaaatgttcaattggcatattttttaaaacagtaagaacttgataataaggttcaaaataaactttgctctcaaccaacaaaaaagatttgtcatagagacctgcaggtaactccatatctgaactaaacccaacgatgagctgaccatttcctagcaattctgcctttcggtctacaatttttccgaaaagtagtgttttaaacctatcatctgtaaaacacagcaaagaaccaaaacataaaatcttttggaattctcgtattcaaactttgttttcttgttagagaaatcaaattggattctctgacaattttggtcgtttatagattccgcattgagaaacttgacaccttcgtacactttaatatcctgctgtttatctcgtgggtttttgatgtacccacatattccttttcttagaggcattacaaaatcttctctatataagcgatattgtatatctaagtaagtattaacatctggataagggccctccacaatgttctttcttagaaatggagagttttctgtggtaatttctacagtcgatggataaacacttatttctcgaaaatcgtccggtggttcttcaagcttcgagttgacatttggatcctttttttatatttttctttgcctctatttctttctgtctcttttcaaccacttccagtatattagcaaccttgtttttgattccatcagaaatatgtattgaatgactttcttctatcaaagggatactgagtttaacagattttaaaagttttactgtaaaatcgcaagaagttaaaggcaataagtcataataatgttctgatattttgattatattattccaaaaatcatcagtatccttccaaaagtacttattatacattttgtctcttgaattctgaacagccaagagagttataaaagaggtcacttgattggcaaagtcactttcgatcgcatattgtagtactttagtcttcgaagcatcaaaagcggaatcgcatattttagctaacatttttacaaccaaaacaatcatatctgtcgataattgactacccagtaatgttttaaaacctttcttgctatcattaagatctaaaataatatcttcaatgttgtcattattaatcaattcttccaatgctctgaatcccatctgacgcggtttacgcgttctgtttgattcattatattctgtcttcccagggataaagccacgatcattaccagtatcatcgtcattaccagggacataataatgaccacgaccccgtccaccaccacgaccacgttcgggtctaggatcaaaaccacgaccccgtcctccaccacgaccatgttcaggtatagcatcagaaccacgattacgttccctccagttttgattcctggagaaattaggagctggtccaccatcacgatttctccagtttccattacccctcctgcctggatgattatttctattttcgttattcacgttcccattttgttgcatgttgacacaacagtggaacagtgggtaattagaccaacacagtagttaaaaaagtcaatagcaaagacacaattattgaattattgtaataatatcaagtttcgatttccacaaacaaaaacacctgactggactgagactgaacaatgccg

SEQ ID NO: 6401 - DNA, 3352 bp, Diabrotica virgifera
  SmartBlast Evalue=3E-15; Info=Endonuclease-reverse transcriptase n=1 Tax=Bombyx mori RepID=D5LB38_BOMMO
attaattgcttgtgcagaaagctgatgtgttaccgttggtggcaagtcaacactttgtacacaattaattgatgatggctctgttgatggcgaattagcagtggcagttgaatgttgttgactattttcaaaatggattaatgagatgttttgatctacattttatacatggtcttaaagtacattctcgtgctttatgtccatgtctcaaacaattatgacaatccgtgtattcaacggttataccgaccacgaaaatcaactttaaggtaaaagaccaattttgggggttctttatgttttaaaggtcgttgaacctgaatatgaagtttttttttatctagaattggtggaacatgtttaaaaatcaaattttatgcaaaaatgcgaaaaattaattttgatgatttttcaactttacctccctcatattcagattcagcgacctcgaaaatataaagaatgaccaaaatttgctattcacctatcatggtcgctttctcgatttctaagcctcaaattattcttcgattagtcttcgatctttctttagcacagcctattccggacgctatatctgctagaatcaacagggactccaaaactaagctatagctgacgtttcgaacgtgtcatcctgctgtaaattcgtggaatcactgaaagccttgagtctctttagagataactctctcatttggctcgatttcaaaaaagcacaatccaggatcgaccacctccgataggtcaatcttgggcacttccagagaacatgtgaggaggtttcctcctcatcatcacatagacagcattgggccatccgccaattctaataaatgtagatgccacctcagtttacagtggccagtaagcatatagacaaccagttaacatttccttgagtttagatggggaagttgtgctataagacttttgggcacttcaagcaatggttcgggtaccagagataaagtgaataagccccatcttaccagggcttaggttcattcgttcccttccacaccggagtgtcccttcttcttctttaatcaggcgagactccttagcctctgatacttggtcgaaggcctttgtatcataccttgtttttccttaaaatctaataaattctgttgcctcaacgaaagccaacagttttctttttgatagtctctgatgatctcttctggttcaaaccttagttgacctgccttacatcaattttgcaatggcatagtatgtgtatggcaagtctcttcttccatttgcactttctgcaccatggttcattcaccttacctagttcgtataggtggtgtcttaaacagcaatgttctgtcaccatttcagtaaaccgttcaatcagtgttttctgaagcttttttttctacttgttagcatctttagtgatgccacagaaaggctctgggccttcaaaggtttctcttgagccttgttttgccaacatatctgctcgttcattccctttcgcccctttatgacacggcacccatattaaagacacttaggttgtcttttgccaaaaatatctttgcagttcctcaccagttttgatttcgtgagtgtcccttattgctcagtgaaacatcatccagtgctctcttgttcttctcatgaaccagattagagctaacttgggtgctcccagcctttagagccctagagttgcttcacggtcagatcagaagcatttgatgttagtcgttttttctgaaaataagtttcaaatttgattttttgcaacacagagtctttttcttagatttaacaaaatagtatggggctgcatgaaacgttaggttaaaaaaaatacgtgatattataaatataataatctcatactatcatgtatgcggggaagtcagtaaatcattgacacttggacattttctcaaattgtcaatctgcagagttgctgtgggtatcttcactaatcggtccttaactataaggagaaaataatgccaaacagaaaagttaagtactgtgtaagcaataatgctttgctttggcgctattgcttttctactctcatatatttacaaacttaaaatcaaatctatcagtcggtgtggcattttcatattttatcattgtatcagatctcaccttgtttttaaatatcttgtgtttagtgatttatactttaattctaagtttattactatgataattttaactctagtatgtagtacataaccattgtaagcattttacagaaatcagcaacctaacctattattatgtaccgaactgagtgtataattttaaagttgtcaaatgtcaaacttaaacgatagtaatgataatatactgaagattttaacttttaaattgaaaatatttaaatctgaacattaattttgagagttcttaacagcagtaataatttttaaaagcagaaaactaaagacgtttatcattttcaaaacaaattgcaaaagagaataaaactagcaccacacaaaacgatgccttaatattgttttaacaaccttcttcttctctagatgccgtccccatatatttcgtcttgcttatgttgagcgataatccatattattcacttcctgccgtcacttcattaagcagtatctgtaggtcttcatgtgattcggctaaaagaactgtcatctgcttatctcaaattatttatgagcatgcggttaattctaatgcctacgttttgttcatccattgccttacttaatatgtcttccgagtatatattaaataatattggtaaaagtatacacccttgtcgaacacctctttgtatttacatttctttctattttaacaaccaagataatacaaaaaaatgctcaagatccaaacgaatttgttttgttaaaagaaagtaattaattgatcttatttttgtggtgatttttagtcagttatttatgattattttgataatattgtgaataatatatattttgcacagtttaattgaaacgatacaaatacatatggaattaaaataattaagatcacaccaaaaaatcattaggaaccctgattctgtaagatgctttgatttccttgtatcaatcctcaaatctatgacattcctaagagtgctatcgatagtcacatatattttttgcatactaaatctattatatttaatttatagtgcactatttttccaaaaatcatagttataagtaaacaaaatcaactttttagatgtccgtaaagccggacgaccattcggtaacattaacgttgttgctgattgtaagtctagtaagttagtagtcttatgaagggtatctcagtataatatgaacattagtgtttctctgtacgcagctaacaacca

SEQ ID NO: 6402 - DNA, 3336 bp, Diabrotica virgifera
  SmartBlast Evalue=0; Info=Importin subunit beta-1 n=2 Tax= Formicidae RepID=E2BR28_9HYME
catcagtcttgagctgaaaggtctgctgacgcgcactagaacagacactatttacaagcgttcattttgctattttatatcaccaaacggttccggagttcctttatttgcactgcacagatagatgatcactcagtatcagttaatctgaaagttattatgacaaattctcatgttggatgatgattcttgacttgatttttaaaatatacctgagaccggccacgtatgtatgtaatatatttttaataattaatcaaacataatttaaaacgagtttttttgtaaattttgaataaaaatcaacatgaaaatttttttatgatgatgtagatctctctttggtgtttctaaacagccaagaagaatcagctagcagcagccgcggtgtttacggccttcagcttctttaattctttaacggcccaattggccaaagtcttagtcctatttactcgactacgtctaccttgtgctaacatttcattaattgggtccagatctaagaattgaaccattggagctccgaaaacattacacatatcacctacaataccagctgcggcagctataatactatcagaatgttccgtatcttgtgctacgacagtaataaattgaacgataaatggaatgtggggttcaagtatcaaaacgtcaggatgtggagtgggcccgtcacccttaagcccttgtatgatgccggtataagcttctaaaactccctctcttaggtcgttaagataatcgatcatgtcgaagtcgttgcggtcgacttgcgcctgcgaagcctgagccaaagtggacagaaccacctcgaggtacttcttgaactcggagccgatgctgagaccgatgtctccgaacacgcccaagatctcaggcttcacactacgatggactgactgatcgcggagattttctagtaataaggtcattatttcatcacagtatggtagcgctttcagtttgagagctctgaagatgtcgccggttaagcccactgccgtaacgcacacttggtattcttggtggttcttcaatccgaggtagaggaacggtttgaaggcgtccatgtattttatgaagttttctcccaggacttcgaccagcgtcgagacggccataatagcgtcttcttgaacacctccactcttacatgaattggaattgaacatggtcaacatggcggtcattatggcgtctgagatgtgaggcgcatcttctggggtaacttttctgagtactgactgaagagtggcacacaaaaggctctggagatcgttgaattgcgatctatcgttgtggctgcttatgtgagtttccatctgtaagacctgatgtaatctgtccaaaatgaccattgtagtcttttgcacggtgacatagcaatctttgggtgagtttttcaccatttccatgagggcttcgtaggctgcaggtcgtaaattgtgttgggcgccatcgggtcgatccgttgtttcaagcagtctttgtataatgaactcgaagtattgtgacaagacgtaagtatctggagtaccggtttcttcattaacgtcggcattttcgtaagctgcctccaccaatccagagaacgcccaacagacattggcggcaacacgaggttcggccttgaggcctgtgatcaagctttctaatagcggtttgaggaaggtttcgttgatggccgcctccggaatgatttcgcaaattctgccgaagttccaggcggctgtgtctcttacgataacgctattgtcgtacatcagatctatcaaggtcggcatcgcctgttcaacaagcggtctcaaagtagtactctccaaaccgcccaaaatagatccgaaagccatcaaagaagcatctcggaatcgccaattatcagacttaatattttctttgatgaagggcagaacgtgtggaacgatttcgtcttcgcaacacgtggcgagaagcattaagcaaacgccggctgctttgcaaggattccaatcgtcttcgtcgtccagttcttcctgtttcgttaatttttgcagcagaatcggtactatatattgtagggcacctttggcgtagtgccgtgaacatcttgtaggtggtcgacctgcttcagtggcttcggtatcttcgatggccaaatcaacctcttcatcactaacgttagaccagaattcgataccctgtagagaaacagcatcgttttccgacttcatggcttctagagtgatagggaatagagcaggagccatataaggttccatgtgttgataatacaaagacataatcttaactagacactgcaaagcggccactctgatctgtgaatctggagactgcgtggcttcacagacgacttccatgatatagttccgttccgtcggttggtcaaagttggcctttgtgaattctagagagtttagtagggcctgtgtagctgctaaacgaacgtggttgctcggttccgaggctcgcattccatgaactatggctgttaagatgtcgtttgattgagatactaatacgtccgagtcgatttcttggcatatataaccgatagcttctaatgtggcttccttttgcatttctgtggaatttgcatggcaaacattgttgaccaacgttgctatgagatctggccattgcccttgtggtagttctgttactgcgacgtatgctacgcactgagctgcggatgatggtctgcttgtttcggttccaagtgcgcacacaacgttatttttaatatacccccgaacgtcctctgggaaagccaaccaccgttgttggtaggtggtctttatgttggagtctttagaggtgagttgattttttaactgcaaacctgcggccattcgggccacagggctatttccgccatgtcttaatatatctgatagagttttgatgaattctagtaggttagtcactgcagcttgttcgagaaacgatgacgcttgttccaattcatttttatccggtgaaactgttttttctaggacctggatgagttgtatggcctcctgatgcattttgaaactattttacgccttccaaaagccaagaattgtatttatttgttctagaaaattaaccggcttcacaaaacggttctacaccacatgtaatttcacggcagtctagacaaatttactgccttctgtcaaatcgacttgtcaactgtcactttaaaaactattttgtaaattgaaatccttcaaatgcattgatttaaatatttaatttggtattaaattcggaaaacatcgaaaaattcaattgtttttactagcaaggatacaataagtcgtagaattaacaaaaaatagtatttgc

SEQ ID NO: 6403 - DNA, 3334 bp, Diabrotica virgifera
  SmartBlast Evalue=1E-171; Info=Nucleolar protein NOP5 n=1 Tax= Culex quinquefasciatus RepID=B0X5E5_CULQU
aagataagaacgttaaaattcctatttgtttgaaaaacaccctcaaaattgcttcgaggtttacagtatatacggtttaaaaaaaacagaaagaactaagaatacaaaaaatttaaccaaaatacaaatttcatcaaaagtctagtgataaaaggattacaaaacaagaaataaaaaatgtatgtgaaggctatattgaatgttgaaggctttatatgatttccaaagaaaattcttctaaagtggtctaataaatcctgatcaaaaacaaggttaaaatcaagttaagtacttacaacagatctaatcacaagaggaacatttagacagcttcaaaagtttgctatatataatacgacgtggaagtggtactggaaatatgaataaaagttgaattattatttcgacaaaacactaaaatggcattgaacgctgccaacacgaagagtcttcattaaacgattttagctattcaaaaaaagtgctatatttatatatccagctaaataggcacgatatcacatagtaaccagcaagcaaaccttacaaaaccaaaaaaacactaaatatgaagtaactgttgcaaactgtgatggaaatgaaaaacacaattaaaattaactcaccattttatgttcaccaaataaaatagcatggtttaccaaagaatgatcagaatttgaaattaatctgagcgtacaaaaacatctctcaaaattccacatcaaaacatggttaacgcctttaagatcgaggccaaataaataaccgtcaaatagtatcaccacccaccgtcaattataagtatttacgggtgatcattaatgattttttgaaaacgatttccggactggaaatcaaaatgtcaaagaaaacgtgtaattctcatacaattgtggtttaatcccatataaaacaattctgagttaatcatgccgcaagaaaacctttttaaatgtagttgagtcatgaagtattcatgttctccaacagagatgaacattgtattagtccagttccaatttataaaattggttaattattttgttcaaaatgaacaatgaacttttcacagctgctatttcgtgatgatataatttgggattagccaccttctggaaaacaactctgacagctgatatattacctttgatagcagccgcagctgcagacttaagacaaggaaaaaataattccagaaaacaatacatcactgatttcaatgtacgacttgtacctaaaatccatagaaaatctgaagtaagcattagatttagatgatacaagcatttttatgaatttaaaaagtattataacgttatcatgaactgagttatgtaaaacgcataaaacattttctacatatttttctgaaacactgatatattctacaggtttatcttactgttcaatgacagaagacttgcttgtggaacagttttttactcagtgtaggtgttgtaaacgaaggctaagtttgtaattctattattattaaaaaacttgaatgctaggcagttttgacttttataccatatttacaaacataaaataatttgtaaatttattacaggtatgtatttgtaaaacaatttgtaaagttattcgctttctgactgcttctttttcttcttctttttctttttctctgaagttggcgcttcatcatttactgcttcttcttgttgttcttcttgttttactttttttttcttctttttacttatggattcatctgctacctcttcctcaatttcctctttaacactttcatccactttttcctgttttgccttctttttcttctttttgggagtttcttccgcttcctcaggctctgcttctacttcactcttaatcttctttgctttctttgatgaacctggagtagatgcatcatcgagaccaaatccctccgattctgatctcttccttttaccaacagttggtaatgtagaatctgctgcatcaggatattgttgtatttcactgataccatggtacttctcaaacttggcttttgctttgcctgtaccacttattcttctaatgtttccttcctcaaggatccttagcctggattcaagtttagccttatgttcagctcccaaagtaaatgttccatcttcaccaagagcatctacacgagtagcaagagaagctttagcagccagcattctggacatcttacccttattcttagtactagactgacctaccaactgtgtatggtatatgagaccatatttaggagtatctttcttagtttttagtgctctaaatagagctttctcagctccaagaatctgtacagtggaagcaggatgtttggctaaattaataagagaaccagcatgggatataagtcgggctcccaccaattctcctactagaacagtaagattaggtgcaattgccatcattctagctttcaaataatcatagagctgggccctataatttgataaatctaggatctggtcacataaattttgaatattaaatatatcttcctctgaaatttccgtacccattgaaatttctgctgcttctttaactttttcttctacttcttcaggtaaaatatctgacaaatctgaggttgctgtattttctctagtaccaataattttaacagtttttgcaaaagctacgttatcagttattatcttgccaagttctggaaaatgccaaccataccactccctacacctcataatatagttgtttaattctttgtctaaatcatctaataaagacactgcttgtacaatcatagtatctactttatctggagaaaatttcaatttatacctagataatgaatgggctaaacccaatgccatagcagtcatttctttttttggcaaacctgacagtaaactgtctaactgtgaacgtatacatctcatcaactcttggactgcactgttcgaaagacattgtaaactgaatttatccttaattgcagatcccaacttagcatcagccactaatagttgctcttgaagatccttatcaacatacttctttaaaaccttctttaggctcttggaaagtttaccttcaacagcagctgtggtagcagctagagcctcagtagtatcaccaaatttttcaaaatgtttaagtttcacaactcttccagcattttcaggcgtttcaaaggcatggtataaattatcggtttccttgagtttcttctcatctaaaagcttgaatatagcgtaaccagcaggagtttcaaaaaggactaacatttttctattttataagtaaaacattgaatataagaaaacaaaattttggaaaaaatccacaacacaattcaacc

SEQ ID NO: 6404 - DNA, 3313 bp, Diabrotica virgifera
tcacagtggtcaactgtgaggggtctagctttggtggattcacagagatttttcagcgctgcctcttggactattatttttaatataactatccatcccaatacgctaaaatgtaaatatttgtgtgaaagtttattacattatcccattattaaaatttatccttctcgtggatatgtgtacaatttttctctaattcagatgtaaaaatgtttcgaagatagattttaaactcaaagaaatacccaaagttatagatatggcgatcgataacgaaattttcttaagatgttacttgtcttaaactctcccctacctgcacaaatgaaatcatcaaataaggatattaatcaacaactgtgtgattctaagataataattaaagttaaatttttggttaaatgaatgtatagtatcacttttttgtggtgttttctctgcttgtgaacaaaatacggttaaatgttaaaactgatcaaagacgagaagaaaaaacaccttgtaaatattattactattgtgataagtctattgaatcaaagtttatattgtgaagataatgagtcttttgtgaaatacatgttggcagttcagaaatttaaaaaaatcattttaaaattatttacagttgtattttgccttcgtctgaaaaatagtcaacagtttagaaaaaattacagtactttacttgtttctgtaataaaataacatctagttcatagtatttgcagactgttttaatggtattaagttctacaaaatatttattaccatctactccgtccaattcattttattactttatatttgattagcatgtttaaaaaatagaataaaatatagttaatcgataattctcgatcaaaattcaaatgttgaaagattaatcatgacaacttatgttacagaaacaagaggtattcattgttttcagtgtagatacacctctcaagtgctctaaacaattcaatactgtctcggtagttctctacaaggtcacaatacacctctaagggctctacacaattcgtttgtttgtacgcacattaaaaaacgtatttctgtccgctttctcggcaacaccttttcaaagagtaaaggcttttgttgccggtgttgaggaggtttttgtcctatccaattgcaccttttcaaatctgttatggtcctctatctctagattagatgctatagtctgatcctgtttaaaaggtctaataactttgaggctcaacattgtaggtgccggtggcttttattcgcctaatgcaaagaaccgcgcattttccaggctgtcacactgacataaaacatggactctcatggacaactgaaacatggactctaaaaaaatcgatagaagatcgaagcctttcaaatgccgggagagaacacagaaccaacctgtcaattctggaagagtttcctataagagacaggctatgtttgtttactagcaggtattgaacgaaacaagtaataaaataaaacacaagcaataaacactaattacaacacctgcttataaagtttatcccttctgatggccaatattgagagaaagcggaatttctccataagcgcaatacaataataatacacaaattcaaattggtttgttgctaaatatttcaaaaaacaataaaggataataaaggcaataaaatttaggttaagcttaccccgtctggctggagacacaactaccgaaaaaacaaacgaacgaattcgatgttacatgtctgtacacattcgggttttgaaggcatctcgtcccttatctcttagggaaagaatttttggatttcaagtggtccgatcctcttcttcgcgacacatgtgaatttcgataacatgctcgacaggaacaacaccggcgtcggcaagggaaaaaagggacatgattccgaactatttaaacaaccaaatcaattttatgggatttccaacaggctatttaaaaaagtaaacccagcctccctaggtggaactattggtagtagagggaaagactcgtttgattcttaaatctcatatggtgtatctctcaactaaagtcaaatcaaacagacttgaatttactggagagatacaacagagaatagtcttcacagttttgggaaagtacatcggataccatttaacgccatctttacggacttaatatttcttttcattattctgctcttttccgaacatttcattatatatttgtttataaacttcttcaccatactggcactaggttaaacaactgtaatctattagatttacaaaagaaatagaacattaattttcaatacgtcgctttttcattataatgtttgccgcagttgtgaaagaaacaggacgagggaaataattctggacgagtcttatagatccagaaaacaatgttttattacaaaacactggccttaaaagtattattgattaaggacactagtcgtgtcttcttcttcttgtagttccttctcttatcggaggttggctatcatcacagctatccgtaccttattggcggctgcgctgaaaagatctactgagctgcgcctatacatactactctcttaggtttctcagccaggaaattcttaggcttcctatggatcttttacccctaattttaccttgcattatgagccttacaatctcatatttcgcacctctggtaatgtggcctaaatcttccagctttcttattttgatgttctttgaaaccctttctaaaattgtaaaaattaattgaagttttcttctaggaattgaattttctacctaattttctgcatactcgtacaaaattattattattatttatatgatagccacaggtgcagtacatcaaaaaataattaatatacattaaaaaactgattgcgtaaaagaaatattaattattactaaacttgttgacttattttttcgacgattcgttttgttacttgacattttgtcagcctgcaatattttcattaaactttgttcaccgtttatattgataaagttattttttatacatgtggtctcaacactaatctggtttttagtgggatcattctgatttttttacggtacaattgttacgattctataaaatttagaccaacttactaataaagtcgaaattcaatatgattgtcaaagtatcgcttaaaaatgatagactctggaggggcccgagacgagagacgagtgtagttcaatgacggcatgttaaaaaaaagaaaataacggctaattatatagccgcttcgcatcaggtgtttactaaatacaaaatgtctttcctgacgatcctattgaatttgaa

SEQ ID NO: 6405 - DNA, 3313 bp, Diabrotica virgifera
  SmartBlast Evalue=9E-31; Info=Endonuclease-reverse transcriptase n=1 Tax=Bombyx mori RepID=D5LB38_BOMMO
cagtgtagtctgatagcaaatacataaacctaaagaagctgagcaagagtgtgttgtgtgagagatacttttgaatgatgacttagaattggatatttttaaaaatgtttaatttcacacacacacttccaattttactattctttctttttcatctaaaacaatactgattatgttgtctttactcttaatcagattagcaaattatttgaacagctcttttgcaacatacagcgttgccagtgcaattgactgcaatcattatcgactaatctcttgaaagttaagaataaaatcgttctgcgcaactaaaacttgatgtttcatgaaatttaacagtgatatctaataattaatgagaaaatgccgttgatcaagcctatgagcaataattataataaattcagttctaaatttaccacttcgcacccgttgtattcatcacataagaattttattcgtttccagatcaatcctgattattgtttactattactattttattattttctaccggtactaatgatatttgaatagaactaaatagatattgtacatcgtaacaaaaatttgagtacttgatagttaagtacttacatttagttgtctacttacattaaagcgcatacgagtatgtactgtgtacgtggtattggtatcaccagaggtaccacttacttgataaactttcctttgatacaatgttacacatatatttaatttatatatacaaaaaacaatttatcgaaggcgacagacaatataaaaaagttcaaaaatgtgttcacttccgaataattttagctgcacaacctatactgtgttcatctaaagtaccttcctctaactgttgtctcaacaacaacacctcagttgattaagtttttggtaaacttacactgcgaagccacaaaaagattcactctacgaaaaaaacaaacttttggttaactcactctacgaagaaacaaacatgttaagaaatagaaacggtataataatcataaactcagaagaaaaacataaattggaataattacatatacaatacgtttagttttcaattagatataggcgaaggaagcgctaaaatcggcaacattgctattccactaccgttgtgacgaatggcgaaggacagcagaggacggtgcgactgagttagaattggcgagaatcaggtgcatagcgtgggaagagggcaccgtctcgtactcgaaggagcgcagtgttgccatttatagtatgtatatctaatttaaaactaaacatgctgtatcagctatacaatgataatagaccaaggattgggtcttaacacttttcggaagatacacctgatgagataaaacaagccataaaagtggcaaagcagtaagttcagatgagatttattgcgaacatttaagaatactggacgacaaatctatatctattttggtgaacctgttcaattgtataatttatagaactgaaataattccaaaatattggctcatcttcacctttctaaccctaatgagttatgtatcaaatgtcttcctaagaattatacataccagaatttacaacaaatgtcaaagtgaaacatcacatacacatttcggatttcgcaatcttttgggaaccaattaagtcttatttgcattgaatgtactgggacatacatgaacacagatgtaaaccaagatctgtatgtctgcttcatttgctacactaaagaattgacaatgttaaccatgaggatctactggaaatcttgcaaaaactaaacattgattatcaagatattcaaataatatcaagtttatattgggctcaaacggcaagaataaaactcgaaggctccctgtcagaagaaataagtattcagaaggatgtacgacagggatgtattctcttgccaatgcgatccactttatactctgaatatattttctgtgaagcattagaagatgcgttagctggaatagcaataaatggatttcttgtaaacaatattagatatatgctgtcatatcaatatcagaaaaaccaaaatgatggtcttttcacaaaaaattaacaattgtcgacaattagattttaatggagaggttcttgagctggtttcgcgttataaccttataacgattgtcaacgagactaaccaacattccgaagaacttcatccaagcattgtataagcataagctgcgtccgtgcttgtacagcacgagcaaaatgaaaaagtcgttgacagcaaagtatctttctgtgactaagagtagaatggttagtcgttttgtgtttttcaatgaaataaagatacaataccttgccagcgcggcgagaggaacaaaatatcgggttcagagaaagattttattaaaacgtagagttggaaggcggcgaatgtaatagctgcgctatctcaggaagtggtttaattgctcgtcgaaccagcattttagagcagctttaaaaagaatataaatagtgatgatgatcgccaaccttcgaaagaaggcagcaccttaagaacatgtgttttccattccatactcctctacggtgtggaaagctggacaggaaatccttaaaaagatagattcctttgaaatatgggtctacaggtacgctcttagagtctcctggacggatagtcatacaccgggcagttctaaaagactgtatattgaacctgaaattatacagcttgaaaacttgagtttcttaaccacgtctctagaggcatagagttcctatagcttataatgcaagaaaaaatagttaaacgaagaagcatgtgacgtaaaagaatttcttggctgctaaatcttcgtaaatggttcggaatgacaggggtcgaattattccgtgcagcagtttcgaaaatgaaaatatgtagtcttgttgatcagcaacctccacaggagaagctgaatgcaagaggcaagaagatgtaaggaagcaactctttttatagttgttctattggttagtcacaaaattgtgatcacaatataatttgcacgtatttttacgtctttaagagagttcgctacttacataaaatattggacaattttctctagcttcttcttcatttcgtaaaccctatagtcatgaccttcgatgacttgtttttaaatagtagttcttgtttgcttattcaacatgtataaaaatatgattttcctcgaaaacaacttgtaaaaggcgtattaaccattataaatttttgtttgcgctagacaatggtatctaatacctcctttctggttcaatttttgtagatgttggaagcaaacaagaattactgaaataatca

SEQ ID NO: 6406 - DNA, 3308 bp, Diabrotica virgifera
  SmartBlast Evalue=0; Info=Endoplasmic reticulum metallopeptidase 1 (Fragment) n=1 Tax=Harpegnathos saltator RepID=E2B4B7_9HYME
caaaggcttttttgatcaaaaattgaatgatttgaaatggaatcacccttcaactatgcgtatgaattttttgaaatttttaaatggtttgcaactcaccgaaaaaaaagtaataaaatcgaaaaaatggtgtttttgaggaaggggtgggggaggggtggcaggaattgtgggagtaaggggctttttgcttatcttaacgacgccgacgtatccttcatatcgggggatcttaagggtaaaggtgcagaaataacaaagaagttttcagaaagacctacaacaacgttgtaagaatataaatcaaacattttacaacgtgagcttcattattttacagccacacctcgtattatctcttcaacgtccccgtatatattaaatgaatgacttccattaaaattccagtattaattgttaaatgatatatatttcctaaataatccacgattcgtacgaggccgtccaatagtttatagccgtccatgatggaaattcgttgatgaactttttgaattctttcgtagctttccccggaccgaagaggtagtgggatgtcactgccaggtccattataggtcctttgtgttcactcggtaccttaaaatctattgtaactgttattggcacaggttccagaccgtaggcataatagatgaagtaagtttttcttccgttccaaagaggtccggccaaaggttcttgcgtgggtagactccaatcggcaatttcgacaccaggcaccggagaaatcattactccaatatgtgtaggaccatcaactctaatagtaactttttcgccgacgccagtctttgttctattcaaaatattcatactgacgggtgtaaggagcaccggtggaggtcctggcacccaatgcgttttccatatcatcgtcagaacaggtacaaggtacggtagcccgcaatacaaatagctttcacagtctttggtaaccaactccgcattttgcatttcacgaacgtgtcggtccaccgtatgtggactgttgacgtccatgtcggcgatccaatagcccgtggactcgttctggatttttcctgttacatcgtggaatgttctgtgagtgttcgcaatcataaacctttgcggggctaaagctcccggttctccagagtacgggaatcctagaggtgtaagtattagtagagccaacgataacagaaacagtccggtcaacagactgaagatcctttcgatccctctcaccaatatccccaagggcactacgaaagtgaataaattagcgaacatagacgtcactaggacagcaattgcgaattctgcgtggcttcctgatccggctctaccagttattggtatgaagaggtacagggctccgatgataaggtagaagcactgcacgaacggaaggccgaatacggagatgtggaggaggagccattttgaacctctccatctagtaaacaatgcagacttcaatatgtttcctaaagctgctgagaatacccataacagagctataaaactcgaacgcaatctaactgctacacctagcaatagcactagagtccatagtaactgatatgcgtcataatataactgaaataccgtccaaggcgacatctcaatgtccttattgtacactttggcgtgatataatactgttaccatggaaatgactagagtgggtatcacgtacaaaaagaaaatccataaaggacgggcgtaccagctcatggtacgacctaagcaattgattaaggcggcgattcctaatgtacttatcacggatattacccaagaaagaaaaactactaccatacagcctacaagctttctggtgtatttttttctctttaaaccgtcggtaacttcagcacttctaaagtttccgtaaatcgaatataacgaaaatatcacagacgatatattaactatatcagcgactagcataggccatcttataacgaaggctcctaaaaaatcgaagaatacgagattccccgcttggtatttcttcacgtcagagagttgatggccctgtgccatgcctttggccaaggccaggatgttgtcaccggttctctggagggaaccgagggggacgtattccacggagtcgaatttggtgtggtagacgtatccgttcgctgaccacgcgaaatccaaacctgagaggtttccaaaatccctgaagatcctgtaatcagtatctccgggtattatgccactttggaaaatttcttgcgctaaggaagaagcataggggtaaggcacttcttcggagtaagtttccaagatccaaggatgattgggaccagcctggaacaacacttctcttcctccagctccacatgcttccaagtttataaaagcgcgcacctcttttgcccatttatgttgggtgataaacccgtgcgaagctggcatgaaattttcttctccgccattaaataagaatatgatgttatgcctcaaaattttcgtcgatttcgagagaactcttaatatttctagcataacggcacaacttgccccatcgtcgctagcacctggactgtcgactacagaatcaaaatggcagttaacaagcaaactatgtggtgaattaatcctagatccgatcttaacaacaacattttgtacgtcctggtatacattagtcattccatcgagaaactccaagttaaaagcacctgacgccttctgaatgtctaattctatcacatggttttcgttggcatcccgtatgatactgtcaatttcatgctttaacacgtcgactgccagaacctcgttttcgtagctgcccgcaatccgagggccgatttttgttaaattttttaacacgttgtacgctctttccgctatgaaagtgtctgggtgtttgtgttcgtcttctatttttaacgctactggtagttgtttttcgatgaatatcactaatgaaaatactataagaattagacataggaggcctaagaagtggacgtagggcataggacgatggaattttgacttttcatatttgttgtctgtgaagattctagccggtgctttttcgttgaatctgtttcttaaaagcgtgttcttggacatttttgtaatttatcacactaaaacttcacaaatcctgaatgaattttatcgataatagcgataacaaattcactgtcatttcactgttattaataaattgtctgtataaataatctccacgttactaccatttaaattaaagtaagaacatggaaataaacattctgaaaatcgaaatcaactgcattgtaccagaaattcggtatcacacttcagaaacg

SEQ ID NO: 6407 - DNA, 3274 bp, Diabrotica virgifera
aacatgaacactattctttttattaaatcaataaatactttgtataaaaaattatatgtattattaatgagaaaatacatgaaaaattgttggtgaagtaaacatttcaattcatttactctatgaataaatatacggtacggtactgaagacaaatttacaaataggtaagtactacaaatggtaactttaggagcaaacaatcatacatagacgttgcaagtacactgttaacccttaaccggagacgtgccgtctgacagactgtagcataaacatattctaaagattattgcgaacaactccacccaccggcatcacgcttcatatattcctaatactattggttgcttagcactcgcctgatttgaaaggagaaatattcactcctttcaaaattatcgtaaaaattcagtttttaccagtctgtcagggggcacgtctctgtttgtgtgactaagttgattacgtaaagtgcgtgttacagtacattttttatatcagtttaagttgtaagtactgttttctagagttataacataaaaaatgcatatttgaaatatttccttttttctgtagcgatagcccttatgtcattactatcaataatctttccacttttaaaatttatttactgtatcgtatcatcaacatttatgtatacgtagttattatctgcctgagaggcatgtctccggtcgtgtgctaaaaagaggtctctccagttaagggttaaaatgaaacaattataaactgtttggtttagaacttgctaaacattttggtgtcttacctattgtatataaattattttaaataaaatacaaagcaagaaatgatcaacaaaaaaggttcaacaataaaatataagatcacaatttatttactaatcactacactttatcacttaatctactgcttcaccagcaaatattttatcaaggagcccacgcgcaagttgagacacagtttgatgagatcaggcgacagagccttgtaagttttccataatctaagggccggtactttctgtctcgattaaaccccggttagccacccctttaaattgttcatcaccaccttcattaaattacagaacaaatgaccgtcttcatatccgttataggtatgggtatgaaatgttaacgctctgttaaataattcacctagacaatgattattaaggttttactaggccatagcgcgcatgcgcagtgtattgtaaacaatattacattttatgtctttggattttcattcataacagcgttaaaacctttcagcgccctctgtgaaatacgagtatactcaatatctcttcactaactaccaaagggaataatcttgttcataacaagactgttttgtttatattatactgtattttttgtgatggtcacaacttatcatcgttgaatatgacagaaatgctcgaaattttgctttaaattcgaaaaaaagctgcccctatgatcttctaaagaataaaaatattcatggctccgaaaccttctagggactggcttgtcagcaaatgaataattgttacattccgcgcaagatcgagaacagtattgacaaattgcgaaggaagcctaaaatttgagcatggtactaaaataggattttaaaaggtatagaagttcttcttccattggtttgattggccttagggtatagaagttacaacggagcactttaccaaagaaaatcatagaaataaataaataataaataagtttttatctcttattttgtagctattttcattctttattgcttaaaaatgagatttagtaggaaatcattcaaaacataaaacatacgttttgaattgggcgccaaatattttagtttatgatcccaacacgtgtggcgctaaaaattctcttttgggcgagcaactagggaaaatgtctgaaattgtaattaataaaaagcgtcaaatagacaattcaaacgaatatgacgatggcattaaagaccattacaaaaacagaatttcaacactggtggaattggcaaatcaacaatgcctgcactacgcatctagctatttaaactgttgcgatcatttccgcatctagtgtttattagggctaaacaattatcagtattccatttcctacatgatgcaaccatttattttgtattttgatgaagatgaaatgataatagtctccaatgttcgagaaaaaactttaaaccgtcaaagtgaggtgggtccatagatataatacgaatagataaggcaatgtatgggccgctctgtgcatcgaggtgtaacgccgatatcaaggacgtaattggtcagtatttactttgagtggtctggccatctttgtctgtcatatgagcgggatcgcttagtaaaaagagatagatagattattacgctattttgcttagtacgcctcgtctatcattattatgtctatgggtgggtcatcccattttaccaaccctacaaatttcacctaaccttattatctgtgtctcaacttacgcccgggcatagcacaccggataaaacttgttaatactcattacaacttaagtactaaagtattttgataaagttttcttatttcacaagtacgtggtattgttttaagagattgcagaattaagtactaacaataagtcatatcgtccattttgaactataattcaatgcttatgataaatatgcagcgcctacgacgcaactgttttaaaattacggttgaaaactagttggaaaccagtttcaggcagatcgtctcatggacggatcctcgtgctattacgctgcagaaataagaaaatagttgcgaatgcaatagttttcagaccgtagttttataacagttgctccgtgtgcactagacctaacaatcgtgaaataaaaatgaaagattagaatctagtacagaaagttcaacagcgattccattgtgatacacgacatggcaaaagcaagtttattggacaaaataaataattgttattgatatacataccacaaatttcttacttacgatcgaatttcgcaagttaaattaaaaataaagaccccgcaatattgactacaacagttagtttccaaagaaacttggtttagctgtcatagtttaagagtaggctgcgtcacatattatgtaactaatttggtagcaagtagaattaaatattttctccttcctttccttttgacgtaccatgtcctttcagaatgttggttaccgtcatagctatcttaattttattcactgccgccctaaataacatgctt

SEQ ID NO: 6408 - DNA, 3305 bp, Diabrotica virgifera
  SmartBlast Evalue=0; Info=ATP-dependent bile acid permease (Fragment) n=1 Tax=Aedes aegypti RepID=Q16IR9_AEDAE
gtccaatgatgtgggaagattcgactacagtggacaacatattcattatttgtggttatcaccatgtgttggaatcgcttgtgctattttgctttataaggaaaccgggataactggtttgtctggaagtatgttcttattgtgctttgttcctgcacaagtttatatggcgaaattgacttcgcaatttagattaaaaacagctttaaagactgacgaaagaataagactgatgaacgaaattatctcaggaattcaggttattaaaatgtacacatgggaaaaaccatttgccaaattgattgaattcatcagaaagaaggaaattgaccaaataagacatacctcaataataaaggctctaactataaccttcaacatcgcactatcacgagcggctattcttgtatgcattttaacatacatattatcaggaaacgttctcacagcatcatatgcctttacagtaacgtcatattatacatacatgagagccataatcactttgcagtttcctcaagctatgacccagtttgctgagacattagtatccatatccaggatacagaagttcttattatttgaagaactagatgtaaaatatacaccaatgcacaaacaaatcaacaacaacgagattttacaaaacaacaagccagatgtcatcgaagtacggcctgtaggtattaaaataaaaaatgcagctgtaaaatggatcaaaaaacatccagaaaacacaatagaacaaatcaactttgaagccagatcaaatcaacttgtagccttagtaggtccagtgggtgcaggaaaatcaacccttctacaagttattttgaaagagctaaaaccattagaaggcacagtcaaagtaactggaactgtttcctttgcttcacaagaaccttgggtattcgcatccagtgttcgccaaaatatcctctttggagagacgtacaatgaaaataaatattatgaagtgttaagagtgtgtgctctagaaaaagacctaaaattgtttccacatggtgatagaactcttattggggaaagaggtacgtctttaagtggtggacaaagagctagaatcaatctagccagagctatttacaaggaagcagacatatatcttcttgatgatcccttatctgcagttgatacacaagttggcaaacaaatatttaacagatgcatttgcaactatctcaggaaaaagtgtgtggtattagtaacacatcagttacaatatttgtatagagcaaagtttatctacctaatcgatgatggtcgaattagagcttctggtactttcgaaaacttgaaaaatggtgataatgcctttacgaaattattagccaccgcaactgaaatggatcaattggagcatgacaggaaactgtcaaaatctgaatctattagttcgatcaactacgaagaagaagattacatatctattgaccaacaaaaggaaacgattggatctggtggagtgtcttggagagtttatggaaattatctaaaggcgggaggaaatttattcaaaactttgatattggcactaagtttcgttggaacacaagttttggtttctttatccgacatatttctaacgttatgggtaaatatagaacagtggagaagaaaacaagcggtttcataaatgaaacctcaaattcctcaaacttagatacaatattgaaatataaggaccaatccactgaaagttactggccccacgtgatggaccaaattagtccgttgcatatatacagcttccttgtgatcgcaacagtaattctggctgttgctagatccctcgcatcttttagctattttttgactgcttccacgaatgtccataacgcaatgtttagaaaaattattagctcaccgatgctgttctttaatagtaatccatctggtaggattttaaacagattttccaaggatattggtattttagatgaattgctaccgctagcgactgcagactcaacatgggtcggccttactgtagtggctacaacaatagttattagtcttttgaatccttggatattgatacccacggctgttattgtttgtattttttacaaaattaagcaaatatttcttgtatccagtagaaatattaaacggatcgaagctgtcactcgaagtccaatttttacccatttagcagcctccctacaaggacttccaacaataagagcatttggagcagagcagattctcacccaagagtttgataatttccaagatgcctacacctcgtcatatttcatgttcctaactgccagtaggggctttggattctggttggacttgcactgtgccttttatattagtctggtcgtcatcagtatagttttttcccaaagtgattcattgggaggaaatgtcggtctttcactgactcaggcaattacattatcaggaatgttccaatgggtaatgcgagaatggagcgaactagaaaaccaaatgacttcagtagaaaggacacaagaatataccgacctacccatagaatcagataacgagagaaaacaacctccagcagattggccaagttcaggaagcctaacgttcaaaaatatgagtttgaggtactccttggaagctccttgtgtacttaaaaatcttaatttcgagataaaaccgagagaaaaaattggcatcgttggaagaacgggtgctgggaagtcatctttgatccaagcgttattcagactggcaataaatgaaggaagcttaatcatagataatgtcgatataaatactgttgagctgaaggtgttgaggtctaagatatctattattccacaagaacctgtgcttttctcggggacgcttaggaaaaatttggatccattcgatgattacagtgataaggttctttgggccgccttagacgaggtggaattgaaacatgcagtggaagagatgagacacaatctatacggcaagatggcggagggtggatccaacttcagtgtaggtcaacggcagctactctgcttagcgagagctatcatcagaaacaacaaaatcttagttctagatgaagcgaccgctaacgttgatccgatgacggacgctattatccaaaaaactatccgggaaaagttcgccgaatgcacagtgctgacgatcgctcacagactaaacacggttatggactctaacaaagtgttagtgatgaacgccggagaagctgttgagttcgatcatccatatacgttattacaaaataaaaagactatattttatggcttagttaggaataccggtaaaaatatggctgc

SEQ ID NO: 6409 - DNA, 3303 bp, Diabrotica virgifera
  SmartBlast Evalue=0; Info="Nucleolar protein Nop56, putative n= 1 Tax=Pediculus humanus corporis RepID=E0VA68_PEDHC"
cgtgtgtggaagattttttattttcaaacattaatggaaaaccaaacaaaatgacgaagctttatgttttatttgaacatgccgcggggtatggggtcttcaaagttgaagagtttgaagaaatcggaatgttgcttccgcaattggaagccgcagtgtacgatataagtcgatttaatagcatcgtgaaacttgttggattttgtccatttaggtcagctgtaacagccttggaaaatgttaatgctatttccgagggtattcttcctgaagagctacaacaatatttagacgtaaccattcccaagggcagcaaaaaggacaaagttactttgggcgtgagtgacccaaaactatctgctgccattactgaagctctggggattaattgtagccatattggtgtagttccagaagttataagaggtatacgtgcacactttcatcacttaatcaaaggttttaccttaaaaagttcaggagttgctcaattgggtttgggacattcatactcacgtgctaaaataaagttcaatgtccacagagtagataatatgattattcaatctattgccctattggatcaacttgacaaggatattaacaccttttccatgaggatcagagaatggtattcctatcatttcccagagttggtgaaaattgtaccagaaaactacacatatgccaaggtagcacaattcattaagaacaggaaacttctttcagaagaatctctggaagctctagaagaactcacaatggactctggtaaagctcaggccatcttagatgcttcaagatctagtatgggaatggacataagtgacatagatttactgaacattgaaatgttcgctactagggttgtatctttgtcagactacagaaagcggctagcagaatatttaaggaccaagatgtcagatgtagctcccaatctcgcaacattgattggagatcaagttggtgctaggttgattgctcatgctggttcccttactaatcttgctaagtatccagcttctacagttcagattttgggtgctgaaaaggctttgtttagggcactgaaaacaagaggaaacactccgaaatatggcttgatcttccactccacattcataggacgtgctggcaccaaaaacaaaggtcgtatttcaaggtaccttgcaaacaaatgctcaattgcatctagaatagattgcttttcagaacagccgtcacaagtgtttggagaaaaacttcggcagcaagtcgaagataggctaaaattctatgaaagtggtgatattcccaagaaaaacatcgaagtaatgaaagaagctatagaagagtatgagcagcaagtagcacaaatcaagtctgagaagaagaagaaaaagaaaaagaggaagtcagaagctgcaaatgagactgttgaggatgcagaagttgaatcgtcagaacctaaaaagaagaaaaagaagaaatctatctcattggatgatagtcaagcttcagaattgaatggaactgttgagggtgaagagagtccaaaaaagaaaaagaagaagtctatttctttggatgatagtcaagcttcagaattgaatggaactgttgagggtgaagagagcccaaagaagaaaaagaaaaagaagaaaaataaggaacaagatgaataggttcctattatgtagttattgatttaggtattctttattacataaaatcagaaatctaagccgtttagtatataagtatatgaattttagaaattagtataaaaatttattattaaagcttgattttatagcttgtttgtgggaagggagtattgagttagcctcattgtatcttttttgatcttatattttcaatatatatattattgtagagtattctacgtgtatatagttttcgctcttcagtcagtgaatggccacataccgcatattaacttacgattttatatatgtcccaacacagtggcagatacaaaaaaccaatcatcagctgctttggatgcgtctgcatctggaacgccacaaacatcttcactgccaaaaccttcctatccgccaacatctgaaatggtgaacaatgttcacctcaatgtctcacggaaagaggtggttgttctctttaagctatcaaaaaatatatcgctaaaaattacaaagttaatgcggaaaaagttgcaccgtttatcaaaaatatttaaaagctgcagttgctactggatcattggtgcagaccaaggaaagggagcatcaggatcttttaagttagcgttgacctcctcgtcgtcttctgaatctgccaagcctagttcaggagcaaaaaaaaaagaaagttggaggaacaactaaaccgaagaaaactgtcgtcgctaccaaacgttctgctacaggcaaaaacctataaataaagtgactaagactaagaaactgcatcaaagacatacaaggacagagaaaaagccgcaaatacgaagaaagttaaaaagaagtcagcacataaaactgcgttttcatccgcagttccgacttccgcgtaggccaaagtaaccaaaacaccaaccaaggcgaagaaatcaaataagggcatgacaacgaaaaagccaaggctgctgcaagttcacctaaagctagaaaagctgctgctcctaagaagaagtaatcgggccaatggaatatctttaaacaattattagagttattaaaaacaattaatttttctaacaaaacaagctagtttttctcgttttcttaggcaagccgcacaccaaagaaacatgaaacgaaaaacatgtttcatgaaaagaaaacactgctaaacaaatctcaaagtccgcctatcaatgaaacgagtgtgattcatgctcatgacacatttttattttcggagagtctcataaataaccggacgtatatttgtttagcagtggtttatttccatgaaacgtaatttacgtttcttgtttctttgatgtgcggcctgcctaacggctggaacctttcagcagagtgtcttctacttatttttaatatattcagttatgttacagaaaagatagttttgtataatattgagaaaaatcaatgtggtctattattagttttctatgaatcaacggctttcatgttcgtagtagtgcaaattctatatagaaactagtaagttttaagcaacttttgatgtaattgagaattttgggactactgttttgatgtttcaaagattatctacgtcaatgtgctaatatttttatactatgtaagtttatatactataaataggtaagaaaatgatcttatg

SEQ ID NO: 6410 - DNA, 3295 bp, Diabrotica virgifera
  SmartBlast Evalue=0; Info=Myosin-IB n=1 Tax=Harpegnathos saltator RepID=E2B7F9_9HYME
ttatgaatttaatagcccagtttaaaatatcttacatgtttatctagtatataaatatatataaatatacaatacagaataactttttgctcatggcactttcttcttactttttggctgcggttgtaaaattcttaaggtgaaacaactattaacaaatggccacttttatctttgtggatcttgggggcatctccatgttgaatgtcaattgtgccgtgttttcctttcatattatgttcaatgtgtgattgggaaattattttcaagacggatttgtcttttaatgtgtccataacgtaggtcaaagcttctatcaagttgggcacttctaaaattaagtcacccttatcctttttgatcaaatcctctggaatttgcaccaaaagcatcttgtcattttctggcgttatggtaaaagttaacctatttaaaggaaggcagtgcttgggtttcagtgatcctttacattctaaaaggtgaagatttttactaccaataaccatcagtctctcccttggtttatatccatgcctatcaaacttgattacgttcgtagaataaatttctttgtctccatttagttgtgatgcataaagttctttcattggaatatttatttcttgaactctatcaggttcgaagaggtgggggacactatctttgtacgatttctttttgtctttaaataacgattccgccaacactttcaactcgaactgtcgtttcatctcaggtgttaaagccagtctatacacccttgacaagtgtgctccgtgcattttttctaaatgcttggacgcttctcggcacacaaaaggacaaggtggccaacgtctgtacaatatttgtttaggaagtgttttggctaatcttttcaaccattgcactttggccatgctcaagaatgatttgttttcgtctgtaggtggaccatttcgtgtaatgaagcccttgataaaccttctaattgcaaatgctgcctttttgcgtttttcggccaggcgtttagctagtagtcttctgatgtacttttgcataataatagcagattccctcatctttcggtaccttgttctttgcaggtaacccttccagtgggcttgaattatcgaagcgatttcgtgctttttgacttggaatgcatcttcagtctggaacagcgtttttggatgtctgatgaaaattttggtctttcccatctgatattcttcttgatcgtagccgaggctattaactaaagcctggacaccgtctttagcatgccctttgtaatttggccaagtttctttggacagacacttatacctctttaggaatctttcataatctcgccgatacgcgaaacctgctctacgaacccttaaattttccatcaaacccaagtatgttacttgatggcttactagtttgaagtcaaagatacccgattgtttagagtcattgggttttatacatctaatataagacggttctttatcttttaagatattcatgaggttgtttacggaagtcttaaactgggtaatggcagtctctggtctctttttgcttttttgctcgtgttcgaagaatactgactgtataatgctattcttggaactcaacatagcttctctcaaatctctgaacaataaatcgttgtttttatcgatgaaagatttgacgttgtaggttacattgccagcgtaatgtattaagcggaattcatctctacccataattttttgtaacttaatatcagccttcttgtgacttatgtaatgaggatggtagctcagacgttcatctaacttagcaagtaaagttttgtcactaggatctcctggtcgcaagcattcttcgtccatgtacgcaataagccctttgtgtttttcttcaattaattcgcaaataattttattgtcaaagtattctatatgttgccatacgattccctctttttcatattcatcctgttctgatttcaatgtaaggtcgataaacaactgttgaagtttttcattacaaaagttaatgcagagttgttcaaatccatttctttcaaaaatttcaaaaccataaatgtctaggatacccatcacaacatttcttcgtttgtcgctaggttgtagagaatcgttaatcctttttacaagccaggtgaacattctgtcgtatatggccttagccaaggcatctctggcatatattgacaattctctatttagaggactagtaactacatctctaatagtttcaatagttctttgttgcagtgctagactcattttttctttatcacagtcaagaagcttactaacaatatctacttgctccggttttaatatgagagtacgtccttcctcctcagaaaatccaatgtttcccaattgcaatatggccgagataacggaaaacatatctgactgttctttttcggtaaactctaaagtagtcaaggctcttttaacttcactgaaatccttctgatcgtttatagtagtggtgccgttgtgcccattggacaaatagtagtaggaagacaaactcctcttcaaatgcagtttatccaattcttcttcagacgcacctgcaagcaattgataaaagatgtggaaattcctctcacctggcgcttgattaattactcttgatttttctaaaaggtagttcaaaatatttcctcccactgggtttccttcgaagttgaactggatgtccatgtattttccaaacctacttgaattgtcatttctgttagttttagcattaccaaatgcttctaaaatgggatttgaaaacaaaagtttatcttttactttttctacttctcctttctggtctgtaactgcggctataaagttcaggacttttttggatgcttcagttttacccgatcccgactcgcctgaaattagaatacattgttctcggttttcttcttttagggatgtatatgcgttgttggtaatggcaaatacatgaggtggaacttcaaaaaaatgtttgttgcggtattcttgcacagtcttagaatcataaatatttagttctctatacgggttcaccgatatcaatactggaccaatgtaagtataaataacatcttctttaaatctcttttgtaaattatctacaaaaacatcttgattagtgtagtcttctaataaaactgcatcttgtactcccactctgtctctatcataaagatggtgttccattttttatcagttgttggcaaaagtttttcttgaaccgggcaactcactttccaacactcatcataattaatttagacggtatacaaagtttt

SEQ ID NO: 6411 - DNA, 3273 bp, Diabrotica virgifera
  SmartBlast Evalue=0; Info=Probable multidrug resistance- associated protein lethal(2)03659 n=1 Tax=Harpegnathos saltator RepID=E2B3S7_9HYME
gaaatctacatcaacgcatttttaataatcgtagcaagtctcatccaagtcacgtccgtccataactaccagatgttggtcatgtccttaggaatgaaggttagagttgcatcatgtgcgttgatctataggaaagcattaaaattaagtaaaacatcattagcagagacgacaattggacaaatggtaaatctgttatctaatgatgtaggaaggtttgacttttcaggtcaacacattcataacgtatggttagcaccttgtgaaacagttgttgttatgattttgctatatttttatgttggaccaaccggattaattggatgcgtttttctactaagctttataccgtttcaaatgtatatggccaaattaacgtcacaatataggctcaaaactgccatacgaacagatgagagagtaagactgatgaatgaaattattaacggaatacaagtgataaaaatgtacacgtgggaaaagccgttcgcaaaattagtggaaatggttagaaagagagaaattaccgaaataggacacacatctactatccgagccattatgatgtcgttcaaccttacaatgagtcgatcagctgtcttcctctgtgtgatgacatacgtcctcacaggcaacaccttgacagcttcttacgcatttacagtaacatcgttttacgcattcctaagagtatctgtcacccaacaatttcctcaagccattacgcaatttgcagaaaccaaggtgtcgatatctaggatacaaaagtttttgatgtacgacgaattagacagaagaactgactcagaaaagaacggtttaaatggtgtcactgaaaagatatcaaataaaacggacgcgaaagaagtaggcgttaaaattaaaaacgcctctgttaaatggatcaaatctttaccagaaaatactttggaagagataacattcgaagccaaatcaaatcagttaatagctgtggtaggaacagtgggtggaggaaaatctacattgttacatgtcattttaaaagaattagatcctatagagggtagtgttgaagttaacggttctatatcttatgcgtctcaagagccttggatatttggtggtagcataagacagaacattatctttggtcagaagtacgatgaaattaagtatgaggaagttttaagagtctgcgctctggagaaagatcttgcgttatttcctcacgcagacagaaccctagtaggggaaagaggagttatgttgagtggaggacaaagagcaaggattaacttagcacgtgctatctataaagaatctgacatttatttgctagacgatcccctttctgctgtagatactcacgtaggcaaacaattatacaccaattgcataactggctatttgaaacataaatgtgtaattctagtgacgcatcagctgcagtaccttcgtactgctaactgcatctatttattcgaagacggaaaaatcagagcctcaggaacataccaggctttaaagaattcagacagtgcctttactaaacttctagcttcttcaaaagatgaagagaaaaagatggcgcacgtagaatttctaaggcggagtcggtagagtccgaagctagtgaagccgaacatgaagctatagagcaaaaaagggaagaaagggctactggtacagtatcgaaaagggtttatgcaaattatattaatgctggtggttactggttaaaatctgtggtgctgttatgtactttcgtagctgctcaagtattcggaagtttgactgatatatttttaacaacttgggtcaacgtagaacaatggcgagtagacaacaaaaacaatggagcctttactaataaaactcttaatgaatctttagcaaacgcaacctattctacaaatgacaataaacctccattttggagtacagtgttaacggaagacaacaccttattaatatacagttgcttagtaatacttaccatcatactagcagtgacaagatcgataacgttcttcagattttgcttgagagcttctacgaatctacacaattctatgtttgggaaaattattttttctccgatgttgttctttaatactaatccatctggaagaattttgaatagattttcaaaagatattggagctttggatgagtctttgcctaactgcttggtagatacgattgggattggtctgattgttactggtacaactttagttattgcatcagtaaatccatgggttctcctaccgaccggcgtaatattagttattttctactttataaggcaagcatttttagcatcaagcagagacattaaaagagtagaagctgtaactcgtagtccaatatttacgcatttatcagcatctttgcaaggtctaacaactataagagcttttagagctgaagagattcttactaaagaattcgatcactttcaagatgcttatactgcagcgtactatatgtttttgactgctaatcgtggatttgggttttggctagatctacactgtgtaatttttataggaatggtggtcgtaagcatattgtttatacagaaagaaacttttggtgggaatgtcggcttatcattgactcaagcaataacactttctggaatgttccaatggggtatgcgtcaatggagtgaactcgaaaatcaaatgacatcagtggaaagagtacaagaatacgcagaccttccaaaggaaaaagacgagattaaaaaggagccaccccctaattggccaagcatgggccatatgaagtttgagaacatgtccttgagatattctgatgatagtccatacgtgttgaaaaatctcaactttgaagtcaaacctaaacagaagattggtatagttggtcggaccggtgctggtaaatcttctttgatacaagctgtatttaggttggctcaaaatgagggacacatatttatagatggtatagatagtaagagcgtagaattgagattgcttagatctaagatatcaatcataccccaagaaccagtattgttttcaggaacgctaaggaaaaatttagatccgttcgatgaacacaaagatgaggttctgtgggatgctttggaggaagtagaactaaaacacgccgttgatgaattaccagcaggtctggacagcaaaatggccgaaggcggttcaaacttcagtgttggccaaaggcagctggtctgcttagctagagcgataattagaagaaacaagattctggtactcgacgaagcaactgccaacgtag

SEQ ID NO: 6412 - DNA, 3267 bp, Diabrotica virgifera
  SmartBlast Evalue=1E-28; Info=Muscle-specific protein 300 n=1 Tax=Tribolium castaneum RepID=D6X2J9_TRICA
cttgttagtatttttctacgggtttatctaaagtttccagaacttcttccacgatttctgcagatttaatgtcgacagtaacagtatcaacaggttttataatttctgtggatattgtaagttgttctgtagtaaaagtatcaactggtttgtccttctttttatcttttttcttgttagatttttgtacgggtttacctaaagtttcctgagtattttctaatacttctggagatttactatcaacactaacagtcttaacaggttcaactatttctagggattctgttatttgttctgtagtggatatacaagttggcacatcttcagacttttgtacagataaagtttcttgtgtaccgtctagtatttctggaactttgctatcaacagtgacagtatctactgattttaatgtttcactaatctgaggtaccttcttttcttttttctttttagatttcttagaaggttcattcaaagtatcttggattgtgtctctagacggttcgtgagctgcaatatcagaatatttgatagttgttttgtcttcagatatatcatcaacttttctttctgtaacgttcttagtaactatatagttgtcttctacttgaatctcggtggttatgaattgcgtggttacataatttatatcggattggtccttttgttcactggcaacttcaacaacatctacattactatgtgtctcttcattttcgatgaaattttcagaagttacaggtgttttctttggcttcttggttttagtcttcttagcagtttgcgcatttgaactatcttcagtatggcttgtgctgattatcgtgtcttgtgattgagattgatcaacttcggttacaagatctacagattcaacggactttaccaattgtgaagtttcttgactagcaatttcttgctgaggttcttcgatttttggctgaaccttcttattcttctttctttttggtttaatgaccgagtcttcaactatatcttccgttttttctgttacggttgtttccgttacaaccaattcaacttcttttagaggcacttcatgttgatcaatttgtgtgtcttgttgaggctgaggtttcttatgtttcttctttttagattttttgtggctatcttcatcggtaggtttgactgattctgatgattctgtaccagccgtttgttttgtatcgatttcggtaacagaggtttctgtaactttggtggcttcagttaaattagttatatctgtttctgtggttgtttgggaaatagtggtttccaaaacaacgatttcgttgtttggtttcaccgtttctggtacttgaggctgagatttgttcttctgtttcttcttcttagacttctctatgggttgatctacttttaatttttgtgtttcgatggttgctttttctgattcaattaccgctgaagtactgatgttaatatttgaggtctgatgaggctcaataactggttcttgctttgtaactggttctggtgtcgcgttttctggaagctgaggtttgtttttttgttttttctttttagacttctctatgggatgatctacatttatttgatgtatttcgttgcctgctttttctgattcaatgaaagcagagctagtagtatcactagttgaggtgtgttcaagcttaagtgtgctagtttggatttgcacttggtttataaactcttctgagtgttttatttgagttgttggcttatttggtttaggtttacgttgacgctgtggcggatggtcacttctatcttctgtttcttcatcagatatgtgtctaataaactcttcaataacaaaagcagccttattttcgtttggtctggaatgttttggttttcgtttatgttttgattttttatcttttgttggattgcttatatcttcactgtcgtgagattcatctactgaggatttgtcagttggttctaatttagacgtggtagttattttggtttctacgattgtaacttctttgtgtggttctttaacggtttttgtttttgttttggtaacagttatctgtttagtatgtgactcatctaaaggtttagttttcttatacttattattagtcttatgtatatctataataggagaaacatcactatcactaagttttaagtcttgtgtggaggaaatatcagttgcttctcgacctcctacattggtaggctctccatggtaagaatgcagctgatcatgttcgaaggttactttatttaatgtttctggatgttgcttataagcaacattgaggaatttctcttctttaagagacctatccttcaaagatttgcgcgttttgtgctcccttgatttagacttcgtatcttccgcatgcgtggaatacccaggcacgggagattttagtctgggggcttgtcgagcgttcgaaggttgcactgttgctatactggatggctggagagatttgccgcttagtccctgagacaaaatttgagcgtacgagaaatgcgaaccagtaacatccggttgtgacgcttgtgttagtggttcacgagacacttcttcgtatttttcgttatcttctataggcactatattttctatcaccatttgttcagttggaggaggtacgatactcgtaggaatagactgactagaataagttctctctgagtaactcgtgtcctcataagcaccctcttgataaggaatattataactattggaactttggtaagtttctacaggcgtatttataatttgttgatttgaagacatgaaatttaccatttctggagtaggctgcatgtagtccacaagaggcacattcatattttgagcgtaataattctgctctatttgtggaggtgcagaatactcttgttgatgatactgagtccagtcttggataaaagaaggcaccacgtaattatcttcagttatattgttaaagttatcttgtacatcaggaacttcgaactcaagttcagtttgtggttctatatctatatgtttgtcaatgtgcgcaatagcttgcttttctaattcctgatatacttgcttatttctttcatcctgaagatacagttctctttcttcagatgatctgaattggcctcttaagatctcggcgtaagttgtatttccaggtgcccacatgggactaggagatctacctcttatcctttgttgaactgatagataaccagattcagtatcatcagtatgatctatagattcatctactcgttcttctcttaatt

SEQ ID NO: 6413 - DNA, 3249 bp, Diabrotica virgifera
  SmartBlast Evalue=4E-91; Info=Transmembrane channel-like protein 7 n=2 Tax=Formicidae RepID=E1ZVE5_9HYME
acaccaactagttactgtcgtacatggtgacttaaataaatatatttcagtaattagtgtttcaactaaatcaaccccatcatcgggtctaacaacccccagtaccaagatatccttaaggacgttggccatttaatcttatttgcagccgccctgaatagttctatggaggtcatattcgtccattgtcgtaggtttttaagccaagagttgcgtcttcttcttctttgttaggttaaaattggacaactggtttaggaaattcgatacatcaaaaatgaccaattttcaaggtggtgcgttaatttcttggagaagtgtatctattaaaacgcttcagtcattgtactagaccttatcaagaaatctcttactgtcatgaaagaatctttaaaaacatgtatatgagatcatctttataaaatacatattgagcaatttgtattgttcaacaagaatgagatccaagagagtattaagaatattaaaaatttacttgaacagcaatgtcaagaagtcatttttctatagtacttaagtagacgcgtaaacgcgtccatagcactaatgtagtcctatttggacgcgcatacgcgtcatcggagctgaaagagttaaataattgctgcaatcggtttcagagacaaatcgcgagactctctataatactgacaaatcataaaaactgctttagtgctgttttgagcatcgaaggttattatgggcgttttgttgatacttcaaagagcaccaggttatagaatacttatagatgattatttacaatatatagaaatacctattacctagttaattgattaaaaaaactgtatagtaacaaaaacattaccgctagtaagtctcttggaaatacctaagaaggaactgttcctgataaaaccaaacatctcgtataaattaaataaaaatgcagctatggtttgttggttttatacagcaaacagtcccgttacaaaagtaggtatttttcatattcttctactaatatttacataagatactaaactggatatggaaggtaatggaccaatttatgataaaaatgtttctaaaaaaagtttttagttttaacttcggtttattaattcgtcagtagacaacttaatcaatcacccactgtattcaccagatttagcaccgtgtgactctctctgtggaaatcgagcaaaattacatgcaggaacaggctaagactatccgatcgattgcaagggtgatgacgatagtgtttttggatgcgaaagatattactaattacttgggtcgtgtactatgcaattccattagaccgtatcgatgctaatttgataaaaaaatctcctttatcaacataaatcttctcccaagaccgttgcacactcaaaattaaaccagtttgcatacgaattaatgaattcggtactgtgacgaaaaattgtaagaacagaaactaaaaaacgaatttaaacacaatattaaaacaagtattaacctatggagctgaagtctggcaagtaaccaaaaagtacaacgctaaattattagccactgaggtggatttttggaggaggtctagactagaatactagactagaaagaacaatcatagatggcatcgaaagacaacagctagtatggtacgaatacgtaatagtccaagaggcagcgctgaaaaatctctttgaattaccaaagctagatcttccacagctgatcaccgtgagtgtgcagagaaacacactgcgaaacaactagcttcagtcaaattcaaagattttttcagcgttgcctctccgtttattttcttttggactaactggatgtaatattcttcaaaaaagatccggtttaaggaaaacgtcattgtttggtaaggcaagaccctgtcacaacgcttcaaaggaagtcgcgaaattaggtgaattaaaacataagttgttgcaacatccaccctattcgccagatttagctccttttgactaactttatttcacacgtaaaagaattcatctgtaggaaaatattgttatcgaacgaaaaggtagtgtttgatagtcttctggattttcacttcaggaatggaattcataaattagatcactggaacaagtgacaaaacttaactacgggtaaaaattagatgtaattaaattaaaatgaaaatataccttcataaactggtccattggttattaaatctaatctcacaagttttggcttattacctaattcgtatccccgtcctcacacctttgttcagttctaagtctcttccggttctcctgtttgatgaacaagctcagcctatccaacaaaaattgcttatcgtgtccctccagaaccaactggttcttcaaaacagacaccaagtgtctgttagccgagttcacacctctgtagtagtacagagcgaagaacaatcctatgatacatggtaccgcgaattttgcggtacccaggaagaaaataatggtctgtatcagatcaggggtttgccgaaacaaactcacagctaaagcccagacggattccttatctctgaaaggtccacatgacttggatggagtgagatccgaaaaggaaaaacctaatggaagagctgcaaacgcaaacgatattagaagtaccaacataaacatcgaatttgttctagaagctctgtagatgatgggacttggtctacagttgtaaacgcaagcaaacttcttaatataaaacattaggaagaatattatcgtgcccataaagagatgagtggggcgtaaaagatgccgatccagatgagagtttgcgtgtagacaatgtccaaggagtgttttggaagatcgaaggtttgtgaacaaagaaactggattattttgttttctacgtgtcgggccaataacgcttttggtgcgttaatgaagaaagtcattacgacttggatagcgaagtgagtcaacagaagtttgtagatttgttggccgacgtaactttcccaacaagttggaccgtctttacagactccgcaagctctcaggtcctctttatcgcaggttattttattccaaactgaaccatagagcacgattaacgctgaaagtctcaggaagacgatcctgatgagggaacacttcagctcagtagaaggtttatatttctcgaaggtcataaggaagttgaacaggaatgggaccaccatgttcaaaccgactatcgtcaaagaaggtaagaattcgtacaaaaactggatgtacttgtcctcagacg

SEQ ID NO: 6414 - DNA, 3252 bp, Diabrotica virgifera
  misc_feature (1)..(3): n is a, c, g, or t
  SmartBlast Evalue=0; Info=Echinoderm microtubule-associated protein-like 1 n=2 Tax=Formicidae RepID=E2BVP5_9HYME
nnngatatataaatattgtttattatcacacaactcaatgttatagataaaaatatacatgtaatctcaagatgttaaagaatgtcgctcttcgacgatcaatacaactttctggcacaatttcgtgaattctaaaagtgctttactctttaaaaacaataagttacaaaaatacaatgtccttagcattggatagtttaggctggaccttctgtcttctcaagacctcaagctgcagctaaaaatttgattaagtaggtatgttggatacaggtggttactgtggaaaagtgttagattatgaaatagtccattgtaggacagcagtgtcgtttcctcctatagaaacaagtcgggaattgtcgtagaggaatcggacgttggtcacgtggctgctgtgtccattgtaggtatggcacagggaccttggctggctaacgggataactatacaacttgacttttccgaagtcatctccggtagccatcaatttggaatcatagttggcatcgcagcaattgacatcagtaccatcagcattctctggccagattccgacagtggtaaatgtaatggtacagctgtttgtggcccattccacgtctcgcatgatggtactctgtgggatctgacgacaagtaccagcattccaaaacagcaactcataatcggctgaattagaccttattgtttggttattagttgcccaatctagatgtattacactactggaatggcccgaacatcttcctaccctggtatacttggatccgtcgtctgatacctgatatatgtaaatctggctatccctggatccaaacgctacaagggaaccatctggtgaaaaccttataacttgaatggcctcgtttccatcaacttgttgggcaagaagctcacgagtttgaacatcaaacaccatccatttgccactcaagcaaccaactataacgcaggagccgtcatggaaataacatacactatgagcttgttcctcgatatctttgctccacaaaatcgtatgagacatggaatcccaaagttgtaaaactctgtcatatccggcagtggcgaattggggaatgctaggatgagcagccaatgcccagatctcgtcacaatggcctagaatgatgggctggaagcccagctcgaatgttccgagaagaatacagttatgggtcgtaccgatcaatagctgataccctctaccttctgaaatcattcggatacctccaaaatgaccctcaacttgactcactactcctgtcatgtttaaattcggactgaattccactaatctaccatcctttcctccaccggtgatgaagctgccatccttcgtgacgcaaatcgagaaaatcgaaccctcgtgcacatgcttgacgtacttgaagatggtgttggtacctctaccccaaactgccaagtttccgctggaatcgcccgttatagcttccccactctgcagaaaactgacgcaagtaacgtatctgggcttatcccggctctcgaagatgcccatgcgcttgaatagggtgccgttaatatctaatgaccagaaggctatgtgggacttgccgcacgtgacgatggtgtttctatcaagcgggtggaactcagcagctacgatggtgtccactgaacactttgtttcagtaattttatatccatgctctcctttttgccagtcccaaacggaaatgatatgatcaggtgcctcgtcatagctactagaagggaaccatcagccttaccaaaagacagacaacaaactgacagttcaaagtcgttcataccaataaccgcttgagtagacagtgacactgaattccaaacacggatatgggctcttttttcaactccattgtggcctgcagtttgacctgtggctatgaccatcttgttggggtgtatcgccaagcttttgacatcatcggtatgttctgtataatgcctctgagtctgttcctcgggattatataaaactaccaaagcagccacaaaatataccatttccccagtgggcagaaaatatagattggatctgcagtctcttcctctgtacccgtatgcccagtccagttttagacgtttggacggcgtagtcgacaccttggtcagctcatagttttctcccagttccgtaggggcgtagacgataataggccgacctctcgaggaagaacctcaggcttttttcttcgtcattgtaggttatgtctttagttccatgcttataattgggtgcaaaatgattgttgctcttggtggaaatgtttaggtatgacctggtggagaattttgaaaccataccattttgattgacttgattaaaatcccctgtggagctccatctcttatgtaacgaagaactactagtagatgacctagagctcgaactagtggttcttttgagtgtattcaaaggttgtggtgtagctctgggagaaggcgaaggtattgggctcacgctgctcgagctatgactgtcgctgtgcaggctacctgtggaacgataatgaacttgctttctctgaggtaaagaagatcccacaaaagtcttcctctggctctccaacttagaagtagaataagtctgtttattgtaatcatctttattagtgttgtttaaccgggtaggtgtcgatgaagccgatggaatctgcggtattctcgaggaatggtggtttacttcgagactgttgagtctgcgcagtgcctcagcaagcgtagctttgagacaaacaagttcatcttgctgttcgctcaccttgcgctccaactcagcgatcctgtcattgtagacgtgattctcggggtccagaagctcatgattttcatctggggattccatggagtcgcttcgcaactgcattatcaaacagtaaacaaaaaggcactatcatcacttgtgtcctacgtacattgtgaaataatattcgcacaactatcgcaactttccaaaaaagtttcccacaatcgaaatcactgagaaaaccaaccctaactgttaatattcacttataaacaaccgatctcacggcactaaacaatagaaaacattcccataacagtaaaactagcgaatctgtcgttacttcaccttcgtcgataaacacgaaccactgacgttccttccattgcacgtagtatgaggtttcaggtgaacgtattgctcccactacttcctcttttacctttgcgttacctgtccctctccgctcgttcttttgattggtaatagtcgtg

SEQ ID NO: 6415 - DNA, 3235 bp, Diabrotica virgifera
  SmartBlast Evalue=3E-54; Info=Integrin alpha-ps n=2 Tax=Aedes aegypti RepID=Q16R90_AEDAE
tccgagtctagcgctacattgatgggatacacccgcagttgacagagtagatatttttagcgtctgtgataaaactttttatataaaatgatggtctttaatagactatattttttgacaattttaagtttaattttcggtgaatgttttgtaagtgcaatcaattttgatattaaaaatgtagtgaatattaacttaaatccaaatgacagagttgaaggatcgtattttggatattctttgctgttgcaaaaaggatctagaccattggtaatagtaggtgctccaaaattaagtaaacgtactggtggtggaatatttgcatgtgacattttaaacaacaatggatgcgtaaagtaccccatagatattaataacaatggcactttcaatggtaacttttttggttcttcgctagatggcagtgatgaatctggcgatgcctttattgcgtgtgccccacgaaaagtattaccagtaggaagtcagccaaatccaaattactttttaaagggatcgtgtttttggaaaaggaactcttcgataattgatggacgatacaccgaactaattcctttaagaaaagagagtccagtcggaagggtaggagcagcgggggagtactactatgataatgcttttggacaagctggaattgatttattttatagcagggatgaagttttactaggagcgactggcattaaaaactggaatggtgccattgtttctcagtcgttaaacatagtagcaaattacagaattattccgcagaagtctagtcccattataactgaaaactacagctacttaggatacaaagtgggctgcggctttcacgcagattcaagttttttgttcgctggagctccaagggcagataatttattgggaaaagtaaaactttttcatgatcgaaactatgtcaactacagaagctttaaaggagaggaaatgggtgcctattttggatctgctgtcttggcaaacgacgtaaatgatgacggagcagatgatcttttcattggtgctccaaccgctgctggatcaagttttgaggaaggctgtgtttacttttataaaaatgcagctggtactccaataaaattagttggaactggaaggcgaagagctagatttggaaccaatattgtagctttaggggatataaaccttgattcattcaacgatattgcaattgctgctccttatgaaaacgatggtactggagcggtatatatatttatgggaagcagcgacggtatcaaaaatgtttatggccagcgcctagttccatcaatgtttgcgaatcctgcacttaacgtcaaaggttttggaatgggcatttcaagaggaaatgatatagatagcaacggtcacaatgatcttgcagtaggtgcttataaaagcggccacgtctttgttatcccaactaaatctgtaattgatttccgtacagctttagaatcaaacatgacttctatcacctctaatgacaatattttaaacctaagatattgcattgatttcaaagctagaagcgaagaaagcaacatagagtcggtggattttatgtttgaactgaccatggattatagagtcaaaggatcaaaactttacactgaaaatgtcactgtgtttcgagaaaagactttgtgtaaaacattggatatcaaccttgagcaatctctagctgacgttctaccctttacttttatattaaatactcaacctagtgataaagtatttgcggagggcaaaagcaggacagaaagatcaattccttactcgcatggctgtggaactgacaatatttgtcaaacacaaatattgattgacgtctactctgacacaaaggacattattttgggttcaactaaatcagttagtgttaacgtaaatgccgaaaatgttggcgaacccggatatcagtgcaagctttatatggaagtacccaaagaacttgagcttagccaacaaagaaaatgtacgttagaaaattcaacatatatttgtccattcgtttcgagactaaatgtttcagcggaaaaacagataaattttgatgtacatgaaattgatccaactacactggaatttgacatttcctttgaaataaaatgtttgggagaaaacattgaaaataaagacctggtaaaattcaatattattgtacaaaataatccatatatcgaaggtaaatctgatccagaagattttgaatacaatgatgaaagccccgaagaaggagagagcgaggttatactccaccatatgtttacactcggaaattttggaccatctccaattaaaactgacgtttatcttttgattcctcaattgcaaataaataaggaagatgtgttccaattagttgaagcaaagggtattctagaaggcacccagatatcctgcattccaggaaatataaccgacaatagtgataatacagataacgttaacttggaagaaaattcatctactaatagaactgcatctatgaattgttttggacagaacaactgcttaaaactgttttgcgaaggggattacttagattcgtcctcagcaactgcaaaatacagtttaaaagtgaaaaccagtacaaaattattagcaaattttcttatggaactcccggataacaaaaatatactggcttatacaacatcggcttttgtttataatggaacgcgggttgaaggccatgcaacgactttattattatctctacatgcgacacgagttcctctttgggtatacgttgtatctggagtcgtaggaattttgctcttgtgcttgctagtctttattttttacaaatgtcactttttcgaccgtcgctataaagaaaaaatgaatggggagcgcctgatggatcaaaatattgaaatggtacaagaaaaccccaactccgagccaaccaaagagcaagacgaggagtcaccaaaaggtgatatctagtgctggaaaagttaaaagcaatactcaaaacaaacaaaagtgctcgaagtttactttgtatagggtgaggcagataaggggcctattgggggtgtctcgggaactggaggcgactgaattgtgaaagttggagtaagggggttttgaagacttatctatttgataaaaatattgtcatctatttggcacttccggttatgccgggggttgcttgtggcttcgtttttttaaatgggacgccctgtgtatttttgtatttttggattctcct

SEQ ID NO: 6416 - DNA, 3234 bp, Diabrotica virgifera
  SmartBlast Evalue=0; Info=Protein shuttle craft n=1 Tax= Harpegnathos saltator RepID=E2C3V1_9HYME
attagaagtcgctttgtgaaaattattaacagattatttgtgaccttatcgttaatttcatgattttgtgcaacaatatgtaaagattaactcaccgctgatacaaaatgctgatttatatctcaaagtatttctgtgaaatcgaactatccgtatcaaaggagtgactcgagcttacttataaaagaaatgagttgattgcgctgttagtatgtctttttacgataatcaagcaactagttatccaggcggtacttttacgtcagccgaaaattttttcaccggatcgcaaagtggccacttttctggaaccactccagtcgatatatctcattccacattggagccaacagccagagagttctttcctacctctagtttttctgagactaataatggtgctgttaggaggagacctcaacaacataataaatttagagataataaggaatctggtaattggagaaataggtatggtagtgggagaacattcaacagctcaagatccaattttagcaataaaaccggcagagaagatcagtatgctcatgttcctgcaaactatagaagcgataattcatacaatacaactgattttcaaaatgatgaagaaagacagcctgagccagaaagaaattctcaaaaataccacgaagatcattacgatgatcacgtagaatataacgatttccaaagtagagatcaaggtaacaactcagtgccgagttcctcaagaaattacagaaatactaagagatatgataactattatcaaggacggtccaaaggtaactacaatgaaaagaattccatgaactatgatgataaaaggagtaataattataaaaaacaaaacaataactttacaaatgaagataattcgagaagaaataaccaaactcagaagagaaacagctacaaatcttattatgattcaagaggtagtcagaaatcaagagaaggttcttcgtctaataattggagaaaagaaaatgtgggtgtagaaaaaagctcgtccaatgtgattaaatctagtaccaagaaattggatgcagcctctcaacgagagagattaatagaaatgctcaatagacgtatgttagagtgtttagtctgttgcgaaaaaattaaaaatactgataaagtgtggtcgtgtatcctctgctaccacatattccatttaaattgcgtagtagcctgggcaaagtcgtccaagattgaaaatggctggagatgcccagcatgccaaaacgtttgcagtgaagtgcccaagcagtacaaatgttattgtaataaggcagtggaaccgaggtacgaacctggagtaattcctcatggctgtggcgaaatgtgcctccgaaaaggtagaaattgcgaacacaagtgcaccattctgtgccaccctgggccctgtcccgattgcgtgattatgatatctaaatcttgtggttgcggggcaacacaacaaatggtaaagtgcagcacagatatagaactgacctgtggcgccatctgcgacaaacagttggagtgcgggttacatcgttgtctagaacactgccatcagggtgattgtccgccgtgcggaaaaagtatcatacaggaatgttattgtgccaaagaaggccgaaaggtaccttgttgcggcgaatacaaaggccaaaaccattattcgtgtggggaagtatgtgataaactattatcttgtggaaatcatcgttgccaatcgatatgtcacgaaggtccgtgcgaaatctgtcctgtggatataagtgtaatcaaaacgtgcccttgtggaagatctcctcttaaaacccagagggtatcttgtctagatcctgttccatgctgcgataaggtgtgcgataaaattttaaaatgtggccaacccaactctccgcatcgttgtgaagctacgtgccacgaaggtgcttgtcctccttgtccattaactacagttgttaaatgcagatgtggtcacatggacaaggaaataccgtgtcaagaacttacaactaaagctgacgatgcccggtgtcagaaaaaatgtaccaaaaaacgtttatgcggcaaacacaaatgtaaccaactatgctgcatagagatagaacatatctgccctcttccatgcaacagattgctctcctgtggccagcacagatgcgaacgcacatgccactccggccgttgtcctacttgcgtcgaaaccagcttcgaagaactgtactgcgaatgcggagctagcgtcatctatcctccggttccgtgcggtaccaaaccgcccaactgccttaatccgtgctcgaggccgcggcactgtggacacgaagtcaaccacgcgtgtcacactgggccgtgtcccccttgcacggtactttgtaagcggtggtgctacggacatcatgaacaaagacctgcgataccgtgtcatcaagaaaacttcagttgtggattgccttgcgggaaagacatgtcttgcaaaaggcacaaatgcgttaaaccttgtcacgacggcccgtgtcctacaccctgtaagctgccgtgtaatgtacctagagagttgtgcggtcatccgtgtggcaggccatgtcacgtaccaccctgtccggaaagtagttgcaagcagatggtaccagttacgtgcccgtgtggtcttcaaaaaagtacgagaccctgtacggaagtcgctgatgaattcaagaacatccaaatggcgcagctaaaggaaaagatgggaagcttgtcgacgagttccaccatcgatttgacagatatttttaacgctcccaaaaagccgactgttttaaagatattggaatgcacagaagaatgccgagttctggacagaaaccgtagactagcaataggcctacaaatccgcaatccagacttgagccaaaagctaacaccaagatactcagatttcatgagacagtgggccaaaaaggatccacacttttgccaaaaaatccacgacaaactttcggaactcgttcaactggccaaaaacagcaaacagaagagccgctcctattccttcgactcaatgaaccgtgacaaaaggcacttcatccacgagtactgcgagcacttcggcgtggatagcgctgcttacgacatggaaccaaacagaaacatagtagccacagccgttaaggataagtcgtggctgcctagtatgagtctgttggagattattcaaagggagaacggccagaggagggttcccgggcc

SEQ ID NO: 6417 - DNA, 3235 bp, Diabrotica virgifera
  SmartBlast Evalue=7E-34; Info="cAMP-response element binding protein, putative n=1 Tax=Pediculus humanus corporis RepID= E0VRL4_PEDHC"
tgacgttcacgtgacgtgtacggtaactttgatagtatttattaatatgggtgcttaaaatttttgtgtaaaaataatgaatatcgacgactttttaaactccagtggtgaggaaggcaacagtgatcttgaaaccatggatgttgcattgggttgtgaaaatccggagctcatgagctccgaattttttgattcagtactctcattagagaacaatatggatgatgaatttttcccaaattttgaagaggatgttaatctgtccagcgatgccagttctaacgtagacgaagtcttatcgccgcaaagttattattccgaaagtgataagaacagttcttgcttggaaaattatgatgacaccagtaccatattgggaaatattgatggttttgatgaattaatgtccattttagatccgattccagatgttccagtaaaagaagaaattaagcctgttacagtacctcctactcccgttcaaaaattacccacacaaatcctcattcagaatcctaacaacaaaaaatgtatagcaaggcccatgataactactactagtcaagtgaaaaggcctttaataaaaactaaacctcagatacttaaagtacaacagatatcaaataatggtagccccgttctactaccgcttaatataaaaagtataaaaatactgagcagtccggcagaagttgctgctctgaccaacaatatgagaaaaagaaaggtggaacctaaaattgaggatgatactaacgttgtcagctctacaaatcactatccaccactagtgcttacacctgaagaaaagaggctattagctaaggaaggtattgctctgcccacccaccatccactaaccaaaaatgatgaaagggagttgaagaggattcgaagaaaaatcaggaataagatttcagcacaggattccagaaagcgcaagaaagagtatgttgacagtttggaggagagagttagaagaggttctgaggaaaataaaaacctgctacaaagagttaaggcacttcagaggcaaaacaaaacattgattgctcatgtgaataagctgcaggccttaatttgcaactctacaacatccaaagctacaccatctacatgtcttatggtggttcttctgtccgctttgttggtctcattgccaaacatgaaattgtttgagagcaaaaattcttctcagatgccaaatgagcaagaacaggtagctgtgagaagaacattgctttccagccaacagccaactgaagataatttgaacatggaggagttcctggtatttaaagatgaggaggactttgacggaaaactcgatgagatggacatggataactccaccgaacaagagatctcaaagatccttgaagatatgggtagaaagttcgagagtatccagccagagactaaagactctctgggcttcttcggcaagatcatggaatctgtcaaggggtacctctctaaggacaagaaggacatgtttggtgctgcggattatgggggattccagaagaagggttttatagagccggacatagatgattttacacacgcggaagaccctcctaagaagagaatgaggttggatccggatttagggccgctaaatgaaaatatagtcacgacgaccacgttgaatacgcgtgctctgaatacaaaggaaaaatgaagtttttgagtgttaaagataactttatttgacgacaactaaataaatgtggcaaatgaaatttgccagattgttcttttacgttctcgtcgaaaaaaatttgtttttttgttaacagagaaagatgcatcgttttgtacacactttgaatgaaattatacatcgttgcggtagagtttcattaaaaatgttagtattttcaacgaaatatccttctgttcaaaattacttgtaggaggggatccgatatatggtcgacctgcatcgatctgtttaacggagaaaaattatttgatatgttaacaattataaaaaaaaaacaaggggtgcccgatacaattttgtccagactattataataattaaaaatgactatttttttataaataaaaaaaattcggccctgacagatattattttagattttttggatcattcaaaaaaaaaggtattttgtaatgtttctcttaaattgatctttttcgatttataaacaattaaaaaatttaaaaaaaaaaacgaaaaatgatgatttttaaggctcaaaacacaagtaaaaaatattatttttgtaatcatcaagaacctaaattcaagttcaaaccttctaccatgtcccgataagaattgttgtttagaaggttttattctaaaatatattgttttacttgctactgaggaagattccttatgggaagacgggcgatcgggctgcatgaactaaaaaaccatgttttaaattaaaattggtccaaaatacttatcaagaactgatggaataaggtttgaacttgaatttaggtacttcgtaatttcaaaaatgatattttttacttcgatcttttttcagctttaagttgtttttaactcaaaaacgaccaacttaagaaaaattacaaaataccttttttgtttcgaatgatccaaaaatctaaaaaaaattattgccagggccaaaatttttttttatctataaaaaaaagttatgatttttaattattaattaattatagtcagaacaaaattatatcccactgtttggggatataatgggggcacccattgttttttataatttttaacataccatattacatatcaaataatttttattcattaaacgaatcggtgcaggtcgaccttatattgtatcttagactattgcatattatttgtagatgtcctattagattttttaatataaaagtatttgtgctagtatcatctaacgtacgaaattttttatctttatattattcattccatatttattagatacattcttcagtagattatttttgcttgaaatttttattttttcaaatattatttttgttatcaagtcgtgtacttcatttttattttaagactgtgtaaaagagatttttattaattaatatttatataaaccatcgcaacatatatattttgcttggaatgcctgtcggtttttaacttggttagttaagtttgcctagatttatctacaacacaatgttaaatgtttatggtttattgtaacttaaaagttaaataaatgcatttaacagg

SEQ ID NO: 6418 - DNA, 3232 bp, Diabrotica virgifera
  misc_feature (32)..(32): n is a, c, g, or t
  SmartBlast Evalue=9E-79; Info=TEX2 protein n=1 Tax=Bos taurus RepID=A6QQK8_BOVIN
cttctatatatctatttcttttgacccaatcncttttatttcaactgcctctccgtatttttaataaaatagaacaaataacatcactatgcggcaataagacaatttgaactctttttaaaaaatacgactaagtgttaatcgacaccttgttgccctgtattttttctatcaccaagtaaatgaaataattacaagcattttgtttaatccggcaattttggattcatcacaggtataatcaagtcttccatgttgggaatcaccaatactttctggaattcttgaactaattttttctcgatccaactcgttaccataatataactaatgtttctctcgcccacgattggtctggcagacagggaaatttcggggaccggcctgaaacctatccagatacgatctgtcggtggagggggaatatttaagactagagtgccgacgatcgactttacttctaccgtcaatcgaaggtctgtatttgacacaccttccatggctttcttaatgtaccgattctcggtagcggcctggaaaaactttgattcagccaacctatctaccatcttcatcagtttttgtttgccgtgacttcctgttgtggtatcttgaggaatattgggtagttcatgaagtccttcctcatctgtactactttcggcagaatcatcgacatcggagtggtatatagcacatttaactacagcagatttgtcataagcttgcgggtttttcagtctcatcaaattaagtttagtctgtagagcaagaacaatcagtccgtcatatattatgtccaagtctatccacagtcctctctcgtccatcacaggtttgctggtccgcctaataaccggtgaagtttttcctaaagagagctctggaatgaggagttcctctatgaagtaggggagttttatcgtcgatagctttctctgtattcgatctttgactttatcaatgaaactgccgtttctggcacagtcgaaaaggactcggccgatgagagcgttgagccagagaatactatcttctctatgctcctctgtgtctgaattttgttcggtgtcgcctttttcgttttctttgggagacttgttctgctttctggaaggcttaaaggcgctcatgtatctcaagtattccaattcggactcagtagtttctacatgactcgggagaggattatctttggaatcgggggtactacaatctacggaagataagcctaattctctatgagtagaggtacacaatctcctataccagtcttctttctctctgtcggttcgtccaaacaaataaatttttatttcgctggtgtcttgtgggggagttgaacattcatcaaccaaactatttgtctcctctccattttctccgtttttatcgtcctttgtatttaagagttcttcatcctctagggcaggggagtcagctatatccgatatatcagctgatggtgtactagccctggagtctgaatctagatcgaattcttcaccttctgttaatttgctaaatctctgcgccaaaatagggtactctttcttcctaaacttgttgaatccctttttctccctacctgatgaagtaaacagtttacccttatctgtggaacgagtattatcgctttcagtgtctttctgtaagtcagcttccattttcgataaaagttcttgatcgaaacataattgatctttggctagagtaatacagattggatattttttactccaatgccttattttagctaacccttctggtaacaaacacaccttcgcacccaacatattatatatcctgtgttgggtgaattgccttgatctctggttcgttccacatagctcgttttgctactttatttttagcgtgactgattcgtaatagattaccctgtagccttaaaaacactgactgggtccgggatatatgatacgtttcatggttgtatatatccgggtattcgttcaaccaaccctcatatttctcaactggttggtattctttaacagcttgtacttcgtatatcttattcgacagcattggtattgtggataccggttgttctgtacttctgggatacaatttgaaataaacttttaaaaatatagtaacaagaaatattcccgacactaatccggcggaatatggtgaataatactgtatgagactgtaaacaaggatggataccagtaggactagtacggataaataattataaaatggacgattcctagttgcaataggacgcaaatccacgaaacctgtaggtgcgaaaacaatcttctcctcatctttacaatcaaaatacttttccctaacatcagtaccctgcacttctttaatatgaatcacgttctcacaatcgatctctacattatcgattttctgtgcaactgttgtcaagatttcctcatgcgaaactctgacaagtgacggctcggttttgaggttagattcttcgagcgcatcgacgccatcttctactccttccgaatcttctggtagagcctgctctacattttcggtgttaatgttgtacaatttggacaagtcgttggttttgatcgttccttcttcatggtgtgtctttttaaaaaatctaaatttgtgtttaaagctgtggggcgtaacggagaggaatttttcgtctttcttgtctttttctaacgatggagtgtcttcgtcactagacatttcaacaccttctgtggtagaaacgatgccacaagtcttcgatatactactctcggataaatcttcggaatccgagacgctagaattttccttgctgtctgcgatcgtttttagatccggtttgtgggaatcggatttcggtctgtgaagcggcgaaccttcctcatggtttcttgacttgatttctgttattttttcttcgacactcttcgtaattttgccttttatatctgaaaaaaatctccacggatcagaaggtggtgaggcgttcaacggttggtgggtgacgtccacgctggtagacctcttcccgattttgttgaaatattttagaggactgctttcgggttcgcctatattagagggtgtactggaagctgatgtaatttcgttcttctcctcatttttgccagtagcctcgtcttcgctggcgtacagttcttcgatttgttctgcattggcatggaactttatagaaatttgaggaacagaagtggtcactggcttaccttcaaatattctagaaaac

SEQ ID NO: 6419 - DNA, 3226 bp, Diabrotica virgifera
  SmartBlast Evalue=0; Info=Unc-112-related protein (Fragment) n= 2 Tax=Formicidae RepID=E2BUI6_9HYME
gagcgatagtcagtgttgcgatcgtccagcagtcttccaaaaattgacgtgttttctggaataaacaatatgtgattgagtgctttttaaccttaaaaatcaaaaagtttcttgtgatagtgaagtgaaatacttaaaataataaacaatgtttgcgaacggacaggtagtaggtgatggtacctgggaccttcgggtttttgtcacagatctacaaacggagaggttgattcgcgtaaaaggagatgtccacattggcggagtgatgttgaggctggtcgaggacctagaaatttcaatggattggtctgaccatgcgctttggtggcccgataaaaatatatggctgacaagaacaagatctactctcgaccaatgcggagtccacgcagatgccttacttcattttactccaatgcacaaaattctcaggctacaattacccgatcttaggtatttggatatgcgggttgacttttcaatcaaaactttctccgctgtagctcaactttgcaaagatttaggcttaaggcacccagaagaattgtctctttcgaagccactggaacccaatcatttaaaatacaattataaagacctgccaaagaaaaaatacgaaaatggaacgaataggaacggacaccttccatcggataccaacacgtttatagcgaatagcagtccgggaggcagtaacggaagtttggataagtcttacatgtgtgctccagtaactccatctagaggaccgcaaagttcaacgcctgtaaatagtcctagtggaaatggaacatggaacagaaatggtttcggcaacgacatgaatggatcattaaattattctggatacgtacctaatagcgcaagtctcgaacagcttgatggatcttttgataattccttagcacacagtccaccatcacccagtcaagaagccaagaggcatcttattagaccgaaatcattaatagaaaaggctcgaatgaatgttgcgtggttggattcctcactctcaatcatggagcaaggagttagagaacatgacacactgtgcttaaaattcaagttctactccttctatgacttaaatcctaaatacgatgctgcaaggatcaatcaaatctttgaacaagccaaatggcaattgttgaacgaagaaattgattgtacagaggaagaaatgttgttgttcgccgcattacagttgcaaattaagttacaagcaaatcaaccgcaacctgctttggataacggaagcgctccatctcctatagaagacgatatagatgccgctttgaataatcttcagacaactttagaggggtccagtcttaatacttactctaacgacatcacacaagtgcctgaattgagagatcaacttcggttcttaaagcctaagcggtttactctaaaggcttacaagaaatactggttcacttgtcgagacctccatctcttcatgtataaaactagggacgatatgctcagctcccagaatcaagtgttcaaaaccagtttgaagggttgcgaggtcactcccgatgtgaacattacacaaaacaaatatgttataaaactggaagtacctagtcctgaaggaatgtccgaaatgtatatacgctgtgatgatgaaacccaatacgcaagatggatggcttgctgtagattagcagcgaagggtagatctttagctgatagttcttatgaaaccgaaaagaagaccatattggatttcctccacttacagaggccttcagagcaaccagttctgaatcctaatggcttggatctgcagatagaggattacattgctcctaaatatctgaagaagtctagaggaaagttgactcagagaatcctagaagcccatgccaacgttaaggatctcagccttatcgacgccaaaatgaactacattaaagcctggcaactcctcccagaattcggaatcagcctgttcgtcgttaagttcatgaactccaagaaggaagaactattaggagtcggctacaaccgcattatgaagatggacatcaacacaggagaccaccaaaagacgtggagatttaacacgatgaaagcctggaacgtcaactgggaacacaaacacatgatggtccaatttgaagaagaaaacataatttttagttgcttatcggcagattgcaaggtcatccatgagtttatcggagggtacatattcttgtcgactcggtcgaaagatgccagccaaacgcttaacgaggagttattccataaattaacaggggggtggtcgtagattataaaaattagtgcctttaatgaaatgtgtcaattaatatttttagagcacgcttctctcagtagatcttcttattattaagattattgaatctcttacaatacaataagttgtcaatgatataccacacaataagtataggtgccaaatagtctattacgtcggtttatagatatttttcattttagaaatgatagattaacaaaccaaatattttaaaacggttgacgtgtctttaagattcaataaagtttcaacttgcatgtttcagttccataattaggtcttccatcttattatattatcactactattattgatcctgggcacaagttttgtcacatacgtgccactgtatgggtaaaaggagtacagaaattgagtgctattttgtgcaacgtaaaaattaacccaagggggtgtctgaatttaccatttaatgacgaataaatggatgaactgctttccagatgttccacactaaagttgtcataggaaaccatggcattaagggaaatgccatattgccagaaattaagaaaaccatattatagctcctcaacaataaaatcacacaaccttctaactccagtccttttctcatggcggacaaacgaaattgttcgcccgctagaggaccaatatctctagaaggacaggacagatctcgttagaggaatctggcatcatggcagtgtaaataaacatttagattatgcttattctcttggcagattttaagacgcagttctcgaagtggtaaatacaattcttatgaaagttatatacagattggacaaaaaaatgctaaaattttagtattaacgttaattaatcggagcaaaaagcattttcaggacaaatattttccaacactatttatatagtttactatactgaaaagtattttcgacttacaccgttaaaatgtattttttg

SEQ ID NO: 6420 - DNA, 3219 bp, Diabrotica virgifera
  SmartBlast Evalue=8E-38; Info=Serine/arginine repetitive matrix 1 (Fragment) n=2 Tax=Eutheria RepID=A2A983_MOUSE
ttttgtttaatattcgcgtctgtaaagagtgagactgttttctttctagactgatctaacaatacaatattatcaataaatatttcactgaaaaagtgtagatgtggtcatatttagggtaaattagaagaagatctaattttcattaaataataacatgtaagattgtaataaacacccatgcgatcttaccacacacattgtagatatttgtattgttatatcgcaatctaaatacacacaccagcttcaagatgatgtacacggacaaccggttcagcgacaaggagaagaagctcctgaagcagatgaagttcaatccttgtctgagtcaacaggttgatatgacaaaagtacagttggatgttatcaagccttggatttccgataaactaactgaaatgcttaaaatggatgatgatgttgttgttaattttgtctataatcaattggaagttaagtatccagatcctaagaagatgcagataaacttgactggattcttacaaagcaaaaattcaatggactttatgacagaactatggcaacttctaatatcagcccaggaaaatccaaaaggaattccattttcattcataaatctaaaaagagaagaattagccataaaaaaggaaaaagaagataaagaacgggaacagcgagaaaaatcggacaaggaacgtaagtatcgtgaccgagatagatcccgatccagacgttccaggtccagatccaggaaccggaagtcatctagagaccgttcgagccgaaacaagaaatctaaaagcagggatcgaaattcgaggagtcgcgataggaaatccagaagtagggatagaaaatcgagaagcgtagacaaaaaatccaggagtcgggataggaagtccggtagtcgagataggaattcacatagcagggataggaagtcgaggagtaggagcagggataagaaatcggcgagcaggtcgagggatagggtaagcaaatctaggagcagggagagggataggaccaggagtagatcggcatcgaagccaaaggaagacattcccaggaatggagatgttagcccgaaagttgcagttaatggtggtagagaagattctgaaactgaaaagcaggcgaataactcagcaccagcacttccggtgtccaagcttcaagcgaagttgatgtcactggcagagaacaagaaggtctcgaggtcgcgttcccgctctaggtcccacacccgttccaagtcccgagggcctcgatccaaatccaggtccaaatcccgatcatcgagccgttctttcaaaggaaggaggtccacttcgaaggaggcgaaggtcaaaaggagatcgagatcgtcttcaggctcgaaggagaatttcgaaattcgcaagaaagaagacagcgtgcagaagaagcgacactatagatctaacaaggacagttccgacagcgaggcggacgcgaagaggaaaaggtcgaggtcgaaatcagctagacgtaaagacagtccgaggaagaagagaagtacgtctaggaggcgatccgatagcaggcggagaagtgcatcaagaagacgaagcccatccaggggaaggagaagccctagcagagatagaagacgacgcagtatgtcgagaggacgtccaagtcctaggagaggacctggtggacccagagggagctacggccgcagaagcagaagtcgcaataggagaggaaatagcagacagagacgcagcagtcccaggagacgttctagaagccacagtagaaataggttccgtcgcagtagaagtcgaaatagaaatgcctataggagaccatccccctctcgtgatagaaggatgtcgagggatcgtcggtcgaggtccaggagacgctcccgtgaaagaggcagcgtcagaagacgctcaccaccgcgagacagatcacgccccaggagacctagccctagtccacagaagagagacaatcgaaaccaaggacgtccaaggaaagatgatcgtcatcccgagccacctccgaagaaagtcgaggaagccaggcgaaggatagaagaggagatcaatcgtcacgagaagaaagaaagagaagagggcgagcggaagaagaaggccgaagctgcagcagccgaggaaagatcaaggaaggagaaggaacgagagaaggaaaagaagaaatctagaagtatcagtcccgaggagacttacccgataccaccacatggtcctccgaggtattctaggagtttgtcgagaaccccgtcgccgttcatcaaggcacacgagttccctccgaagcccgctaagacgacgagcgtcaaggaggacaagaaaaaagccagcaaggagaagccagaagcaaaaccgaagaaggttaccaagaagccacccaagagcgagtcggagtcctccagcgagtccgaaagtgacgaggacaccaggaaggataagcgcaaagtccgaacgaagaagaagccaaagaagcgggactcaagcagcagcgagagcgaggacgagaggtcttcaagagaagtagaagtcaaaaagaagaaagaaaagaagaagagggacagcagcgaggagaagtcttcgaagaagcgccaccaaagctccgattcagaagaggataagaagaaaaagaagcggcgatcgaagagttcagagaaatcgaagaaatccaagagggataccagcgagagcgacgtgcccgccaagaagaagaagagtcgacaagacagctccgatgagtccgaaaaggaaaagtccaggaaacacaagaaggagaaggatagttcatccgagagcgacgacgattcatcgaagaagaggaagcacaagaagaaagctacgaaatctgtcagcgattctgacgaggagcaagaggtgaagaagaagaagagggataagaagcacaaaaagaagaagaagcatactaagaaacacaagaagcataagaagaagaagcaggacagcgacgactcggacaatagcgaatctgaggtggtaaatgaggacgagaaaaagcttcgtgagaaagctttgaagtcaatgaagaggcaaaattctagcgataagtctgagtaagttgcattgaatctagcgtaaaatatgaagtatttcatttacctttactattgcttaatcagtgtatgatactgaaactgattttaaaaattgatgttactttagtttataataacaataaatagttgtgtatgtg

SEQ ID NO: 6421 - DNA, 3201 bp, Diabrotica virgifera
  SmartBlast Evalue=6E-96; Info=Endonuclease-reverse transcriptase n=1 Tax=Bombyx mori RepID=D5LB38_BOMMO
tccaatctaagtttccaaacttaaccaaattcatcataattcatcattcagtaccattgccataagttcattagccaagaagttctgctataacatggatcccttttaccatcaatcttgtggtatcttgatcagtgtgtatatttttacatttgtttaggtagtttaatacttctgcggaacttgtcgataacctgcatgtgtctgtaacaccatatctcggatgcctcgagttttcttgaaaaagctttgggatgtgtgcaggcctctactccgtataacatagaaaatacatagcatctgatgatagatattttggtagcaagtggtaaattgcgacttctgaaaagagacttcatcattatgaactctgatttcgcttttcctacgctttgttttatttcacaagagtggtcccattacctgtttatattggtaccaaggtatgtgtagctgtcgacctgtcaattagttgttggttaaccaaaagctgtgtatttaatatttcgcgcttactgactaccatgtactttgttttttcgtattgagatcaagtccgtattctctacttatatctgatacgcgtgacattattctttgcaaaccatctagactgtctgcaaaaactatagcgtcgtcagcatatctaatgttgttcagacgcactccgttgactaatacgccttcctgtagttctcccagcgcttgctcgaagatacattcagagtatatattaaacagcaccggggacaggatgcatccttgcctcactcctctatctatggagactgcctctgtcaattgatcatccactttaatattggcagtttggttgtaatacaaattatatatgattctcaagtctctatcatctactcccgcttctttcaagatgtttatgagtttatcatgttttactctatcaaacgcctttttgtagtcgataaaacaaatatacacgtcacagtcaacatccctgcatcttgcataagcacttggacagcgaatagagcctctcgggtgcctaaggcatcgcggaatccaaactgcgtccatgatatctgttgttcgcattttttatatattctgccgtgtatcaccttcagaaacgttttgagtaagtggctcattaggctaattgttctgtagtcttcacatgttttggcatttacttttttgggtaaagtttcgaaggtcgactttaaccagctttggggtatttttccagttacgtatattttgttgaatacagttgttatccattttattccttgttcatccataagttttaggaattctacataaaactggtcaggccctacagctttaccatctttagttgttttaatagctgacgtgacttcttcaatggtaatcgggggtcctgtttggcattcagtgtcttcaatggtattctacctttcatctgcaaaagttacttccacatacttcttccacgtgtctagtttttcttccacacttaacagtggtttgccttggttatctgccaaacacccaactcttctatgattgtactgagaagaacaacgaagtactgagaagaataggtaaagagaagggagttgaacttacaattaaagaaagaaaactacagcatctcggacatgtaatgcggggcgagaagtatggcattctgcgactcataatgcaaggaaagatagatggcagaagaagcatcggaagaagacgaatttcatggctgaagaacctgagagaatggtttggatgcagctcaaaacaactatttatagctactgcctcaaaaattaaaatagctatgatgattgccaacctccgtagcggagatggcacctgaagaagacaatatacaccacttgaaggtagaaagatggtattctatgaatcttttataaaacacgttttacaacaaatttcggcgcggtatggcataccgcatgttagtggttaagggacagacaaactcagccttaaaaaggatatttgtgtttacacaattatatacctaagtattttaagagcctttgtacttaaaaaagattatttaaatatatgacaagacattaagtttaattttgtgttaatataggtacagtacaacttcgtatgtaagtcatttttatttaaaactgtatttgctttaagtcaaataaatgtaacaaaagtaccttcctttaatgtttagaaatacgtgcatgtattaattagtgtatatgcttaggtattttcaatcttaccttcctcatactttcttttatatcaattatatttaatcaaaaataatagatacgaatacctagtcatagctgtgttttattaaatacttttaaaatgttagtttattacagtattattttgaaggcaaatagaatatgtgtgtaaccactccatagtctgcaatttggtttcgcatctcccagtaacaattcgattaattagtgagtcacatacggttcggtcatttttgaatttaatgtaccattgacgcactccacattcagtgatcacattgatcccataaacaccacaaatttcgcgataatgcgacacggacttccgtgacagtgacttcccgcaagcatggctggacagctactgaacggaggaacgccacgatgctatgatggccgcgctagccccacccccagcagctacagatcaaaacgttatctaaatttctggatagccttcaaagatccgcctttatctcagtatgttcgcctacagcgtattcaatgagtaggccgtatatttaggatagaagaaaatgggcttccaaaaaagctgttgaatgcaagaatgcagggcaagaaactttgggagaccgataaagaaatgggagaatagctacagactgtaacgaatggagtacagggctcgaattgggccgtagagccataggatgaatggaaaaaaactacagacatccattaaatgagtaacaaataaacggaccactaaatgatgaataaagctaaactaatagtgacataactagtctttaggacatataaataattataaataaatcagacttccgatctcaaaattaacacgacaagtaaatgccttattttgaaatttatttattctcaaaagctataataaactaaagctgatataaactatttgaattaaattcaaataaagacgttatctcataattgtggttatacagtgctagtcaaaagtccgtacccc

SEQ ID NO: 6422 - DNA, 3214 bp, Diabrotica virgifera
  SmartBlast Evalue=0; Info=Insulin-degrading enzyme n=1 Tax= Camponotus floridanus RepID=E2B270_9HYME
aagttaagtgttttattaacagtaaaactgccacattcaggaaagttaaaaaaaatattagtccttaaatctaatcacggcatcacagtttgcatttgttgccctttcgcgtaatgttaatgtaaggttgcactagtggatacatctcgtgacagctcttaaatacagtaacgtcattaataacggaagcgctgcaagttccatcaccgacctcattggtttcctcggcggcatttcttccggctccaccttctgccattgaaagtacttggactgtcaattttttgcgcttctccgcgtttttgctcagcacctctttatagaaatcaataatatcctctttcgtaagagtcctcaaataggctacctctacgttcgctctatcatagtgatattgttgtgaagtaatttcctgccaaaacttgttggttaaagcgttgagctgtttcggcttttccagcctttgagctgctaaagcttcgcgatgttttaaaaagtcttcttcgctcatttcagtgatgtgttccagcatactctccaaaaacttttccactcttgagtccagatagtttggatgcctgtcagattgcacaattatccttagcccttgcactccgttcgatctcctaacgccgctaaatactatatatcctaattgctccttagtacgtaaaatgttgaaacaaggttcctgtacaatttgggccaccagttcaagttttacgttgttttccttcgactgtagcccacattggtaatagagttctatacaagaagatttgtgaacgtcgttactgacttcgtaagaataatcagaaccatcttcaagttttaactctctgttaagaagaagttgtctgggaagtagaggggacatgctcatcgccgttgtgagaccatcttctactatgtgaactagttcaagtgctttttctttattaacattaccatgaatgagacactcaatgtgcatcttcgacaacatttgtggaataaaagcttctaatctttcgattgtcaattgatcagttgctgctaaaagttcttgttttgtccatgaatgttccgtcaacagaacagttaagtaatatacggcatgttgatagggttgctcagcagcaaagtttttcaaatttcgtatgtaagtttctttaagtatattaaacctcttaggatcaatcttgaaattagttaatttctccatgatttttttcaataatatatgttgtttattattgtatccgccaataccaagaatcaaaccatattttgtattaatcaactcccatttcaaacctgcaagctcagctgcatacgcatactcgtttaaggcatctttgaaaagttgtaccaacatatgggttaaattacaatttgatggatctaaataagccagagggctcacgaaatcgcacatgagatgcgatttgggcagtaaaaattgatcatcttgtttaaaccatactctggtcagcccagtatcttcaattattacaggaaattcagtaacatcctcgtccagcgtatacaaactaaaatctgtaggaataaattcgttcttttcgggcatcttcaaatctggacacagtccagtttgtttccacgcctctatagtttctttggggatatcaactttcttatacttagttccataccagggttctgtctcattaagttcattttcgaatttcttagctatcacagatattctaacattatctggaacaaaactattccatacactttcaacaagatcaggacgccattcacgtaacatgtagtttgcactcaggatgtcttccattggatattcttgtatactatgaactaaagacgagatataagttctaggagattctttgtctttaaatctaaatatcatatgtccaatatttttattttcatcctgcacccattgctgtgggccttcttttttcaacatgttcaaatactggaacactaattcgatgatttcatcaatgtggtccatgccttcttctgttaaatcgacagctacggcgaaaaagcctatacctctaggagcaggtttacttccggctactaaattgttggaccatcctcgagccttaagtacggacaaaatactacctggaccttcgtggcccattaaatggcttatataatgactaggtgatgatttatagaattcagtcaaatcttcactaggaaatacaatatttaaatttctaacatcctttactggagaaacataaactttagtacgaaattgactgtctgaaaaaggatgggtcttccatactggtgcttctacatccttgttttgtacacttgaaaataatttaacaaccatttcttctagttcatctaaactctcttttcctaatatagccaaactcataatatttgatgagtaccacttattgtgaaactctagtaacttctctcttacatcaatattattctctttaggaatttttattaaagtgtctttgttgcctgttccaaatgtgttaaatgggtgatcaggattggctaaatgtttatttaattgatcaagtctccaaagatcattgggcaaatttttttcatgttcagaattaacggcgttaatttctctttctgttgcactctctgtaaaaagtggagcaataaagaactgggaaaatctgtccaatgcttgggggagttggttgggaactatatcaaaaaagtaaactgtgtgatccagatatgttgctgcatttgtactgccaccatgttcacttaaaaacttattgtagtcattttcattaggatatttctttgttccaagaaacaacatatgttcacaaaagtgggccagcccatacacttcttttggatcgctaaggaatcctacattaacatccatagcagctgcagatttatcagtttttggatcacttacaagcaacactttcatatggttagacaattccagacctctataaagcctatgatcttcttcagactttgttatattatcataccttttcaatacgaaatttgacgtccccatttttggtttgctgtctttgagaagctctgctgtactatacaaaaaaaaagtagggcgaattttctttgacgcgaagttttggacaaataggactgtatgtcttaagcaatacattcgacattaagattaaaaatgagctgtttaatttaattaatggataaggagtcactaattatttttagttttttattgttg

SEQ ID NO: 6423 - DNA, 3208 bp, Diabrotica virgifera
  SmartBlast Evalue=0; Info="Hect E3 ubiquitin ligase, putative n= 1 Tax=Pediculus humanus corporis RepID=E0VG83_PEDHC"
aaacgtcaagaagagagtccagtttattgtattttaattatatttttttacatgtaatgattaattaaatcagaagtgtcaatagaagaagccaaagtacgcaggaaaacaaacaagtatgcaatccgtcgaaaatcatagctaacagcttaaaatgttcggctggggaagtactattcatggtgaattaggattgggtggtgttgaagaggagtatatcatcacacccacaaatgtagactggtacttggcaaacacagtcattaaagcagccttgggcgaaaaccatactcttctcctcaccaaagaaggaaaatatactcttgtggtagcaatgactatggacagttggggcatgaccagccacggaagaggccacgtatgtctttatttaaaccggtagcaggattggaagctcaccatatagtaggaataacatgcggttccagacactccatggccttgaaccagtggggacaagtgttttcgtggggatcgaatttgcatggacaattgggctacgatactgatgaacaaatccaagcaataccgaaaacaataaagagattagccccttacagtatagttcagatttgttcgggacagaggcattctgtggccttagctagcagtggtgaaatattaacatggggagcaaacaattttggccaacttggagtaggtcatcttccgtctaaagtggaatccaacccgaaaataatatccactctgttaggtgttcctatagcacttgtctcttgcggtgctaaccataattttgccatatccaaatccggtgcagtatttggttggggaaaaaacactcacgggcaattgggaattaatcataacgagaataaaatgtttccagagcatctgaaaacacttaggaatattagagtgaggtatatagcatgcggggaggagttttctatgtttttaacattagacggaggagttcttacctgcgggtctggaatgtacggacaactaggacacgggacgatgagcaatgaaatattacccagacaggttatagaactgatgggatcgacaataacacagatcgcctgcggtcgacagcattctctggcgctcgtgccgtctcgaggaagggtgtacagtttcggcacgggcggatgtggacaattaggtgccagaaaaacgacgaatgcctcaacaccccaagtagttttaggtccctgggtatctccaagtggtatgtcactaattcctgtagcccaagatgtaaaaaatttagtcatccatcaaatatttgcaggtggtgaccattgtttcgtatctgtgataaaaaaagacagcaaagtgcctccgttcgatggtcgcgacatcgatcctttgactcaaataactgtcctttcctataattttgtaaagaatcttttacggatatcagctaaagacacggtcgatcacgacgtctggacttttctggagaccgcgttcaaaagtttggcctgcataaacggatcgttcctattggacaatgatgctcactacatctgtaacattagaaaccacggtgtcaatgtgccagtagccgaggatgccttttcttatatagcgaagattgagaacgagagtattaaaaatttgatttggaatagtatagtcgataacatcattcctagtcttacaccgtctccccctgaccaggaagctcttcgaatatatctgacgctaccgctgtatcacgaattccagaaccccaaacagcatagtaaattgcataaaccgttcgcaaatgctgtgcttatgttaaccaaaaatgctactaatatagtgtgtgcttggtggaggatgatgaacaatgattattttgaaagactagtcaattcctttaagtccgtagctagtttcataatacgaaatcaaaaagtacctgagggatcgttaattttttacgatcccagtctagtcgctgtgttggatgttcttaaatttctcaacgatgtcaaccatttagaggaaggtttaaaggtgtcgtacgataccttctatataagtgaccttacagaatttatgaatatccgatacgattatgtttattggttgcgacagcaagctacacgtgttcagagtgatagggtgcttctatgtagctacccttttgtgttcgacgctaatgcaaaagttcagttgttagaaacagatcaacaaatacagatgcacaacgcgataacagacgccgctcagagagcagcaatggctatgctgttttcgccacacaacttgcattccattcagagccacctagtattgaacgttaccagagaaaatattgttgaagatgccatacgagaacttatgaatagtgatattcatgatttgaagaagcctttgagggttaagttcgctggagaagaggctgaagatgccggaggtgtaacaaaagaattctttttgttgttactaagggaaattttagatcccaagtacgggatgttccaagaatacgaagagactagagcgatatggttttctgagtcgtgtttcgaagacatttcaatatacaatttcataggcaagtttcttggcctggcgatctacaactttactataatagacattcctttccccctggctctctacaagaagcttctaggcgaacctataggattaccagatcttaaaggtctctcacccacagtggcgaattcactccagtgtcttttagattacacagaaaatgatatgcaagatgtgttttccttatattttgacatatcgagagaatctttcggcgaaaccgtcactattcctctacaagctaacggttcagatattccagtaactcaggagaacaaacaagagtatgtcaaactctacgtcaactacattttcaatgagagtgtcaaacagcaatacgaagcttttcgtgatggatttatgaaggtgtgtgatagtaagctgttagaactgtttcgctctcacgaactgatggatatgataactgggaacgagaactatgattggcatgctttagaagaggcggcagaatacaaaaacgggtataaatcatcagataaaacgatcagatggttctgggaggttatccatgaaatgtctttagcagagaagaaaaagtttttattgttcttaactggcagctatagaatccctattcaaggaatgaaaggagtaaagataataatccaaccaacaaacgacgagaagtacttgccag

SEQ ID NO: 6424 - DNA, 3197 bp, Diabrotica virgifera
  SmartBlast Evalue=0; Info=Phospholipase c beta n=3 Tax=Culicini RepID=B0WMG5_CULQU
acgaatatggattcttcatttactggaaaagtgaaggaagggagggagatgtcatcgaattatgccaggtcagcgacattcgagccgggggtctaccaaaagatccaaaatatataaataatctggtaaccagacatggacaagacgtggaggagaaatctcttacgatatgcagcggaacggactacatcaacataaactaccagcatatcgtatgcccgaacgcagaaaccgctaaggtatggttggatggactaagaaaaatcacccacaacgggaaagcaaataatttttgtcccatgacatgtttgaaaaaacattggatgagactaggattctctgtggatcacagaggccaaatcccggtaaaggtaatcgccaggactttcgcgtccggcaaaaccgagaagttggtctatcagattctgtccgaacttgaacttccgtctggaaaaaatgattccatcgaaccagaggctttcacctttgacaaattctactcgttgtaccacaagatctgtccaaggaatgatattgaggagttgttcaggagcataaccactgctaatgccgactacttgacattggaccagttcatcaactttttgaacgagaagcagagagatccacgacttaacgaaatattataccctctctacgacgaaaaacgtgctcaagagattataaatacgtacgagcaagacgaagtctcaagaactgagggaaaacttaccaaagatggattaattaggtatttaatgtctgatgaaaacgcgccagtatttctcgatcgtctcgacatctacatggagatggacctacccctttgcgcctattacattaactctagtcacaatacttacttatctgggcgacaatttggtggcaaatcttccgttgaaatgtatagacaagtattgttagcgggttgtcgatgcgttgaactcgactgttgggatgggaaaactgaagaagaagaacccatcatcacccatggtagagccatgtgcactgatattctgtttaaagacgtaatctacgccattagagacacagcattcgttacatcggaatatccagtcatattgtcttttgaaaaccattgctgcaagtcccaacagtataaattggccaagtactgtgatgatattttaggtgatttgttgctgaaagaatctcttgaggatttccctttggagccaggtagtcctcttcctccgccaagtgcactgaagagaaaaatattaattaaaaataagaggttgaagccagaagtagagaaaactgagttggacctgtttatgaaaggtcaatttgtgattgaagatgaagaaaaggaagatgcaaatgcgagcgcagaaaggcctattccaccagatgcatccatcgagaatcctccggaagctgccgagggagagatcgcagcaccagttaattatactggttctactaccaacgtccatccttggttaagttcaatggtcaattacgcccaaccggtcaaatttcaaggatttgatgttgcagaccagaagaacattcatcacaatatgtccagtttttctgaacctgctgggttgaattatctaaaaacacaagctatcgaattcgtcaattacaacaagagacagatgtcccgtatatatccaagcggtgctagggccaattcttcaaactatatgccacaagtattttggaatgctgggtgccaaatggtatctctcaattttcaaacttccgatctgccgatgcagttgaaccaaggaaaattcgaatataacggaaattgcggatacctcctcaaaccagatttcatgagacgtcacgacagaactttcgatccgtttgcagaatgtcccgtagacggtgtcatcgcggctcagtgttcggtccaagttattgctggtcaattcttgtctgataagaaggttggcacatatgttgaagtggatatgtacgggttaccgacggatacgatcaggagagagtttcgcacaagaatggtacctgcgaatggtctcaatccagtctacaatgaggaaccgttcttattcaggaaagtcgtattgcctgatttggctgtgttaagatttggggtgtacgatgaaaatggaaaacttttgggacagagaatccttccattggacggtctgcaggccggctaccgtcatatttctctgagaacagaagccaacttccctatgtctcttcctatgctgttctgtaacattgagctgaaaatttacgtaccggatggtttcgaagatttcatggcagctttaagtgatccaagaggttttatgggggcccagcaaaagcaaaacgaacagatgtcctccttaggcatagaggtcacttccgataaacctgccgagaagaaagaaaagaaagaggaagtaaaattggtattcgaaccaattactatcgaatccatcaagcaagacaaagccttccaaaaaactacgaagaagcaacagaaggagtacgatactctgaagaaaaaacaagccaaagagaaacaggctgtgcaaaaagcgcagtgtactgccatcgataaactaattaaaggaaaaaataaaaacgatttagtgaatgaccccacagttcgtaagttagtgacggagcaaaccttggaatggagtgccctaatggagcgtcatcgcaaacaggaatgggaatttttgaggacgcagttgaacgatcagagagacttgctgagaaagcatatggaacttttgcaggggatgcaaatgaaacagttggagggcaaacacgaaagagaattaaaagaactgagcagtacgcaggcgaagatatctgtcgagactgcaaaagaggtaaacaacgacaagaatctgaagacaaagaaagataaggagagaagattgaaggaaaagcaacagaataacaataaacgtttcatagaagaaagaaaaacggctcaaataaaacagaacagagaaaaggaaaagttgcaaatgacccatgccaaacagttagagatgttgtcacatgatattcagaagatgatcgatatgtataaaaacgaagaggcagaatatgatatgtctagcaaaacagaatttttcgcttaaaaattttagagttcttattgtcgttacttgtagctttatgaatatttaattaaattgtatagatttcgaggtcaagtaaattatatgaattatttaacgttg

SEQ ID NO: 6425 - DNA, 3185 bp, Diabrotica virgifera
  SmartBlast Evalue=0; Info=DNA-directed RNA polymerase II subunit RPB2 n=19 Tax=Neoptera RepID=RPB2_DROME
cagtaatttcgcagcataaggcagtctaacttgcgatatctgcgtcttatttttgcaacccttacattcaaaggtgttgttacgcaaattggcgatagctatcaaaccacagaagttgcaaatatggattctataaggatcagaaacttcaaacagcctctctcttaagaattgtgcagcaccgtgtgaaatttgacaatctcgttccatctcaccgaaacgtagaccaccgtctcttgcacgaccctccataggctgtctgacgagaatctgcaacggtcctctagctcttgaatggatcttatcgtccaccatgtgcttcaatctttgatagtaagtaggtcctaagaaaatctgagcatttatcttacgtccagtgtggccgttgtacattacttcgttgcctctgagttgataaccatattcttgtaacaaagtggagattttctgtacgttgacggcatcgttgaaaggtgtagcatcaccgatttctcctttattggatgataccttaccttggatgcactcgatcaagtgaccaatcgtcatacgggaggggatagcgtgaggattgatgataatgtctggagtaataccttcagcactaaaaatcatatcctcttgacggtattgtataccgcacgttcccttttgtccgtgcctagacgcgaacttgtctccaatttgtggtatcctcacagatctcacccttatcttacaaaacttatatccttctgaatttagcgttaacatcacttgatcaacaactccagtttcactgttacgcaaaaatgttgatgcgtctctcttggagtaccgttttgtagttccatccaactcgtcatctgtttctggtagcgtcatagtttttcctataactacatcgtctccagacacacgaatacctggagatatcagtccgtcgtcgtctaatttatcgtaaagggcattcctcatgccctggcacgtctgtcttgtcggtttttcgaattgttcttcctggtctcctatacgtttggattcggcgtctttataagaccggtaaaacacagatctgaaaaatcctctttctactgcagaagcattcaagataacagaatcttcctgattgtatcctgtataacaagcaatcgcaacgatactattgattccagccggtaactctctgaatctaagatactccatagatcttgtcgttaccagaggtttatgtggatagtacaggacgtgggccagtgtgtccattctaacgtggaagtttgtgatatagacacccatggcttgtttacccatagcactttgataggtgtttctgggactctggttgtgatctgggaacggaatgatggaagcgcaaactcctaaaatcatggctggatgaatttcacaatgagtgtatgttgtacaataagcgcattctttgtcttggcgtaaatcttcggggttcatggcaatcattacggtttcttcttctaaggtgtctatgtactccaccacaccagacgcgaccagtacctgccaaccataattattatattctctttcttttaacatatcaatatgtcttttcttcaatagcaactggccattttcgacgattaacaaaggtctacagattcttccggcgtctgtgtaaattcttatttctctgtcacgaatatctcgaatcatcgatacttctgatacgatgatgtccatttgacgtcgaagtttacgcagtgtcgccataagttgttcagggtctctgtgaattcccacccaacaaccattcacaaagattttggtagcgttagcaattgcagatggcgctatttcttccaagttttccatggaccactcctccaagaactccaaaattggcgatggttgggaaccgacggaaatataagccatcagagcaagattttttacaagtcctacagcagcaccttctggagtttcagcagggcaaatcattccccacaacgtattatgcaactgtcgaggcttggctagtttaccgtctcgtccaattggagaattgacacgccttaaatgtgacaacgtcgatgcgaaagttagacgattcaatacctgggacacgccagctcttgcttgatgggcttttttctggtcaccccagtttccagtagcgagagaatacctcagaccgtccgttattagtttggttttgatggccagatccagattgaaatctttgcctctatcgataaacttctgggcatacatacgaacttctttcattaggttcttgaaaagccctctgaagaggaaagccaataatggtccagccaaatcgagtctcttatttccgtagtgatctctgtcatctaactctcgacgtccgagtgcagccagcaaaagtcgatgtaccatatatccaagaaaataagcttttttagtctcacaaaaatcggatacaccaacatgaggcaacatttccttttgtaaaatttctctagcatatttcacacgcttttctttagttactcccggcctggcacctctcgctccgatgaaattcaaagcaatattctgttcctgaattacgaaagcttcatctaacgaaggttttaccatttccatcaattctggatcgtcgaaatcgtaaataatgtgttctagaatatctctgtctgctacaaaccctaaagctctgaaaactatcattatagggatctcttgtttgatgtatggaagaatagctataatacgttgaccaatagcagcttttttgatggcctggccaccacgagccatcatatttacccacagagttgatgttggccgagagctgtgctcaagacaagatcttatttcagatttgtacgcatattttccgtctttcattgaaaatacatatactgtgttagttgccatcttctcttgagcaattaatactttttcagaaccgttaattatgaaatatccgccaggatctaagggacactcgtttaattctgttaaatcacgatctgttaatccactgagcagacagtatgttgacctcaacataatgggaattttacctataaaagttttctgatgttgagtttctataggatcctctccttctttcacaattgtttttgttatatctacataaagaggagcagaataagtcaaatttcttaatctagcttcattaggcatcataggagatggggcaccgtctttctcccaat

SEQ ID NO: 6426 - DNA, 3185 bp, Diabrotica virgifera
  SmartBlast Evalue=1E-169; Info="Programmed cell death protein 8, putative n=1 Tax=Pediculus humanus corporis RepID=E0W028_PEDHC"
gcaccagtactttttaaaaattacataaatctcaaaaaaagtatcagaaactaacaaatataatacaataggattggagtttgatggagaaggatatggaattttgtaggtaaaaatgcgtttaataagttcttactaactcctggatacaggtcgtaaaagtaaattaaatctagaaatatttgactcgattccttaccatagaggaatgtttttggatgcacccaaaataatagggggcatctgacaattacatgacaggaaagcctgacacggaccataagtctcgtaaaaatagaactgttgtaaaaaatttaacgaatttgtatttgcagtaatatacataaataacaaaattaaaaatttaactagtcaaccatttctagatatttatatttgaactaaaaacgaggtatttctattcacacattgcaacacatttttcacaattttctgattatttcgaattttccggttttttcgaattgtctggttttttcgaatgttctgaattttcagatttttctgagtcctccgctttttccgaactttccgaactcacactttcgtcgtgaatattgaataatttggctacctcattgaggtcttcatattttttctgatccatgagcacctgtcgcgctatgttcattctgttaaaaacattccacagtactatacccactacgatatcgtctcttaaatagaagataattcccttgccgaaatcttcaccttcggcaacgttcggtatattaagagatcgtcttttttcttccagttcttttttctgttcttcggttaggtacttattgcattcttctggtacctcttccgttttagatctaattccctcatcggtagcagtgactaccgccctaggattatctttgtcggtggctttggcaaataccgcaactgtaggaagagccgaatcaacaataccgatggcttcgtatcctacatctggtcccagatctgaccagaacatgctctggtgtaagtaaggctttcgacctccagtcatattctcgcctgctaatcgtcctgtgaccacggcgtggtcgtgatgttcgaaacgtcgtctgcctagttttgtatcgtagaagcaagcacaatcgccagcaatatagacatcgcttcttgcttgtaattctgtattaactaaaaatccacccaattctggatcaacttccaaatccgattcttcggctagatcagtatttggctcaactcccatagccacgatagcacaatcaacgtgcaaagttgaattatcgtttaatgttaaaatcattcctttctttccgtcgtgtttcacacctattacttctgtatgaggttttacccgcacaccctcatcttttactttctcagtcgtccaaagagaaagatattccggtaatactttacccatatttccgccttctttaaaaagttggtatatctttctaggatcttttgtatcttttgaagcttttcttgccatggcacacgccaactcgctacccaaaaatccgccaccaatgatggctacggcttgtgcgtgctcaaacttctcgctacattcttcgaagtctaagatatctctgtaagtcattatcaaatctttcaacttatcatcctccttggctgcctcgaacactggcggaatcttaggttttgcacctgttgcaacgagacacttgttatatcttatttctgagccatcttccagataagcaattctttcaaaaacatccagtttatttatactccaacctctggcaacagctactcctccgtttggatttgacattaatgatttgcaatcgatgtagaagtcatctggttcgtacatcaaacttctttctgaaccattccattgtttgaaattcaacttttccacagattccttactatcattgaaccatatctcttttgataacggtggtcgcatataaggataaaaatattcactagaaattatcagtacctttgcagtaggatccgcagatttaatggcacgaaatgctgtaaatgaggctgttcctcctcctattaacaagtaaggcacgtctttgggtatatcttttgaatgtagtggatgttttataagttttctcttttttttctcttttttctcaactttttgcttcacttcctctacatgaaatggattaagccaaaatagtactcctattgtaaatgcagttagtaataatccaaagatgagcagctttttgtttctatcccttgcagctttatccttttccttccagtcacattttgggtcaggtatctcactcattaaattaggatgcttacaatctttaattgaaggtattttcttctttttattctttttaggatcatctttacaatcatcatttttgcttgaataagttcttatactactacataggcttgctcttgttaggattcccttgaatggtgagtgtgctagatgtctcatagaagtaaatttcagtggggctacagccaatactttagatatctgccgaattcttaacattgttgactgaataattaatatttatataacatacgaacttatatccaaaatgtataaattaaatagtactggtaccggaaaactaagaaatgcagggtattattaatgtttgtgtatgaaattaatatttgcgaatattttttatgaaaatattgaaaacttcaaaattttgacatcttcatttgttttcaagtcagcgaaattgctgtggtcttaatttcaaatactatattatttgatatacacttttcctcactgccctttattaattttgttatgaaaatgacattgaattttcattaaaaactagcacgaggaaccggcttgcctttttcaatctcttcttcttctctttttttatggcttcgctacgaggcgattcgccagcactatttgttggcgaccgtgatgtaatctggttctaaaccatatcagggccgctgacatttgcgtgagatggtagcattttttcctgacttttaaaaatttgaggttaaggtgttatatacaaataggaaacacaaacacagattgtaaacaaatggtaataggaacgccacagaggagaaaccagacaaaaacaatttggggtaggttaggtacgttagtacttaggaaagacctcgtattcgtagaacgcggagccaagcgctgttcacaccaccaagca

SEQ ID NO: 6427 - DNA, 3182 bp, Diabrotica virgifera
  SmartBlast Evalue=0; Info=Probable peroxisomal acyl-coenzyme A oxidase 1 n=1 Tax=Camponotus floridanus RepID=E2A9R1_9HYME
tgggagatgacacgcatataaccacataactttaaattatatttataaattttgaataaaagtgaaacagtaattattgtgatatcgcctagtaataagtaatatagtaaattttagttgtggatattgtccagtaagaaacaagtttataaagatgtctcacaaaaacaaaatcaatcctgatcttgtaaaggaaaggagcaaatgtagttttaatactttggagctaacacatttaattgatggaggagtggagaaaacaaatgaaaggaaaagtagggaatccttttttctggacgacccctcactgcgatcaaaggtgcctttggaatatttaagtcataaagaaaagtatgaagaagctgtacgccaatcctgtctgctgtttagaaaagttcaagagcttcaaaatgaaggaaaaggaggcatggacaatttcagagaaattctggggggacaacttggatctgcaatcttgaaagatggtaatccgttgactcttcattatgtaatgttcatacctactttgatgggacagggaactgtcgaacagcaagcagaatggatacaaaaagcatggtcctgtgatataattggaacatacgcacaaactgaacttggacatggcacatttattagaggactggaaacaattgctacttacgacacaaaaactgaagaatttgtcttaaattcgccaacaattacatcttacaaatggtggcctggaggattgggacattcagccaattatgcagttgtggtagcacagttacacacactgggcaagaaccatggtattcacccattcatagtacaactgagagatgaggaaactcacgtacctctaccaggtattaaaataggagaaattggatgtaaattaggaatgaacagtacaaacaatggatatttaggctttgaaaatgttagaatacccagaactaacatgttgatgaaaaacagcagggttttacctgatggcacctatgttcagtctcctagtaataagctaacttatgggacaatgatttttgttagagtggtcttagtacaagacgcagctacatatttgaaaaaagcttgcaccattgctactaggtatagtgcagtcaggcatcaatcacaaataaaacctgatgaacctgagccgcaaattatggattaccttactcagcagaataaactgttccctcagttatctgcctgtttttccttccaatacgccgctacctggttatgggatacctacaacaatgttaccggtgaactcgagactggtcaacttgaaaatttaccagagttacatgcagctgcctgtgtgttgaaggcagtagctacagcagatgctgctcgaggtattgaaatactcagactgtcatgtggagggcatggatacatgacagcttcaaatttaccttctacctatggattagttacggcgatgtgtacttatgaaggagaaaacacagtacttcttctgcaaactgctagattcctcataaaatgctggcaaaaccctcaaagcctccagtcattacctagctgcaaatatttgttacatgctctaaacaacaaattgcctttccagaaatcagtaaattggattattagtgctttgcaaaaaactgcagcaggtaaaatcgagctagcaaatcgacgaatcaacgaaagagtgaggaaaggaatggcttacgaagatgcatggaataatacatccatcgaattggttcaagctgccgaattacatggacgaactcttatagtggaaatatatttagcgacaattcagaagttaaaacaaagggtttcaacagagcttatgacagttttagatcagctgcttcaactgtatgcggtggacactatcttgaggtgcactggtgacattctaaaattcaccgaagtacaaggaagagacatagacgctctgcaaacatggctagaagaattactaaccctcataagaccaaacgccgttggtatagtagacagctttgactttagggatgaagttttagcatcagctttaggttcctatgatggtaatgtttacgaaaggttactcgaggaggctcaaaagagtccactcaatgctgaaccggtcaacaagtctttcaaggagtacttgaaaccattcatgaaagcacaactttaattcatgtctatctaggtaaagaaaattttgacagactttggatcagtttcacaaacctgcattaatttacatattattgatatatcttaagactacttaaatgtttttaatatattgatttcaaccaatcgaataaagttttgtacatttttctggttaggtatttagtaattatactaacgagcgatccacaattattgggatcaaagctatccgtgcaaaaaattacgtatgtcttgttttaatctgaaagacctccggagtgtgacgtcacggccaactgcggctatattcagtgttgttatgatcacttttgcaaacaaagaataaagattgaaaacacgttgaaaagatacccaatctcaagaccttttaattcgtataaagttaaaattttgcttcctctgctactttttatgttcatttatagtgtttttaaattgacgtacgtacactgacaagtatctgtcaaagttgatgtaaactggaaagtatatctgaattaataatatacatgcactatatagctatctctgtcgttcagagccacctatggtgacaataattttggatcacacgttatgttacaatattttccaaaccaagacttttacatgtaattgaattttttatcaaatcaatcgaaaaatgtcgataattttatttaggatcaaattaatgattggtgtaaatgatcacaaagctttttcaaaagtttctaaacaattttattatatatacagggaccaatatgctatattgatacttttagtagttctagttaatgccaatgtgatttttttataccgtcctagattgagaattattttttggtgaaagtaggtattttagattattttatgacttttaacttcttggtttttctagaattgttaaattgaatgataaaccaatttaacccttaactttaactggtccatcaaaaatgtgtaaaggctgtatgacactattcatttcttgtatcatttctaatatcgtttctgatattagaaagttatataca

SEQ ID NO: 6428 - DNA, 3168 bp, Diabrotica virgifera
tttgaaacggtaactgctaaaatttataaattaaaaacgaagaatgtggataagtgaatgtttctaattgtgtaagaggcaaaaccaaaaaaactatgatgtctgatttaacaaagaaaaaagatgaaaattttgagttatgtcacttttcttttaaaatattggctcctttttttaaattaacaaaaaatacataggacacttcttgaaatacaacggtttttgtgttaaatagcgataagttcacgtcgaatgtcagagcataactggaaagtgtcattgtccggaataaaagtatccattttaccatcaaaacaataatgacactaccgccatctttcgaagttggaagtaaacatatatatgacatttttcctgataaaagtgtaggatattaggagtcaatttaacaagataactcgatttatgcattttttgagttatgtcacttttcttccggatgagcgaatatggttttctaagaatcttgtataaaacaagttttacaacaaaatatatttttggcgtggtatggcatattgtatgccagtggttaagggttaaacgaaattgataaatatgcaaattatatttagcggtttacagccacttttttaacgaatacctcaagatatctgattgtatttgtaaatttctcctgtagacgttgtaattattgccatcaaaattgtgccgagcagagtttacattccttgtacagattgatttatctcaaaacttctagattcccatctgttaaataatgtataaaagataatcccttcggctatttgctagaatgtcaagatgttgtaagggaatctagcgagaccgattgatttaagtcactttgtacattttttattgcaacactatagtttatagtacatgttacactttgctagacggagactgatgtgcaaacaaccagcccgctgtagaattagtaccttagttctggatctatgatcattttcttctttttcgatgtctgttttgcacaatagggccacccatttatttttatcgtcatatcaacactttatccaacctaacgctttttaagaaacacggcaacattaatatcgcgatcaattcaaaaaatttgaatttttttgtgaacaattctgtttttttctaaaaatcattaacctcaaactttctttgttcagaattagtgaatattatggcatagttagttattcattattattttggctttttaaatttgtttctatactcttttccaaaatcacaatgtgaattatttatagttttttgttcagtatttgggactttttgtcccagtatttgcgtaagacaaatatttcgttaaaattttgccgaatgtttcttgaagcgtccacgtatttctattacttgtccgatctaaggtaaccattaaaaaataataaaaaagatgtaaactacctcagtaattatatatttgttgttcatgttttaacttgggtatcaatataagtttatattttacttaatggtgaatactatttgtatacaacacagtttatatatagtgctagataaagttttgtgtcagtgtgccatttgctttttaaaatgaaacggatgaatggtccaaaatttccgcaccttcttcgtttacgaagttgacgaaattttgttactattatcttggaaactaccattttctgtacaggacattttagagcctcgatctagatatttagacgtggctagcacactgtaagctattcttctactgttgtttctggtgctaactatactatattcccgaaggtgcttggtaacaatctttgttacctttaacgttgggcctgcaacattagtagttaagcctttgttactgctgtttttattcactgtgtctatgtacacgccggcttgtgcgcaagtcaaaaagttagatgcacgcgaacgaaacttcatcaagccagtgacgtcataatttggcgtgcgctctgactctatttttggtacacgctaatttttcgatttttgcgaactttcaggaaaatttttctctttatcgttttcgttactttttgtagctaaaactaattccccttcgttagttactaaatttcataacatctagaaaagaagaaataattttattttaacaataatttcaaataatcaacaaaccagttacatcaatgcttctaccatgtaagcacatttttgccactagaatagtggaaaaaataaagttatttgaccaaagtttatgcccaaaagaattttatataaaacatcaaagggttgctaaagaagttaccactacaagcgagaacatttctttgcaacggttttctgtgacacaggctgttcttttagtgttatagtgtagtgtaagagaaaaaaaggctctttttgtgacaaactcgttggcaaatttagctagtctatcttcccggtagttcgttcagttacaaaataaagatactggaagcaacagagactgtttggagagaaggtcatgaagtactttaatgtaattcctagtggcactgacgaaaatacagatcaaggcattaaaaataatgaagatccaaatgatgtttgtgatattttatctgtaaattggcattggcgatttattacaattgtttgagacatctcaataattctgcttccgttcccttaataacaaatatttgtctatcaaacaaaccataaacacaccaaaaaatcggaaaatttgttttttaccaaaaatacagtcacagcgcatgctaataatgacgtcactggcttgatgacgtttacttcacgtgtatctaactttttgatttgcgtacaagttggcgtgtacctggacacagtggtttttattatacatcaatattttaataattgtaaggttgtttgcgaagagatacgatttcccaagccatccgttagttggtttaatacatcgatgccacaaaaatagtgatggaatattatgtatctcttctccaaatactccagaaatatttcgacaatgatttactcaggaagtgcagctcaggtaatgattaaataattggcatttggtaattttttacattataaatataaggcttccgtgaacaaacagattttttgtattgaatgtcctgtagatgatgatgataatggcgtaaattaaggcgaacagttgtcatgtggtcgatgtaa

SEQ ID NO: 6429 - DNA, 3159 bp, Diabrotica virgifera
  SmartBlast Evalue=0; Info=Foraging n=1 Tax=Diabrotica virgifera virgifera RepID=Q06BQ9_DIAVI
aaggacgaaagaattgaagagttgacacgtcaaattcagagttttgatcgcgaagtgatgcgggaacaacggctgcaagatctgcagcagcagctgcagatacgcgaaatcgaaatatcggatttacggtcgcagttggacaaatttcagagtgttattcgtgttcaaaacccgacgagtcctaaaggtatgagaccacgtaaacaaagggcgggtatttcggcggaaccgcagagtgaggcgtccatattggagttaagcaagcagacctttactgtgcatcctaaagatgaaagttctcgggaacttatcaagtcggcaattttggataatgattttatgaagaatttggagataactcaaatcagagagatagtggactgtatgtacccagaagaatataaggctaatgatatcattattcaggagggagacgtcggtagcatagtgtatgttttagaagagggcaaagtagaaatttcaagagaaaacaaaatattgcatcatttggaccctggtaaagtgcttggagaattggccattttgtacaattgccagaggaccgctactattaaagctcatacggactgtaaattatgggcaatagaacgacaatgcttccagaccattatgatgagaactggtcttatccgacaagcagaatataccgatttcttaaagagcgtaccaatcttcaaaacacttccagaagacactcttatcaagatttccgatgttttggaagaaactatatacgccaatggagactatattatcagacaaggagcccggggtgatacgttcttcattataagtaaaggaaaagttaaggttaccagaaaaatgccaaattctaacactgaggagtttataaggacactcggtaaaggagatttcttcggggagaaggctttgcaaggggatgatttaagaactgccaatgtgatagtggatgatccagagggcgtcaccaccctggtaatagatagagaaacatttaaccaactgatatcaaatctagatgagattagaactaaatataaggatgaaaatatagaaagaagaagagtaaaccaagaattcgaaggcgtcaaattatccgacttagtaattcttacaactctcggagttggtggtttcggcagagtagaacttgttcaaatcagaggccgctcaaacaaatcctatgcacttaaacaaatgaagaaagcacaaatcgtggaaactcggcaacagcaacatatcatgtcagagaaagagatcatgggagaagcaaattgtgattttattgttaaattgtttagaacttttaaagacgctaaatatttgtacatgttaatggaaagctgtttgggaggagaactttggactgtcctaagggataaaggccattttgatgacgcgacaacaaaattctgcactgcttgtgtcgtggaagcatttgactacttacactcccggaacatcatctacagggatctgaaacctgaaaatcttctccttgataatagcggatatgtgaaattagtcgactttggatttgcgaaaaaattgcaaaccgggagaaaaacttggaccttctgcggaacccccgaatatgtagctcccgaagttatcttgaacaaaggtcatgatatcagcgcagattattggtcattgggagttttaatgttcgaattactcacaggcacacctccctttactggttcggatccaatgagaacttacaatataatcttaaaaggaatagatcagattgatttccctagaagtattaccagaaatgctcaggctctgattaaaaggctttgtagggacaatcctgcggaacgtttaggatatcaaaaaggaggaattagtgacatccagaaacacaaatggtttgatggattcaattgggagggtctcgttacccggactcttacaccgcccataataccaactgtgcaatgcgtaacggatacgtctaactttgataactatcctcgtgatacggacgaccctccaccggatgatatatctggatgggacaataatttctagatattactttttcaaatgaatgtaggcttttttaattttataattgaatgggacatttttggaaacaaggcgtgtattcaaaaagctttattaataaaactgcaaagcttaatgttataagattacaactccttgcccaaggaaaacgttttggataatacccagtttattacttttataagaacatgaatcttgacgttatgtcatatcttagggagtatttattgtcagaacttttcttttccacattatttgacacaaaaaacattagaccgagctatattgctgtcgaaaacctctattatccaaatacgtgtcttcttaatagagcttttcattcaccgtcatttgtttcgagcttctgtcatatgtcgtataatccgtgtatattaatattatacacacattatacagcatatgacagaggcttgaaacaaatgacaatcgatgaaaagccctatttttaattatattgtttatggatcgaataaattcgggatgcctactgactgtcaaatataccaacaactttaagattttatctgtctgtgcagaaaaaaataatgacacaccaattggagttaagaggacacaatacccgcaggacctaaaactttgcctctttgattatttctacaacagatgtatacactttcatatgcgaaaatcaaattcgaaatgagacttgcagtcactgctgtcgattctcattttaaaccttgtcctatatttgacaaaccttaagtaatctatcttatttacggttgcatatctcaaatgttaacaacaaggatccgttttccaaaagaacctggtttcattgatattaacaacgattactctggttgttttcagtaaagatactaagcttatttttgtttccaagaatgtgcccctgttgatatttttaaatgtttggttctcacctaagtgccttagaaaatgtattgtttgtcaagttaatattttaaaaattttaaaccttttattgttaactctttaagaaaagtatatatttgtatttatgaaaataagtgtctaaaatatatatttttatattgtaaattattttgcaataaagtgccaataattttaagtaatgttagtatataaggg

SEQ ID NO: 6430 - DNA, 3163 bp, Diabrotica virgifera
  SmartBlast Evalue=3E-60; Info=Profilin n=5 Tax=Endopterygota RepID=PROF_APIME
cttgtctctttagagcttccgctgccactacaaaatcttccttggtagacaaaagtattcggcttcagttcgtcgtgcggcaactgctctaattgcaccaattttattagtgagtagaaccgtgtgtgcagtgattttttaaatttacaacaatatgagctggcaggattacgtagacaaacagctcttggcttcaaaatgcgttacgaaagcggcaatcgctggccacgacggaaacgtttgggctaaatcagaaaatttcgatgtatcaaaagaagaactagcaaaattagttcagggcttcgaaaaacaagacattctcacatcctcaggcgtaacattagccggtaacagatacatatacctctctggcacagaccgtgtaattagggcgaaattgggcaaagttggtgtacattgcatgaaaacgacacaagctgttgtagtatccctttatgaagatccaatccaacctcagcaagcagcgtcagtggtagaaaagctaggtgattacttaattacctgcggttactagagatagtgtgtgccgctgtaagcagccatgccgtgcggcgaaaaattaattattattaaatttgtatttttttcaaaataacagcgaaccggcaatgcgtataccgagtgcatcatcattaaaaaatacatggaaaaaagtcataaaatcggacaatattgtattttcctttttttatcaaacaaacaacataaaatatatattatatatcggtcaaaatcattaattttttcatcgttgtccatcgtgtggttccagttatgttacgagggtcataatattaaatttataacaaaaaaatttgtcttttaaaaccttttatacaatacgtgacctcctaacacgactgcgccaatttgccaatcataatttatgactgtggtctcaattatcattgttttttaagagtatttaggatattttaagtttttttttgagagtgtttcgcaaacttaactgagataagtttccggaacatgatgtgatttttttaattataataaagcgcatttttcttgttaagcttttctcataccattgctatctctaaaaacatttgatactgaagaacttacagtttaggattttttaataaaaaaatctctagtcctgctgtctctattttattttcgacccttctcctttctcctgggctcctgtgctttttgtaatagtgccgatgtgggatctaaaaacggaatttatcagaaaaagggttagagtaagcacaaatatttatacggtttaacagtgtaaagtgaaatttgtttattggctttttaagttttcaaaaaaaaccttttgctttaggttataaaacattttttttgttaaaaatgagacagtgtaagtgaacttttagttgattgcattttactaagctttttctgtagaaagtcaaatggaaaaacctactaacattgtgatattttttctcttatagtaattgtccaactatggtgtttttactacaaaaattaacttacatcattcaagttttctgacgtcagaaccacaaaattttgtatttccccacattcacaaagagcgtcgttatctgtcttgatgccacatttaatgaggttctgttttagagggacaaaaccggtgcgtatgcggttaagtgtccgccagtttctccagtccaggttcattccattaggtcgttctggctgtagagggaacaggtcgggtagtttgacgctgacatttctcataaactatttccctgatttaagtcggctggttcctgacgggtcgtcaaactcgtataattaatgcctttcattcaacttccccacattgtgaggcgcatctacggtcatctggtgatgcgaatccagctgcccgatacaataggggtagaagggtaggcttcatacaactggtagttattctacatgttttatttaacgccgtggtgacttgttgggcgtgcatagatttaccccaggcgggacaagcatattcccctgttgagaaacataaggcctcagctattgactttaacacctgggggtttgcacccacttgctccctacaagtttccggagaagtctttttctctcagaaaccttttgtcttgtgctcggacagtggaatttatatgttagtgaccagtctagtatcactccaagatatttgggcctatcagtatgttccaagcgttgtccctcccaagatacattcagtttgccatgcgccaaatggttgttgagatggaatgcacatacttgggttttagtagggtttagctttaatgagttttgtttgtagtaagttgacatcacgtttaaagcctcttccattgtcgactttacttgtgtatgtgttttctcttttacggcgataccgaggtcgtcagcgtaaacaaaactctcagtctggcagtgcattggttggtcgttggtgtagatgccatcaaaacaaacacaattcttactataaattgttggcaacgctgtaaacgttttttccaatcgccccactgtcattgaagaactataattgacatcagtttgtataaactgtcattgaagaactacaagtgacgtcagtttgtatagactatgacttaacctgacttttgtagtaaaaaactataccatgtttttttataactatgacataaatttcaaatacttattttgttttataacctaaaataatgaggtgttaaagtctgctttccttttttatttaagctatgattggtgtgagctagtcctatctccaaattagcagcactagtttactggacacttaaataagaccattttggaatttttgtgataaattataaattatcatttagtttgtatttagtatttttcgccagtatttagcgttttcaaatatatttaggctattacaccaatcaaatattttttggaaaaaaatatgacggtttttcagaaaacaaaaacgttcatattttttccccaaaaatgctgtcatattgtaatgcataatgctcagatgtctttttgatataatgaaagacaattactttttacctcctaatttaaagtaaaatcgaaaaaagtagctttgtaaaatttctgatataattcgcaagagatattgtgtatcaaaatgataaaacataataaatttgtattataaagt

SEQ ID NO: 6431 - DNA, 3160 bp, Diabrotica virgifera
  SmartBlast Evalue=1E-160; Info=E3 ubiquitin-protein ligase MARCH2 n=2 Tax=Camponotus floridanus RepID=E2AXV2_9HYME
aacgaacaaacttcagtaaaatggagaactgaggagttgaggagtattttattgttttgtatgaaagttttgttcacaataatgtgcgtgcttaaaaacataataattgtggtatagactgattgttcgggcatctgtcatcattttaaagacaaaggaaattacaaacgtccataaggactgtatataagtatgtttcgacatctcctaattatgtcaggactatcctccagctgcacaagggattgttcgggaagaggagaatgttacaatgggacttgtatgtgtgatatcaggttcacaggagatctttgtgatggccccaatttaccttaccatacaggtatcggaggtgttttcttcttcatcagtctagtgtgtgctattcaactaataacatgcattatgtctgaatatagaagattgaaagcgccaactttattcagagcttgcaaagtaacgactcagaagttgatctatttcgtcatttgcttggccagcttgatacggggtgcatattttatctttcctgaattgtttgaatacggctggtcaaacagtctactctcctcctattatcctcttctgatgtcaagtgcttcgctaattgtttgcttttgggcagaggtattccatttaccgggaattcgctgggaccgaccgcagtttctttccaaatcttttctggccttcgttacttttaatttgatcagttacagtcttctgttagccgaatttttgaccactcaacttgctgaacctccctcagatgatcccggtttctatcatcatctgttcaacggttgttatgctgtattgatgttcatcgttgttattttcttcttaatctacggagtggaagtctattttaaggttagaggaggattcatcgcaagaccgctacaactggccggtaactctttcgaaacggagcctttgaaagacgaggctctcttaaagacgcagatcaatttgtctcagttgcatcaatcccgaataggactgttaagtcaagctctgatgttaattgtgatatctggattcttgttttcggaaactctctcagaattttggaaaactaaggtgccaataaactccagaaacctgcacaacataatctttagagtggtggaaataggcgtcgctctatggtttccagcagtattgtggaactgcatgcaaccctccgagctatggatactgaatccgagcaaacttttagccaaaatagaccaatcgaggaacgaaaacgttaccgatcaaaatgttaagactgacaccgacgacgaagcgtttctggatagacgggaatgctggatatgctacgacgccgataagaccgagcccctgatacagccgtgcgactgcactggcgacgtgtcgagtgttcatcacgaatgtcttcgaagatggttaatggaaagctcttcctccagtaacgaacctttaaaatgcaaagtttgcaattacgaatacgacattcttaagagcagcgaggtgaaatgggacaaaggttttactgcacaacactggggaagtactgccttcatcgtaacatgcatgtgtcttgccgtcgccggagcttggatctcaattcagttgtatgcaaatccgtacataagaatggtcagcgccagcctggcactgatggtaatctacgtctgtatcaggtttttgggccaaaatactctaagcgcctatcagcgtgccaaagtagctgcactaagcattggaaaccacgtgaccacaatcagcgccaacgtaaatcctactcccgaagatgcgcaacaagtgcaagccagtctatagctttcagaagtgttttgaacacttatatagcagaaggccgatgaaaaagttatgtaaaattatagttcagttgttttatttcgtagattttggtattctatatacatgatattgttgccaagtttataatatagaatagtttatcgggaaatataaaaaataaacaaaacgtttagtaggaacagtactagacacgtactgattaatgactactacaaaaatatatttaccagtgttttaccagtttataagtattgattgaaatacttttagtcttcttagtttcgaaaaatgataagtagatgacgcagtttttaaaaatctcaaaacttgactccttttgatatttgataatattgttttatttgtcattcataatgctctttccgaatattcttccaaagccctttatcttgtagcatatcagttttaggcatttttggggatattagacagtataataggaaaacatggatctgtttctatataactgcttatgtcccgttcttatttggcttgttctgtataacagatcttatctcagattagtcatgtggacgggaaaaaacgtttaaaaatctttttcctgtgtgacttcggcaagtattgccacctgaaagcagaaacgttaatatatttatagaagtttttagttttatacctgtgttatgattcccataaaatcgcttaaagctgttcctgagctacaaatatacatcagggaaataaatattcatagatatttgcatcgtatgaataaaccagtcatctattgatatttttcaatcgtgaaaagtatagaaaagtcaatttttaattctattactaacgcctgaagcttaaaagtgagatattgtcaaatatcttttatctttactgatatgtaaagggtgcacaggctcaaagaaattagtttttttccttttttcttctcctaattatcattttagccaataaatgccggtcctagataataaaaaagaatttataagtaaaattggatcttatttgatcccatactctctttctcagcttgatttcaacgctttgtttctcgacttttgtgttaggtctcaaaatatgcccccagttctgctcatccgtttctctctcaaaatataatatagacctggaacattctgttggatttattgagtgtgttgcgtttgtgcaacacccgcataaacaaaaatacgtctcaaaatacgccccaagttcttctctttcgtttatctctcaaaatatctctacctgaaacattcttttggtatgagtatgttgcgtttatgcaacacactaataaacaaaaacacagaattctaccactaaaaaatataaaagagtctggatt

SEQ ID NO: 6432 - DNA, 3159 bp, Diabrotica virgifera
  SmartBlast Evalue=1E-100; Info=Repressor of RNA polymerase III transcription MAF1-like protein n=2 Tax=Aculeata RepID=E2BIK6_ 9HYME
ttgacggcaatttatttgtgtccaaacagatgaataaaataatattttgacggattttctgtgtttataaaactttttgtgttatcttcaacgacaaacgacaagaaattatgaacgagttagggaaaggttaacatttagaccaactatacattaaaaattcgttattttctacttaaaatataattaatttttatctttatcataaaaacatgacgaaaacaacttcattttagaataacaactgggtttatcgaaaatcatttacgacataatcattttaattattgtatataagtatagctgtgtttatatgcaaaatataccataaaaaaataaagtaatgaatgaaatttattgcctgcaatttgaacagtgacatgcgaaacaagacaggctaaacttatcattctgtttatatgcagacaaatcaatataacttaagcttgacaggcaatcggcgccggcggatctactaacaaatctacttcatatgtcatctgtcacaatttaccgcgtttgcgcagtcgaccaaaaataacgctcagaccattccggcatttgtttgcaactgtttccgaccaataaacgggggtttttgcgtagacatgtgaaataaatgacacacagtcagctgagttacagcagcaaattaaaaaccactcaatgatgcaaatatcagctggcacagttgtggtcgccatttttttgacaaccacaatgtattttgctcatctattaccttgacagattgtaccagatcgtaactacggtgaaaatacacgaatttcacttagaactgttttagcatccatcgtattctccagatctagcttcaagtgaattctgcttttttcgtacccaaaagaatacttaaagggaaaaaatttgtagtcttttgggagtaaaagtaagaaagacaagaatcgaatataaacacagctacttattaatttaaatacaacaatatattttaataattgtactttgaggtacaggtacaaaaaacttaatttttttgccaattagaatttagaaaccattcatatatacaaggactacactgaataaccaaaatcaatttttaaatacacagaaaaaagaaaactgtaaaattttttaactagaaacaattagtacaataagtacaatacaataaaataaatttaatacacagagaagaaatattgagatttctatatagttatctgtgtaattatttgcagagaataaacctctcgtctaacgtgttagcaaaaaagtgagattaaggttatgtacgtcaataagcaacttgactaagacgtaatgctgtcaatttttttaaggttaggtcaaggaattgacgaaaaaatgttgattggttcaaatatagcatttttcaactgtttgaacctttattatttatcagaaattattttacattcaagtcaagttatatattttgttgccagaagacaaagttggtcttatggcatcaaaatttagacctaacctcaaacatttgtgcatgacgtcaaaatgtaagtgacatattgttaaaaacactatcttaatgggctatatatcataatccttttgtatttctttggatgatacaaaaaactacacagaaaccaaaactctacatttattagtacgtcatcactggcctatacttatcctatactaagaaaagaaaaagagtcgtacaacaatccgtgaaaagtgtacaatcaataaaaaaactgtggacactatcgtatctaatctttgataataccttaaaactaaaaacttacaagctaacttgttaatgtaatttgtacttttgctctcaccaaaagatttttatgctcacaatttttttaaagaaattgtgctgatacaccgagctgagggtgccattattttggagcctgccaaaaattgaaggcccgctccatctgttgtaagtggttgatttttagtaggattcatcctcgtccatgatgaaatcgcttccaaaaccagaatcaacagtatatcttgggttgatggctctgcaggtgaaaaacacaattctcttcagtttcttattgtagaagaagtaattaaagctccataaacaaccatcttcgccgaaagggtcacatacgaggtcgggctcgtaagaataaatatcacaattctccaaagagatctcgtcatcaatcgctgtccacatggatggtcctagcagacggtagtgctctcccactgtcgcggctaggttagtatcgatggcgttggtcacccattgtcttgaaggttctttgctgaattcgtgactcttaacgttcatgaagtcatagtctggaaaagccgagtttagtgttgctattaagtaaaacagagttttacggctaatagtatcacataaagggccttcttcatccccagaaatacttctgctgtattgggaatggcctggggagactccttgaggtggtgaaagtgcttgtagatcactgggattgacaccttcagcgttgaatctcttatagagggctttgtcagtgcctgccattttgcatgaataactttcgatacgaccaatgattttgctgtcgcctgtttggatacatagggcattgttgatggcttcaaatcttgtactctctagcagcttcatcttggctggtgtagtataagtagtaacgaactcaaaacgattataaaacacttgtgacctttatatggatttattgtctaaacggtatgcaagcactactattaaataaacagtttttaaacattgctgtgggatgtatgaatattccttttcttttggaatgaaggagattaaccgtcggcacaaaggtacgccttacagatatcttgctcaataggtaatttgggcacattacaaacagtttaaaccaaatgataaccactttgcaagtagttggagagttttagttcagatttttgggatacaaacaaataatttcacacacaaaacagatataggacgagtccactattttcaccttccttcgagaacacacacaaattatatcacttttagctagtgttcagaataatcgcagtccctaatcattttcacactacgatggcacaacaaacttgctaaaaattttataatgaatgctgaaatactaaaaatagagggtcaacaatagcttggccgcagtacaa

SEQ ID NO: 6433 - DNA, 3162 bp, Diabrotica virgifera
  SmartBlast Evalue=1E-104; Info=Midline fasciclin n=1 Tax=Culex quinquefasciatus RepID=B0WG14_CULQU
cgctactgcttggtatagacatagaccatagacttggtatagacacacatatccatatagtattctttccgacttactaaatgatttctgagagaattgcctttctcttgatcgatacattgctgatctcttttttgattaagacgattatttgactggaccaatcctaaatcatagtctttaccagaaggatcacatgatttctcaactaaaaaattattataaatggaggtctcatgtgcttgcaagttacacactgtaccacgttcattctcatgataagcttagaagacagttttagacactttaaagatgtatcgtgtcctcgttttgtcattggttagaaagtaatttgtaaccaatgacaatctgagaagacatggcacacccaccgatcacgtgtctgaaactagcgtctgagcttagtttgaaaatgaacgaagtatacaaacgtaatggatggaaagccaaaatctgcattacacgatgattctaaatcactttaaaaactctaaagatcgaagaggaagaaaccaccgatagacgaaacgggtggttgcctgggcaataatactttgttgacggtgtgtacgactccgttcgttgctaaattatcacagctagtgactactgctctgttaacgcggatcctgcttccggtgcgggctacttctatctgcgtgttggccagagttgaaataaaactgctaaaaccccaggaatgtggaccgacgcctgagcagcacagaacctcagttaatacatgatgcttcaaaatctgttctgcttttttcttatcgttcagtaacgcctcacgatccttctcgtccaaagctgcaaatgtttcatctgtaggtgctaacaatgtcaatgatctattattttcctgcagaattttctccaattctgtgtctttcagtaaagctttgagggtagaatatctcgcgtcgttttcgataacttccaagatatttctggtgggtggtaccaagatttggttgacttcgtgaatggtggaaccgcatgctttttcgtcgaaacctactagccttgcgcagtttactgtggcgcgatttacgatgttggtgaatagaggtaaagttgaatagagattcaatctaagttctcttccattatcatacgtgaccaacttttcgttattattcatatctcctgattgtagctgaccctgaagtgtgtgatacctgactatttcttttagcttctctttgtcgttttcaatctcgctcaataacttctttccttctggactttcaaaagcttgattacttggaacgaatactgtagcattttggagctcgttaatttgttcttccagctcagctttctggatgagttcctggaattttgtgtagttttggtgtttaagtacgttaccaatatagagacctgcatctggtacaattacagcatcgatcaaatgaataacaccgttggtagcaatgatatcagtaccaactaattttgctttgcgttctaagatcagttcatcatcaacggttctttccaggtttaacaaatctccttcaacgttgtgagttgtggcattcccaataattgcgggagaacatacagtgtgagcagtgaaatggaatttcaggatacttgaggcacatccagatcctctcagaatcttctgcttctgtacctcatccaacttattaaatgcttcatcggtaggtgcaaatacggtatagtgtccatctggcttaatgtggctgggaatgtccgtttttgatatagcttcctttaaattagtcaatcgaggatgagtcttaataatagtttcaatgtcttgggtagctgggagaacaacaccatctgtgacatggataataccgtttttggtcaagacgtttggtgttttaactctagcacagttgacagtaacaagtctttccctggtgtttgttggatatatgttgactctgatagaactgttgttgttttcgctatatatcacgtcatcattcgctagatccgttaaatcaacgaaaccttctacagcgtgacttaataccagatcgcgggttgaaagatgttgaccgaggcctctacgtcttcttacaacgttgttcatctctaccattttatcattgtactcagttagagcatcatccgtaggcacgaacaaagaacagttgctatccgtgaatttttcgtctagctgacttgttttgattaaatttctaaactccgaagccttgatgtcgtccaaagtctccaaaataggtttaagatctgcctttttgtcgcatccacctcctctagttctagtatatccatagcagcacttgtagcgaactgtaaaagtcttgaagacgccatggttatttatttttgtgacacattcatatttggatgcagtttcgaagcagttggacaagcttattgaagtggaaaacaagtcaggaagagcttttgaggccttcgatgttgaagatgttgaatttttcttgccttcttcattgctttggtcctcgtcactgtcttcatcgtcatcggtactctcttctctttcgatgcaaacgttctttcccttccaccactgactgccctggaacgaattaaacaaatctccaattccgaaaggcttcgagtttccaactccaaaagacgaagaaaagtcaaactctggcccaaaaggattgaaaggacctccaaaaccatcggaattaacatccaccacaccacccggaagaagctcagttaaaggtctttctggattctcaggtaaatcagaaatttcaggcttttcgggtatcgatttcagattgggctttggtttaggcaccaagacaggtttttgctccgaactggcagcaggtggatctttgtagtctttggctagaggttcgcgttcatcgctgtcgtcttctgcagatgctagttcctcttcgatcgcgcgtcttggattcacgacgggattgtgccaattccaatttgccctgtatggttgttggagctcatggaagaggctaaggtcactgtaaaaatcagactgcgctgctcgcacaaccaacagagcactcaaaaaaagaaatgctttcccaagcattttcgcgaacccgttttactatctatataaaaaaaccgcttgtagaactcgcggaaaaccggctaaattaattctctttttct

SEQ ID NO: 6434 - DNA, 3156 bp, Diabrotica virgifera
  SmartBlast Evalue=1E-144; Info=Cell division cycle and apoptosis regulator protein 1 n=2 Tax=Formicidae RepID=E1ZZH2_ 9HYME
gacgcaatcaaaagaagctttcaatttttcaatttcatactttatattataatttgttaatttgtattgtgttcgtccttcgtgaaagatgaataataatatgggatataataataaagcatgggggagaactaacaactcctccaacttaatgaatcagaatcaattacaatcacaacaacccggtggtctaggaaacatggtcccctttccgggaaatcaacaaatttttcaaaacccattgggacttcaacagcagaacctggggctagggttacaacaaataaacaatgcaatgacggctgcagctgcactcagctcccaagttgctagcaacccaattttccaacaagtatcttacccgaatagtagaggactaaaccctaaagctttccagtcgaacttgccgttgcaaaatagtcagaataacggatctggaaggcagagagttttcactggttcccagtctagaagctatggcagcagtaactatgtgccccaatctgatagaagacgaagagatggtaagggcagagacagatctagagatagagacagagacgacgacgaagttgatagaaagaggaggagggaggatagggtaagagacagggagagagacgacaggaaatctcccatcaggaaacgatccaagtcacggtcgagatccccaaagggtgtaagaaggaggccaaggattattccgagatatatggtgcagatccctaaaattaatttggatttggatggtggtgatgttctcgaacttaaaagaagatataaaaacatgtatatcccttcagatttcttcttcaccagcataaaatgggttgattcctttccagctgacaaaccgtttgctatcaacaaaccttgttcattccaaataatgcacaaagacgtcgcaccagtccttgaaaaccgctcctccgatccgccagatgccgactatctcttctccgctaaagtcatgctgatgagcacccctggactggatgaaatttaccacaggtgctgctctctcgctgacgataaagacaatgacgagaaagactatgtgcaccctaccagactgatcgactttttgatcggtctcaggggcaagaatgaaactatggctataggaggtgcttggagtccatccctagatggcgaaaacccaaaagaggatcccactgtgttgatcaaaacagctataaggacttgtaaaaatctgacaggtatcgacctgtctaattgtactcaatggtaccgtttcttggagctgtattatcgtcggagcgagtctacttacaaggggaagaccatccctgcccgtgtcgagaccgtcgtactgtttctgccggatgtctggagctgcttgcctaccagggtggagtgggacgatctgcagaactcctacaaaaagcaatgcgaacgcatcttgacccagcctgagactgttgacgctgctgctgatggtgctggtgctgcagagagcggtggtagtggggatgctgcttcccgagttgcggataccagtggggatcagtcgtcgcaagctgatgaaaaggaagacgaaccgacttccgataaattggaacctacgcatcattcccagctggatcccaagggtatggtcgttaatgatttaagaaacgagctaacggcaagaggtctgagcaccaaagggctgaaatcgcaattggcagctaggttgatgaaagctttggcgtcagaagccgaaaagggtgaagccaaagagaaagaaactaaagaagtcgaatctgaatcggagacttccgttgtagaagttagaaaagaggtagaagagaaaaaaatggacgataaggaaaaggcaatgctagaaagacgccacacgttaccggagcatccacaaataatagtccatccctctaaatcagccaaatccggcaaattcgagtgtactacgatgtccttgtcgctcttgttagactacagaaccgaggattcaaaagaacattcgttcgaagtgtccctattcgcagaactgttcaacgagatgttgagcagagatttcggttttaacatctataaaacgctgtacgcattacctgagaaaaaggaggagaagaaagataaaaaggagggagacggtaaggaagataagaaagacgataaggctgaagtgaaagaaggcggcgacaatgaggagaaagcaacgaatgcggaagaaggtggtgatgcaactgagaaaaaagaagacgacaaaaaggataaggcatcaaatggagataagaaaaaagaggaatctgacgatgacagcgaaaaaaggaaggaacgggaaagaaagaaaaaagaaaagataaaattatacaccaaagacaaacatttgttgctttcgttcgtttatttcgaccagacacaatgtgggtatatatttgacaaggatatagaggacttgctatacacgttaggcttgaaacagtccagagcacaaatcaaaaagatgatcagcaaagttattgtcagagattccttgcattacagaaagttgactgataaaccgaaaaacgctgaagatgaatctgctgaagaaccacctaaagaactagatttagctgaaattgctcagggaaataggaagctactgccggtgtttggcgctaaagaatctagtgagaaggggtccaaacgccgcacgacaagtactttagaaactacaaacggttttgtgaaattcagaggttctgtcgtggacgtaggtaaactattgaaccaattggaaagaagcgaacaaattagagttgacacagaagcaagaatgattgatttgaaaaatgaaaatcaaaagctttccgaaaagtaccacaagtccaattcaactatcaaacaactcacgtcagacttgcgcgaaaataaagataaactacgcaacgcgaatgatgtcctcagcaagactaatacccattcgaaattgtattatcaaactttactcgacatcaaggacaaaatcgatcccattgtaagaacctcgcacaaggaggaaaagaaagaaagagacgagaaggaccgagacagaaaacaagacgacggaaagtctaggtgggagaaggataaggatcatgcgcatagcaaaaaggaggagaaagaggaggtaaagaaggaaaaggagaaagaaaaagaaaaggagaa

SEQ ID NO: 6435 - DNA, 3137 bp, Diabrotica virgifera
  SmartBlast Evalue=1E-104; Info=Transmembrane and coiled-coil domains protein 1 n=1 Tax=Harpegnathos saltator RepID=E2BM81_ 9HYME
aaactgatgcttagactggaatatgcgggcgtctgatcgacctatgagggagcagtacggcaagggataagggcttgcggctcggtgacactcccccacagatccctaccggaagggcgttgacgcctaaataccggtgtatataaataggtttatacgtcccagaaaagattttgattgtttttactgattatttttgaattctcgtaaataaaaaaaggattttagcttcaattaattagttcacgaatggtgaacattataaatggtgaatttcatgtgtttaaatatttaaggcaagcttacatgtctccaaataagtgattttgcttgatgctctcattatttttagttctcatctataaaaagaagtatgttggcttcaaatagatgaatttaggaatggtgaattctgtgtttaaagtagatttatatgctccaaactgattttgcttgatgctctcattatttttagttttagtccataaaaagagatatgttggcttcaaacatatgattttaggaatggtgaacgttgtaaaaagtgaatttattgtctttattattttaaagtaggttaaaagggtaaagtagggtaaaacaagtgattctcttgcttgtttcaagttagcttgattctctcattatttgtagttttcgtcacaacccggttttattcttctgtcacacaatctccgaatatgcacaacaatctaccacccgataaaatactcattttttcaggtaaaataatttgctaaaaggccgtcgaataattacgtgagacgctattcttactttttcgctccccacatctttcttggtgagataaatacggaacccacctccactacaaatagattaagttacaaacactatctctttttgtgtttattaaagattcgtcttatttttgaacggaattaagcggggtcgtccagaccgcgccctctcacgtaattatcggacgcccctgagtgaggaactggactggacgtcgcaacaccgtcttagctcgacgaattataatttttttgttgattttcctaaaaaaacaatgaacggctcggcatttagcagcgtcgaaacggcgccaggcggtggctacaactacggggccggatctagggtatctttgaggcgacgcatcatgtgcgatccgatgtccctcacctccggccactgccgcaatacaaaagctattcctattactagtacaaccgtcgaaagaatccttaaccttgtacgaagaaagggcatgataatgcccgctcccgtggcgactaacaataaaaccacttgaagtactgtgagcaaaacattgatgagtttgacgacgagcgctctggcgttggaattgtcgagaccttccaaggtaacatactgctgttgctggagggcttgatgttccatcttttggattttggtttggcaatgctccagcatctcatgtatatctctgagtcgctcttcgctctgatattgcactttctcctccatatcagccatcgcctgcttcaggttctccacttcgttttgatggagctccgtcaggtcgttgatttgctcttccaacctttcacttttgaacctctcctcctgtaaggcggagttgaggtcgtgtatctcttgctgtaacgacttaataatatcaaaactttctctaaaattgtctaattgttcttgcactaatctaattttcttatttacatcagtatatttgtcatggccctctctagcgtaccttcctatactatcactcgtaacactactacattcgctaccgtcatcgctgacgaacttcccgcctgaatgctgatgttgcgggtgcgcggcagcgcccggcgcccccgcggcaccccccatagagctctgcgacgtcgtggcgtgtagagtggccggcaacgtcgccgatccgcgatggtggtggtggtgatggtggatcttgtcgccgtggtcgctgcctccgttggtcggtacgccgctgccttccgaaccggtcggaccgccgcccgatcgacctccggtggaatcgccggctttggtggcaccgccgccttctcctggccctacgtaccacgtcgacatctggcttatgttgtcagcactgccgaatttgttcttgatcaagtgagcaaattccctcggtttggacatcacagaaccacccacgtagctgataccgtctcggatattcccaccgacattcttgagtccttggcccatatctcgcagaacttcccgtggcggtctatgaccttgagcaggaccatgcgtttccaattcgtggacgcgtttttgataaatatctaactttttttgtaattgcgaaataacttgtgcacttttttgtattcttcttttcgaacacagccttaattctttggacttgttgcttgtctgcgttagctgccagcttcaggtattcgttcacgttatcatccctaagtttctgctcagtcctgataagatccttcacccgaataatcttcgtccccaattgctccaaaatggcgttcgtcttgggatccaaactgtcggtgtcgtcctcctgtttcagttcgttactgccgttcgacataaaggaggagggatagtccgagggatcgtattcttgcataagggcgcccccaccgctgtcgtccaaaaggtacacttggttcaaggaatcgtctagatcacccgttgtcgtgacagcggtggtgacggtcgggccgccggatcggttcaggctggaggtgggggaccgatgctgacgggaaggcctctggggcggtatgccgcctccgccgatgccatcgtggctcttcgaactatccactgatccgtgactcagagttttcgtgtgatgaggatggtacggttggtgttgttgttgtagttgttgttgctgttgttgttgctctctgggcctgcaaggggaggcgctacgactggacgttttacttcctgtttgttgagaactcacatgcaagctgtccattgcccctaatctaattgctatacattttgtgggctgctgtaagtatgcgacttcacattatacgtccaaatcacaagtaaacggttcagaacgtctgtatacacacaatcaccttactacgattttattcataggaactcctgactcaccgcac

SEQ ID NO: 6436 - DNA, 3145 bp, Diabrotica virgifera
  SmartBlast Evalue=0; Info="Methionyl-tRNA synthetase, cytoplasmic n=1 Tax=Camponotus floridanus RepID=E2AQ76_9HYME"
tttcgctatcgtaagcaaacagtttttatcattgttaacctatcctcctgctgtcactgctgtcagtgtcattttcctgccgggttgtagtgtaaagtacttgtgtatttcgttaatgatttttgaattaaaatcaaaatggtattaatttatacaaatgagaacaatccggcgactttaaaacttataatagccaaaaatgtggctaaacgtacagttgaattgaaaatagtgaacaccaacgatagctctattccacaacctaagcatttaccttatgtagaaatagataatcaacaaacattatttactgtaaattctgcaatatgctattttgtacctataaatggtgaaaatttcgaggaagtttacaatttactagaatgggaagccactggattgtcaccacaattgtcacatttgctaggtggttcttcgaaaaatgaaaaactcaaaagttctgtactgtctgccttacaatttttcaatgagaatttgcagaacaagaactttttggttaagaattgtttgactgctgcagatatagctatttggggtacgttatatcccctcagtatttgtccaaaaaattcaaaggaatatctttcgaagtatgtcaatattgtaaactggattgcatcattaggaaatcaccctgacttcaaggctgcagtggatagttacaaactagatccgtcttcagcatacaatgccttacttgttggtgctaaatatctttcaatatcggacgaggccgaaaagcagaaggaaataccttctccacaacaagaaaaagaagcgccagtggaagctgttagcccagaggaagtggaaaaatgcaaaaagtcgtggcaaaaaagtattaaggatttaccaaagttaaaaaatcataagggaccaataatgccagtacctggagaaaagaacgtactgatcacctctgctttaccctacgttaacaacgtgccccatttgggcaacattatcggctgtgtgctatcggcagatgtttttgcccgcttttcaagattgtgcaataataataccgtctatatttgtggcactgacgaatacggaacagctacagaaacgaaagctctcgaagaaggcttgagctgtcgagaaatttgtgataagtaccataaaattcataaggaaatttatgaatggtttaatattagttttgactattttggaaggacgtccgaaccacaacaaacacagatcgtccaagacatgttctttaccctcaacagcaacggtttcatgttcactcagtccgtggaacaactccactgtgaaaaatgcaacaaattcttggctgatcgattcgtggaaggtggttgtccgaatgttggttgtaattatgaggatgctagaggtgaccaatgtgatggttgtggaaaactagtcaatgccgtggaattgaaaaatccccggtgtaagatatgtaacaatacccctgctttgaagtgctctgatcaattctacattgatttacctaagctggaacctttgctgtatcattggataaaattgcgaaattcaggttggtcgcacaactcgcaagtaatagccaaagcctggttgaaagaaggtcttaaaccgcgatgtattacccgtgatctaaaatggggggttcccgtaccacttgacggctatcgagataaagtattctacgtttggtttgacgcacctttagggtacatttcgatcactaaagcttacacggaagattacgcaagatggtggacgccgacaaaaggagaagaagtcactttgtatcagttcatggccaaagataacgtacctttccattccgttttgtttcctgctatgttgttgggtgccaaccagggttatattactgttaatcatctaatggctacagaatacttaaattatgaagatggtaaattttcgaaatccagaggtgtgggagtattcggaacagacgctcagagtacaggaattccaagtgacgtatggagattttatttactctatgtcagaccggaatctcaagattccagttttagttggaacgatctcgttactaaaaataattccgaattgttaaataatttaggaaacttcattaacagggcgttagtgtttgcgaaaaacaacttcaaaggaacggtacctgcaataaaacccaccgaagaagatttcaatctgttggcgttatgtaccagagaactgaaaggttacgtagaagctctcgaaaagtctaaattgcgagatggaattaggcatattctatcgatatccagacttggtaatcaatacatgcaatcgaatcaaccatgggtattactaaaaggttccgacgatgaaaaagtacgcgctggaaccgttattggcatgtgttgcaatttgtcatgtttgatagccaccttgttgcaaccatatatgcctgaaaccagtgagaatttgaagaagcagttgaatacatctaacattgttttgattcctagtgacccagaaatagttaacatgcttccagcaggtcataagttaggagaaccctcgcctttgtttgccaaaattgaaccaagcgttgcagaagagttaaagaaaaaattcgcaggcaaacaacaatctaaagaaaccagccccagtggagatttcaaaagcgcggcagatctagaagcagcagtagccagtcagggtgataaagtgagacaactgaaatcaagtggtgttgagaaatcagtctggcaacccgaagtaaaaatccttttggatttaaagaaacagttggaatcattgaaaataagttcagctcctcaatctgcacctaccaaaactgacgttgtagattccaatgcagtacagaagattgaagaagaagtggccaagcaggctttggttgtaagaacattgaaagaaggcggagcagaaaagtctaaatggcaaccagaagtagacaaactattggctttgaagaaacaattagcttcagcaagcggtaccccagtggctgctccccaaaaaagcaaaaagggcaagaaataagaataaaaataatataagttgataaataaaagtattgcgtgtgatctgggtagaaaaatatttattttatttattcaatattctaaatattgataataaatatggtatatttaaatacagtttt

SEQ ID NO: 6437 - DNA, 3133 bp, Diabrotica virgifera
  SmartBlast Evalue=0; Info=Signal-transducer and activator of transcription protein n=1 Tax=Tribolium castaneum RepID=D6WML4_ TRICA
aattttgttgaatttttaaaatctgtttttattcgaagcgttagagtactaaacagcggtacataaatacctttttttattgcccggccagtgttaagacattgtaaaatgagatttattttctaataacttgcagtccgaactattgacaatacgaattgaattttgtagaattttcagtattttgtttttatacaaagcgttagtgcatttgaagcaatctgaagtgaatcgtgtttttttattcttagaactattttatgccttatatatagagattttatatagattatttgtacatattacgaagaaaatataatttattaactcgcctcatccccaggtaaagtaaaggtgctacgacactaaaaatactattttcagcttttctttatataggccttctttatataggcgggatccatgactaataggttttctttgtatagacctataataacttaaaaaatcctcagataccaggatttgtcccgagagaaattttatttccctgagctatttgttgatagaatttatgcgcaggatctactatttgtctgaatgtctaatgaaaaggttataaaatagtaatttgatacaatatcacaactcgttatgaccatacagacggattatcacagattggtttgttaccttcagtaaaatgaggtccgtccaatcaaaaacataaaacctacgtatttataaatctatcaattttacagatgtaaattttgccttcgctcgtcctagctcatcatctcaaagttgactaatccatttatgtcctcaaattggtcgagatattccgtgggaccgtttatgtggctggggaccgtcgaagctacagatccaggacaactactaattaccgacgctgtatcacgagtggaatcgtgttgtggcgtgttggggtaagaattaggaaagcaagtaaaacctggaatctgagtcactaatatttgcctgacataaccattattcgccgatggagggttatcttgatatggtgtgtaatattttccaaacaaaatctctttgcatatatctggatatagatatatcaagtgatttaaatctgaaatgcggtcggccagagacctgatggcaaaatctttatgtgtaaaaggttgcaaactgaaaacgtctccagaatcggaattccaagcgattgttatacctcctaactcgctatcagaaaatcttaaataaaaaaggttccttgaacccgcgaagatagaatctcctccgcctttctctttctgacaaaacccatgatggcaccatcagcccatggtcctcttaggtgctccctggtaagtttcatgatggcaaaaaaccattcccagaaagtgaaattcctgtcagtcaatggttctttacaaaactgcgaccagcttagcatggcatttgttgattcgttgtaattacccctgaaggccttttctgccaaaaatcgtaagttgtcctccgttagaccccttccagtggcggctcgaaatttaagagatagcatttctgctactttaacccacggtactttttctggtacagcaaaaggtattctgccagattcactaaaagcattatcccatgtaacagtcgcccaagcatacggctcttgattaccgtgaacaataactgcaactggtaaactcaaggtccacacttggaacattaattctcctcctccgacactaaattgtgactggaatagtagagagaacttttcatccattacactttcagatcccttcttttcggttcttttgatcgacttcaactgcatgtttctaaagctcaccgcaagttgtctggagctttgttggtattccattgtgccaatattatttaaaagctctccagaactttcatttttgcctagtttgtcattctttaaaagcatattcgcctgcgattctgatatgattgtaactttaacttgtggtggcgtcatatgaacgttcagttttcctccaaccaggaggcgaacactagcagtaaatcgcgtatttttcttcattacttgtggaggttgtttttcgataataaaagtcgaggtaactagcgtcgacagcaactgtgtaaactcctgaagtaggtgaggtagcacatcagctactacaggcggatcaaccataggtactctctgcttcaacctttcaacctctttagtttgttgccgattcaaccaaattaattctgccaaactttcgcaccattcctgtatagtgtctaaattgcttttgaagttagctccatttccagccaactgttggtctcgtttccatttaataagttcctcgtccaaaacatgtgtttgtaactgggccaccaattgaaacgtttcttttaatttatcgcctaaagctaactttaactgtaacagggcagccaacttttggttgagactggcttctactacctctttttgtttttgaagttttgtagcattgctgttagatatttgtgagttctgttgggtaatcatctgctgcaaatgtgctgtaattttctgacactcatgatattgtaatgcaaacgactctaactcttcctccatttttcttatgtcttccgctgtactctgagttctgtttcttaaaacgttgatcttttgtaaaatttctgcattgctgttcgatatcaaatttgaaaaaccattgaaattgcccacaccggctgcattaagcagtctcatttcagcagctaaacagctacgaataagggtaaagagttgcattggacaagaactgtatctttctttgaataactttgcagcttcagcaagttttagttttgtaaggaaatattctgaatcagttacaactgatgctttgtcctctatctctttgattaaagagttgatcaagcttgcaatgtactgctcatgttgtggattgtctggatcaatatcacaacaaaacttttcttcaatataatgggctaggtagtgtctgacttcaataggaaacacatccccataaatttgttgcagactccctggtggaagcgtttgtacttttgcccacagtgacatcttgtctgttcaccacataccaccaaaacaaaacggcaatttttaaccttgcgagaaaattagcaaaaaacagcactgactctgaagactgac

SEQ ID NO: 6438 - DNA, 3123 bp, Diabrotica virgifera
  SmartBlast Evalue=0; Info="UNC93A protein, putative n=2 Tax= Culicini RepID=Q17DS4_AEDAE"
gaatttatttctacagtattgcgtttaaaatactgattactttacaatttgaatacttagtttctatattgtacaatctaacaaatatctatttatatttactgtacacattttctaaaattatcagaaaaataaaatatatataaataatatttgaataacaacataaagttactggttgagactccaaaatactttgtagaagtctcatatactctacggaagattaatagatatttgaaaaaaatattggtgcaaatactttctttactcaagaactttttgtttaaaatggcactctggttagcgtttctatatctcatttcgaagttaagtttataggtaaatattattaacagggaatttaagcatacaacgcattaagaaataacccagttaacttccaaaatatcattatatctacctataaggcaatgagcagtgtagatcttcaccaatatggttgagttcaaaaatattttaaaggactatcagatgacagacatgtatggttgttaaagaagtgtggtgcatgtttctaaagtgatgtattactattatctgtgatctaataaacgtagtaagactaggaacttttaactaatgggaaagtagacggattgttcgaaaaatggctacaatacttatgtgttcatgagtaaagactaaacacaaaggcataaaacgattaataagtcaaattaaaactgagatgaaactggttttggatataatatactaacttcataatcatcattcatacaattaacagttttcattgcttcatcttttatgatttgtaacaacacactttgaactctaaacaagatactgatattctacaatacaatacaacaactttctaactatcgattcaaggttccgcggtggagatcctttcttgttcaacaaatactgataagttactggctggttcctgttgttttcttcattgtataaaaaatgaggcaataagtatatccggaatggttccttctcgcattgctgaccaacctcttgcaaaactggaatgcttaatttacaagtgcgtaacaataatctcgtcatcaatatcgtctttttcgtcgtcagtttcttccggttctggaggaagaatttccttgttcttagctgcttcagctgctttcctctccttctccttctgtcttcgaatcttgtgcagatggtgaatttcgacgatgacatagagtaagaatcctgacaagaggatggtcagttgtacgtacagcttcatacgagcgcagatgtgcgttgagtaggcgtaggcgatgacgaagcctacactctcccaaagacggtagttggagaaagcagcttccttgttacgacggaaaagcgtaccgtataaaccattgacttgagtttgccatacagcatctccaactccccaaagaccagcagccataaagaactgataaggagtatcgggatgaggtttccagatcaacatccaagtttgcaaacctgcgtgaaccaaaagtccgagacccatgataggtgctctaccaatgtacttcataatggatccaaagagaagactgcaaatagcgttgacacagccgaagcaaatcatgacgtaacccacggaaggaataccaagcgcacatgaaacgtacgcttgcgtgaagtctgctcctataaaggcttgttccataccaatccatactgtaatcgggattaatagttgttggtagggtttctttagttggtaggctgtagctgacaacagttggattcctgagagttctacctgactagctcttcgtccctgtttttcaccataccttgtaagtggatcaacaaccaatgcaataacaacagcggcacataatatgcacgctaaataaattatagatatttcatagatttctttatcatctggcctctctaaatttccattattgttgatggtactaacacaaaaacttgcaccgcagacatcgtagttgggagttgcgttagcgtgattgctggcactaccatgtgggttgctgagaactaatgaagatataagatttccccacaattctgcggtctgccaggccaagaagaagaacccaaagaacctcacgatgatgccgtcgactgcttggtctgtaagtttcgcgtaaactcctgcaacttgagtgaggtacgtagccttcgacgcccacataggcgccgcgccaataccaacgagtattcccgcaggaattaaagtgtaaaacctaggataaaactgagcggcaatataaggagcataacacaacaacgagaaacaaagagtccacttaactgtgagttttttgatagcgaacgtaggcacgaaaatgcacgaaactacaagcgccgcgtatattgcactgagagaaacagtaccgagaccgtctttagcattaatactactttgaagatttgctgttccttggaaagctgtgaactggatcatgaaggcgcacgatatagcggaaacgttcttgaggatcctccatttctccctggtggacattttgaatttgccttgctggaaggcctcttcgtcggatatttctcgtgggggtttctttggttctccattgttggcgtctcctttgaaagctttgttgtcgtaggctccagtgactgagactgtgtagacatcgttgtggttgttggttccgtcatggccatggctggcattgtcaccgccgctgtcgccacctactccgagggacgcggtcatctctgatgggccgcgatcaccctcctcgatataaaactataaagatgtaacctgctcccagcccttaattaggctgtgtgtcgtcagaatcaccgttttcttccaggcgaataacttttagagaattttccctgataccagctaaatgtcacacacgaatcacgagcaaatgccgtttttgacaagtgtaaacccaggtttacttaaaaatcgcgacgaagtataccgaaacgagatccaccttttcgcaacgtactgtgggtgctttgggtatcttcgacgaccaagagcgacgtgggtactgacaagagaaccactgatggtagagagtggtggacgtactgcagaaactttttcctgcgaccagcttttagacaggaggttcacgtgcttctgatacg

SEQ ID NO: 6439 - DNA, 3106 bp, Diabrotica virgifera
aagcacctacgactgccttcatagacgaatataggtttgtttctctagctcttgaaaccttgagaactattttcatgtacattaaaacaatttccgtaaaattagtaaattagtacaattagtaaaaagtgtggtacctgttgcttgtctacaaatacctataatatacttttacatttcattataatgctgatctctagtataatatactactgcagaaacaaatctatgattttaaatactttgttataaaatttttaaatagaactttgaaattattggtttaaaagttaccacagataaatctgtaaatatttaaaacgtttaatagaattgtagtacatacttatatatcattttctaactttttatattgaaattacttttttaaaacgaaacaaaaaaataaatttcgtctgtaggtttttggtaaacattagctgtaagttgtgaagttgggaaattattgtttttaagtgtgaatatgggcttggctttcgtttgatatattttatagttcaactggcttttaaaaaagttttttccttgtctaaaatctcacatggaatgtatctggcgacttcttctttttctgaagctgcttatccattccgaaaattggcaatcagcagttctcatcttatttacagttccacagaatggtcagtgattgttagttaaaaatattttcttcaatttttctagacaagaaatacactttattccaggatattatttttaatcgagtttttgctaacaaaagtagtagagtcagtttattgcatatatgtaattttgttgcgttgttctgttcgtcggttttctggttccgataagacttgcctttaggatactcagctagcattcgataaagcttgccttttggatacccaactaacgttcgtatgcttcgtttcaagtttcgacatacctccagctgagattagattggaggatactagaggtgaggagttacataaatatatcaaagaataacacaggtatcctaagtcgagctcaacgatgacagaatcctcaacaaaagggcaagatttgacttgaccctgatgatcagtatgcataggaactgcaaaagcacagcttatcgattcattactcttaaaaagttttccgcaagaggggacagagaagttactatagggataagtaacttttgaagccaagggttcatagcgacgtcgctttttgacgcttggatctttttatcattgagaggaaccgcaggttcggatatttggttggcgcacttacttaagcgggtaatggcgcagacccaccatccgtggtattatacctaaacgactctaaggccgtattttttctagtcaaagatggcaacatatcactcggagttcgtagagtcgaaagggtcaaacttcacatttggcaatcgtaggtcgctacgattgttgcacgagtttttatttccgttgggaatattggttaacgccgttaacggtagggatcgatctttgctggtagtccagatcttagtatgaaaatgggttataatcttttcgatgttggaacttggaaatgtctgtagacgatttacgtacctggcagggtgttttacctaatagagcagtttccacgttgctatctatttagaatcagctctaagattaggtattcgccttttcccaaaaaaggatgtattttaatcaaactctgtttactctgattggagtacgaagggaaccattctcgttggaactttaccgcgctgagaagatgggacgagaattataaattgtaaaattccgtcatcttccttagtcttagcatccgttatggcttgaaaattgtagaagcctcggaggtgtaaccagagaaggtttccattgttttcagtctggtgggatgtggagtagcattatgctgttttatatgccattagattgaaaacttagtctgatgtaatttaagttttgctctttattcttatctctacttattgttttttatcctttttgtctaacatcaagcttcagttttgcattaaccagaatagtgcgaagtcttatttgaagattctactttttcctaattagtacctcaccttgtttccagactttctcaagagcccaggtgcaaaatttcggggcaatgatttttgagtgcattatttttttcgaatcttgagaaaactaattagtatttttgaaaaatttaaacgcagaatgaaagattacattattaccgagggctaaaagaccctgaaccttctataatgtctattgtaataagttacaggggtgagaaagaagagataatttaatgtgatttttcgtttaaaatttttaaagttattttaaaattttcaaaatatttattagtttcctcaggatccgaaaaagaataaatgcatttaaaatcattgctttgcaattttgcgcctactctcttcacgacaactagaaacttttttcatttgaacttttttcatttgaactaattttaaattcttggatatttctttcttggacttctaaagtgcttagatattggatattttttaatgtcgtttgccttgttgtattcgtggtaccagaaacgccagaaatacaattcagccagaaatacaagttttaaaaatatttttctccattcgattcttcaaaatctttccatttattctacccataattcaggttagataagtagatcaagactaataagagtaaaaatactcttattagtcttcaggctttatgttctttatcctcttatgtctttattcttttctcaaattttttatcaatttccagatttccgtgcttccagttcctcatatatttgcttatctcttagtggtagaactttgatttttgctgattccttttagtcatttttgattttagacgaagcctaagaaatcaaaataatatctttgtctttcttaatacataaagtacctatacaaattttttcaatattagccaaatatacacactatataaacttttgatctgtgatattggatttgtcaggagtgtgttgcttttcactttagcttatgtaaaacgttttatttatttttgcttttgtaatcattaacgtaaagctaattataattcgtttg

SEQ ID NO: 6440 - DNA, 3114 bp, Diabrotica virgifera
  SmartBlast Evalue=0; Info="Alanyl-tRNA synthetase, cytoplasmic n=8 Tax=Sophophora RepID=SYAC_DROME"
ctttcttaccttaccgctgtcatcgtgttggtaaaagttcggcgttttgtactttctcttagaaaaattagatcaccttcagtcgatctagtttatagatatatttgtgctttaagaaagtgtcttcatataaataaacaatggccatatcaatgacagctaaggaggtgcgaaacgcctatatagattttttcaaggaaagggaacatgtgtatgtacattcttcatcaactataccattagatgatccaacgctattattcgccaatgctggtatgaaccaatacaagtcaatttttttggggacagttgacccaaacagcgatctttcaaaacttattcgcgctgtgaacacccagaaatgcattagagctggaggcaaacacaatgatttagatgatgtaggtaaagatgtataccatcataccttttttgaaatgatgggaaactggtcatttggagactacttcaagaaagaggtttgttcctgggcatgggagtttttgacccaaaaattaaaactagaagctgataggctctatgtaacatattttggaggggatcctgcatctggattggagcctgacaatgaatgtaaacagatatggttaaatcttggtgtcaagccatctcatgttcttcctggtagtatgaaggacaacttttgggaaatgggcgaaacaggtccatgtggaccatgctcagagcttcattacgatagaatcggtggcagagaagtccctgaactggtcaacatggatgatcctgatgttttagaaatatggaatcttgtgtttattcaatacaatcgggaaactgatggcagcttgaaatctttgcctaaaaagcacattgattgtggattgggtttagaacgcttggtatcagtcatacaaaataaaagatcaaattatgatacagatctttttgtaccgttgtttgaggccatccagaaaggtactggcgcgccatcttatcaaggcagagttggtaaagatgacacagatggaatcgatatggcttacagagtattggctgatcatgcaagaactctaacaattgcattatcagatggtggcaacccagataatacaggtagagggtatgttttgaggaggatattaagaagagctgtccgttacgctacagaaaagttaaatgcaaaacctggtttcttttccacattggtcaacactgtagtcgagattctgggtgatacctttcctgaagtaagaaaagatccccaaagtgtcatggacaccatcaacgaagaagaagaacaatttctgaaaacgttgtctagaggtagaaatctccttaaccgaacaatcactaaattggacagtagaataaaggtggtaccaggagatgttgcttggcgattatatgatacctacggttttcctgtagatctgacaacactgatggcagaagaaaagggtcttactgttgatatggatacctatgaagaatcgaaaaagcaagcacaaatcgcatcacagggtaaaggcactggtgtagcagatactattaacttagacgtacacgcaatcacagaacttcaaaataaaggagtaccaccgacggatgatttagaaaagtactcatatgtttctacggaatccccagattcggattacactttcaaatcttgtgaagcgacagtaataggtctcagatacaataaagaattcgttgacgaggttcatactggacaagaatgtggagtactactggataaaaccaatttttatgctgaacaaggtggccagatttacgatactggatacatcgtaaaagttggagacgaaagtgtggaattctcagtgaaaaatgtgcaagtcagaggaggctacattattcatattggaaatttggaaggaactttaaaaaaagggcgacaaagttagtctacatattgataacaacagaagacgattgatcatgagcaatcataccggtactcacgttttgaattatgccttgcgtaaagtactaggcaccgatgctgaccagagaggttcccttgtagctccagataagttacgttttgactttaccaataaaggtgcaatgacgactgatcaagttaaaaagacggaggaaaactcaaaagaactcatctccagaaataacaaagtcttcgctaaggattcaagtttaggcgtagcaaaaactatcagaggacttcgtgctgtctttgaagagacttatccagatcctgtaagagttgtgtctataggacttcctgttgaccagctagaaaaggatcctttcagcccagatggtgataatacttcgattgaattctgtggtggtactcacgttcaatatgctggtcatataggagacttcgtaatagcaagcgaagaagctattgctaaaggaataagaagaatcgttgcattaaccggaccagaagccactaaggctcttaaaagaactgaattgttagaaaatagacttaaccaattgaaatctactattgatagtgataaaacaggtgctaaatctaaagaatacgtcaaaagtatcgtagaactaactgaagaagtatcacatgccttaataccgtactggaagaaagaagaaatacgaaatatcctaaagaaccttaaaaaagctttagacgataaagatcgtgctgccaaagcagcagtagcaaaccaagttgttgaagaaatcaaagaattcgtgaaaacaaatccaaacatacctatcttggtcaaggaacttaaggcttttaataatactaaggctctagattcagcactgaaacaagtacgaaccttaagtcccgaaacttcagctttatttttgacggttgatgacgattctaacaaggtattttgtttgtcttctgtgccaaaaggtgccatagaaaaaggcctcaaagcaaatgaatgggtccaagaagtagccaaaaaggttggcggaaaaggtggtggcaagccagattctgctcaagcttcaggtaacaacagtatacctgcattggatattttagatcttgctaaaaagtttgctgaaaccaaacttctttaaaggtctatttattgcatctattgaataatgcattttaattacatttttaagttatttgagtaataaaat

SEQ ID NO: 6441 - DNA, 3103 bp, Diabrotica virgifera
gaaatctccacttattattttttcagtgactttttcaatcacaagattctcatcttgtatacatatcttgttggtaggtaagtagatatttacgagagtattataatatatagtaaacatgtcaaaagtacataacagtaataaacattaataacattaataaaagagaaataaactataaggagcatctcgacactgtttagcatcaaatatttttggacgatgaaaattagggtaattaagggtaaggtaaaggtgtaatttgattgtctactaggtaaatatcttttcgcaggttacacaaactacaggctttttgttaatttaaagaatttaaaaagctatggaaatgtccaaggaataacctcttataatgcttttaaattgtctctccccgccaaaagcaaagctgtcattatcataactggacacatgcgcagttaatggagcccaatgttgcaattaacctctcgtcaaaaagttgctgtcgttaaagtctacttctttaatttagcatatatatctggaactacaacttgatatatggtagtctcttcgtcatagcttttaaaagtagcatctaattgagttccttcaccaattagcgattttaatttgtccttagctccaggtatgtcaggaatatctactaattcacagaaaattcccagcattctaatgtttttcagagcagcaggaaaacttcttatatttgccctagtcgctgtaattagatttccacaatctacagatgaaatctcataattattttcatcattagacaaaacaacacctcggaaccatgatgcctcttctgtttcatctgttttgtgtaagacaaggcacatttcccctgcttctggatcatatggtgtagcgttatcaaattgctgcaaccaatcatttaattgtgagaattcggtcagtacatcttcttccattgatattaatgttagttcatcctctttaaaaattggaacagacgtattttcccgatgaaccaattgttggtttaacagaatctatttctccaaacattactttcacatttgcatctgtctgagatttctgctctgatggttcttttgccggagtagattggttctcttttacagtagtagctttgatctctgttgccggagttggttggtcctcttttacaatagctgctttgacctcttttgcagaggattcaatttgtttattttcacattttggtttctccaactccaaaagtttcgtagataaacaggaaccgtcttccattttcagatcaaaatcgtcgtcagaaagtaccacagatactttacttttttgttctatcaatgtttgaatataattcaaactcacgtcgctaagactctccaaaacctttatttcaggtgtgaacaataagcaaattggttctttcgccaaataatcatccacgtttctcaatgattttatggcaagtttctcttcgccgggataatctaagtatgtcactgttgctattgtcggtgaatctactttaagcacaacagctctgcaaagattcggcgcgccatctttagcacatataatcatttgaccttctttaacttcgtttaataataaagtgtctttatccaaattttttatatattcgacgatttccttgcctttcgcaaaacattctttagttttaacgataagttgattgttagcttggtcaataatttttacttgatctccatctttcaaagctttaataggctttggcaattcaaagaaacatttcacagaatcatttaatttcttttctggctcaacattgtttttctctacttcaaaattactgtctttatcagaatctacaggtttttctttgacattactgtctttaacatcaatgtctttatcagaatctagaggtttttctttgacattactgtcttcagaatctacaggtttttctttgatttgttcaatccttttttgagcggtattaccagtcgattcctttgccatttgtgtatttgattgaattttgatgtcatctgagctatctttaggactagaaccccattcctcttcatcttccacatttgcttcggaagctctattatcctcatttcgcgatgcctgtgatcgattaaacctgttaccacctgaattattgttaaaacttcttctatcgctgttgttcccattctcaaaccttctcccagattccgatctctcggaatctctcttgcccctaaatccgctatctctcttctgatctctctgatcataccgtctctctgtgtctctaggctgagatctcttatttttaaaatcttgttttccactttccatggaatatctatgggctgggcgagtactgccagaagcttcgttgtcgttattctcactaaaattatcccttttaccatactgccctccacctcccattgaatgtctttggtttggcgggcgaggtgagcgaaaactatcagaagattgatggaatgaaccttcgtttctattattattcccagcattatctcctatcagagtttgtttacagcgttctataatgctggaaatagtgtcttccgtaataactgccgccagttgtttatttttcattaagtatgagcaagcatgatttaacagagactgataaaagtcgtctaggactaccttccttttacttgttataaaatttagttctgctctcgtaagaagaccaaaaccagcatttctcacatcgtccacagatacaaatatacaattattgtctgcttcaaatgttggtatcatttttccgtgaacagtataaagctcttcactttcagaaacataaacgtcatccatggcgggattggaacttgtatcgctgatctctggtttctccggttttcttctgctagcgtaactcgccaaccatatgaattgttccttaaagcgttaacagctgctttattacacgtattattttctaaataaacttttccgtatcttccttctggatctatgtatatctttttgatttcgccgaattgagagaactctcttcggatagaagcccggtcgtcttcgccacctgtcaatggttggatcttgcagaaatggggcacattattatatgccattgtgg

SEQ ID NO: 6442 - DNA, 3115 bp, Diabrotica virgifera
  SmartBlast Evalue=0; Info="Coatomer subunit beta, putative n=1 Tax=Pediculus humanus corporis RepID=E0VBA2_PEDHC"
gctaaataaattttattctttaaaagatatttataatctaacaatgtgtaaccagtaatatgatattaaattaattaaattacagaatatgatttaaaatgaagaaaagggttgaaacagaaaaaaacgtttttatttatgcagctactactttatgttgtgtgctcttctgtgtcatattgactttgtctcctaaacttaaggccatgccctgacttttggcccttattctaatatgaccgcttactggcgcatcgggtttattaaaaggtttctctatacttaagttggccaaagcgtcttctccaaaaatggattttgcatataaattggctgccataaaaccacactgcccgctcagagctttttctgatgttaaacatttcaaatttgtgcttttgagtagatgttcgaggtattctgaaagttccgtgaggggtgtgttaacggttaccttattttcccattcaaattccgcccacattctcataaactcgctatctgtacaactagcaggcactatatagtccattatatctatgtgtatatcattcaaaactacaacattcctatctgaccccgctcctatgacatcatacacaatgttgccaaatataattccgttttcagttgaggccactttcacgttagctttaatgttgcaaaagtctttgggcgccaatacgacaggttgtggcttctctaccaacttcaaatcgcctaaagtagccagctctagcgtgcagttttgtaaagtatcgttagtttggtttacgattaagacatcaagcacgatatcgtactgattcacgtgaacgtatgcttcggaataaactggatcggaaaaaccagtcagttgtgtgattttatctaatttattggaacttaatactgattcgccacctcccgttcgacctcctactaaagcttgtgacagcgacatctcgaatacgttttctcctagctctccacttttatctgtctctaattgcaggaagcttatagcgtcgtcagtttgaatcgtacgcttgtttttttctttgctcttttgcgagatcgcttctaccgattccttagctagaagcatctcatttagtgccgagcggcacaattttttgaaaatttcaacaatgattggagaacgatcagataggactcgtaaacagaacagaatgtggtctttatcgtcgttggttattgattttgtgggaagtcctgattttcccaagtgaagaattccagccataataagcataattttggcattgaatccattgctagcagcaggagaggtgaggtcctcataccgcaaagacagtttggttaatgtagatgccaaagaggctccgatgaaaaaatcaccatccatgaggtattgtcttagaggaggtcgtgcttctttagtggtttggctgacagtgttgaaagctgattgggtagcatatgttccatcggaagtaactaaagtggtggcgcctgcagcaggtgcaggagcattctcttccgtatctcctgctattaacttctgctcagcttcaacgagggatccttcacccaacaatctgttaatttctccaacgataacttctatatcggaagcagtactcgcgtattctcccaaaatccaaattgctgctctatggactttgaccaatttaatgtctttgaaagtttcgatgagtttctcaataattaacggttgcaattctttaaacttctgtatggcttcccttaagaacagcaatacatctgtggcagccagttcattattatcggataaaaattcaatcaagactggtataacactacgtgcgatatctgggaacttaatggaacacgaatgtagagtccttactaacaattgcctgtactttcctgtatcctcatgttcactgtctaccgttttactcacttcctttgttaatactaataccatttcttctatgttccgtgaagagactaattcaagggctagacttaaagtcttcttgcggacttctaagtcaggagcagagagtactctcagtatgtccataactaaatcctgcagaattctttcgtgattaggaagctccttaagtgctatcagcctgtccaaaacgatgagttttacattgttgtcactttctttgataattaactcaatgtaacagctagcagcagctttaacggcagtcggggcactggagagggtgactaaagttcctgcagcttcgtacctgacagcaggactgcttgagttcaacaagttatatatacatctaataaatctagatctttccgcaggattggaatgacacaccttatatatcaactcaacgatgaccagttgtagaatatctccaaatgaatttacttgatctaaacatgatgccaaatacgacaacgccctttcttggtcagcatgaagaagcattaaaaacgcatttcttttacaagacatgtcttgctcaccatccaaataattggagatcagttcaggagcatctggaatgagggcttcaaaatttttgtaaatggtaaaaattgccagtacagcattcctcctcacatagctgtgcctatgatccaaacaagctctaatactgggcattaatggttccaacaattctggttccttcagtttgcacaagaagcgaagtgtagaacctctcaaaaattcatttgggtgttgcagatcttttctataggcatcacataccaaaatcatctcttgtagtagtttaccttctggatttgtttttggaactatttcccagaaaatcaataatagtttttttgccaaatgatcttgtagaggtaaaacgtttcttatgatggtcattaggaatccattcggcaacctttctcctgccagaatcatgtgaattattttttctaatgctcttatttttactttaacctcacccttttctaaatccatttttagttgcatttcattgtagggctccgaatctgttggcaagtttattagtgtgtaacaaggttgttctaccgcggtcattttcgtacgttattatgtactcttaataaatcaattttaattatgtttttcggtaattttactcaaaagtcaggctaaacattacagacgtgtcagattgttgacgttttg

SEQ ID NO: 6443 - DNA, 3112 bp, Diabrotica virgifera
  SmartBlast Evalue=0; Info=26S proteasome non-ATPase regulatory subunit 1 n=1 Tax=Culex quinquefasciatus RepID=B0WHS6_CULQU
caatgactgtgttgtttttccgacgtgaaagtttaaaaattacatttttcggaattaaatagtgcccaagatgaatatcacatctgcagcgggaattatttccctcttggatgaaccaagaccagaattaaaagtatttgcactgaagaaactagattccatagtgggtgagttttggccggagatctcagaagctatcgaaaaaatcgaaattttgcatgaagacaaagttttccagcaacaccagttagctgcacttgtggcaagtaaggtatattaccatttaggcgcttttgaagactctttaacttatgctcttggtgcgggtgatctctttgatgtcaatgcccggagtgagtatgtagaaactattctagctaaatgtatcgactattacactcagcaacgtattgctgtagctgaaggattggcagatgccaaacccatagactctcgccttgaagctattgttaatcgaatgtttcagaggtgtcttgatgatggtcaatatcgtcaagctatgggcctggctctagaaaccagacgaatggatatctttgagtcatctattactcagtctgatgatattatcagcatgttgacttatgcatttcaagtagcgatgagtttgattcaaaatcgagcatttagaaacactgttttgagatctcttgttggactttatagaggactggttacacctgattacgttaatatgtgccagtgcttaattttcctcgatgatccattgtctgtggctgaaattttagacaggcttgtaactggcaaggaggatactgaacttatggcatatcaaattgcttttgatctctatgagtcagctactcaacagtttttggaaagagtattagttgcattaagagccacagcaccagttccatctttgctggaagaaaaagcaaagccaaagccttctggtgaaggagagggtgctatgtcaaccgagactggagaaccatctacagaaacaaaagaagaaaaattaaaagaagaaaaatctctggatagtttgtctgatcaggataaggaacatcagaaaagaattgagaaacttcatactatactctcaggggaggtctctatagaactgcaccttcaattcctcatcaggtcaaatcatgctgatctactgattcttaaacaaacaaaagagactgtcagagttagtatttgccacactgctactgtaatcgcaaacgcatttatgcatagtggtactactagcgatcaatttttaagagataacttagaatggttagccagagcaacgaattgggccaaacttacagccacagcctcgctaggagttattcatagaggccatgaacaagaagcattaacactaatgcaaagttacttgccgaaagaagttggacccagctcaggttattccgaagggggcggcctttatgctcttggtcttatacatgccaaccatggtacaaatatcattgattaccttcttggacaacttaaggatgcacagaatgagatggtgagacatggaggttgtcttggtctaggtttggctgctatgggcactcatagacaggatgtttatgaacaactcaaattcaatttataccaagatgatgccaatactggtgaagcagctggtattgcaatgggaatggtaatgttgggttcaagtaattctaccacaattatggatatggttgcatacgcacaagagagtcaacatgagaaaattcttagaggcttagctgttggtattagtttttccatgtatggtagattagaagaagcagatccactgattcaacaacttacctctgataaagatcctatcctcagaagatcaggaatgtatactttgggtatggcatattgtggtactggacacaaccaagcaattagaaaactacttcatgtagctgtgtcagatgtcaacgatgatgttagaagagctgcagttacagctttaggttttctgttattcagaactcctgaacaatgtcctagtgtagtatcccttctagctgagagttacaatccacatgtacgttatggagctgctatggctcttggtattgcatgtgcaggaactggtctacgtgaagctatagctcttctcgaacctatggttatgtttgatcctgtaaacttcgtaagacagggtgctctcattgcttctgctatgattttaattcaacagactgaacaaacttgccccaaagtcacattcttcagacagacatatgctcaagtcatttccaacaaacacgaagatgtgatggccaagtttggagctatcttagctcaaggaatcatcgatgcaggtggaagaaatgtaactttgtcgctacagtccagaactggccacacaaatatgttagctgtagttggtacactggtgttcactcagtactggtactggttccctctatcacattgtttagctttagcattcactccaacatgtgtgattggtcttaatgcacaattgaagatgcccaaattagacttcaaatccaatgccaaacctagtctatatgcttatccagctccaatggaagaaaagaaaagagaagaaagagaaaaggtaactactgccgttttaagtattgctgcccgccaacgtagaagagaccatgaaagaaagcatcgtgacgaaaagatggaagtagatgaagacaaagatgacaagaaaacagaaaaagaagacaaggagaagaagtctgaagagaaagataaaaaggatgaaaagaaagctgatgacaaagataaagataaaaaagcagatgacaagaaagcatctacttctactggcgatgataagaagaaggatgaaaaggaagaaaagaagaaagaacctgaaccaaacttcgaagttttacagaatcctgctagagttatgaggcaacaattaaaggtgattacacttaatgatagcaatcaacatgtttcgatgaaagatgtttctattggaggaataatcatggtgagaaatttgaagcctggagatgaggaactggttgaacctgttgcagcttttggtcccaagggcgaggatgaaaaggaaccagaacctccagagccgtttgaatggacagaagattagatatcatca

SEQ ID NO: 6444 - DNA, 3110 bp, Diabrotica virgifera
  SmartBlast Evalue=0; Info=Programmed cell death 6-interacting protein n=1 Tax=Aedes aegypti RepID=Q16QI6_AEDAE
gacataaactatattcatttattaaaaaacatgattttaaaatagaataatgaagaatataatcaattataataatatatcaataatataccacaatgttaaaatagaatacaatttcaaccctaattcattgaaaaattactgtataagccagggtttaagcattttccttaaaaataaaactcggccatatccaacgagccgaaaatgaatacagaaatataaaaactaaaacttataaatgcttttctagaatcagaagacctttaaaaatattatgtataccagcactgccaatttctaatactagtactaagagagaaaactctttttcaacaactactacagtgtccgtacaaaaatgtaatgcataacagtcgcgaccaaaaatcgagtatttatagtttctgttggatataaccgaggtctatcttttttataatcgatacaagatctgttattcacgttgtgcagtgctatatgctggactagaagccatatttaacacaggatttaacgccagttggggtaggttcctggaggataagctccaggtgggtaatttccttgttgttgaccgtatccgggttgttggccaaactgctgttgagggaatggcgcttgagcagcctgttggatgttctggtaactgccgggtggaccttgtgggaattgataagaagatggataaggcatggttccatatggattgtagccttgaggcattggcggaggcacatacgtaggataaggagcgttaggtgtagctccgtatggtaccggcataccctgaccttgcactggatatggcagatatcccgaggcttgagacggctgtgatggtggtgcagctggagctggttcggcagcctttggtgggtctgtgtgatagcttggtgtagtaggctgtacgtgggttcctcggctagtttcttgagtcaaatctttcagtagttcttctttttctgtttttctggcgaagcaaaagtctgatactttattttggaaggttaccagcatctgtgtcagatcattatagaatttggtgccttcttgtaagttgttcaataaatccctaaaagcatcgtgagcagaggccaaagaacacatcatctgttctcttccaccagcagtagaacccctctcggagacgaattgggagtgagcttgctgtattctttggaccaaagatccttgcttctcgatactttctgcgacttgcttttgtagaggaccgtagatcttgcctaaattctcaaaagaaatagctgcctcattgatgacgccttctttagcgagagcaccgaggaaggcatctttcatatcggtcgtgggactcttcagctcagcctcaatggcttctctttcggccttaattgtgtccacctcttccattaatccccttaaagtttcaacggcagaggaatttccaacgcttccaccggttccactgggcaatgcactctgtattgcccctgggccattacttaacagttccataccttgtttgtgagaatcaaacttctctctcacagtcttatcggcctgaacagcattattgattatctgtctatattttgcagaattagacttgaacatttccgtgagattatcggatggagttctcgtccacttttctttgaattgagctctaagtgcatcgtccgacgacttttcttcatttaacattctgtctgtttcatctaaaatgtcttggtttctcttcaacagttctggtagctcggtgaccatgcgttctagctcacctagacctcctaaagtaataatggagttagatttttccaaaatggacggaggtacttcatctccactaccggtaacctcgatagcagcaggtaaattcaaactggctaaaagaccattcaacatctgagacgattctcttaatttagtgatctcagtattgactatttcggtttttctgatatcataagaagcaagagcctgatggactgccacgggtaccaactcggtgaacaagtcgttgaagttttggctcattggatgggctacttgtagcactttggcaggctgagctttgccgattggatcaacacttttaatatcgggaataatttcgtgataaatgaaatcattgtcttttacagcttcgttgagatgcctttctaccctagaagctacttcattgaagaacgacctgccagatcgggactgagcggctttgaagagttcattggatctcctcaacctggatatttcttgtcctatggttttattggtcttgcacactaaactctgatagaactcagctacagctccaagtgcggcttgtttaccagcaattattggtatccaatccttatcccaaatgtgtttgaggttatctctttgaaataccttaagacattctgcatataaatcttcacactgcgaagctagcttggcgacaattacgtctttcatgttatcatgtatggctttatgtacgaagatctgttgagcttgggccaacatcagctgagagagggcaccaagagtgtctggatttagatctggagtaggatcctgttgaagggcaagcatcactgttgatttcaaatagttgaagattccagaagcttgctgtaacaatttagctgccagtttgagtccttcatcactctcgacactctgggcagcagccacactactctgcagagctgctatattgaaaagaacacataccttctcgaaactcaaggaagaaatagttaaactcatcctggttccgaaaagatttcccttgtcaaaggcatctttccacttaaagggcacttgtagctcctgtgggggaatttttccttctaaagccactatttgatcatagtatccataaataatttccaatgagctctcgtatttttcaaaggccttccagatagcgttatttctttgcttggaaaactcatttatagcttctgaacaatcttcaggcttgtctgccgtgctgtatcgggattgtattaaattctttaaaggagttatgaggtctacatcactgggtttcttcagaggaacagacagtatttcagccattgcggttttgtttttcgtaaaattaaagtaaaaatgaaagtcaactgacaagc

SEQ ID NO: 6445 - DNA, 3102 bp, Diabrotica virgifera
  SmartBlast Evalue=0; Info=Argonaute-2b n=2 Tax=Tribolium castaneum RepID=D6WJK1_TRICA
gcccgttactctattttatataaacatttgtaaaaaaatcaaattttagacaaagaacataggcagtcccttctggatactgtcctggattttaaatctttcatattccctatttaaattttgtaaatccacattttcgggttctatgtagactttgcctctggccgcagctaaatgggcatagtacgtcggagctggatagcttacggatctgttgcaccgagtgaacatgtgacatagaaaatacgtaagttgctcaatgtcgtcgtttgacatatcgttgtcatcccacaaggtacaatactttgttggtttcgccactccctgtatactggcgtgggaaactagatagaagtcctgcataaatggatgtgtaatatgcgtgtccacgcaagtacctgctggaacgtttaaatttctgtcatgagaatctcttggattcaatgggaaaagtctagtatgatgacgtttctggacaacaaggaaagttattgccggttcataaccttctctttggactctcttgcatgctgctcgaatagctcgtacttcggcacttgtaacttgttcaaattgtccatccgatactccatctctaaaaaagataattctttggggtttttgacctttattagactcataaaagaacttcaattggtctaccacaatattctccaaatcttcgatgatctcctgtctgggtggttgcaatctccagcagatattgtacttaaaggcttttggatcataagatgcagtgactgccgccacactcggtatatgttgcgaatcagggctgggatgagtgacgtcagcgcccatgatcatggttggtctattcaaaatgggcggacgggtagatagaaaatgattagtaccatttaacttggcattaaccttaagtaaaaggtttaacgccgtttgagaattcatttttaacacagttcttactttaacacattgtgttaaacagcctacattaatctcagctgctgttttaacgtaactatattgtggtccgctatttggtacgacgacaaagattacatcatatttgcctttaacagatgtgaagtatttcttgatgtccatatttctgtcaccaattgtacagaatggttgttctgcttcaccaatctgcataccgcttccgcgtgcttctctaagtaattgtgaagctaagttccgtaagtcatctggtcttggtggcctcctatcagcgcacacgattgtccatttgttaatcgtgaccgcttggaagaatttgtcacctctccatattcctttatcaacattcacttctttaccggcatagcctaatctgggagggggcaagattctggcatctaatttttcaaatgcgctagaaactgaaaaaccgaattctcgtacagtgggatggttgttaaaattagcccgtgttattccttccataatcttattcttgcgtactgtagtagaggttgcagcatatcttatcatgtttcttgtctgtccttctgtcatttttctattaattgtctgattatcttctattgtacacaattcaataggtacaagtataggattatccgatctagctgaagatccgacccatagtgtcggcatctgaggatatcttaatttgcaccttttttctgtttcaaaataccgttggatggtaatttctctattattcgcatctttaaaggttttcacggccggtgggtcatttataccgttaaccttataacttcttctagaactgggcaaatttggaatttcataaacaactcttaactgcttcatgtacttgccgaaaacttccaaatctcgcctatcaagaggtctgctaaggtcatttctcgtaagtttattattatatctgtctgcatttattacttcaagcaaagcttctataactggtatagctttaggaaacggtttatgagcaacatcaacatttaaaagtggcttccagcctcgaatggccgattgataaaatccgtgatacatttccatgccttctcctaagtcgataatttctccgactggcttatggaaaaaacttctgcccacttgaagtagattttgtgaaggagcacaacgtaaaacaatatcgaccacttgtatagcttccgtcggagttgctctagataaatcgtaatctttcaagggggataaatcaaccgaatttgcaaatttgactttcactttatatattttctctctattttgactgtcgtgaatagtaacctcgccttctttttgttctccaaaaggtaacatagtagtgctgtataaattttttcttccatcaaaggctggatatctttttgggtaatgttgctgcctaaagagttccatcacggttcttaaaaactttttcggggtatctggtaccaaatcaacatcatagtgataagccgtgtttaatttacctagcgcgaggctgagatgattcgtttctacgggtattttgcgacctgcttttccaggttcagggtttcttaacctcataggtacaagtggaccagcttgcagttcactcatacgagatgtcaattctttaacagaagctgtctgctgcctatcctgaggcctacgctgttgttgtggtccacccctttgttgcccgtttgccgatttaggttgttgtggtacatctccatgtggacccatttgctttggtggggaactttgttgttgacgttcatttcgacccgtttgctgttgttgggcacctttttgctgcccttgtgtgggaccagtctgttgtgtgggaccagtctgttgtgtgggaccagtctgttgtgggggaccagtctgttgtgggggaacagtttgatgttgctgttgtggagctgtttgtctgccccaagtgggttgttgttgttgaggaggagcagactgctgttgtctcgctcgaggttgttgctgtggcggaacgggctgttgttgaccccaagcttgaggttgttgttgtggaggtgaagggtgatgttgtctcgctccaggttgctgttgcggaggagcttgctgttgtggaggaccagggtgctgttgtctcgttccaggttgttgttgtgaaacctgtggttgaccccaagcttgaggttgttg

SEQ ID NO: 6446 - DNA, 3079 bp, Diabrotica virgifera
  SmartBlast Evalue=2E-25; Info="TNF-receptor-associated factor- like, isoform B n=1 Tax=Drosophila melanogaster RepID=Q9VXG5_ DROME"
gtgcttggataaatgactaaaatagactaaaagttcgtggattacaaatttagtaggttttagccttttagcgtcaagtagcaaggtctacgtgcgcgtttttaatctaatctagtgtttgatgtatgaaccatccttgttttattttcgaaccgtgaatgtgtatcaccttctctgactgataatagtgaataatgtgatatgataacaataccccgaacaaatatggaaaataatcgtagggctacaccaaaatacacctgctacttttgtaataaaacccttgaaaatgaaactgaggtgggtcatacatcggtgtgcggtaacgttttggttccatgccccaacaactgcggtgcttacattcaaagaatggcgttgaagaagcacaacgtcgagtgcataaacaagaccaatcatacctttcctaagcagcaaaaagttatgcgacagcaggttccaacgcagcaagtaccgacacagcagatacacctacagccggttcccgtacagcctaatcaaatacagcaaaccacttatcagccagtaccgaattatatggtgcacacagatgctagaaatatgatagctacaaaaacgctacctaaaaatacaaatgatgtaaaaaatgacaacaaggaagaactttacaagctctctagaaaactcgccgatctcgaaagccgctttcacttccaacaaaaaaatcaaaatcaaacgtctgtttcgctacaaaacttcgaaaacttaaaaactgctcagctacagctcaacttagatatagaaaagctgaaataccaaactcaaattgcctacgattggagaacgaagactgacacgatcattagtaccttacggctcaatatatcaaacgtagagaactacaaaagagaaatcgattcgaatttgatgagtctacagaacagaattatgcttatggagaagctgcaggaccaaattagttaccttaaggatagttttctacgggaacaagcttataatagacaggtggatatggatttcaatgaaaaactcgaagaagtaaagaagttgttggctcaagagaacgcgaagagtgccgctatactaggagaccttaaggatagtgtggatggtttaagacaagacatggaaggggccaaagctagattagaggaccaagggattcaatttacaaatattatctacgatttaaaaggggtcggtctaatggctgctgaaggtcacaagaaaatagagaagttagaagaatattttagcgagttaaaaaagcaaatgacccagatgaaattggatatggagattttagagagtttaagtggttctagcgattttagaccgaagcctgggaggttgttgtggaaaattacggaagttgatactaagatggtgcaagcgaaacagtctaatagtgttatcaagagtcctatattctttactcatgaatatggctatcgtgttcgaatattaatgtatatgaatggactaaaaaagtggaaagatagatatgcgctgttatgcgtacatgtcctaaagggcgaatatgatatggttttaaattggccttgtcaaattgaaggatatgtaacgttaaggccaataagtgacgcagccacagcaaaacccttcacgaaactcataacagccaaaagacaagaaggcaacgaggaatgtgaagaacctcaagaatcttcgtcgtgttacatcttcattcctcatacaacattgtttaagaataattaccttaaggacgacacaattttcatcgatattaaaattaaggaaaccaaaaaattggagactagtttataggataggcttttaaataatgcggagtatgtacctgatgtatatttagtatttggcttagaagtttacctacattattctaaaacacatcaattgactcgtgtagttagaacaatattataatgagaaagacagcaatgtaactgaaattgcagaattattactctttcaaaaaatgtccggtttgctagtccactctgcttctctgcttccaatattctgcttccagcatgacagctctgaagcatttatatttatatgaataactactatatacagaattaaaattacttttaatttgggcataacatttacttgttactaaagaggagaaaagaagttaacattttgaacgtgctggaacaagacgaatgaaagtatttctgagtaccaaaccattgtaggcaatcatcattgctacttttaccttattgacaagagcggggagaatatctgtacttttgtataaatattttcttgaagacatgacctcaaatttttatccagcagctgcttctgtaaggtttggttcaatatgagtgggtcgatctaaaaggtccattgtggttcatctctaggttaaagttatcccctcaacccagcattgtaggacttgcttcaacctctacgaagttgtaggacttgatttaataatgcttaagtgtattgagtcttgaagtctgtgaagttgcactgtccgattttgtttatgagccaccttaggccttaggtgacagtgtcctgtgaggaaacctacgataattcgcaggtcattcctattcatgtatagtagatccttggatctcttcttctaagcttaatgaatgcctttaaatgtttgagacccattttctcgtaccagtgattacggttcatctgttcctcacactccgatattgttcttttggttatgctttttggtaggcatacacgaacgacaggttctcggcctaagaatgtgtattctgtccctctcctggcaagtaggtccgcctcttcgtttccttcaatacttttccaaacagaaggatagtcgctatctcttgggccaacggtatacgaaaataggtaacagggccagtgctacgcttaaaccgcctaactattattaccgctagttttgccaaaggtagttgttttattcagggtgagtctatctggggcctgtagatatttaaaaatattccttcatcttaatttcgtcttggcacccgtatgatttataattattgaaaaatcacgtgggtagtaaccagagaagttccacctg

SEQ ID NO: 6447 - DNA, 3077 bp, Diabrotica virgifera
  SmartBlast Evalue=1E-60; Info="Ankyrin 2,3/unc44 (Fragment) n=1 Tax=Aedes aegypti RepID=Q16FI9_AEDAE"
gctagtcagagccagaaatgagaaatcagaaatcggaggcagcagcaacagtacagagtacacacagtgcagcataataataaagtgtatgaaaatgtgaacaagaggtatttaaagaacaaaattgtgtcattaataaagcccaacgcagtgtatttttaaatatggatcagaatgagtttccactccattcagccacacaatttgggaacctagatgaagtacaacagttgattgaaggaggggcaataattgatgaagtggattctgatggttctacgtcactacatatagctgcagagttcaggcgtataaaagtagccgaatatttattggcacacggcgcagatgtaaacgcaatcgcatcttggggaaggagccctttgcatcttgctacgcgcaagaataatcttgaaatggttcgattattcacagaagctggagcagatttgcagtgttcagatatcaatggaaatattcctattcatgttgctgctgaagtaggatatgttgaaattgtaaaatattttttagaacatgggatatttgtagatattataaatgaaaccagcaaaatgacgccacttcatttagctgcagattccggacatataaaactaaccgaatatttattggcacacggtgcagatgtaaacgcaatcgaaacgtctgaggagaggagctgtttatattttgcttcgcgcaatggtgaccttgaaatggttcgattattcatagaagctggagcaaataatatgcagtgttcaaatatctatggaaatatgcctattcatgttgctgctgaattaggatatgtagaaattgtaaaatattttttagaaaatggtatacatgtagatattataaatgaaaccagcaaaatgacgtctctccatatggctgcatattcaggttacatcgaagtagtagattatttactgttaaataatgctaacgtgcgtctcaaagattgtcagaaacggggttcaattcattatggtgttatagcagggaatgtaaaaattgttcatggccttatagaaaaaggagttgatatgaacgctaaagatatattcaagatgactcctttagatttagcttgtagagaagggaatttagaaattgtccagttacttttaaaaaacggtgcagtgtgtaacctacaggagagatcccggaattattctccacttcattgggcatcagatacgtgtagtctagaaattgtaaagtattttatcaccttaggggtagacgccaatttcggtacaattcaagaatatactcttctgcatgtagctgctaaacgagatcacattacattggttaaatatttggttgaaattggtgctgatgttaacaagaaaactatacccaaaggagctactccattatattatgcgataaaaaatatgtgcacagatgttgcagaattcttaattctaaatggagctgatctaaaagaagctgaatataaaggcaaatctactttatcgatagccttaaaagatgtgtcaagtgattatccagagtcagaaccagacaaagtatatggtacttgcaaaactaataatcaaatacaccgtgttaatttacagtcccattgaaacatttattccggatggttgtcctttcttcaaagaattatcgcaatactataacgactgccaaaaagaaataacaagtatgagcgtgtgacaataaaaaatagtactgtttcattacataaaataatttgcggctccaataaaggcaacgcgtttgttcaatatctatgtaacgacaatattaaaaacgagttggaaaatattgaagattaccttaaagactttttgatatatggtaatattcttccgttggtacaacttagggttaagaaagggtttcaaagaatggcattacttacagatgctgacttaataatgaaaaaagtttcacctaagttaccatcagaaataagatggagagtattcgactacttagacatgactgatcttaaaactgtgatacaatcagattttatttaaataaaattattatttgtttgtttgtttttaaaaacgttatgatttgaggggagggtggtagagaaataccgcgctcggggaatagattacaggatcaacccatacgtaaaagtaaaatttctccctaccagttcaggttcagcgatgctgttgttacgagagaggctttgttcttaatacaagtcttattccagagatgcagagacgtcaattgcgacgtatacccatgtatggttgattacgagaaagcgttttatagaatacagcacgccaagatgatgcaaatactaaaagaagcaggaatttacaatcaagatctgaaaataattaaatacctttaccgcaaatctcagaaggtaaacacaccgaatatgtgaagatcatgcgtggagtaaagtaaggctatattttttatctcttctaattttcaatctttactccgaaagaatatttatcgaagctttgcacgaaactgaaaaaggtattatactaaattggtaccgactaattaaaatcagatatacaaatgacactatagtatttgtggacaacctagaagacctacaagtccttatggacaaaattacgtattacagtcaacaatatggactcaatataaacacctgcagaaagagtgaagcgctacaactatctcggcaccataataaatgaagaatggaccaacaactaagagatacacctttaaccagataagagccttttcaagagccatagcgtctctcttggtataaaagtaagaatgctgcaatgatccgtcttctctgtcctttttatggtgttgaatcgtggaccttgaaccaaaatatgtgcagaaaattggaataatttgggatgtgaccgtatcgaataatacttaaaatcctgtgtactgaatgagtcacaaatgaggaggtcctcggaagaatgaagaagaaccgagaggtactgaccaccataaaatctagaaagtttaatacttcggacacattatgtgtatgaagatcccttacgtataattacttttataattcggttagtactaattttttt

SEQ ID NO: 6448 - DNA, 3079 bp, Diabrotica virgifera
  SmartBlast Evalue=5E-14; Info=Next to BRCA1 gene 1 protein n=1 Tax=Pongo abelii RepID=NBR1_PONAB
gtttgtgttatttgttgtgcgtaataagtaaacaaataaaactacggaaatttcctttgcattattgtgtttttagaaattgtgacatactttaaaaactgaaaataataacatttgccactttaaacggcatcactgcaaccaaaatcctgtgtgatggggtccaaaaagaaagatctagaaataatatatagcttgcagtggaagaacaagtcctcgacaaatggaggtgacaaagcaaatattatcggaatgtatgacatccccacgacaaccctcaactgggaaacatttaagtcttatttgctaaaaaattcagggacggtgggagaagatgtaaaagtatcctacattaccagcagtaacagagaattcccaattgaatcccaaacggattttcagattgctctatatgctttcagacgtaaagctagaatgggggacattgttacactaaagttggacagaatttctgaccaacaaaattacagaaatactcgtcattctaatgatgttgaaactcagtttgacaatgaggctcaatccattgtttcctcatgctgcaattcagacactcccccagagtggttcctaacttatatgaataagttcaagaaaaatctaactgacgacataacgacatcagtcgcaagtattgtttctaacatcaagccacatacagtaagtcaaccttcttgctatcattcgagaaaatccaaggctgagaattcaaagagaagaaaattacctttactaacaggcgaaggatcccacgagagcacaaaggacttgctcaagtccttaaaacttgaaggcaaactcgagcacaaactggaaaaactggaaagtaagacaaagaaattgaaagagaagaagttggccctcttttcaaaatcgagtgacagcgatggatgtacaccaagtgttaaacgccgttcttcagtgccatgcgagcctgaagatgacggttttcacatggatgccatgccaattaatgtacagcaaattattccacatttgttgggaggagagatttatttacatcaatggaaagttctgaatagtggaaaatctgcatggaccaacgaaactaatttattgtacacttggggtgccaaggctctaaaaccattagaaacaataatttctgtcccacatttgaaagcaggcgaaacaggaaccattggtgtacgtttacaggtaccaaataatcctggtcaatatgaatgctactttaatttccatcatcgaggccgccgattcggccattggttgggctgccaaattattgtggatccctttgatttaaaaggcaacaaatcagttttggacactgcttatcttaaccctgttacttgctacgaaaatatttggcaaggtacatcagtagcatcaaatgcgttcagttcatctttcaaccaatctactccgattcaagatgataaatccactgcgctgctaccagaaaacaaacccgacttatttgacttttctgaatcatcaaacatatatggggataagattgttagagatataagttcaagagtagaggatatcaaattgcaggatcccacagatacaaactgtagcagtgattccgataatcagagcattatctcattgcccgagagcaacgattccaaagggttaccatctgaatatgtcgttgttcctatcccagattgtttcaaggtcgatgatactccactcgccaataagactcaagcaactaccaaagtagaacaacaaaaagctctagaagaaaatgcttctgcaatgcctaaggcagcatctgtggaaaatttcgacgacaacaacaatgaggatacaattgtacaaaaagatacttcaagaaatgatgagacagcttcaaatacgagccataaatcagatattgttatggtctctataccagaaaaaaatcaagacagcgaagagtatgcttgtgtcatcgttgatggacaaaaagtgatgatcccgaagaaaataattaaatcagagtacttacattcgaattccaccgaaaagatagatacacttgtagaagaaaatctcacaagctctaacgcatctgtcaaggaaaatacacccgaaccgcaaatcgtaaaagttgacaacgatctagagaccgacggcgcaaaagatgtaagaaacaattttgaagaagtcgagtttaattcccattgctcagcagccggctcctgtttctctgaatcgacggctgaaagaaacaacaggttgtttgtatttcctcctgcttgtcctggatacgaagtcatccgcggtgaagattttgctaacatcgacgacgaagagaattatacatgggccaaatctgatactcactatgcctatagtgttcaaggtatgaaagaaccgttagttcccgaagtagttccagctacagaagctattaatataccatcgtctggaaatccatttgttgctccaactatctcccatgttccgaattttcaacagactccccccgaagaacggaaatgcccatcagaagatgacattcgggctacatttgaagctgcagtagatcctcctgagttaggtaccgaagttccaccaccagaagttagtagagagggtaccccagagaggccaccaaatgaagatgcaagtgctcctccacaatcaccacatgtagtgcacattctaccggagggattagttaacggagcagtaaacgttgcaagatctgtgataaatagaattgtaccacaagggtctccaggccgttgggtgaacggacactgggtcagcactaacccagattcgccccgcgaagccaatttacaagctttggcagaaatgggattttggaacagagatctaaacgcctccttattggctagatacaacgatgacttgtcaagggttgttgcagagcttgtgcaataaacaccattacttattttattactgtattaatgcacttacatgtttattccttacataatacggatttaatagtaatagggcatatagaggtacacattcatctgacaaagtaaacgtatgtaaatcacaagtttcagttttatttttatgtaaagctagagggcgc

SEQ ID NO: 6449 - DNA, 3081 bp, Diabrotica virgifera
  SmartBlast Evalue=0; Info="Leucyl-tRNA synthetase, cytoplasmic n=13 Tax=Eutheria RepID=SYLC_PONAB"
atttggcttcctagatcaacagtttgttttcctaataacagtttaagtctcgaaccgtcaatcttgaagacactatcaggtgatacttgaagcttatccttagttggttcattgaacgctggtatttttgtaggcccaagaacgggatcttcaaacctccatagctgaatagattctggttttttcatagctttactatctttggcgagcctttgcacgactttttcgtaagtatctccgtcactaacggtcagcacctttgaaaagagcccattctgtgggaccggatttataaattctaatttaatacctggttttgcagaaaacagtacaaaaggagagcctggacagcactctttcatcttctcagttgcttctgggtcatcagtatacttaatgataacttcttcgagatctaaagtatacgctaggtatgcactgttggtcttaagcacagcagcttcatcgaactccagtgttagagctaatgctttcactcctagttgctcaattttttctctagtagcttggacgaaaggcataactcgtttcatgtactttttgagctcgttcattttgccgaactccacagaaagagttttgttatcaggaagaacacctttgtttgcctggaaatgacttttcaatgtagttaacaccaggctctgccattctggaaaagtcttagctacccatatgttgataatgttaggcttctctacaggtggaggattgggatggtttttcgtttttacaccttgcatatacgttttcaggtgaactctaaacgaatgagcgcattccataaggtattccgacgccttgatctttatctcatcaataggacctaccactggccacgatgcatttacaacgctggttttgttgcctatcagttcccaaacatgttcagatatatgaggacaaatgggagccaaaatgatggtttgcacttcaataaacttcataaccagatcaatgtgcattccgtctaagcttatctctcggtatttgtctctgatagcctggaattcgaaaagaccggttcgcagtgcctctttaaacaacatcttcttatagaattcgtcggtttctttgattttttgattcatttcgttctggaatacatcgtcgctgaaggaattgaatggccccgtcctgtaagttgatttattagccaaaacctcctttacccattcaataaaggtgtaaagacgcagaattccagcatccgcgttgctttcaacaaagttagcgtcttcgatggtatctcctgaatccgcgagacataatctggtaccgtcggcgctaaatttatcgacggcttctccaagagttaggaaattaccgtcggattttgacattttagccgagtttaacatgagcagaccattggcccaaatgcttttcggccatttggacttatccttgtcccacatggcgacgtgattgaaaatgcagtatgttaaatggttttgcaccaagtccttacctgatactctcaaatcaaatggcatccaatattcaaactcccgcttcattttatccaatttttcttttttgattccacagttagaagggtatttagcttctttgaaaaatatgtaatcccaaacttctggagtcatttggtctgctttgacgtcaagagcattaggaccagtgcccttgaaagtgcctccctgaatcaaatgtgccacagtgtagtacgccatataaatagtggaatcggaaagagactcgattagccatttggggtcccaaggtaacttagtaccgagtccgtaagtcctagaacaagcatgctcgtgcagccaattgatgcaaccgatgaagttcttcctaacttcatcgtagtaggtgtttatgttatctaaagcctttaaggccgagtttttccattcttcgtttccataatcgaggaaccattggtcgcaaagagccacgacgcattcgtctccagaacgggacattacttttttctcgggttcgtagtatattactccttcggatttgtcgatgagggagttctggatgagtttcttaacatcctggatctttttacctttgtattcaccaatggacatcaccccttcatagaagccctttaaataaaccatctccttagcttctaacaacttatccttatcattctggctttgaattttcaacttctcacacacaaacaccgcggccatatcgccaaatcctggaatttcgagcacaggaacaggctcaaagggtagtaccatatcatccgtgattccgtacttttccctgaagggttgcttcttcttcaggtctacaatagctgcgtaatcgtccggagaatcggaaggtacactggtgacgacaccagttcctttgtcctcttttatggtcagcatagggagggcgtatattttggggtagactgataacgggctggttaaggcacaaccaagaagatcctgccctgtcaactccacaacgatgtcaaactttccctgttctttggtaaattcttggaaagccatatttcttgcagccctttgtgtacaaacaaatacctcattatttttcgtttcgaagccaatatatttcatatccggtcttaaccaacagtttgtctgtccatacatggtttcgggcctcaatgttgctgctaccaaaaatactggtttgtttttaagagggcttaattttgcaggatatggagccaaaagtttcatcttgataagagtatattcctgtggtcccacaccttcccctgaagcacggtcatgatccatacaaggctgtccatctcttacggaaaagatagtatttcttttaccaaacttaatcttattacgctcttttaacctgatgaattgccaccgtacaaaagaatcatagaaaggattcgcatctgttgtgatgaatgttcttctccagtcagtatgtattccaaacctattaagatcttccacagctttaggagggaaaaattcacaccaatacagcgcatcagcaaattttggaatatccttatcatcgagaccaatactttgcattatttgccattggaattttgctggaccagctttagccacagctttg

SEQ ID NO: 6450 - DNA, 3050 bp, Diabrotica virgifera
  SmartBlast Evalue=0; Info=Hypoxia up-regulated protein 1 n=1 Tax=Harpegnathos saltator RepID=E2C858_9HYME
attttacttaaattgtcgagaacatacactataccacatcaatgtttagactcaatcccaagatgtcaattgatttttaacctagtaaattgttcatatcctaaaattttcactaactacagctctgaatgactgtcttcttctccttctattgtctcggagggtttgtcttttttggtctttgactgttctttcttgggactttctttagactcctctgcgacgggttcctctgtcggtggttcttctactacgacgttttcgcttccggagtctgttgtgttggtatcttcttttacaggtttgtccacctttttgggtttccacatcttcgctttgtttaacagatatttaacttctctatctagcgctgccattttatccacgatagacttgatcgtcaacttaactgggtcactctttttagtagcatcttgttcttttaccattttgtctctccattcttcagtttctttaataatcttttccaaggtttgcacttcaacgtctgtgaaaatgtctctttctgggttgtctttcgtagcatttttagcattgaccaagaagttagacgattggttcaaacgagtatttaaagcattaagcgcttctggtctctctttgtgttcgtacactcgagccaatacgtctttggtaattgccattaagctgtcgattttcttttcgtatgtttctgcatctgcgtctgaaccttcatcatataaccactctgagatctctgagcaagccgttttgattttttcttgttcttcaacagtagttgcctcggtatattcgtcttcatataatttattttgcatatctataacaaaactttctaagttattcatggcggtggcttttctgttgatttccatctcgattttatctagagcgtcaattttttcctgtgatctacccagttgttttttatttaagcttggaaccccaaacgactgttcaacggtcgttattgattcctttactgtctgtacttttggttttgtgtctttgactttctctgtagcgtttttagcagtttcgttcacagctttcttagagtccttggatgctttttcttttggttcttctttttcttcgactggtttttcttcggcctcttcagcttgtttatcttcagaaggtggggcgtccgttggtttctcttctgctggtttctcgtctccgccaaataatttgctaaacgtactacctaatttagatagtgttccttcttcttcatcaggaacgacagtcttctcaacaaccaattcaacattcacaaagttcaaaataccagaatcgtccattgcgaagtgagctttgatacctttggattccacgttttctcctgagtgtttcttcaaagcatcagcaactcctttgagttcaaattgggatatattggtggttcctaaatattgtatttctttaggatttaagaagtctaaatcggcatagttcacattgaaattgaagtcgctggtgtgtttgttgaaagttatgatcttcttttggggataggaattcatgaggccaaaaagtgtgcgctttacttgtttaactcctgtttctgcaagtctttcaaatgtaacctgaattggataaacaacagcatctttggtaataaatttagcaactttgaaaccagtactaagatcagcggctttatacacggcacccatggcagcggcttcatctgtatttaagtttttggctaactcttgtccaacggcttttctaagatgttcttgtactttgggtactctggtacctgctcctaccagaaccacttggttgacgacgtccattgttaagtgagccgttttcagtgcttgttctatcggtttgttaactctttcaaacaaatccccaaaaagtgcttccatttcgtcccttgtaactggcaatttgaaatctttttcatctaataacccttcaatctgtgcagcatgttctgcattagctgataaaacatttttcactctaccagcttccttgaacagtttagccatagctctatcatttttaaaaacatcattattagtctttttcatctcattgaatttcttagccaagtagtttcttaatctaacttgcatttcaagtcctccaagtgttctatcaaaacctactcctaaaattgtagcttgtggatgtacttctacataaggcttgtctttggtttttacactctggtaactaacaagtgtggcagttgtggaagatgctcccatatcgtagaacataatgtattgagctgtatcattaaatgtcttagatctgaatattccataattaagtgcaactgctgtatagtcgttaatcaactgaagtaccttaagtccagccaagttcggctgcttgtaagagagcctttctttcaatttgattaaagtaacctggtacagtcaaaacgcattccttgattggttgttgggcattcgtttccgcaaattctttagcctttcctaaaaactgagcaaccagttcttctggactgtaagcagtttcttcatctattttaaataaaacagtcttcctctcaggatcctcaactatgttataataagggaaacgttcctgatacagtttcactaatggatggtctatactcttacctaataaatctaaaaggtaactgaaggtttgtttgggaaaacggacacccatggtttgggcatcttctccaaaaagccttgtattgtccctaaagctaataactgctggagttttcctttttgattctttgtttaaggcaatttccatagggactcctggtgagacaattcctactttcatccattctgagcctaaatctactgacataacagctaagctgtttacaaatgttactcctgtgtaacatactaacaggagtgttactataactgacaactgcattctctaccgcaattcagtctttcaataaataaattagatacttcggacttgtttcacaaatcttataattttttatacaaaaattggatacaccacgtcatatatccatgtgcagtgcggattttgtcactgaatacagaaaacag

SEQ ID NO: 6451 - DNA, 3051 bp, Diabrotica virgifera
  SmartBlast Evalue=4E-58; Info=Putative oxidoreductase GLYR1 homolog n=2 Tax=Anopheles gambiae RepID=GLYR1_ANOGA
aaaaatacttccttttattttttaaataaacagcagaaacatcgtagtcaccaaaattttcccgaatacattctttgtatatttcgttggcagtattcgccaatggtagggcatgatcaacggaatcagccatgtccaagatcatcttcaaatcattctgcatgtgcttcagtggttgttgtacggaattaaaactattttggtcgatgaaatcggttttgctttttaaatatgggcttgcgatatctgacatgttgaatatttgtatcagtttgtccttttctattccacatcgttccaccacgttaaatgcctcgctaagagccgccatactcacacctttgatcatctgcatggctagattgatcctaatagcgttcccaatagtgcttccaaaatataaaggggtgcaatctatggctttaaaataaggatgacaatggtggaataaggcttcatctcccgccgtcaataaaactcgtgattctttggaagactcttcgctaccaccttgaagagcaagttccaaatattttcctcctttctttgtaatggaatcgtttatttcctttgattcatttgtgtcaatactcgtcatcattaaaatacctttactttttaacaaattttctgtatctatagaagcttcgaactcattttctaccatttgttttgtagcttgtctatctgatatacacataaatacgacatcagatttaacgagtacgtttctagcagtcagtaagacggaaagatgctctcctttccctaattctttctctaactgtttacattttgctaatgtcctattccacatatttactgtataaccagcttcaaccaaaacttttactatttcggcgcctatcatccctgtaccaacaactccaatctttaatttatcagctgtcttcttcgaaaatgcttctcctgttaaaggtggtactaaaatgttaatcttcttcggggaacgctccaccttcttaggagaacttttacttctcctggccgtgtctccacttcttttcttcggagaacgttcgaacgctattttatattcactgtcctctttctgctttcttaaatgctcattagcttgtcctaacgcctgcgcaaagaactgggtttttgaactttttgaatatttctcgatgtttttctcgtatgggtgtatgtggcttttttctacccaagcgtgcgtaaaatcacctagaaacaccactggataatattgcttgtttgattttgatgatggcatggcggcatcgacttctacttcactgattataactgcaggccagtgcggatggcctaccattttagcccatacaatttgctgttcagtgtattccatattattatctgcattatcgtcctcagcattttctttcttgttcggagaactcgttacatcaccatcactagatttctcttctttaatgcgacgttttttcggtctgttaccgtcaccttggtcgtacctatcagtagcttgcttaattttgattcggtatttactatcctcctttctcttttcctcatattcatcagcttcgtctaaagcctgtaaaaataattgattctttgagcactcgtagtatttatccttattttcagtatacggacatataaacttgctttcaacccaagcgttcgcgtattctcccaaaaattgaactgggtaaaattgtttgtgaattttcggaggacgggcagtattaacttcagattcttcaattataactgccggccagtacgggtgtcccatcattttcgcccaaacaagctcttgtactgcaaattgtttatcaatgtcagcaataccaaaaaaatcaaatccattttcgtttatctctgtgtccatatcatttttatttgattcttcaaccttgtttgatacaccattaagatttttctttgatttttttgcagatgattctccactcttttcagctactaccgaagtctgaccattgagacttttttttgattttttcgaggatgaatctccattctttttgtctactacaggagactcaccattatcttgtttccttgctttttttgtaactgcaggtgactcttctttcttccgtttttttgagagctttattggaacctgatattcaggatcccctttttgttttcgcacatattcgtcggctgcgcttatcgcttttgaaaataattgattttttgaacctttgcagtatttttgtttgttttcttcatatggacaaatataggtgtccactatccacccattggtattttcacctaaaaattgtactgggtaatgtactttattggatttttttgaaggtcttttagcattgatatcttcctcctttattataacggcaggccagtgaggatgacccatcatcttagcccatacaatctgctgtacgtgaaaatctttattgatatctgaagtcacattatttttagaatcctcttcacacatagaaatattctcttcagttttacttgcactgctaaatatatcagtgatatcttttcccacatagtcagtttctttttcagttttttctttctttttcatccacaactaaagcttcaggttcaccttcatctttcacttttgtttcttttgatttgatagcaatgatatattgagtgtcctctttctgcttctgtaaatgttcatcagcttcttctactgcttttaaaaatgctggatcttctgaacccttatgatattgttccctgtttgcttcatacagtaaaagtaaatcttggtctatccacatattttcagattgtgctaatagatgtataggtacgtattccttgttggtttcagaggcgggtctttctgcaccaacttcattttcatcaattattacacctggccaccgtggcctatctgctaattcagcccacaccaactgttgggtatggaactccatatttaataaatttctgaacttaggaataagtccagtatttaacaacaagggttttgttgaatcacaagacaacaaaccattccatttaaataaacagaaacaggacaaaccaaccaac

SEQ ID NO: 6452 - DNA, 3038 bp, Diabrotica virgifera
  SmartBlast Evalue=0; Info=alpha glucosidase II alpha subunit- like n=1 Tax=Nasonia vitripennis RepID=UPI0001A46D45
gaatgtttaataatttatttctcatcacaatttataataatcacttaaaacatactacaaaatcatacttcctggaaccaagactgtaaaaaaagggaaactaaatttaatacaatttaatagtaaatttctctctaatgctaactcctggttttctaactaccagaactctatcctcatgactgtaagaagtatcgagttctacagtgccgagacttttgctggttaactttgcccccttaatgcccttgggagggcctaatatgacaagtctttctacccattctttggttggataatcagtcttatcaactaaaacactgttgaaagtgttatcttcgaaactaaagtgcagatacaaatatttctggtttttgtactcaaaactttcgttgtcatcgacataaaggtaaccactagcctttttgttagaatctagagcaatatatagggtaaaaggatcgtttttcatcaaaggagacgctctcctgggcctatccttccttggtataatactaccacctctgtaaaacgctaaactcttgtctaaagatactggaatgttatagtttccggttccttggtacaatctgaagtcttcaatatcataccaatattcgttagcgccacctggtaagtaaacgccgacactcgacgctccaggttctgcgatcattgcagcaaggactgaatctcctacaagaatttcgttgtcgatatcaaccacgttttcgtcatttggatattggtagaacaggggtctaatcacaggctctcccgatatctcgtgttgccaaaacagggtgtagaagagcggtatgtgagcgtatctgagccttaaagcggttctaattctgttcttgacatcatctgggaaaagatatggttctctccttctagtatcgatatgtgcgtgtgctctgaagaacggtaaccatacagcggcttgataccatctttgtaacaactccgtatcaggattgttgaagaaacctccgacatcggcaccacagaaactcatgccacctagagcttcactaagacacattgggtagctgacagctaagtgagaccattcagcggcgttgtctccagtccatactactgtgtaacgttgggatccgggaaagtgtcctctagtgaggatgaatggacgtttatttggtgtacgttgaagaagtccttggaatgtagcatatgtatgtgctaaagcatattcattgtgaacatctctgtgctcccacccaccatgatggatagtatccttgggcatagtaatttcaggtccgttgaagacagacggctcattcatatcgttccagatgtaaacgtcgtggctggttcctttaaagttttccaatctgtacaagttcttgtagtactcagcagcttctggtttatagaaatcgatatagctactagatcctggccaacaccaaccttcatatacgttgttgtcttttgtttttacgtagtagtcgtttgctagacaatcttcgtgaacaaagtatcctgattctcttttgtagtgtggatcaataatgactatgagtttcctaccagtagctgtcagattgtttaccataatttctgggtgtggaaatttaattggatcccatgtgaaatacttctttccattagtatactcgatatccaaccacatgaagtcaaccggcatatcgtttgcgtcaaaagtttgaaccaccgtggtaacatcatcttcatcgttataattccatcggcattggtggtatgccaatgtgtagtactgaggtaatggatgtactccagtgagggaggcatattgtttgacagcagctttaggtgttggacccaacaaaatgaaaagatcagcaacaccggattcactcatgaaatggacatctacattattttcggatttactgcctgatactaagtttactattgaagacataacatttccatctttactattgttgatatcaacccaagtttcggcagcattaagccaaaaggcaccaatggttcgtttaggagaatgagcatagaccactgggattgctccataaatggccattgttgaatctaattcatattcaaacacatccaaattgtatagacgatatggatccacacctccaggtccagttgttcttaaaggaagtctgtccgcatgctctggcaaaccataaactcttaaggcacctggaaaactgatatccaatccaacagctgaaggaccttttggtttgctgtcatgatgacttttgaagttttcttcccaagttcccggatcttcagctacttcttgttgttgttctccttcgttattctgttctggtttctttctgaagtgttcaaacttaaacagacctcttccattaacaacgctaatgagttcatctttgtcgaagacttcaattttgaatggtcttgcatgtactatgaccttgttgttgttatattctatggaaacatattctttgttcctttcaagtagtttcaatttggctacttgaggctcaccacgtaaggcaaattgaggcctatacctcgcatacaaaggagaagcttcatccacttgcaacctaaagatgtttccactaatggcagttaatgaaaacttaaaaaggattccagcttcagtgtttaaaagttttgactccacagaattgtcggtgatttctaacgattctaaatctaattcatacttgctttcgccaggtttaacgcttcttaatcgtctgcaaaaactactttgttcacacgttttaaaattattcttatctactgctgatgcataaagtactataaagagtattaaagaaatatagagtaagttctgcgccatgttggcaaccggtatttaaaaaaaatgatgtttcaacttcgtgtgtaatatcttaacatacgtataacgttatttgcaccccatacagttctccgttctcctgtgtttttcactttttgccactcggaccaaatatatgtctgattaatttagcattttagacttgtgaaaccaactaatctaacttagaacatggagcgttgat

SEQ ID NO: 6453 - DNA, 3037 bp, Diabrotica virgifera
  SmartBlast Evalue=0; Info="Electron transfer flavoprotein- ubiquinone oxidoreductase, mitochondrial n=2 Tax=Formicidae RepID=E2A3X9_9HYME"
gtgttggagttggtattggaattgggagcaaagtgctcatctgtaattcaatttttttttgtggataaatccaaggtacaaattaaatttctggaagacaaaattaatgttaaaaagtttatatagatgtaaaaagatacaaaagactgaaataatggccttaaaattaaagacttccaacaatctggcaaaacaagttcatattttgataaggaattattctaaaattacaactcattatacaatacatccaagggaaaaagatccaagatggaaagaagtaaacatggaacgttttaccgacgaaacagacatcttgattgtaggaggtggtcctgctggcatgagtgccgctattcgggccaaacaactcgctgaaaaagatggtaaggaacttagggtatgtttagttgaaaaagcctctcaagtaggtgggcatatactgtctggagcagttatacagcctacagctttagatgaattgataccagattggaaagaaaagggagcaccacttaacactcccgttactgaagataaatttggttttttgacagctacgggtagatttaacattcctgtttttaaaggtcttccaatggacaaccatggtaactacatagtcagattaggtcatgttgtcagttggttgggagaacaagcggaagcgttaggtgttgaaacgtatccagggtatgcagcttctgagattctataccatcccgacggtagtgtaaaaggaatcgccactaacgatgttggtatcgccaaagatggaagtcccaaagatacctttgaaagagggatggagttacatgctaaatgtactatttttgcggagggatgccatgggcatctgtcgaaacaaattattaagaattttaatcttaggaaaaatgctgacgtacaaacatatgggattggattaaaggaagtgtgggaaatagatcccgctcaacacaatccaggacgagtagaacacaccttcggttggccgctagatattcacacctatggaggttctttcctctatcacttaaacgaaccaactcctctcgttgccgtagggtttgtaataggtcttgactactcgaatccgtatttgagtccttttagggaattccaaaggttcaaacatcatccttcagttaaacattactttgaaggaggtaacaggatcgcttatggtgctcgtgctttggtagaaggaggattccagagtgtacccaagcttagttttcctggtggctgcttggttggggactctgcaggttttatcaatgttcccaaggtaaaaggcactcacaatgccatgaaaagtggcatgttggcagcagaaagtgtatacgaagctataaacggagaaaaacaagaaactgaaggttacgaaccaaggacatacgaagaaaatttgaagaacagttggatatggaaagaattgaaagcagttagaaatattagacccagtttccataatccgttaggcttgtacggtggtttagtacatagtggaatttccattgcattaggaggcagggaaccctggactctgaaacatggagatcctgacaacaaaagactgaaaccagcaaaagaatgtaaacctatcgaatatccaaaacctgacggcaaaatcagttttgatctcctcacctccgttgctttaacgggcaccaatcacgagggtgaccaacctgctcatcttacattgttaaatgacgatgtcccagtaatgtaaacttgaacacttatgatggaccggaaggaagattttgtcctgcgggtgtttacgagtacgtaccactggagtccggcgatggaatgagactccaaatcaatgctcaaaattgcatccattgcaagacttgtgatatcaaggatccgactcaaaatattaactgggttgtaccagaaggtggtggcggaccagcttacaatggaatgtagttaattatcctcatacattacgcagtccatgaaaaattgttatgtcataatatatgttccaagataactagttatgggcatctagaagtgctactcaatattgcgattggatgttacaacaaaaattggtattttaacttttttctctgttttcccgccaaaataatatccccaattttatttattttacaatagattcaggtaacttctaatcacattttgggttagattattttaatttgttagatactcgttattagactttttaagtgcaacaaagtgtatattggtgtaattgatacttaatttattgcaaatctgcaacccttagtaaacatatctgtatacagagttgcgataaagtatggaaccaagcaaatatctttgaaatgaaaagaacaatatttatgaaactttgcatgcaagtacagtgacgcaaaaggcaactgatgccatattttttgttactactccacttctggtttcaccggaaatacccttaacttatttactttaaatgggacaccctgtatatttttgcagattttaatagaactggttatttttaattcatacataccaagtttggaagaaaaaactattaaaacaagaaataaatctctttacagtttaaaaataggttattttattaaagttatcctgtagttaagttgtaatcgtcgaattggtgtgatgtatcatatttaacgtgagtggttcatcacagggctgaatatgtaggtacatcatcagataatttcaagactttattatttaatcatttgactatctcaagatactttcggaagaattgcgacgcctaaaaatgttgctggttagagaactcttttcatcagtcatcagtatccggggtttgaatcggatcataaattcgattctcacatcactctttaagttcataggcacaaattccctataataagactgtatgataatcttgaggattttgctttaatattgaaatggcttacgatgatgatttaaaagtgacttgcttccattaaaagatctaacctaaaatgtactggaacatagaactaatagaataatttctaaataagtagcggac

SEQ ID NO: 6454 - DNA, 3032 bp, Diabrotica virgifera
aatccgatgaggtaacgattgcttattatgcagtcttagtgattggttgcaatactgcactctgcccagtgtgcttttcttttcttttcagctacttcttccttccttttgattaccaggtactttctgggttttgaggatacggaaatcaaatagtatacagataataaggaaattcaatattttaaacgctatatttgtatataaatttttagatttgcctatttacctactctagtcaaaatgaagtgttacgtcattctcgtaagttttttgagtgtgttcgtgttcgtgagttcggcaccattcttccaagcatcatcaggaggtaattctggtacccaactacagcttggatctggaggtggaagtggaagtagtggaggcagcggaggaggtttaggcggtttaacaaatattttatcccaaattgatttacctggattattaagaggagttaatagttttgtaaaattagttggagtattttgtccgccatgttcacagatcttagacaatgtcattcaaaacgtaaccagtacagcgtttagagtattcggtagagccatccttcaaggaggaggtttaggaggaggcagaggaggagatgctgcaaattcagtaaatgtagttcttcctaccttcccaccagatgaagatgattatgaagacgaagacgaaactgaaaaacctgtagaagcaataagcagtagatctggagtaactaccgaatcagcacctcttgtagaaagcaccacggctaaaaaggaagcggaaaatgctgtgtttacatccgccgccgctgacgagagcaacttgatcgcccgaagatcggcgaggataaccagagaagcagctgcggatcaagcgccggcagaatcagtaccacaacctgcggaagatctttctgatctcgatgatgatgatcaagatcggaataaaaggttcctgccctttggaggaggttctagctccggagggtctggaaacttcttattcgatattattagggtaagcaagatagcttcgtgaaaatctgaaaatatttaaaaaaaactgaaaaagaagaaaccaattatagtttcagaaatatgttacagtattctatatattccttaaaaggcagttataattgagctcatgagagccacagtgggctaactgattttaacattactttacataattaaggaaaatgatcagaagcttacaatgtccgattgttttagttgttttatgttgaccaagaatcattgttggtcaacaaacaattactaaaacaaccggacattgagagcttctgattattttctttgattattttcaagtaatgttcttatcagttgggccactctggctctcatttcctcaattcatacctgaatattaactaacatttttatgttattataaattcaatctttcaatttatggtccgttcataaattgttgagagcactaaatttgcctcaaagtcataaaacggtcgtaaaagtagtaaaatcatagtttattcattaaaataatggatatttacatctatcttccttttcaaaacgtttatcaatatcctgttttgattaaaatacggtagtaattagcgtttcgaatatttgttttgcgaattttgtgcagtgcgtgagtagatttttttccatattcctacgaacatatacgcacatcatcatcaacatcatcaatttttacaccggtactgttgcgtacagtcagtaagtttgtatattcaccacgagagaagactattgttctgaacgttcaccatgctctagtttctcagaatcccacaaacactgttcagaacataatcgagagttgtgccaacatagagcgtaggggagtcaacaatgtaattacaggttcctatcagaaagaaaaaaaaataaggtacctatagctaacccaaatacaaacgaacaattaaggaggcggaaaaagccttataaaattgatgaatttgccaaaaagggtattcgaaggaaaattcactgattttttttttcaaaaaagaaataagcaacttaaacaagatgttatagacgacccgaatttgcctcatatccgacgaaccaaatagggaacttgcacatttttttattatataataatgttcagttttgtataaaaatgagatgtccaaaatttcacgtttcaaaaactaataataacttagaattacaaatttaaaatcttctgtatcttaaaataattcaaacgacccgtgacgtcacagagtttaactatatggttccgtttatggttatatttaggtatattcttcttcttcttctttattttattggcctccacctacttgggtatttggccagctcgtcgtctcgtaataaagaaaaaatatttatgacatttatcgtatatcattgtaataatatataccagtttgttgaaattggagtttgataaagttttcgagggaaaggaaagaaggtttactatgaaaaataaaaccattttgtaaaagtacaagttttttatgaatagatcaaacgatcaaaaacacttgtaaagtcacataactgtatcttctactgacgtttataatgtctaaaatttaaaattatatacaattttgtttacaaatgtaaacatataaccccgtgacgtcacgacacgttttgggctggctggtataagttgaatttttaatcgtctttaggggccaaacgaaagacaaacaaaacttttttatctttgatacatgttttaaattatgttctgttgtaatttacaatattttttcaaatttaaaattttatgcaagttcccaattgtggcaagttttaaaagaattaaatttctggtgggagaaatcagactaaaaatcatttctgatgtgaaatataaaaactcctggaagagataatatgttggagaagaaattatttaagattcatacgaaaattccgggatgaaagaaggccaatctactatcaggacgaaacgtgggtaaactcaggtcatagcgagatgcagaagacgtaatagaagaagaa

SEQ ID NO: 6455 - DNA, 3029 bp, Diabrotica virgifera
  SmartBlast Evalue=7E-31; Info=Reverse transcriptase n=2 Tax= Ostrinia nubilalis RepID=A4KWG0_OSTNU
ttgttcctatgcatatatatattcgctgactacaagatttgtcattatctagattttagatatatttattttcaatccccattctagcgaggaaaggtagagctgatttaaaagttctttggcctcatctttcgtatcagctattagtacaatatcatctgaaaacctcagatggctaagcttttctccgtttatgtttatgcccttgtcggtcagttttgcccttttacatatatattccaaaagcgtagtgaacaatttcggcgaaatggtgttaccctgacgtactccacgatgtatcgggaatttctgggtttgacgatcatccactcgtaacactggctgttgcgttttggtatatattatgtttaattatatttatacaccgatattcaagtcggcattctgttaaggcttccaacattttttgttgatttacgatgtcaaaggcctattcatagtccacaaatattacagctagtgttttgttatattcagtgcatttttctttaagattttttattatcagtagatgatcgtttgtaccacagccttttctaaaactctcttttctaaacaagcattacggcacggtaaatttgaattactcctcctagtttaaaaacgaggatagtatcctttaattggctatttttttctgctggaaggaaaattgtagttcaaataacatattttagtaattcttggatacaaatcttttaaactggctattaataacttgaattagatcgttattcgatggcaagtagttcaaacagctcgaaatgtacttggtcggttagtttgattgatttcaggctaataaaatatttttataggggtactttggtttttttccttgtattatttttgttcctatttatatgaataccaacagatagacaactgtgtacagagtatatagagacaaacgattcaatttgtaattgtagtactaactaataaattattcttttgattcgggatgactgtatattacacttttcaacaatcattttaaaaataagaccatacaattattatgatcattcttatctcggtagtggaataaaatgatagagtgatagtggtgtatgttaatgatttttaaccatagtgaactacaattttggatcaaatataaatgggaatcaagtaatttctttcttctaaacgtttttattgaaacattttgcttaataagatagcactctttcttttgaagagttggccgtcggctgagggatgccatcggtgtactttccaatttttaaagcaaagattctatactggcgttttaattttcctcattaagtaaaatacagcggcgagcgtcacgaaacacaaaatagtggttcgcagtcacagtaaacagttggaagagtcaatttacgtgacgaggggagtccgttatacgagatgtaaactttaaaatgtataaaaaaataaataaaattactttattcaattttaaatgaagcttcgagctacgttacagtgccacctactgtaccactttgttacatagttacagcatttatacagatatatcttatacagctaagcgttgtcgtccagacgaatcacatatctccgtatagaaagtaaagattttactttgtagatgatgcccttcctgttaatatactgtgtacagattattccaaaatgtttctattgatagtaaagtaactattctctgtttcaaacgctagaatcagtttggttgtatattgcaagcgggattgccattctgtgaattatcataaataaatgcccctttagtatttcacagcagttaacagtgataatcctctacaagtacctgcctaatactatctttccagccgctgacgttgagagcggcaacgttatcaacaaaattctcatttagtttgcagtggccctattctccgtacactgaatcgcatgtctgaaatatagtatagtcatgtacattgtgctacatctgccttcttattgcatacttcctgtttatgtttgacccatctttggagatgattgttgttaagtttttaggtttcttgttccataaacaattttatttattttttatgttgactaagttctctccacagatatatcgcccgttgaagctatagctttttcaaagataggcgcactaattacttttcactgactgaaaattagtaattttataagccaatcagaatcctcaaatatactgcagaaaaatatgtaaagagaattctacttgatttgcatgaacaatgcatttgaaacatctgtttaaaaaaatcttatatatcgtctataaaaatcgatatattatatcgtcgatgtatgatatatctgcgaagagaactgtaccatttacttttctttgtaaataatattactatagaagaaaacgcaataacgaccctagaaaacatatcttatggatattgtaattattgttcaaaaatttgtttatggaattcgacaaagtaataaaatatttttcttaattgtaatggatatactctgtaacacgtttatattattctaaataagcattgagagtttttttttgttttaattgggaaatataacgattataataatactcaacattttctatcaacaatttttgaagtaaatgttctgatttttaatcggattttttttaaatcagttttagtgtttgaaatcaatttttttgagatttagaatgaatctggatcttttttatgaataaattattgatacttggtttaaagacatactattgacttttttcattttctatttatgataatacgtattaaatgattttgcaaaatttttttaagaaaaattcacatttacttatagttggattgttaaaagtacaagggtaattaaaaggatattaaaacagacaatacaaacatacaaaaaaaaacagcagcataagcttcttcttgtagtgcctatccgtttcagatgttggcgaccatcatggcaatctgtactttgcacactactgctctgaaaagatgcgtagttgttgtgttaaaccatgt

SEQ ID NO: 6456 - DNA, 3022 bp, Diabrotica virgifera
  SmartBlast Evalue=1E-143; Info=Exosome complex exonuclease RRP44 n=1 Tax=Culex quinquefasciatus RepID=B0X905_CULQU
tttactcttcttcttttcttccatcctacgtctgtaggctgcagcacgctcattatcgcgccgcagttttttaggcttctctgaactctttgggtttctattctgagcccctctatgtttcgcaggtgatccgggtggctgaggcctcagtaaacgcccgtataaactgtaggaatcttttcttcgtatagtgatcttcactactgaaaaaacgtcaatgagaatggtagcggcttcgaaattgttgtactttaggaaatgaacttgcagctttttgtcctcgtaggtccatatagtgcttgggcaactatttgcatatattcttaaaacacttccagtctttaacaccaccacgtcgattttatcttcccttacttcgacgacgacacaatcttctttacagggtttaccattttctatgtagtgcgccagatacagatccatacttgcatcgcccgcctttttggcttggtatttttggaggttgcagttggtagcaatagcctccacgtactgtgcgtcccatttcggtggattggtgtaacctaaactggctgccaacagtcgatggaccataatatctgcatatcttctaataggagaggtgaagtgagtgtatataggaatactgagagcgtaatgtttgaattcttcagcgccagttttaaaactcgcacagaaatactgcgctcgtatcattgcttttgatgtaaagtgattgagggctaccgctctagctttacctataaaatcgtcagtcatatacttcttgactgacgtagctatggctccagaagaggatatgtccaaatgcattccgtacatggccaatttgtcttgaagagcagttaacatggtaactttgggcggttcatggcaccgcaagaacgctacttctggaaaatcatcatagatcttttgtgctaccgatatattcgccaaaagcataaattcttctatcaaacgatgcgattccttgttttcatatatggaataacttacgggttcgcctgatacaggatcaagtgaaaacgatagttttactttatcaattcgtaaggcaccattttgtatccgtttctcccctaattttacagctaaaccttgcaaaatattaacaatattcaccagatctttaggttcaaatccattgtaaatttggggaaagtccttggtactaaactccttatcagggttttctataactgattgagcatgctcataagccaacttagcacaagaattaactacgcttcttgtaaatcttgtatttacaatatccccgtcttgggtcatctcccaaaatacagaaaatgacaacttatcttcaccaggcagcagggaagaagctaaacaaagttcactgggaagcatatggtaagctttatcgaccagataaatcgtagttgcttttcgggcaactatttggtccagttctgtaccttcttctaggtaaaaggctgcatctgatatatgaacccctacttctaggttaccatttcgcaaactttctactgagacagcatcatctaaatcccttgcagactcaggatctattgtgaatatacattttttccttaaatcctccctatattcaaactctttttcaggaataactttaagatctggcaagctatttacgatctcatcactaaagggtgttatatctaaattattctctctcaaaattgacaaagactcaatttggagattaccagattctcccagtttctctaacagaatacctttggcgtagctgggaacttcccattccagtagctttcccatgaataacacagtttcgaacttctttggcttgtccttaaaacctgccggtaagtaaagttctgaaatcctcatgggaggaaaccttttatctctaggagcgaagagggcaaaagtgccttcttcattgtcgatccattttagaaaacctatacatgttcttgaatgaatcttttgtagtattgcaaccaccttggctggattttggttagaatctccttccttcttatctccttctttcttatctccttctttcttatctccttctttcttatctgcttcttttttagttatgacctgtaacaccacttggtcaccttctagtgctctattcctatcactgatagatgttatgttataatctgctatactagaatcctcattattaacatatgagtctctagcgtttttagggttgatcctaataaaacctttcactaaagtgccatttgctaaaccttcatcaatatctttttggtccatatattcactgaatgttccctgttccctttcttgttctcttttctttctttctcttctggattccttcttggcatatttgcggcaattaactttatttgtcttttgtcgatttgctgatttcttgaaaaatggtgtgataaacaaacacgaggatgacctactttcaatgaaagacctcaaatttataaatttatcttcaacgtttcgttgccttatcattttactgtttgtgttagtggtaacagcttgaatagagaatgttacttgtattgtgtcttcacggggtggtgtgttagtactagctgatggtaatctttgtctaggattgtttgtagatttattagcactggtacttggagaagatggtaaatctctaaaatttgatgatgaacgactacaatttgaagatactgagtgcctcgaaccatcatcttcgtcgtctttctgtttatgtctattcctatgtcttggttttcttctgacttttttagcagtctgtaactccctatctcgatgatgatttgaggcatgctgtacttgcacatttgctctacctggattgttggctggattgtttaccatatgcaccactgtactgcttttacttacaattgtagatattgataattgttgaagaaagtctgcacattgggaaacaggatttgacattatcacaaaaaacacaaattctttaagttaactaatacactaaaaatttattcacccaattcaataaaagttctacatgtacttc

SEQ ID NO: 6457 - DNA, 3004 bp, Diabrotica virgifera
cgaaattgggtggtaaaagcaaagaggtatcattcgagcagccagaagctacaattataaccgaaaaacctattccagctcaaccagaaataaccataaaagttgatgacgtctcaaaaacacaaagtttaattgaatcagaatcagaaacattttcccatgatttaatgaagagctttgatgaaaaattagagcatgttaaagagaaacatgatgatattgaaaagaaggcaaaagatgaaatgaaagaatttgaaacaagaactgaaaatattaagcgaggcgtatcagatattgcacacaaacaaactgtgacaataactagcacagaaaaacagttaagagaaaaatctgatacttttgaaaagaaaatcgacgaaaagttcagcgaaaccatgaaactgtctgaagaactatcaaagaaacctaaagaaattagtaaaaaggtaacaacagtttccgaaaaaataattgaaactcagcggaagcaaatagaagctgatgtgagtcttctcgaggacgatatagacaaacagactagagaagctaaggaaaaacttagcgacgatataatctatgtccaaaaggcaatcaaaatagaaaaaaagcaaacttggtgatatgccgaaagactttggcaaaaaagttgaaaagaaagttgaaggtgttgaagtaggaatagcttcaactgttcaaaacgtagaagatgctgcaaaaacgtctaaacctgtaccagaatctccaaaagaaattataaaacaaattgatgactcagttgttatcattaagaaaggtttagatcagttagaaaagacagaaactggtgttagggaagaaaccactaaaataaaagaagtaacagaaccagttttttctagcatagaagccactatagagcaagcaaaagacaccataaacgcaagtaaagattttcctgataaactaggaagtgacttagcaggtgcaaaggaagaaactggcaggaaatatgacataggatctttccatcaactatccgatattcaacaaaagactctgaactttttggactctgaaagtcaaagacaggatgattctagaatgagtcgagcagtttcggattatggtacgacgttaaaagcaggtgcagaggaaggctctaggaaaatttctgaagctaacatcgatttatcaaatttatcaagcgaaagtgaagaattaataaaaaatgaaaaaacgaggtcatatgtgacgtcgccaactttgaccagaagaacgttgtcggcgaaaataactaaaggaggaagaccgcaagtagtagaaatcacttacgattcttctttagacagtagttctagtagtagttcttatatagtaactgagccagatgacgtaagacaaaagaaaactcttttccacatagagtctgaagagggtgatttgagctctaagacagatagagaaagaagagatagtagtagttctaacgtattagagactttaacagaaagtagaatagaaagcttactgagcgatttaactaaagacttagatgattcgacaaaacctatacagatcgtgttgaaaaaagaagaacaacgactagaagagcacaagaaggaatcccaagccgaggtagatataatagaaaagaaattgcgtgacttagacagagctttagattcattagaacaagtagaaatagtagaacaaacagaggaacgaggggatgcacgtgtagagaaaaaacttcgaagggtagaacgcaaattcgaaagaatggcatcagaagtcctcgaaacagaatcaaaagaaggcaaaaaagtgcaattgaccagcccggagatcgaaggtaaacgagagagtgcctaccaaaccttggtatcgcagcttagcacagaagagatcagtgacttccaaaaagagtacagccacttatgggacgaacacacgttctcgaagagcagtgatcgagaatcaaaaactcctgacagccaagcggatgcgcaagaacttccacaaggtggcgatagtacttcaacctcaccttccactagagatactgcaacaacatcttcttctagacccgaaggagaagagggagcagaaaaagatgaatctgaatatgacaggcgggtggcagaccagcaccagttatccgaagagatgaaagaactactcaaagaactagagaaagaaagcaagcaataaacaagccaaatcaaatatgaaacttaataatattgacatatccctaaatcctcgaaataattccaaatgtgacaaataagtgttaaacttatcttaatattcgacaaaactaaaccttgcaatttgacttatgcttctaagcttttgcttatttgatttgcaaaacgacgcgacgtctaaaaaaatttggtccgttcagcactttcctttttaggaaaaaattgccatttttcagacaagattaatattactacaattcgtaactagcattaactcaaattcaatgttatatatttttaaagcaatgtatatttttaatttttatttatgtatttatttataagttatttttggaggaattcttcaaaattggaaaatgttatagtcaaatatttttgcttgctaggttttacaactcaaagctttaaatacgaacaattttgaaggattttacagagtttcgatcaagagcgactgttgttagaaaaagggcacgatttctcttttagttttcaggatgtaataaaaaaaaagttgctaaagggggcaacgtctccggaaacgtgccatctagcgccgctcttgaacacgacgtacttatagaaagataatgttaagttagtaacgctaacttacaataattttgagagtatttatgctgataattatttgtttttgttatagctgttatttttatatatatgtatatgctttattgtaagttaaggttacatgtttgtataaaatgaacgaaagcaagaatgacgattttttagatttaaataatgttatttagcttctatggataacgttt

SEQ ID NO: 6458 - DNA, 2994 bp, Diabrotica virgifera
taagaataaattgacaataatgctacattttttcgaaaacttgttgcctggcaataggtacgagagctcgcagggttcgagtgactattgccgactggaaacaagattgagaaacaaattgcaacattatttgcttatttattcttactatcgtgtgatattcgacatatctttgtaaataaacattaattaacatttatcccaataatgtgatgcacatttttcaacttgtcaaagtgaatagcagagtttagcaaatatcaaacgaagatatcaataaaatatttgttcaaattatttataattacagttttattcatgaaataatcttaccgaattacacttgagcgcttaaacttgccgacttgtattgtcctcgtgactatttgacattagatacagaattaaaagttcattatggttcattttcttgttacagttttgttatggttatggttcattatatggttacagttgtcaaaacgagaaaactcgtaattatacaagaaacaaaaaaacttaaaattatttcaggtataataatgtaagtagataattcccaacttattagattattaccagtataataatagtctgattggatagaattaaacaagtgatgaaaaatctttatacacgtttggaaataaaaaccattaaaaaataatcactaatgaactatgaaataatcaacattaatatcacaagagagtgagaataatgtccagttgcaccaacaaaataaacgtttgattttttgatttcgattgcccgtttattttaaaatataatagttgtcaaagctgtcaattagaaaacagaaacttttaacgattctcccgcaaaatattaaattttttgacaacaaatataataacggaacacttttctttcgaaaaaggttaaaatttaatatgttttgggacaatcgttggaatttctgtttttatttgacagttttttgacaattatattttaaaataaacgggcaatccaaatcaatcgtttatttgttggtgcaactggacataaattaaaaaaataatttgaaaatttttcaaaaacttgttgcctggcaatggcaatagagacgagagcccgctgggctcgagtgcctattcatatatttcagggctcacatatttcagatcatgaaagtttaagtaaaactttgttattatgatttttcagtaaaaagaccaaccgacaatctatcaaacagtcagcattcaagccgatcatttcccattgtagcatctttcaatgtgcaatatatcctggtgaaacctttcacactgctcatctgagacggtaccaacatttacaggaaaagaatcaaaagtagtgcgaatccaaaaaatgaattttgaaccaatatcatcatcattggcttgaaatgttgaagctaaactgtgaaattgtttctgtagacgccagtcacgtgtaccaatgtaagggaacaaaatagtgcgagtaatgttgctatttctaggattcgattaaaccgtcgtaggacaataatgaccaaactgcacattacaaaaatattgtacgaatagttttggatggaaaaaatacaaaaaagaatagtaaaaaaagttacaatctttattaaactaaataaatatgtattcttttttttttctatcaaattatgttatgaaagtcacgaatgaattgaaccccaaaggcatttttaattataaatgtacataattcattataacaagaaaagaaaaaaaattaaaccgaaaatacctgtagacgcattatcttgtttcatatatttatattaaaaagtttatatctctattttagaaatgtattttcttttttacatattttttaaagttttaaccatcttttttatatattatatttccactatatagacttattttttctatcgattttaaagacttaacttatctcgagtgtttctttaatatacactgcgaggcataagttaggtatgtagaaaattatgcttgattttttcgtgaacagatcaacggatttcgctaagtttttttattgttttagatttttctttggtatttgcacagttgagcaaaggtttactcaacgttttttttgaacctacacccggtggaggaaaagaaatgtttttcgtgtggatatatatcgaaatcgtattgtagtcttatattttctcaacattttactttttgaatggccctgataactttagaaacaaggaaaataggtgatgttacactttaatatgcgtttaaatgaagcaaatctaaattaacaataaaaactaacagttaacaaaaatttaaaagcagaaagacccatacgtaaacagttctgatcggtacctataagagttatttgttgacgaggtaagcggtattcacagcgcaacataagagagacgagattgtttaatggaggctctgtgatgttttggggtcgaattcccttgatagtaagtacggatttcgtgccttaggtggaggtactttaaatagcaagaggtacattacagttttttttctttgaatactctgttcctttcacactatataggaaataattttatcttagtggtatgatgagacatggcctccttacgtatcgcatgtcgtcagttaaaacatacattaaagagtaaaaccgtctagtttctttgttattaaagatataagagaaaataaaaaaataaaatgttcgcaaaatttgagactacaatataatttcgatgtaaacgcatctttgtacatttgcctctctacagggtggaaccagggttgcctgaaacttttgtttcagttaaaacacatgctaaataataaaaccgtctattttcttttttctaaagatgccagagacattcaaaaaacaaaatgtgcacaaaatataagactacaatacgattctgatgtatacttacatgtgtacctggtcctccctacagggtgtctcaaacataagaaaaacatttcttttcttccacctggtataaac

SEQ ID NO: 6459 - DNA, 3000 bp, Diabrotica virgifera
  SmartBlast Evalue=0; Info=Dynein heavy chain n=1 Tax=Tribolium castaneum RepID=D6WRL4_TRICA
attcagttctactgtatacaacaattccgttcttgtggagtttagataaagaggaagagacagttttccctctttgagtttctcgtcgccagtcgccattcggacccatcggaaaagagtgattggtagttctatcatgatgctggaggtgagtaaaagttgactgttgcgacattgagcaccttgtagtttaataccaatgacagcaaaacaatcgtgaggaatagaatctttgtcggtactatccgtgattgttacgtctagatggagttcttccaatggccagctgttcgcctgggcaacgcattgtcttgtggcggttatgtaggcttctggatttagtaatccacccaaccatacagggagactctgtaactctttagctcctgaagaagaaactacttgagacaccttttgcaattgcttaaccctctgactgaaatcggtaatccattgcatgacggtacatcctttcggtatggtgtatctgtgccaattcttgggaataatacctctcactagctcagccaacatcagtcggtgataattcgtttgctttttgtccccttgacaaatcaaaagtacatcattaagatcgtgtaatacatcaatgagaagtttggaagcagagttgacttccctctcgaaatatctataaaggggatctttaatattttcgacagttcttcgtaaggtctgaagagaagttggtaacaagttaacccaagtatgagcgctgttatgaagagtcttcatccaagacggtctaccgtcaatttcagcatgatctgtaggcgagctgtcatcaatagagtaagctaattcgtcgtcgtcttccagctgttgcattttcaatagtttggctattaaatcggtacctctagttgttaataggaccttttcagcattatttggtaatcccaaccaagctggagtttgtctatcagcaaaactctcgatccacttcaagaagtgatctcttctagtaccatctggcattgtaatgtgtctatttccaccaggtccgttgtcgatgttcgccactaaagcaaagtcgctctcaaagctcttgggagtaaaaagtttattcaggaaggaatgtaacagtcgttgatcgaaatcgttatcgattttaccaccatagatggattgcgagagcagagtgactagggcgtcccatgggactttctctggcggcaagttcgtccttcccatagccgttgtatcaatccaagtatccaaagtatcacaggcaactcttaaatctgattcactaaattcataatgttttgcccaacctagagggcaatatctcaacctctcctggacaatcgcgtggaaccacgccaataagaagtaaagtcttgctctttcgtttggtgctttcatcatcctactggctggaactgtgctgaatgttctcaagaggttagctctaatacccggtggaggttcgaatacaaatattcttcctgctctaagaagattaactggtagtttcggattaatttccatggtgaggaatagtctaaagttggcgtgaggttgaagtgaatgaagcttcttctccagctggactaaccattgaggagccaagtgtacgttcttcagcatgacccatcttccagtcttgcaggccatatttatagctctatcagcctggttgaatccttcggctgatccgatagcaatgctggatatttgcttgttaagttcggctgcaagatcatcgacacgaccagaagcgtcgaaaccgggaaccgagcataaaagtgctggaacgttagatctaatctctttttcgacgcatgcggcaaattcaagttctttttctgccaagtacatgaagtctgctcccagaacgactgatacgaagttatgagcggcagctattactctatcaggtctgaaggcttggataaccagcagttggtacattgctctacccactgcactgagttgtttttcctcaatccacaattgtggaactgcttgctcaggacttccttgttgcaaccaagctccaaattcaggcatttcctttatttggttcgctaatttcttaaatgttggtaattttgtcgataatctaacgacagcttcttgttgatcgctgttcaatccatcggtagcgaatgcaccggtgttactgaaaacaccttctttgcctctaaggaagaagttgaattcttgatccaaattcggttcggttagctgtcctttcaagtggattctacagagtagtattgcaaatgtaagtcgatcgttgtggagcatacctcttgccactctttcatatacaacagagaataaatttgatgtgatgaggttcaatctagcttggtaatcgctgattccatccagctgagagttattatgcaaaacagtggcaaaaacatccaagaacatcttgagtgaatattgatacaagaaatgaacttggttaagactgtccatggtgaagtaggtattactgcaagcctgtgataacggtagatattgttgagataccgtttcaatttcagaaataaccttatcggtttcttcgactttctgaccaatttctgctgcttcttgtttcagggtttctagagttgtgataacactgtcatcgtccaagattttaccctttgcatcgttcaaagcttgtaacagagacttttctagctgtcttaatcttaagtggaattctccttgtagttttaataaatctgaacgcttagcatcaatgtctggtctttcagctttaagcacttggttcaagcactggctctggagggaacttctagtaactgtgaaattaacaaacgtaactctagagcatatatcaggcgggaattctacagtaggatctctagttgataagaagataacaaacgatggtgacaaatcgatgtcttggtcacctaaagtgatcaagacacgacctccagttctcctcagttctctgttgagtactggattaagaatagcatcataattttcaacgtcttggacaag

SEQ ID NO: 6460 - DNA, 2998 bp, Diabrotica virgifera
  SmartBlast Evalue=0; Info=DNA topoisomerase 1 n=1 Tax= Camponotus floridanus RepID=E2AAT4_9HYME
ctccaatctcccgatcggtctcgaaaccactaagttataactttgagtgcaatctgtatcggaatggaagtcgaaaactctgttactgaagaaaattcttgtccagcaaacaaagagcaaaacggtgattcaagccatgtgaatggcctaaacggatattccgataaacacaagagccacaaatcggagcacaaagataaacatagggacaaggatagggacagggatagagaaaaagatcgagataaggaaaaaagtagaagtaaagatcataagagctctagcagagataaagataaagatagacatcacagcagctcaaaagataaagatcgtcacagcagttcacataaatcctcgagtaaagataaggaccgcgataaggaaagggaaaaagatcgagagagaagtgacagggataaggagaaggacagacaccgggacaaagataagagcaaagatcggcacaaagatgacaaaaaatcgtccaaagataaagaacataaaagttcccatgataaggacaaagaccataagagtagctccagagacaaagatagagaaaaggacaaggagagaagagacaaagataaagaacgtgataaggagagacgagacaaggataaggaccgggataagcataaaaacagagaaaaggataagcacagggataaagaaagagacaaagacaaacatcattccagttctagagacaaagataggaaggacaaagatagaaaatctgaaaaggaaaaggaaaaagatttggaagaagatactaaggtaaaagtagagtctgaggaaatcttgaaaccgaaagaatctcctgtgaaagaggatgcaaacttaagcacagacgacgacgaggataaattagtaattaaagacgaccctgggagtcaagacgaggcagatgaaggcgcccaggcggatcactcacaagcaagtagtgctgattttagtttaaagatagatgaatcaaacttttccggttattctgctggagaagaagaaaatagtcaatcacagaatgaaagtcaattggaggtagacgatgtgaaaccagagattaaaaaagaagaggaaagtgacgaagatgttccactgtcggctcgcgtgagttcaactaagagaaaaataaaagacgaggaagaagaggaagatgatgatttacctttgtctgctagaaaaaaaccgaagaaggaaatcaaggaagaaaaatccaaaaagaagaaaaagagaggttatgatgacgaagattatgaagaggacgaagaggaggattataaaccggcgaaaaagaaggctaccaagaaaaaagagaaaaagattaagaaggaagctgtaaagaaagagccagtaaagagagagaaggcagaagctgatagtccaaagaaaaagaagaaggaagaagaaacgcaggaagtatggaaatggtgggaggaggagaagaaagatgatggtgtcaaatggacattcttggaacacaaggggcctgtatttgccccagattatgagagactaccaaaggatgtcaaattctattatgatggaaaagaagtggcattgtcggaagaagctgaagaagttgcaggattctatgcaaaaatgttggatcacgattacaccaccaaagaagtatttaacaaaaacttttttaaagactggagaaaggtaatgacagatgatgaacgtgcccttataactgacctgaaaaagtgcaatttttaaaaagatgcatgcctatttcatggatgtagcagagaaaaataggaacagatccaaggaagagaaaaaggctttgaaggagaagaatgaggctatagtcaaagagtatggtacttgtaatattgatgggcacaaggaaaagattggtaactttaggctggaacctcctggtctttttagaggtcgaggtgagcatcccaagatgggcaaactgaagagacgactcaatgctgaagatatcataattaactgtagtaaggattccaatatacctcaacctcctcctggacataagtggaaggaagtccgtcatgtaaatactgtcacatggttggtttcttggacagaaaatgtacaaaatcaggtcaaatacattatgctgaatcctagttccaagttaaagggagaaaaggattggcaaaagtatgagactgcacggagattgcacaaatctataaataagattcgaaatgagtaccaacaggattggaaatcaaaggaaatgaaagtgaggcagagagctgtggctttgtacttcattgataagctagctctcagagctggtaacgaaaaggatgaagatcaagctgatacagtgggttgctgttctttgagagtagagcatatagagcttcatgagcaaaaagatgataaggaatttgttgtagtctttgattttcttggtaaagattccattaggtattataatgaggtaccagtagaaaaacgagtgttcaaaaacttgggtcggtttatggaaaacaaaaaacctggcgatgatctctttgacagacttaatacacaaattatgaacaaacatctgaatgaacttatggaaggtcttactgctaaggtattccgtacatacaatgcttcgtttacactacagcaacaattagatctattaacaaacgaagatgatacggaagctgaaaaaattttggcctacaatcgagccaatagggcagttgccattttgtgtaaccatcagcggtccgtgccgaaaggccacgaaaaatctatggaaaaactaaaagagaagatggatcaaaaacgggaggccatacaagatgcagagagacaggtaaaagacgccgtcagagaagcgaagcacggcagcgtcaaagagaaagtagtcgccgacaaaaagaagaagctccttcaacgtcttaaggaccactcgcgaaactcgagatccaagaaactgacagagacgaaaacaaaaccattgcgttgggtacttctaagctgaactatctcgatcctagaa

SEQ ID NO: 6461 - DNA, 2988 bp, Diabrotica virgifera
  SmartBlast Evalue=1E-44; Info=Glutamine and serine-rich protein 1 n=1 Tax=Camponotus floridanus RepID=E2A1N2_9HYME
tttgtctttcacctcgctattcgtaggagcaggtttctgtttatgcttttttccaaagaaatcgtcgtccgaactgaagccgtcatctgagctgtcgaaactgttgcgttttcgttccttaggtaaagggaagtatctcggatcatcctggggatcgccttgagacgacagtcttggtgtaggcaagggaggtacagtgacaggcacgggtggaggcgggtttgaagaagcggaaggtacaccattactgtcgggagatttgtcttccatgcccttcataggagctctaggccaggtttgcttcctgtgggctcctcgcatcgcaggcggtggagatgtgtctctttcgccctgcagaaacttaaggtagctactcatgaagcccgaaccggcacctggtggtttttctggcggtttatttgagttcatcgccagtggaggtttttgtggaggtatgtgctggtgctgattatttggaactcttgttgaatcctgtgaaagaaaattcagttcctcttcaatatttggcaccaccactttgggatgttcctctggttgaggttggtattggttggaagcctgtggtgattgttcattataatttgtcaaaggagttaactctacagtggatgaatattcggtgggatggggaggtaaatgaaaaggggcgaagtaaggtaagggaggaggtggatgatggccgtgaggatgaggtaccatcagaccttgatgttgctgatgtagtgattgggtggtaagaaatttggaagtcggcggcgggagattccatctgtcaaagtcaaaataggcaccattttgttgaggctgattcgtcgctgaactgtgggcaggcggaggaattcgacttggtaatggatgcatatcagcaatcggcttatcactgctcttccttctttttggaggcttcggttccgttttaatctcagtttgttgcacctgacagctctgctgctgctgctgtagattctttacaatactcataggatctcccctacagctcgacagatcctgtaacgtcacttggtgaccactgttcgaatcaaaataagtctgctgtcgttcggccactcccaaaaccactcgttgctgttgttgctgctgctgttgattcgattcactcctattcatttctatgttattgttcggactgtagttagtactagattgagagcctgattgattgttctgaaactttctttggccctgtctttcatcccaacaattctgagtctgctggttgttatggtttggtcgttcatacctttcaggaaacgacttctcatggtttaatgctctagttataacagaggggtaagctacattgctagtttgagagctaggcctaggtacagaaacatcaagaggcgatggaggggctacttgattgctagaactctgctgaggagatgagattgagttcattggactattgtacatcggataagccggactttgtgcatgacccaaaggtgatgcctgggaatgtgcttgaagtgggctaggtcttcttgggaccacaacattgcaatcaggaccattagaattgttgtaatccgagccacttttaggcctctgaaattcttcagagttagagcttccttgtggttgttgttgttgctggtaatgtctataattgtgtgggaactgaggtggtctctttccagatgaattactaccagtatagtttaaacgtccaggtgcatccatgatagagaagctgatcggagatgattgactttgtgtttcttcattacttggcctttgtctttcttgttggttgccaagttctgaataaatttttgtctgggctttagtttgaatctgctgttgaacaggtgacgcctgttgtttactaggcggtgaagcaaaagccttttcgatagtagtacgggaagcattaggagaagttaaaaatgtagtacgtgcaggagcctgaggaactctatattccttagcaactgtagtagaaggtgaagatactatacaagattgttgtatattagaagtattggcagaggagaaggtcttacttgtattggatgaattatctgatatactagatgggacttgaaaaaaactacttggattgccttgtgatgcatttgttttttgttgatggtgttgacacctgtggactttgagccctgttgttacctgctttggcaatctgagaatttaagtggttatttatactttgggcttgggcagctgcaaaatgagcattaaagttttcgtatgttttactggtagtggtggctacaacactttcatggggtagaataccaaaggggctgctctgctgccaggcatttgcagcaccttgttcgaaaaaggcttgagtttgaggatggaactctccatcaccagactgcttcgtagcggctgcttgggccaaagcttgggctctttgctgagtaacctgggatacataatgagcggcaggtttggcactagcatggtggaaaaggggagaaaatactgtttcatatccgacagggtgtggggacaaaaaactaccgggcaggagttgggctgttgtagttggtggagcacctcctgcggttgtggttgctaaatggtgatgcaattctccacttccagatccagcagcttgcacactggcaaggcggttatatggagtggcataccatggccccactggatccatgtttgatggtagttaactcatgttgtttagccatcccatttctcatttgaaattgcagaaatcaggaatattttcaatataaatttcataaatatggctacagaagatgtggacaaggtctattcataagcaaaaaacactcgaaatcttatatatgattaagtcactattgccgataaaccataaaatatctaagcttttataattcgctaactatttacaaagttttatcttcaaaagtttcatttttaacatgttttcttctaacaattttgtatgcactagctcaccaaactttg

SEQ ID NO: 6462 - DNA, 2988 bp, Diabrotica virgifera
  SmartBlast Evalue=0; Info="Lon protease-like protein, mitochondrial n=1 Tax=Camponotus floridanus RepID=E2AFM0_9HYME"
attaaaatttattgaaaaacaaatacaaaacagaaatataaaccaatacttcatattttatcaaatatattttaacaataacaatggaattaaaatactacacccttttatcaaaaactatatcgtacacttgatcaaaagtaccgacaaaatgtacttctaaaccttctgttataaacgccggtaaatcgttaaagtcttttttgttttcctctggaagaatgatgcacttaacacctgatctcttagcagctatcgttttttccttgatcccgccgacaggcaaaacttttcccatcagggatatctcgcccgtcatcgcaacatcttgcctaacggactgatctttggctagcgacaacaacgccgtaactatcgtacatcctgcactggggccatccttcggcgtagcaccttcaggaacgtgtaaatgtagatggtttttttgtaaaaattggttgctaggatcgttctttaatagaaaattgcgggctactgtcatcgctatcttcgcagactctttcataacatctcctaagtgtccagttagttctaatgtaccgtccgtatctttttcgttagactgtttccttgtcgttgtttctatatacaaagtggagcctcccattgctgtccaggctaagcccattacgacaccaggaggggttactgggtacattctatcctgggtaaatactggttttccaacgaattcttgaagattcgtttgatcgactttcacaaaattcgattcatcttttacaactttatacgctactttcctcacgaccttttcaatatgtttctgtaaatttctgacgccgctttctcgacaataacttttgattagcgaagtaagtgcgtcgtcttcaactttgatggtctcgtctttaagtccgctatctctcatcgcttgaggcagtaaatattgtttggctatggctagtttttcctctgctacgtatccggacatgtcgatcatttccattctgtctctaagcggctctggaatcgtttccactatattggccgtacaaataaataatacttttgacagatcgacggggacgtccaagtaatggtccaggaaattcgcgttttgttccggatcgagcagttctaacagtgctgagcttggatcgcctgaataaccctttcctattttgtcaacttcatcaataagtactaaaggattttcggtacgggtctttttaaggcactgtatcacttttccaggcatcgcacccacgtaagtccttctgtggcctttaatttcagccacatcagtcataccaccaacagaaaatctaaaatactccctatttaaggccctggcgatggaacgagctatactagtttttccaacaccaggaggtccgtggaaacacaatatttttccttgtgtgctacctttaagttgacttactgctataaattctaaaatacgccttttaatatcttccattccgtaatggtcttgatctagaatctcagaagctcttttcagattcaagttttcctcgctgtgtactccccaaggcagtgaagtcaaccaatccaagtaatttcgtgttacattaaactcagagctatggctttctaaaaagtttaatttcgttaattcttcatctataactgctgaaacggctgagggtaacactttatctttaatcctctcccgaaatttctcaccaatggcatctttatcatctttttctaatcctaattccttttttattaccttgagctgctcctgtaaaatgtattttctatgatgctttttaactttttcttccacttctcttccaattttttgctgtaattttgacagttcatactctttcttcagtagggacagtgataacatcagtcgtttgggaatatccatttcttccaacacttcctgcagttctttgctctctgctgcagttagcgcagcccccaaatcgcttaaatatacagggttatctacaactctttggccttggtgcatcatttgctgcaagctatctctatacaacggatttaaacttataatatctctaatagttttgataacttcctgggtgagagctttcacttcttctgtttggcggaacttgttgtgaactacgttttctacttcagccatcagtaagccttcaattagaggtttcgcactggcactgggggtagcttttgggtctttactttcagtttgctctttagttttagtagattctattgggggttttactactctattgttgcgtaatttccttctgggtttttcactttcggtttcctctttttgctcttcgttttcaaaaatctgaccagttatcttaattcgcctatgtgccatcacaaccagtcttaaacgatctcctaagtcttgcatttcgtgaatttgagcaaaaactcctacatcgtaaacatcactgatattactgactacctctgaatcattgtcttctcgttttttaaggaaaataccacaatacggttggtttaacttaacttttcgtcttaagagcttaataagttgtggatttgttagttcaattagcttgataaaccttggaaatactatatttttgctaatggcaataacaggaacatgcggccagacttctggaactgctacagtggctggaagttggggattgaagttttcttcagctgctggtgccccatcttcagggccatcaggagtttttgtggcaaagtgtctaaaagctactgtttctctaggaattaacaactttcgttggaataaactagattttaccgtctcttttcgaaaacttattcttaatcgacttgaggagttattgtaagaggttataggagtattttgcgaaagtttgtaactatatctacgtacagtacatcctcttatagtaagtgtttgggcaattcttgtcaatttgacaaaattcattgctctgccttaaattctgaattgaaaaactatcttatgaaattacatgcaattattttaaaatt

SEQ ID NO: 6463 - DNA, 2983 bp, Diabrotica virgifera
  SmartBlast Evalue=0; Info=E3 ubiquitin-protein ligase UBR2 n=1 Tax=Harpegnathos saltator RepID=E2C439_9HYME
gaagatagcattcgtcagaccatcaatttggttgaagagatgttgcatgtgctcatatttatcataggagaaaggtatatgccaggagtaagcaacgtaacagtagaggatagaataaggaaggagataatccagtatctttgtatcaaaccgttgccacattcagagttagtaaaaacaattccggaagatttgatttctagagaagtggaaatagatgacattattcaagaattggcaaattttaagaagcctgctcacggatctgggaaaggagtctacgaattgaaagatcaatactacgatgacttcaacgtatttttctaccactacaccagagaagaattgtccaaatctgaagaagcgcagagaaagagacacaaggcaaaaggagaagtggaatgttgtcctccacccaagttacccaagctgaatgaatcgtttacactcatcgtaaacgtcttacaatgcgatgttatgttgcacgtgatgtcaattgttttggaaaggtgtatcaacttacgggctcgtagtttctctgaacaacaactccacaaagtgttacatctcgttggctacgctcttctagaagaggaatccaacaattaccccttctttaagtttatcgaaaaatcccagaagtttagaatcttcactctgatggaagaactgttgacctgtccgagagtcgattcacataaaggtttattgcgttggacattgaacaaatacaaacagctcacggacaagaaggatgatactttggaagtgaacaaagacgcctctacttcctgagaaggtggacaatgaaaaggaaagaagagctaagttggcagcagaaagacgagctatattgatggcccagatgcaggtgatgcaaaagaattttataaaagagaatgccagtttgtttgaagaaactagtactggtgaatttcaaaaaccaagaacttctagtcaagtcgaaatcatggacgtcacagaaccatccgaggaacagcctatcgctcttggtcctagacagtcaccaaggtattcagaagaaaaaacttacacttgcatcctatgtcaagaagaggagaaaataactgccagtggaaacactatggtactagcagcttttgtacagcaagcaacggtattgtgcgaacacaaaaccaacgaagctatgatggatattagcaaacatgatcctttatatctacacgctaacttgggacctgccccgcatactagtacttgtggtcacgttatgcacagcgagtgctggaggaagtactttgatattatcatgattagggaacatcggcggccgtacaggttgcgtcatcccgctagctttgacgtggataagcaagaattcctctgtcctctgtgcgaatgtcttagcaacgcagtgttgccactaataccaccgctgaacattttacagcccacaaagcaaatcgaccacatctcttttgaaaattggctccacggcatcaatcatgttttaacaaataaacagacaacttgccacggtttgttcacctgcgattcgtcggaggaatgtaaaaataaacattgtaaggactgcttatatacttctaacggtaatatcgaacacgaggagaatgtaaaatgtgaagtaaactgtacattgcaaccccatcaagttttcttctcgtatgattttacaccagatacacctgaagaatttaaacagcttttccctgtagaatttccgaaattggagagtagtcatgaggaaatgatacaagtttttgcacaggtggcttacaccagaggactgaacgttaatccccatccatatgataaacgtttggtaccgatgtgttggaaaacgttagcatacacaatacactctatagaagtacttttaagagacgcacagaaacctctattgggccacttatccagcagacaaagagattgcattgagagtttggtgcgaatagttggagttttaggtagtacgtggaaaagcagcgctttcatcaatagccatgcagttagtcttttgtctatattattcgaaaacggcaatgagggaccgtcgatactccagtgggattctttcggacttctaattagtcttaccttttctttacctagtctttcttgtaggaatagtaagaaaacgcccgtgccaacaggtggcacatcagactggcatgttttaagaattatatttatatctcatatagttaagatattaatattactgcaaaatgacgatctttccacttcaatggacacggacatagtgggaaacgcggaaattttaaaaattttagacggaatgggcaaaaacctagaccacgtaagcactcacgatgtgtgggagcatgtaaaatacgcttgtcaaccttttcttagatgttgtattctcttttaccactacttaaccgatgttaaagcacctgccaatcttacagaatttaacgaagatactttcagcatgatgtgcgattatttggacttacctcaaactcccaaagaacttttcgactcggaagtagtaatggacttggtaagtcggtggtgtaagcacgaggaggtcgtttcgtatataaaaggtgctccaatacaagttattcgcgagccgctatcggttcctcgtctaattaacctcccaaacgattacagtgagctgatcaatacagtgtcaatgttcacttgtcctaatagtgatgaggattccaagaacccttgcatgtgtttggtatgcggggaaatactatgttcacaaagctactgctgtcaaactgaattaaacaaaatggcagtgggagcttgtaactaccacgcgaataagtgtggcgctggtattggcattttattgcgggttagagaatgtgagattctttatttagccgcgccacatagaggttgtttaatatctccaccttatttggatgattacggagagacagatcaaggactacggaggggcaatccgttgcgactgtgccccgaaagg

SEQ ID NO: 6464 - DNA, 2979 bp, Diabrotica virgifera
  SmartBlast Evalue=0; Info=E75 nuclear receptor n=1 Tax= Tribolium castaneum RepID=D6X2B5_TRICA
agttcacgatgggtgaagaattgcccatccttaagggaatactcaatggtgtcgtcaactatcataacgcacctgttagattcggtcgtgtgccgaagagggaaaaggccagaattttggctgctatgcaacaaagttcaaactcacgctctttagaaaaagctatcgctgctgaattagaagatgaacaaagattgctcgaaactgtcgtcagagcccacatcgacacctgtgatttcaccagggataaagtggaacccatgctacagcgagcaagggatcatccttcgtatacagtttgtccaccaagtttggcatgtcctttgaaccccaacccacaacctttatcgggtcaacaagaattactgcaggacttctccaagagattctccccagcaatccgtggtgtggtggagttcgccaagcgcatacctggattcaccttactggctcaagatgatcaagttactttgctgaaggctggagtttttgaagtgttgttagtgcgcctcgcgtgtatgtttgactctcaaaccgccagtatggtgtgtttaaatggacaagtgctaaaacgtgactcagttcacaatagttctaatgctcggttcttgatggacagtatgtttgatttcgcggaaagaatgaactttttaagattatccgacgcggagattggacttttttgttccgtggtcgtgattgctgctgatcgtcccggtctaagaaacaccgagttgatcgaaaagatgcacaacaaactaaaagcatctctacaaatggtcgtttcgcaaaaccatctcgggcaaccccatatcatggatgaattgatgaagaagattcctgatctccgtacgttaaatactcttcattcggagaaactacttgccttcaaaatgaccgaacaacatcagatcatacaacagcaacagttccatcatcatacgtggaacggccatatggaagaagaaagcaacagcaaaagccctgcagcctcttcgtggtcatcttcatctgatgtaactatggatgatgctaagtctcctcttggctccgtatccagcacagaatcgatgtgctcttcagaaatgacatcaatccatgaatatcctcatccaagtagtcaccatatcagctcaaatgtaacgaacgcacccttactagccgctactctggcaggtggcgtttgtccgcacagacatcgagccaactctggctcaacctcttctggtgatgatgaattagcagccacatcacatttaatccacaacggaattacaataaccccagtttcaaggccatcacataatcctcaccccagattcagaaagcttgattcccctagcgactctggcattgaatcaggcactgaaaaaatcgaaaaacccacttcagtctgttccagccctcgatcatccgtcgatgatcaccatatagtcgaggacatgcctgttctcaaacgtgtcttacaagcaccccccttgtatgacaccaattctctcatggatgaagcctacaaaccacacaaaaaattcagagccttaagaaacaaagattcggcagaagcagaaccagttgtcatcatgtccccgcaaccagtgcaatctcaactacaaatgcagctcacggctgctcctcaatctacgttgtccagttcacactccatgttggccaggtcgcttatggaaggtcccaggatgacagcggagcaaatgaaaagaactgaagttattcacaacttcataatgagaggtggtgaatctgcttcacctatggtaacagcagcacccacagcctgtccttacaagacatcgaatgggtcgttgctgcagcctgcgtgggctaccagtgtgataacaactactgcgcgccaaagtcagatgcacaacagccacacacctcccccgcagcaccaggattacagccggctgtacctgcatccgcagcagtcgccacactcgacttcaccagctcctccacagtctagatctcccgccagtccgcactcatcgttactaacgacgatacccaaaatggtagagctgcaagttgatatagcagactcacagcagcctctaaatttgtccaaaaagtcaccctccccttcaccaaggccgatgaaggtggtgactctagaagtgtaagacagccgtggcggtttgtttttaaaccgcttcgtgagattagtacaaagtggagtgcacatgccctgagagactttttgcgacagaggacattaaggtgccacttttgatcgtgttacaaaaaaccaaataatttataattactgtatattcagccctactatctctgtctacaaagccacggaaaaatgatccaattaccaaacgaacgaaagtgaaaatatcgattttgtgaaatgttcttagggaaaattgtaagatttaaataaattttgtaaagtttggcaacgttgcacaacttcgatattcttcgtctttcacagtgaaaattcgtcgtaaatcggatactttttcccgtcgctgatttatatatctgtatgttgatgtgtgcccctcatgttatgttgtagtagtagtagggaaaagccccattggtgacgtcccagattctcatgtaaagtaacttccgccatgtgtcgagagagggcgcgaccttttgtacatagcggaccaagaaaccacactagcgccctctttccgactctctgtctagttaaggtttcaaacaatcaatcactaatttaaatacatagttccatgtaaatgacatacaaaaagatcgatgaaactggcatcagcacccgaatcaatcctactatagatttaattattattgtttaattaatatatgtgatacattgatttgtaggtttatgagaggtctttcggaaacgtcttgccctgttgccttagtgtttacgaactattttcatcattttttagctttgtttttaaatatctggaggactacacgaaattttagtcgaaaatattatgt

SEQ ID NO: 6465 - DNA, 2973 bp, Diabrotica virgifera
  SmartBlast Evalue=7E-57; Info="CG7971, isoform C n=5 Tax= melanogaster subgroup RepID=Q9W0B0_DROME"
tcgtcttaacacttccaaactacctgtgtctggtaattcttcgcctgtctaagaaactaggcgaaccatgtcttctaggaatagacggtgatctagatctagctgaactagaacttgagctagagcttgatgaagcagaccgacttctcgatctcgagtatgatctcgacctagaacaggatttgctggagctcgtcgacaaggacctgcttcttccatgcttcgaacttacagaagatctggatgaactcctcgatttcgatttacttttactttttctacctttttctttagaacgacttttggatcttgacctcgatttactaatcttcatgtggatatcgacattgtctttaccagctactgaagggctcggatccttaccattccttaaaggtaaaaccttaatatcaaagaaatctggttctatgtgccttttaacaataggtttcggactgggaggtttctctttcttccgttctagactttcttttgccttcgctgctagatcagattttaacagtcgcagatatctaagttctttgtcgtctttctcatcttctttctctttctctttttctacctccggtcctgatacatcaccttcgctggaggaagaccgtagtcggactactggtaatggttttttcgtttttggcttttctgtggatttctttttagccttttcttttgcaatatcgggtgttaatgatttcttagttggacttttgggggaataacatttcttggtttgactctcctttctggtaacgctctcatttctatccctactcctactccttgagtccttttttgtcattggtgtcgtagacctgtcctttgagtatttctgtgatgttttaatatcagatttatctgcaaaggatgatgaaactcgttccttactcgaaatgctcttgactaaggttttaatttggcttttcatcttatcttctgattcgatgtttctagatttttctttgggagaatgtcttgtttccggagaacaactacgtcgtttaggactatgactttttctcgatctgcttcgaccatggattggtgatctacttcgtgaagttcttatttcacgcctatcagtcttttttgatctcctatctaatgatcttgatctcttttcgcgagaatttgacctatttctccttttcctatctttggaaagtgaccgttcccttcttcttttttcttcttcttcagctaatctcaatttcctagctatttcagcatactcctcttcatacctttgctttcttcttctaatttcagctagttcctcgtcctcagattcggacttcggcctttttctaactttttctcttgaatcagaccttgacttttttctttctttatctggagttttcgatcgaagtatctttcttttgtcaacagatgcagacctgtcccttcttttcttcttattaaaatccgtgctagattttcgtttgcgttccttgtctactgaaggtgaacgggattttcttgtactagatacagatgtggatttgcttctggatctcttcacattatcatgtttgagttttcgtttagtggaaatagataaagatctgcttctagatctatcattatggcgcgatcttttcgacctagatctggaacgttgttgtttccctccaggtctctttgacttatacttggattcttgcgattttgacctagatctttttctttgatcgaccgaactcgattttttctttgccgtaggtagggaccatttggatcgttcggtagatctggagctcctatgcttttctatagatctggagctcctacgtttttctatagatctggaccgacctcgtcttccatttgaacgagatctagattttcttcttctttctggcgacctctttctttcatatttgttaaatttttcgtatttattatctttaacgtttttctgagatctcgaggactgcttgggggattttggagtaatagatctgtttgtttttgaactagacattttttctgatttgttttttctatctttactgcgagaacgatgtttatgaccattttttgatttttctgcccttgtcttcttgtcgttttcagaagagctatctgaggagctttcatcagatgaatactttctcttttttgatgatcgttttttctcctttttcttgtttttcttctttctgtcgtcatcactgcttgaaccatcatcagaatcttcatctgaattagagccagaagaagcttcatctttcttattcttctttttcttcaatttgtctttagatttgccgctggatctttctctggactttttcttcttctttttcccatccttctccttttctacatcatcatcagctcccggttccggactaggtgtgtgtactagctggtattttcgaacgtccgctttttctgcctcgttctgtttgtccctttccagagctttcagtctttctcgttcctgtatagcgacacttttcgcgattttttctttggcttggcgaccggggtcgaagctgctgccatccacgaagtactctgagatcccgaaggcttcgcgaagacgtgcatttttctcttgctgtgcttcggccacctggtgagtttccgtcacacttggtcttccccattcatcaacgggtctttctattttttcgccatgtcccaacagcatatttcggtagttgcttactttaatattcaccgtttcttcagtaaaaccttgatcttctaaaagatcagcaaactctgcacatttcagctcaatttttctcttcctctcatgatccaagatatctttattgggttgtttatttgaagctgcatcaaaggctgctagttcctgttctgatttgtatgtcttatccttagcttgaggcctgaccaatgcccaattgcgttgcacatgaccatttgttccagagcctctcggagttggtaagccaatcccattatacattctttatg

SEQ ID NO: 6466 - DNA, 2977 bp, Diabrotica virgifera
  SmartBlast Evalue=0; Info="C-1-tetrahydrofolate synthase, cytoplasmic (Fragment) n=1 Tax=Camponotus floridanus RepID= E2AG54_9HYME"
aatatgtaaaacatttttttaaaatataaaaaaaaatatttgaattttttaaaaatctggtcaaaacaatgtattacgctttcacttaattttcaataggtattacataataatatgtagaagaggaattcacattgaataatgctactagaagagtccttcaatttctccagtttcaatgtttagatctatgtcgtaaatggctggtcttgttggtaatccaggcattcgggtaatctctccagtaaatggaattatgaattgtgctcctacagatatggacatgtctctcacaggaatgacgaaaccagatggtgctcccttaattgaaggatctgccgttaaagatagcggagttttggccatgcatattggaaggtttccatatccctgttcctcgtactgctttattttcttttctgcgatttcactataggacacacctgcagcgccgtacatttctctgctgataatttcaatcttttctttaattggtcggttaagttgatacaaaaatttgaagttactgggttgagaagtagctgccacgacagctttagccaaatcgatagcaccttgaccaccttgtgaccagtgttttgaaactactgcgtcgaatgcaccagagtttttgcatgcctgtctcaagagttccagttcagcttcagtgtcggtttcgcgatgattaattgcaacaaccgctgggattccatatttcaccgcgttgcttacgtgtttgagaatattaggaagtcctttacgaagcaagtccaaattttcttcagtatactgcggcgccaaaggtgctcctggtgtgactgcaggaccacctccatgcattttcaaggctcttatggttgaaacaagtacgacagcgtttggaacatctccggatgctctgcatttgatattaaagaacttttccataccaacgtcagatgaaaatcctgcttcggtaactacaataccatcctctccaactaatttaagagcaactttatcagcaataattgagttagaaccatgggcaatattagcaaaaggtccagcgtgcatgaataccggtgatccctccaaactctgcaatagagttggttctatggtatctttcagcaataccaataaagccccagtggctcccaaatcatcggctgtgacaggtttaccatttttgtcgaacgctaccaccatgtttgctaatctttctttgaagtcagccatgtctcttgctaaagcaagaatggccataatttcacttgcaacactgatttggaagccttcctttctggtcatacctttttcggttggagattcaccaatagtgatttctcggaggaatctgtcgttgatatccaaaactctattccaaacaatattgttggtgtcaatgttcaacctggcaaacttagttctctcttctggtgtaagactttcgggatccgttttgtttatacctaatcgtttaaggcgtctaagttgaatctttgagaatgttcttgcaccctttattttaggaacaagacgatcatatagagctgcatctttttgagttgcttcatggaaaatcctagcatcaagttgagctgccaaaaggttatttgcagctgtaatagcatggatatctcctgtgagatgaagattgacatcttccatgggaatgacttgagaatatcctccaccagcagcacctcctttaataccaaatgttggaccttgagaaggttgcctcattgtagcaaatgtattctttttcaaatgtgttgacaaagcttgcaccaatcccaaaagagttgtacttttaccttctcccagaggtgttggagtcattcctgctacaactacatattttccatttttctgatcctttagtctttccaacacggatatcgaaactttagctttcttaggtccatattgggaaagttcattagggaatacacctatttcttctgccaaatgtgtaatgttctttggaacttgtgctctcgctatacggatatcgcttggtacaggagcctgcaactttaaaggcaatggtgttaagttccatgagcgattcagcaatttctctgcagctttttgagcactttgtacagtgttcttcatcaacatggcaaccgtcatcggtcctacacctcctggtactggggtaatgtaagacgctaccttactagcttctgcataatctacatcacctacgagtctttggccgctctttttggtaggatcaggaatagcgttgattccacagtcaataacaactgctcctggtttcacccaacttcctttgactagctctggttgacctattcctacgactagaatgtcagcttgtctgcacactgctggtaaatctctggttttcgaatggcacacagtgacggtggcgtgattccacttgagtaattcagctgatggggttccaagaattttacttcttcctagaacaacagcattagctcctgcaataggtaggccacttctcttaatcagttcaattacaccgttaggcgtacatgggaggaaagaagtcagttctccaattgctgttcttccttcattgatggtgtttaaaccgtcgacatccttgtcgggcgatactgtatcagtaactaaattggaattaattttattgtcagattctaatggcatctgcacgatgataccgtgaatatttggatcattgtttaactcttctattttgtttaatacttctaattctgttatgcttcttggcaatttgatatgttgagccttgattcctatatttgaagcagactgtattttcatgcgaatatatacatttgagtcttctctatctcctacttgaacaatagctaagcctggttgaaaatttggtaaccttgttttaatttcgtttacaacatttttcagttgttcgttaatttccttggaaatttgtgtcccagagagaatttttccttgtccggtaggagatgccattttgcacagaaaa

SEQ ID NO: 6467 - DNA, 2968 bp, Diabrotica virgifera
  SmartBlast Evalue=0; Info=Translational activator GCN1 n=2 Tax= Formicidae RepID=E2B5Y8_9HYME
gtccgtcgtgtactaactcatcgtggttcctagcgtaatttgagactaaactgtattttaagaaagggaaaatgtagcaaaaagctggaactgtaaaacacatttctgaatgatcttcagtctttttgggtacagtcttatcgtggatcaaagccacagctctcaccatggctttgttaatgttctctgattcccagttggagtccaaatcgcactgaggattggctaatctcaaggtcaagttagccaccagttctcccaaggggtccagctcgtcgaaaaacacagtttttcggagactggtgaagagcttgcagatgagaggtgcggctagaggcgactgcaagtcttggagcaaagtcgggagaagatctttaaagtgtagggataaatgaaaggggtttcccctagccgctgcttgtatcatagatagacactcttgaactgtcgtgttcaactccgttagacgacttctgatggtttgctccttcaatttttggttcttaatggcttctagttgtttaggtgtgagctgcggtggttttattttgccctccttcttcttcttttcctctagttcccttcgcaattgaagctcctctaactgttctttgtagctgtacactttgctctctctcttcaggttcatatcgttattgctgtcgttacctgggatcacgcttttgtcgtatagttctccatctggtgtcaggaaggtgaagtaatcatcttttgatatttgacagatcctcgggtcgtttaatcgagagatgactttgcttgctatatctggcaatagaacgtcaggattgacagctatgagagtggctaaagcattttcattacttaatgtgtgcttgtattcttctacaaaaagctgtttgaactgtgaagattgccgagccaccaaatctttaggtttactattgaagtgtcttattatcttcacccacaagtttggcattaagttcacaacagatgggtgatgagttggcagtaacgaatcgatagctagaagctgcacatcttctgtggataaaccagacaacgagcacaatgtcgttatacattccacaacggtatgagaactcaaaaaattgttgtcactctctttgttatcctccgatttctcgttgattactttattggtttctaaaaacctttgtagttctttgaacaaagatctagctatagcagctccgcttaggctgcctactattcgcttgagtattgctagacatttccgtctagtactactggaacaaactgttgtgcagtacagaacagctctgtgaattggttcaggtttctttagtttttcagggtattgcacgagcaatacttcgcagagttgcatgacgtatatgagactttcttccgtagtagttgacaaatacttctccgcgaagaaaatctgtttttccatatccagcacggcattccaaacactctggaaatcgttatccttatctttttggacactggcaagtttaaacagcaacagtgctgcacagaggccctccgttaccgataatgcgattgttggttgagcgacagctttttcaacggatttagtaaggatggggatgaaaattgaggcttgtggtattgtttttgtgttgaaagtggcgatcatacattgaatgtaggctattttgactgcaggagtggatgttttcagaccaatgccgttctttaatatatccaaaatcttcttaggtacatcctgacttaatttgctagtccacaacgacatcatttccagagaatgacacaaagttttttcatgtacctcagtttctaaaaccttgccgaaaaactcagccgctactactatcaaagcttgaaaatgttcaggagctaccgcattgcagctgagatgaccagcacctaacaacacactgattttatgatctaccacagtcagttttccgtccgacccgtggaaaacggcaaaagttttcttgaggagttcttcgactgatttttggtctttagttttttcggcgagtcttttacaagcgtctgctgcttcggaacgtgctttgtcatctttggaatgtaaattagcaatcaaactgtttcccaactctcctgtacatttactcagatctaaatctactcccgatatcaccagtcctacacattctaaaataacttcaggattcctcagcatagctttctggagggcggggaggacaaattttgtaaacaattgctgattgatttgggacaagagaggataacatgctataattatgttaggagacggtcggactttgcagctgatgaagttcttaataaaggtatccactagcaattccatgtagttgttaagttcttcactcttagatttggacaacttctcagccaacagagatgctaatactactatatactgattctgttccacctttttgatgacttctaggtacattttttcactgtctggcacactcgaccacgatctatgcatcaaagtaatagcttttaattttctcttcatgttatctgcaccaagaatcgaggtaactaaatacgactgcaattcaactatttgtgtaagttgtgcctgaaccgtctctgaactgtgcttccaaccttttgtgaatataatcgtagaccaactcaaggcaaatagagctgttttgctggtgttgttggtgatcactatgttcttgtgttgtgtagcaacatctaccaaaacgtttgtaagacattttatggctgcctctggatgatcttcgaccagtgctgtgatcaaattctttacaagctgttgtgatgatctatctctgtatctcgaaagagttaaaggcaacgttttagaaattcccttgacgatattttcatttacggccggattttttaaaactttaataacgttgtcgataacctctttcctctccttcaaacttgcagtttgaattttatagtggatatctttcaaagcactagtcaactccgc

SEQ ID NO: 6468 - DNA, 2969 bp, Diabrotica virgifera
  SmartBlast Evalue=1E-107; Info=Phosphatase and actin regulator 1 n=1 Tax=Camponotus floridanus RepID=E2A3G9_9HYME
ttttcggtcgtcaaactgtcaaaaatggaaaaaaatcgaatcaaaaatgtctttaaaatgctgtcattcagtcatttctttatataacttgtttttgtacgtttcagataattccttagtacaaaatcatggtcgcagacaattttgaatgagtcacaggatatccgccattttgagttgataagatgttcaaaatgagtaaaaaaatgtttattgcatattttaagagtgcatttattaagcgacaaaatgtagaatcttatatatcataaaagtgagacaataaattacaaaataaatagtttttttcgaaattgacacataattaacccccgggccaattaaacgattaaatctaaagctcgttccacttttgcaaaaagtatttaaaaatgctgaaaatattgagtatatgaaaccatttcctctgcgtaccagtactagatagcagtgagttatcagtgttgccagttatcgatctaatcggtgtgatgtttacgttcaaaacagttttaataactatgtatatatataatcgcactatgtatgtacaataagatgtgtttgttttaactcaattaacataaaacagaacaaagaagaaaaaatttacaatcgctatgtataataataatagttataaccaaaaattgataactaatcataataattaattaataataaaaactttgtgtaataaaaaatcacttatgtacaaaaacaactacacaatgtttcaagttttgatggttctaacataagtcttttttattttattattttatgttttttctttaatagtaagcgattatgggaaagattactacaactacgcccatcacagtaattttcttttcttctagtttgccttgcaatcgtcaaggcctatggaatctcgtcaaatgtcgactatcttcgtgaaccgacatttctgagcttttgaactcgttcaattcttttctgatcgccgctttgtccttcggagttagtctcgtccaaggtttgtccgctctgcggtcgtaatcgtgtgcctgagtcacttcaatataatcattgaatcggataatcttcttctctttcaattcttcaacggttggcctgaagcttagttttcttaacagaaaacgtttcttctcttccttctgtttcttttcttcggcgggactttgttttttcaaaatgttcctctcttccaattcttcctgtgtaggtctcatgctcagccttctgatcaatctagctcctatagcctctttggcctcctgcctctcattatctgattgtatctgaaggatattcctattgatgagctcctgtttgtcgggtctgagagccagtttgagcgataaactctctttccttgcgagcttaagagccaatctcttttcgtcagtcatcgattcatcgtctctgtaagtgataggaccatcgttggaatcgctatcgctttcgtcttccctgatcacgaacggacgagcgttttctttgttctctatggctgtcggcaaaccaaatctgaccggtttgttgctattaaaactagagttatactcttgctgcctcatcgttagaggtctattttcttgagtcggagtattctgcggtgttccgggtccgctgttcggtttcttctttagagccgatttgaggggcatagcgtggaattttggttctttcgcggggatctcgtcaatgcggctcgtgtcgattgatgggtccggttgtggtataaaatattgatcgtcatcgtaatcgacatcgtcgtcttcctcttcttcgtcattttcatcgtagtcatagttgtgatggttgggcggtggcgagagtctattgggaatgggactgggcgaactaaacatcggcggaggtgggatcggtccgatttctgaaacaggaatgggcggttcgggcagctcggacaacatgaaccctggtactccgaccggaatatgcggaggagggatgttgtggagatgcttctcgtggggcggaggtgtgctgcctggtggaacagattgcccgtcggcgaagtgttcgctatgataacacaacagcctcctggtaagcttcccgtgtcccaaagtgctcggccgttctggcttcgaaccgatattttccattccggggggttgagtgacatgtaagggcgtctctccgttcggagaaagagcgccgttgtgtgccgctccatcagtcttttcttttttcggctcggtgttactaatactattggcattggcgttggcactggcctgtgcaaagtgtggattctgcaacagctgctgctgcaggagggcgtgattcataggcggcaggtgtgaggggggcggtggtaggacggggtaaggaggtggttgtggtaaaggaatcatattaccaccggcaccgagtgcgcctccgtggcttagctgcggcgtatggattccacctccgttgccggccgccgaggcattatggccaccgccacccggtacctgctgggcgccgctcggagggaatggaggaagcatgggatctggctcggaagtaggtggagtcagcggactttctggtagaagaattcctttcattactaaatcatccctattggctcggactgatatttttctttctaatgttctagagacagcttccatcttgtctgattttcgtttccgcttccatttccatggcctgagtaattttcctatcgaaaacttgcttttcctttctgccggcggacttctcgtactgctacccaggctgttcgtccgaaaggcgcttccattttgctttttagcgtctgccgttgatgattcatcagtacacgtactattgctaacggtggattcttcttcttctaaaccatccttggagtcacttctattcaaattacgtctgcttcttgaaatccttcgtagaagctgggccatttttgtcgcgatttaaacatatatcactcccgcacttacattgccacctgtgacaca

SEQ ID NO: 6469 - DNA, 2968 bp, Diabrotica virgifera
  SmartBlast Evalue=1E-155; Info=Zgc:158458 n=1 Tax=Danio rerio RepID=A1L1W3_DANRE
ataaaacatcatttatttatattgagggacatacatcttacatccattaacatgatttttaaaatataaaacagtaagaacacagattctcattaaaatataatatatatagttaaccaataatttaaaaaataaaaacaagtttaaaacagtatgcacgaccagcatgcacaagatgatgaaaaatatacattcatttagttatattctttaggaagaaggtagtaggtagataagagttaggtacatttatttgtccgattatgaaacacgatatgcactttttagaattaacattcacagttttctgagtaaaaaatgtcttatgtcaccattgtcaacactatggcgtgtaagcatccatcattcgcctttggtaggcttttggggaaacattgggttcatcaaggcagtagcctggagtttttgtatatctgaaagtgttgtatgaccctgttcgtccagttctttccatcttatatagttttgtctcatatgtgccagcaattctggcatgtcgataaaagcgttccacgcttcaaacatatcattgataatgtaatcaacgaagccaatctgggattttggtattgagcaggtatacctgtcgaacattggcatcactaccggtagccctttcgatttttcttcgtctgtttgatggaaatattcttcggttattctcctcgcccattcaacgcacaatcttagaggtcttgtggggttggatacatcggcacatttaatcatcatccttttgactagggttacattttcagggatcgacagtggagcgaaatcagaaacttcagactctagatccgagcttgatgatttggtacaaaacacgttgacgaatttggcgagatgttcaaaatgctttgtcatttctgttgcaaggatcatgtcgaccacatttgccctagctattttgtaggtttctctatctaaattcttaaaaatatttattctttcatcacccaaagtaagtttaaacgtaagagctgcatgatgtgactctaaaacggtcacatcgttatataaaattgctaactgattgtctgagttggataagaaggcgctagatttgcctggatgatcaacatcgtgggccgcggctgctatcaaagtagtcgcctcatctagctgttctattatggatttcattcgatctttctccaaaaatcccgcagtagcctgcataacgtcagcagcatgtgtgctgttgtgataagagttttccatatgataattggcttctatcaccgtcaaccaattaaataaagtcttttcgtcacagtttagaacactggcaacttcgaaatggttaaataaactcattcccaagtattgtaatggtcttttcttagttaagtcttcaagtcggaatatatcgaattcccacgacaggcagtgatccagcaactctttgattaccgtaggaaccttcatcagtcctccccttgattgtctaaataccgaagaatcattactgcttctccttgatgagccacttaacgttggctgaggctgtttcgacaacagtgctgtgatcaggtcagagaccaccggttcatccgattttattcttaaatcttcttttacgtgggtcgaatatagttcacagctcttcaaaatgtcttccactttatccagtagttgcaccactgaagggttttggtttgaattttctctagcttggtcgattaaaccaaccacttttgtaataggtgcttccaaaggcaaagcattaagtttggcaagagatgtccgccttaggaagtcactgccaacactccttacatctgttgaacctcttctaatagaatggatactacctctagattgagctaacatatttaattggtccgtggggttcaaatcgaagacgagaatgaaatgcgtgggaagccttccagcacatgcaaatgggacagctttgcaagaagctaaaatagtttctaagggtttctttttgagcgttatgggaccctgccaatcttttcctcttagcaaagatgatcccattggatttacttgcgcaggatcgaacataagttgatcttgaagaggtcttcccaagacttcttcttgccttaggccaagttgtttttcgcaggccctgttaatgtactgtaagttatacttgtcatctgttactacgacgatatctttgcatttgtcaagggctgaataaagtccttgtgttgttgcatgctgagccaacggccgaatgtcactatgccgcaataaaatcaactcgtttccactggctactatgtttgttgtttctaccatacacctattaaatccagaatctaataatgatcctatcgtattgtcatctttttcgaacgcactcttttttacaacagccactacaacagtatgctgatttcctttggtatttctgagagaccgacataatgtgtcgtaattgattcccttcggcgaccgcgaatctattatcaccagatcgtgcagtctctgctggtactcttccagagccgctttatctgaggtagaagttgtgatttcaaagcctaacttttcagctgcctttacaatggtttcgcctacttggtccaaagcagagaaaacggtcagtatttttaatagtcgcgaaggtggcgttatttgtccaagtttcacttcgcttgttgctctcttatactccctcgttttaagtatagatgatcccactggctttgtagtgactttcggtatgattccgttatttaccatagcatccaagtcaaactgaattgtctttcttgtattatacactccatcaattgactgatcactaacactacttaactcggaattgaggattacagttgactcttttgtgttacaaaatccgaagcaccaccaactttgcgaatttgtagctgctttactccggtacaaactagttgtcgacccgtattggcttttcaagctactaccgcattgttcacacacg

SEQ ID NO: 6470 - DNA, 2940 bp, Diabrotica virgifera
  SmartBlast Evalue=1E-137; Info=Serrate RNA effector molecule homolog n=1 Tax=Anopheles gambiae RepID=SRRT_ANOGA
acgtgaatgctttattaactactaaaagcataatcgatataaaaatcatcctgaactaatacattaacattggaaaaatccatttagatatctttaggaagaagcaaattaataaaaaaactgccacctaatattaaaacaaatacatcaatcaaataaattcttctggttctcttggggcgtctagatctctgtaatggataactggtctgaaatctgttgggcctccccttcctcttggttggtaacctcttgttctcggaacgaaactttgattgtaaaatggagcaggtctagtgtacccagaaccaccatatccaccaccaccaaacatatgtggataactagcaggttcttcccttttttgttgaggagcttctgctaacattggtcttttgggatcttttaggtagttattaaagaattcgacttcttttcttacttctacaagtttctcagcatgtttattaaatatgtgtttccgaacaaaatctggacctttaaatttctttccagataacgggcacaaccacttatccttggccaattctcttgtattaacttgaacaaatttatcaatttctgtatctacgttctttaacgccaaatgaactaacttcgattcgttcttgtctttttcttgatgtagtttttctggtaagaaggcagccattttattttctatgggcaaaccaataaactgggtcatatcggtcttactagtcggtggaggccctcgggcatgtaaaattccacatctattgggcatttcatcttcattcggatagtcacaatgattgtagtaatcgacagaatgtactattctaagatatagaataatcctatccaaaacagttatcaaattttcatctctttcaactacagatgtagcatcttgggcatctgttgtaggatctaaacctagaagttcctcttcttcagcgctggcttcttctattaagtaatcagttatattatgtaatactggattattggataatagtccaaaagtctgttggggcttagctttcttatcttcattctccaaccacaatcctgctttggtatctaagtgtaaaacaaccttagcagatattcttatatctgatctcacgacctgtttatgggctatgattccattcactggacgaattcttcgactaagatctctatttacgatagcacccaattcgcattctttcaaacgtatgttgtttaagttccaacatatttcttttatgttagcatcacgtttgaatgtcacccatccccgtcgcagccaccttctgtcaggctgagggtcagctaatgccacacgaagaaaaccatcatatctagaacacatggcttctacttcttgtttggtaataataggtgccaagtttctcaagaatatcgaagtagttttatgaagagattttggcttttcaattttgagtctatcgtcctcatcaatagtatgaactgggatatccttatcccttttgttgttgtcggcttcgacatcctcttctttagcatccttatctataccctcattttcactgtcgctactactgctggaagaaccgctgctgctaccagaatatgatcgtttccgttttttctctttagttttaaaaggaaccgctttttccccgtctttctctggtgcatctgtagtatccatagcagcgggttcaagattttcttccgttttttctgtttcttcaacaactattgttggcgcttcaccttctgttggtttatcttgaacttctccagcttcacactccttttcctcagtgttctcattttctatgtcttctgaaggtattgtttcaatttcgggttgaggttcagattcagcttctatcttatcttctactttctcaatttcctcatctttctcgattttctcatctttctcaatttcctcatctttctccttctctttttcattgtcatcggctttaccatttggcttctcttcatcgacaggttttggattttcgccttctaactcttttttaatttcttgatctttgcctttttctcgttcagcttcggcttctttcgctttttgttctctgtatttttgttccatttcttcatactcttgttcaagagcagccaaatcctcatcggtacctccctcaagtttgataacaacagtatctagtaatttaagtaatttattggtttccgcacaatccaccttaacacattctattttgccagcatttaaaagctctataaagacgtcaactcttctcttcaaagctgccttttgctcttcttttcgttttacagattcttctgggtgatacttaagtctaaaccactcatcatctttatgagccacaaaaaattcgttaagctgctgacgttgaaattctagtttataatcattgtacttttctatagcctcgctatcagaaatgttatcatcttgagtagctaaaaaagccttaaaagacatcataggtggttgttggccttcggtatgagcacccatcgattctctgtaggctggctgatggtaagtattaaccccataatggttataataaccatctccgccgcctcctccgtaataatcatgacgaattcttttgggagctggctccatattgggcgaatatcctctatcacgaacactgcttctatattcccttggtctaggacgagaccatgaatctctttctgcccattcgtcccttggtcttgctaccctttcagcacctctataactagcttctgctctttctcctcggaatttatctcggcgttttctatcatattcatcatcactatcagccatattttatagcatacaaatatgtacaccttatgaattgtaaatttttattatttgattaactagtcaccttcaaatattgagataataaattttaaaataaataaagtaaacttttcgtcaatttaagcttggcttcc

SEQ ID NO: 6471 - DNA, 2926 bp, Diabrotica virgifera
  SmartBlast Evalue=1E-135; Info=Serine/threonine-protein kinase SNF1-like kinase 2 n=2 Tax=Aculeata RepID=E2ATN1_9HYME
attaacgtttcaatagtattttgtattttgacaacgaaaccgatttgggcttcgaaacgttaataaatatcattttttagcaaaattgtggcccatttcccatagaaaatacttaattataaaaatgccacaaggaaatagcttcagaacaacattaattttgagatttgattcttgattaactcagaatgctaataaatattctttccgtcatttaaccaaacagtaaacaaacagggctcactacaaacgttgagatacctgattccaagtagcactcgtagcttgccaagacggcgttggcagtgaaactggttcggacagttgacagttattaggaacgttccaagactctccagcgccttcaacaagtgcctggaaagccaatagatctttgctttcggattctgacaaggggagaggaggcaagactggttgttgctgagctatcttgtaactagcttggcgcagcatttgccgtctagacagcgagtgggtggtttctagggacgtcactggtgttgattggtgggatagagcgcattgtttttggagaatttgacgtttttgttggagcaacctgtgttgcatagctgtttgaagttgcactgactcaacaccggggttggtgtagttaaaattgtctggcaaactgatccttttgttgggtctgggttgcaaatattgattctgtctaggcgacacgtcttcggggtctctcttactggtactggatactggggttgcagtctttgattctcgcgttgaactaggtgcatgtccaacacacctttggccttacgtttttcagtaaacttttgtgaattaaaagccaccactctactagtatctgctacttgttgagcgacgagtccatcactagctcgtctaccctctcgaaaatccaccggcgatctggtgattcccctggttgtcttgaagctcgacatgtgcgacagagggttatgcttgtgaaaaaccggcctcgatgtaagcgaatagtgagtggataacacgctggccgaactcagcacgggctctggtttcttctccatggaggtgcaactgggcaagctgctggccagttcgctggattcggacagcggatattctaggctttcgaagttgctatcacagcttaagttttggctgagactcttggatgcgttgaagttggtcatgacgccgcttgaggagtttgaggaggtatagcttaggcgaggggggtggtcttcgagatctgtttcgacaccttcgtcggtcgagctggagtattgagtttggatttctgcgcttttgtaatttgaggaaaacctcccgatggatcccctggtttccggaatatcaaacgacggcaggcaacttcccgtctgtaaatacggcaacgcatgtccctggtggctatattccttaaaaaccgaattgtcaacagaaggtgagggtatcgcagacatctgcaaagtcgacatcagcttagtggcttcactacacatagaaaacgttgttttagaactagcttgattcaatatcttcaaagcgtcttcactattggtggccgccaacaacttagcagcatctataccatgcgtgggcggagaatcacaactcctgttggatttggtgcaaattttgctattgctcgcggttggggtacctgtggaattctgtaacaaccttcggcagtcttcggtggtgctggctcggcagatcttcctcatcgcctgctcagctacgttggacggccttcgcctttgagcttcgcgggctcccgtttgattgtcgccccctaccagttggcttcgtagcttgtctaacaacaagtagtagatggctgcatggtgatcgtagctgccaagtctaatcgactctctcgtcttagatccatcaatgcctaagctctgcattagcctcagaatttgttcgttgggttgagaattagaaaagctaatggtaggaggtagaattggcggtacacccatttgcatccaccgatgtttttaatctgttggatgctgtaccttttgttcggttctaatactaacatttttcgtatgagagattcgcagtctgaactcataaaatatggtatcctaaatctaccggaaagtaccctgtctcgaagggcttgtagtgaacaaccgtcgaacgggagagcaccgcatactaaaacgtataggactacccctaaactccatatgtcaatttctggtccaacgtacttcttgccctcgaaaacttcaggggcggcatacgggggcgacccacaccacgttgacaactggccgcctattgtgtagtaattagaaaatccaaaatctgctatctttatattattattggagtctaaaagaagattttcagcctttaaatctctgtgtactatattacgattgtggcagtattctacagctgacaggatctgccagaacttattcctagattgatcctcagtcattcgaccgtacctggcaatgtaatcaaaaatttctccctggctagcatattctgataccaaatagatcatatttttggtttccatcacctgatatagcttgataatatgaggatgatctaatcttttcattatatcgacttcacgatatactttctgcaagttgctggcatctagttggctcttatcgatgatcttaattgcaacctcagtttttgtgattctgtgcttggcaagtttcacaacagcgaaatttcccttcccgatagtcctctcgatatcatagaaaccaaccctgatggtattctttcctatcctctctcgctcgcccattttatgtgatcttatgactaaaagtccccgcgaaaaatatgaatagaaatgatatctacgaactacccggtaatattgttgctaaattcggtgatagtattgtcattattaggagaggtagaggtccggcgcggaactgaa

SEQ ID NO: 6472 - DNA, 2925 bp, Diabrotica virgifera
  SmartBlast Evalue=1E-108; Info=AMP dependent coa ligase n=1 Tax= Aedes aegypti RepID=Q17M83_AEDAE
aaaaagctatcaatcttgtatcaattagacaaaatatataacaacaatatcttatatgataagtgtcgtccaaactttagaacatactacgcttaataggaatactattggggccctagccacaaacaaagcatatgaacgataaaacgaatagaaaagtagacatataattgctcccaagctgccatgccataagaaatgccaggtacatttgaaggcataggaaaggatcttcctaatctaaagacacacaacattacctttataaaatatctaaaacgattaaaatcattgaaaaatggactgtaaaaagaattaagaattaaaatcaagttcattatgtaaaaagaaataagttaaatttacaaatagattttggctcattaaaaagaacaaaacaaatgtgcaatcaatattgataacacatttttccaataaataaaattaataatttaaaccaaatcctttttaggaaattttgacggttgaatgatgtttaaaaattaaataaaaatatttaacatcaacaaaatagtaggacagacacagtacgatacacagggcacaacattggttttatatgatttcaatctcttctttaatttacactatcaattcttaatttcagtctaattttttaaatcctacctagaggtcctgacctagaggtccagtcattggactgacctctctaacgtcaactcttttttatttcaaaccccaaagacgcttattgttagaatttttataactaacagattgctgaataaacgtttcaaaaaaaaattttttttaaagtacattttcaatctgccatctatacgacaataaatgaattttttgcgttatcataatattcatccatctacaggtttagtattaaacctttcaatttaatttcaattcatttctaagaatctttccactgggatttctagggatgatgtcgacaaacttcacacctcctactaatttcttgtagtgagatactttgccgttcacccatctttgaatatcttcttcgttgatgctggcgttggctagtcgcacgacatatgccctagggacctctcctgctagagtatctgggactcccacgacggctgcatctgcaattccttctatttccattatgagattttctagttctgtgggcgatacttgatttcctttgacttttataagctctttacacctgtctacaatgtagaaatacccatcttcatcatagtagaccacatctcctgtatgcagccatccctccttgtcaacagtttcagcggtagcagcctcgttattcaaatagcccatcataatctgtggacctctgactaacagttctccagattcatgtgtgcctaaggtttttcctgacactaaacacaccactttggcttcagtactgggatacaacactcctatcgtgccaatttttgatggtggtgtcatttttggcatgataaaggtcaccggcgaactttcagtcattccataaccttgtttgatcattacatttggattatcaattttggccttgaatttttgcaagagtccttccgttaaaggcgccgctccagattgaataccttccacgctggctaaatggtctttggtgatggcaggatgcgacgccaggaactgaagtaacgaaggaacaacgaagaggaatgtaggacggtaattttccaatgctttagcgtagtcttccggagtaaacctcggaatagtaatcatgtgattgccggttctaagaactatgtttaaaattccgttaaatccgaagatgtggaagaagggcagtacagaaaggaccgtgtgacgtcctccagcttttgtttttctcgctattaagtcatctctgtctccttgtactaaattggccactaaattataatgggacaacattacacctttaggcaatcctgtggtcccgctggaatatggaagcagcgccaattccctagggtttattcctggcaattcgctttcgtgtccagctctaagtaaactttctaatccatttacattctttgatatatcgtcttctcccccaatacaaactgtagttctataacctgttaatgaaggtgctatcgttgtcgctacttctaataataatggtactgtgataatcatttttacgccagcgttctggaactgcctttttatttcatcaggtgtgtacaaaggattaacgaaagtcactactagtccggcctccatggctccatgacatactatcacaaattcaggtatatttggtaataacagtccaacaacctctcttggtttcattgcgcaatgagatagagccgcttgagcgaatctgttgacgagaaacctcaacatactgaaggtatagtttctgcccgataccgcacatgttgcagctatttcgtcgccccattcgtcacttttttcaaacacatactccactaaatttgagtttggtaccggctcactgtctcccaggggagacttgacaattccacttccgaggtttctcacaaactgcccaactctttcattacttcggactacgtttctctttctaggattattcaattggacactgtatgttctcttatttcctaaagagtttggaaggagtgcgatgattccgtttggcgagttttgtatcaaaaatgcgattctgtttctggcaagcatggcgatgtttcagtcttaaagataaccttacaaatgacagttgaaccagaaccgagtgaaatcgaagataaaagatgcaacaaccaacaacacaaataatacgtggtgttttctctgaaacagtctgttcacttttaaaataatataagttatagtctgtataattaattgtatcgtgtatacatacaaaacatcgcagagttaactttaaccaaagttcaaagtccaaatttctccgattcctaatctgaaaga

SEQ ID NO: 6473 - DNA, 2924 bp, Diabrotica virgifera
  SmartBlast Evalue=6E-22; Info=Endonuclease-reverse transcriptase n=1 Tax=Bombyx mori RepID=D5LB38_BOMMO
cataatcaattatacctaaaaaattaacttacatggtaaacactttcacttttgtacttagttggtccagtaggatgctatgttttaaattttgatttttgtggattatttcacacaattattactgaagattattattttaacaagcgacaaattgtattattattcaaaaattgaatatagaacatgcgtttggaatattttcagtcaactccttaagcttcccagaatttacatataaataaactaatcaaggaaaactgatttcaagcccggaagaacaaataaacatgtgggaagactatataaaagaactcttctttgacatcagagaacctcctacattaaataaagggaacaacgaaggtcctcacaataatgaagtccgaactggaatacatatgctctacatcaactgaaaagcaacaaatctgcaggaaaagatgaaataccagctgacctaccgaagttaatcaacgaggaaaacttgaaccttcaccttggcctattaaataatatttacagtacataatacacagtgataagcgcgctaataaccggaaaaataacgcaaaatgtggaaaatatattaagttgtgaaataaaacgagacgaaattgttagaggggggaaatttagcgataaaaacctataaatattcattatattgatagtttcccacctttagacgtatcggagaagtacgtgaaggtgggaaattatcaataatcaatttataggtctctatcgataattttcccacctctactagtttaatctcgttttatttcacagcgtattatgttttccatcttttgcgacattttgccggttattagcacgatcaaaactgtataaaagacgtgacgaggtcaccggtcgagaacaatttggctttaggaaatgcatagaaacacgagaagcaatattatgtcttcaaactttgacaccagaggtccaaagatcaaaaatcagaccttgttgtttgttttatagattttagaaaggcgttcgaccaggtgcagcacaggaccttaatagaaatattgaacgacatcggaatcgacaaaagagattctcaaattataaaatctatttattggaatcagacagcaatcataaagaccaatgttaacacgtcaaggccaattgaaatacaacgaagtgtcagacagggttgtgtgctatcatggatactgtttaacgtctactcggagataatatttgcgaacgctttatacccctttcaatatatgtgaagcaccaacagcttgaatatgtagaccaatacaaatatcttggctgccggttcaacaatcaacttgcctataaacaagaagtaagagcgagaatggaggtagagcgagaaagaggataggtcgacaaggctgtatcaaaatgaaaagcttattttgtaacagtcgcaataatatcagtcttagatgtcgttttctgcatggctatgtgtggtcaatactattgtatggaacggcggtctggacgctcaacataacgctgatgaacgagttagaagcctttgaaatctggcttcatagaaggatcttgaaaataccttgggaaacccacgccactaacgaaactgtcctgaggaaataggtacatatagggagctgttaaatatcatcaacgttagaaaagttagctacctaggacacataatgagaaactaaaagtaccgtctcgagcaactgatcattctggggtagattttaggaaaacggggtcccggtaggcgccagatttcatggcttaaaaatatcagactggacctgccttgattcaacatctttatttagagcgtcattggacagagacatatttgccagtgtagtcgctaacctccaatataggagacagcaccacaagaagaagttgacaatttagatgaagcaaccagttgaatactagacgacatcgtgcgatagttgaaattattgtcaactagaaattatttgaaatcaaggtattatttataatagattattattagaatattcagaaaatataatcggtgattattaaaacagagtcacaccaaatagagcgaccacagacaatatactcacactaagaatgattcaaggaaaaacttatgaatatgacatatgacctatataatacatcgactttgaacaagcttttgatattgtgaaaagaaacaatatcctgtaagatatttcaaacctgggtataccaacacatatatcagcctcacaaaaatacatttcagggatcaaaaattgcattaagagtataaggagaactgaagtctctatttgatatcaatgtgggagtgtgacaggaatatgcaatatcaaccatgcagttcaacctagattttgaggcgctcatcagaaaaccaatgtaactggttagaataaatgtgtggttagtggacgaaagcacacaagtcaatttttaaaaaacatttttaattaatataaacacctataaaaaatcatctactgctgaaatacaacagaaaaatcaattgttacataataatatattcatatacattataatatataagtgttccatatctaattatgacttttttcatcttaactttacttaatcaattttaactttaaaactcaaaaattgagcaaacaccaactaatggaagtgttcagagaaattgatactgaagcacaaaaccaagtacatgatagtcaaaagagcaccttgcaatgaaaataatatcgcaatagacaactataccatcgaacatgtggattcctttacatatttgtgcacaaaaaatcaatcaaaagaattccataagaagctaaattaatgcatgtttttcagtgggaatcttacataggtactatgctaataaaagatttatgacatcaaaattattagacaaacgaacccaaattactatttacagaaca

SEQ ID NO: 6474 - DNA, 2895 bp, Diabrotica virgifera
  SmartBlast Evalue=0; Info=Hepatocyte nuclear factor 4 n=2 Tax= Tribolium castaneum RepID=D6WSJ2_TRICA
taaatattttaagtgaggtagtgcagaaatcatgtatgtggactcagacatgacgatggcggcgtgcaataattcgctaacagctacgttaagtaacgttagcggaggcgtcaacgccatcagccaacagtgtgccatttgcggagacagagccaccggaaaacattacggcgccgcctcgtgtgacggttgcaaaggattcttcaggcggtccgtcagaaaaaatcatttatatacgtgtcgatttaatagaaattgtgtagtagataaggacaaaaggaatcaatgtagatattgtagactaagaaaatgttttaaggctggtatgaaaaaagaagctgtacagaatgaaagggaccgaataagttgtcgaaggcctagttacgaagaaaacactcaaaacaacgggttatcagtgggatcattattaaatgcagaaatgttatctaggcaagtaggagcagcattagagcaaatgggtccaaatccagtaaacgaatacgacatatcaggtagacaactggccagtataaacgacgtgtgtgaatcaatgaaacagcaacttttaatattagtggaatgggctaagtacatccctgccttcacggagttacagttggacgatcaggtggcccttcttcgagcacatgcaggtgaacaccttctattaggattagccaggaggtctatgcacctaaaagacgtgcttctactaggaaataattgtataataacaaaagaatgtccagctatgataccagatcctcgtaacgtatctccagatatgagcatctccagagtcgggaccaggatcatcgacgagctcgtcaagcccatgaacgacgtccagatcgacgacaccgagttcgcttgcctgaaagccatagtcttctttgatccaaatgctaaaggattgagcgaaccagccagaatcaaaactcttcggtatcaaatccaaatcaatcttgaagattacatcagcgatcgtcaatacgacagcagaggccgctttggagaactgttgctgactcttccacctctacaatcgataacgtggcagatgatcgaacaaatccagtttgcaaaactttttggagtggcacacatcgatagtttgttacaggaaatgcttcttggaggcgcaagcatcgacgccactccaccagcactggtggtcccgaacaacaatcacatcaacaacaacaacaatagctatcagagcaccagtgactcagctgacagtcccatcacttcgcctctagccacacccaacagcccacaggatcacttgatcaacagcaacgttgccagtccgtctggtccaccatctagcgtgctaggactacgcgagatggtgccgttggacgaagccgtgcactatccgatatcgttcaaagaagagccgctgaaagaagaacagcatagtttttaggttatggacttcttggaagtatattcgtagtttgttgtatactggaaatgttttgtttgtggagaattatgaactgtcttttcgagaagatatatacaatacacttacagttcgacagaaatatttgaaactgccaaagtcgaaaccgatcgaaaattttatattccccctattgcactctgacgcgtgatatgggtaccctatcaaccaaatgctcttcatgtgggagtcatttgtaatacaactccaacatggtaatctaaccgtttcaagattcaagctaggatgaggtgctctattcctgttaccttctggtgacttatccgcgaaactaaaattacttgcttgggtcccaagccactactctggactatgcccagttcagagacttagagctcatgtgtttgggctctacttgcccgggtatttagctttttgattttttttttggatggcttgcgccggtttttgttagtattttgtatatttttttgttgactgaagccgttttttgtggtttttcagtagatgtctctgaaaaaaaaatcatgattagtgggatatactcagtggttgcgcgtatctacgttgaacaaaaccactgacttcgtgcacaatgcattttaaaaggatgtttactctttgcaccaacgcgttcaactgaagtcccctctacttgattcactacctgagtggccttcgcagtttcagatattcctgtacagttgtatttatttttaaataagcgctgtacatttataatgaaaatggacagagctctagaatattttccatatatgcctaaagaaggtcttaaatatttgcgaacaatttccaagccaacacaaaacattttcaaaattatatagtacattaaaaatacccgtatgtggtatttttcacatatatgtataacgttaataatcatattgattgacaagtagttacctatttcttttgtgtatatattttaccttcactgttaagtttttggttagggttatttgtaaaaatggcgtaagtaatttgtcgcattcaggagacaaaaaagagacagagcggttccgcaactgttgggaattcgttctctgcgaacgtgctacttgcggaacgtgtttcggaacggcgccataacagtgagctctttttaatttcgctacctccgtccaacgtatgctacatttgtgaatttgtcaatacacttgttgaaagatggcgtcaagtactaattatcaattggaaaatggcccaggcggtaaacaatccatgatctttgaccatggttataaagtaaaaaacaatttattgtgcagagacaagtatataacctcacatataacagaaagtgatatactgtcacgactttagggagcgaagcgttcacataatttaactgtaacggctccatcgggaactgctccttcactttttttcctgaatgcgaccattggatataatgttac

SEQ ID NO: 6475 - DNA, 2918 bp, Diabrotica virgifera
  SmartBlast Evalue=1E-111; Info=Ubiquilin-1 n=2 Tax=Formicidae RepID=E2ASX1_9HYME
ccaatgcagtggaatacataatttgagaaatgagattttttagtaattttatacattcctaatgtgatatcttagaacagaccacactgtgtatgtgcttgttgaaatcattaaagtgatcaaatgtattttttgaaagtctatatgtaaacttctaagtcgtaactatgtattaacataaaaccatcaacactcttgaaaaacctgcatttaaaaaaaaataaaaatacgaaaaactatattgttcaaaaagtagtataaatataaaatataaatataaaaaaatcctggccaactttagatgtcttccaaaaattgcgtttaaacattttccaaaaccattaacaagaatgttaattaaaagactatttttatatattttggaaacatctgtcaaactaaaatgtcacaaattgtttttgtggttgtcaaaaatcactgatttttctctagtcagagcttttctagaatgttgattatgatagccttgatatgtcctttttaaatacctagttaattttacataaaaggtcattttataatagcaataaccttgtagaggtcaacaatatgttatatatacatacctagttaaaattttctaattctttagagtattttaaagagtacaaagacatgactttgttaaatctcagaatattatgctattcttcttatatattaagcagtttatccaattgtataaaaagtgaaccttattttgtttaaataataaaaaatacaaagccctataaccaatagcagcccaacaaatagggaatataaaacaaggcatctcaaggctactttttcattaaaccatctaattatattttaaaacaaggataaactattaaataaaacatgagagggaaaatatttttgggaatctattcttcacaaggttaactcatagagagctgccctagggcaagtaatcgctctacagcagcatttacatctccaaatgtggcaatcaatgcctgtaaattggcttctctattcataaaacccattgctctgagttgttctaattgattctggtatctctcttccggcggcgcttggttcatgctttgcatcatacgagcaaatatctctgcattaaatggtgaggaagtaccagttgtagttgtagctggtacattagtgcgtccactagatggagttgtagttgtggtagttccagtggtggtgctattaacagtgctggttgtattggtagtactattgttgctgttagtggttgttgctggtggtctaaatcctggtggaatattaagtgcattcaaaaaatttggtgctgtctgacgaagtagttccatgccctctcgaatctgattaaaggcatttacagcttcaggatttgtcggcatattaactaaatctggattttgtaataagttccccaagttccccaattgttctgctgatggtgaatttccagaaggaatgtacggatttctaggcagtatagagtctaaaaactcaggatcttctacaaacatattaaggaaagattgcatttcaggatcatctagattaccgccttccatgacagttgcaaggttgtgaaaaaaacttgccattgaaggtcctcccaatggatttgtatcattgttagcaggtgtggttctgttccccccaccaccagatgctggttgagatggtgaccatggattgggtaatggttctgtattttcacgaccttgttgaggattacttgttgatgtgttatccactaacccagtaaatggatttctaataaattgttctgtggtagctgataacattggttcctgaatatcacgatacattctttgtagagcattataacctcctgggatactttctaaattactaatagctctatcatgagttctcatcaattcctgtaacatagatggattcctagccaattccattgtttgtcttaaaaggtcggggttatttagcatatggctaatttctggatttctttccattaattcttgcatctgaggacttcttgtcattaaatttctcatgtgttctgggtcattaagaaatccttgcacaacaggattatctagaatattccgcaaagtttctggattttgaaggatttcattctgtatgctctgcatacttggaagtctattcatacgagtaaaatccgctaggccatctgtacctccaaaatttccaaggtttccaaggttcgcaaggtttccaagatttccaagatttccaaggtttccaagatttccaaggttcccaagatttcctaggttgccaaggtttggcatattgaatctggaaaaagccccatatggatctgcaggtggggtattagtattttccgttgtagtagcagtactggcaggcctttgagcacctcttattaccaaatgaattgtgaaaccatctttgatccccagctgagttaaagtttcattatctttcataatttttccagcaaaaattaggcacagctgactcgattctgcattaaacttgttttgtatcatttctttcaacttttgtattgtgcagttttcatcgacttgaaatgattctgtctccttgggggttttgataaatatcttcattttgggtttggaggtctgttcctccttatcggaaccttcctttggttctgcagcttttccactggcactatttaccggaacgttgtcagccatgttgttggatgactagtattttattcgtattacaatattattacaaatatacgttacgttactagctattattctactgcaacttcaaatatattcttagagctttataaataataaactgccaatgccctatttgctgacataattataaaaacttaagatgaaaaaattttatcggtacaactgttagcttctgttaacggtctaagaacacagcacaccgcacacccccgc

SEQ ID NO: 6476 - DNA, 2913 bp, Diabrotica virgifera
caatcgtatcccagcgagtaacggacgagacacgtattttacgagtgttatcgaatatcgttatcggtttgaaacgttttaagggtgtgagggtgaggagaagatagaagatgaaacagagggagatataatgtataggtaaaatatttaatgtatgtcgctaacaaagatcgaatgcgagaaccctatatttttatctcgatctatatctatacctatacaaaatacctacctactgagaaatacgattctcgatatgattaccggtactcaaatacaaaagtcatcatagtaatcaaagtaacgaatactgtaaatgattactttatacaaaagtaacgatttgtaacgaatactcgacagtaactataatcaacatcactaatagtcggaagaacgtggactatataattattaatattagaaggaaatgccgaagaccaagaagaagatctcgaacacgatggacagaccaaattaagactctggtgggaaaatcacaatatgaaagcgtccatctggcacaggatcgcagccattggatacagcaagctaacaatatttagagtatcaccacgccccgacaaaggctcaaggaatgaggaggagagggttttcatattgaaactaattgtaaaggtgcgtcaggatatgctccgaatgccgtatcgaacctcctcgcgaacttaaatgtggacggcaccctgcaacaacgtactgaacctcgtcgcgatcagggtgcaacatcgaactgttccactagtttccggtaaatccatccacatcaaagtaaagggtcgtcgaaaggttcagaacgaggtttgccgtaaattcacatgtggactagtttgcgaagcattcggcgtttcggtcattgttattttgaaattgagtgcatcaacatggaatgaatggatgagaattgtactactaatagaaaattatcgagaaaacgaaatattatgggaaccaaagagtcccagatattataacaaaataaaaaaaatcaatgcataagtatataagctgatgcagcaacgtccatcttgcagtaaaggtgttaaggcaattactgatggaacatcaaaatgttcggttcgttgcttatttcaagaccccttgcgacaacgtcgcgaacctctgttgatcgcttcgatgttcgcgacgaggttcgatacggcatggcattcggagcatgtgtggacgcacccttagtacaacgagttttatttctgtagaagttttttgacagtttacaaacggtgcgctctatgcttgtatgaaaattaacttttttcttatggttgtatggttatcaaatactattgactgtaaaacatccaactcccacaaaaatctggaagcacgttgccactagcgccactgtcggcttgagttgaactacgttttgacaacgtaaaatttgacgtaaacattcaaatttaattttataaatttttgaataacgagctaattttgctaaattaaattaaaataaaaatagttcaaacacttatacaaaaacaattataaagccattttataaatgtaaggttagattgctctggttatcctactcataccgctagatggcgctatttttttgcttcctcaaagttaatgggaaatgtcaagagttgtgtgtattacagtctatagtatttggtgatagtacggactatgtcataattataatttatgaggccaatcctcgccaatgaagaagtacttcgctgaatgaccggcaaaaggcgttaaaattctgtaaaatgtacaactgacaattatagttcagcgcaaatttaagtacatgcagcatagctgcatgctgcatgattcgcgaggttagtgtgtagagatccagacagcagctgtagattaaaagaaattattatcatgatgcgataggatgcgatggaaaagcttatgggtaaactatgagttaacaaaaatcctcaaatcgatacaagggtttgcaaaagatagttgtaatacgatctaagcaaatcgtacaatagggatgtagtatagtattaatacagtacgaaagtatttattttatattcggtttaaatttctaaaataaaataaaatgtcgcgttttagggttttctattatagaaactaccgtttctcaaatatcaataaattttattcaacggtcttccaatgactccatcccgttttctttggtgttcgtctgaaagtgttgcaaatgtctctgttatagccgcaatggcttcttgtttggacgacaagcactgataagaaaaactagacttaaattttaaaaaacagatgaaattctaagagaatcaaacctggaatttagatgggtcttccattacttcatagtgtagatcctcctaatccaagatattttgtggacagtttcattgtcctggcagaaaaggattagtgatcatctcatgatcttgaccttgtagaaaactctatattgttgaattccgatgaaagatgtgcgatatctgagcgattccaagagcttatcagactaccttagtaaatcatgtacagtaagcgccaccctactagatacatgggtaggtacctaattgctatgtttatgtgctagtccggtccgttctcaaatgtgactttcatccctgtcatgttactgtcaagaaactattcaaaataattgtttttccgtacaaaaaatacattaattaatagtattagtactctgctttaaaataactttattcaaacaccaagaatattacaatactttaaaacttttacaaaacaaaatgacaactataaacgtcaaaattagatcagctgatctattatttgtcaacttcatatgttaatattgtccttttcatgatcatttttcagtgcgtaacaaatgataggagaaagggtaagtccgcgataatacacatt

SEQ ID NO: 6477 - DNA, 2904 bp, Diabrotica virgifera
  SmartBlast Evalue=0; Info=Serine/threonine-protein kinase TAO1 n=4 Tax=Apocrita RepID=E2ANA7_9HYME
gaaaagtgaaatttatttttaagggtggggtttttgtattttctagtttttcaataccttttgtaatatatttctcatgtattttacatacacagttttaacggtattgggcaagatctaacgtaatatttacgccaaagtgtacaaagttattgacggatacatttgtataataacctaatgtgaggttaaaacatttatttgttagtgacagataggatgttttaaggattttatgtaaaagtttacaaggatagttttgaatcaattggtctgtgttatttataatacgtaataataaaacttttaacagaggaatacaatgaagaagtctttaccgaaaaagtgaagtgattttagtctattgaatttgggcagccattttattttcagtacaagatacttgagatgccagtatagctgtggaagttcaaaatatggcacccgtgcctcgcccgggtagcctgcgcgatcctgagattgccgatctgttttttaaacacgatccagagaagatttttgaagacttgagagaaattggccatggaagctttggggccgtttattatgcaagatgtcttcttactcgagagattgtggctgtcaagaagatgtcctatctcggcaaacaaagtctggaaaagtggcaggatattttaaaggaaataagatttttaaagcagttaaaccaccctaatacaattgaatataagggatgttatcttagagacaacacggcatggctggtaatggaatactgtctcggatctgcatctgatataatcgaagtgcacaagagaccactgaaagaagacgaaatatctgctatttgtgatggggttctccatggactcagttatttacatgagttaggaagaatacatcgtgatgtaaaagctggcaatatattactaactgaaaatggaacggtaaagttggcagattttggtagtgcgtccattaaatgtccagcgaattcctttgtaggtactccatattggatggcaccagaggtaatattagcgatggacgagggccaatatgatggcaaagtggatgtttggtctttaggtataacttgtatagaattagctgagagaaaaccaccgtattttaatatgaatgccatgtcagcactctaccatattgctcaaaatgagtcacctacattgacctctccagaatggtcagatgtttttaaacattttgttgaagcgtgtctacaaaaatccccaggacagcgtccaacttcatctaggttattaaatcaccaattctctactaggagtcggtcgtcaaatgttttaatagacttaattcaacgtactaaggctgcagttagggatttggataatttgaattataggaaaatgaaaaagattctcatggtagagaattgtgaaacagaaagtaccatagatgtagacgatactccagatgaacatactggcggtgatagttctaaaagcaattcagttacctccgaacaaagtgttcattccgtgggagtatctgccagtagtcaatccagtagtaccaatagtttaccagcaggtgtagaagatggtacgacgcgaagaaatcgacaacttaatcatccagctgctgcagctgtttcagatcatggtaccaataactttgctactattagaactaccagtatagttactaaacaacagaaagagcatatgcaggaggaaatgcatgaacagatgtctggatataaaagaatgcgtagggaacatcaaagtgccttgttaaaactggaagacaaatgtaagatggaaatggaggcgcataaaaaccaattagataaagagtacgagagcttgcttcaaaactttagtaaagaattagaaaaattacaaattaaacatcagcaagagcttgaaaggaagcataaatataatttggctggtgaaaagaagttgatgaaagatattagtagtcaacaggatatggacagaaaggcgttcgacgctcatagaaagaaagaatataaagcaaataaggaacgatggaaacgggagttgtcacaggacgattcgacaccaaaacgacagagggatgccacactacaaactcacaaagacaacttaaaagtagtagatgcactagaagaacagcggttgttgcgctgtcagaaggagtatctcgaactggaactacgaaaattcaggagaaaaaattgatgacctatcatcaattagaacaagaattattgagacaagaattaaacaaacgacaacaccagttagaacaggctcactctatgctgctacggcaccacgagaaaacgcaagagttggaatatcggcaacagaaagccgtacatgcgttaagagaagagcaggttaaaaatcaacatgatacagaattggctaaccaggcagaatatatgaagcgaactgaacgggaaatgaggaagaaacatgctctagaactgaaacagcaacctaagtctctaaagcaaaaggaaatgttggttcgaaaacagttcagagagacttgcaaggtacaaaccaagcaatataaagctttaaaagctcaaattcttttaaatactccaaaagaaatcaaaaggtagtaattaagaaactgaaggaggaacaaagaagaaaactggccctcttaggcgatcaatatgaacagagtatcgccgaaatgttacagaaacaatgcattaagttagatgaaagccaggaacttcaatgtcaacagatgaaggagaggttaagatatgaactggagattttgatagcataccagagtaaaaataaaatgcaagcgcaagcacagagagatagggaaaaaaatgagctacaggaaagagtggcggtgaggaagtctcttctcgaacaaaagatgactgccgaaaatcaaaggttcgttgatgaaaggggg

SEQ ID NO: 6478 - DNA, 2903 bp, Diabrotica virgifera
  SmartBlast Evalue=0; Info=E3 ubiquitin-protein ligase HUWE1 n=1 Tax=Harpegnathos saltator RepID=E2BHC6_9HYME
agtattcaaagagtaacagcgcatttataaaaggatggcttagttaattataagaataccaagatacttaaattaagaatacaaatatactttgaatatcaaatctgaatatctaattcagttatcacactcgaattgccatcaggccctttacaaaaatacatgtgccgttctatgaaatttacaaataaacttgtataaaactcaaaaactaatccactgactaactaaaattttgaagcgaatatattagaaaactaaaagtaactttttttacacctttcgaaatctgtacacttaacatagaatacgtttatttacagaaatctactctaggtgatatatatataaacagcaataacacatcagtcttaaacatcaaaggattatttaagcgaagccaaaaccctcggagcactcgtggatggccttcaacaagtatcctcttaacttgtcataagtctcataaaccggcagatccaattggttgaagcaagtatgtgctgatggtaatcggtcagttgacctatcatctctgtgaatctggaatttttgaactccattcattccttctaatgctccgaatccctgtaatggaacttttgaagttccagtgacgaactgaagaaatttggcgcgatcggcttgatcaaaagacctcaaagctctccagaaccattgaatctgcaatgaattcgtttggtatttgtgatattctgtattggctttcaaatcatctatatctacatttggtaatcctgaaattaacaactctaattcctgttcattaaatatggatattaagcgctttggtattatatcatagaaaccttctaaaaaggaatggagttgttgctttatagctcctgtcatcttcatttggcatactagtctaacatattccattttgttctcttcagtaacggggatgtgtcgcccatttggtattaaatctctagtctcagttactccaaattcactgatttcagtactgaatgtcagttccagacctatatttttcacatgattctccatgaggtatactaaacctctatagaaactatagtcttcgctttccatatctgtatattttactgggatgcccaaaatatgtttatagaacgatctagtaaagtaacactccagaagtttgttgtcatatatagctttagcaataactcttccaacgaatttgtagtagcacagatggttagtgttatagtggctcgatgaattaatcatataggttactctgtcaccaggggacacagtgaacaatgcataatttggattaaagatatctctggaaatgataacataccattcacgtaacagtccacctgcatcttgaccttcttcatcttcaaaaacgatgtagaacctgttcttccaatcttcagggttctttctgaacaattctcggaacgaatcttcaaagatatttcccctcttaacatggacagcagtttcttcccttcgtgttccatgatccagtctttcgagctcggttctgaagtaacgccttttaatatcaaaatctaaaattctggtgtgatcaaccagaaccgcaaaaggaccatcagccaagtgagcagtactttgtcttagaatctggttaagaactgtgcgatgtttatctgcaaatgtaaggaactgttgttgttcgggagtaatgctagcttttcctgatgtttcggaatatttatcccaatccaagagatttatttcactagcaggtctcgaaggctgctgttcttcttcagcaggagtaactgtagcttgtgcagcagcatctgaagtggatggaacactaccttgtgattcggttgattctccactgtgttcttccatttcagtctctttggcggtatctttctcttccgatttaatagggccttgttgtggagaatggactaagaaaaatgcttcaacagcaggctgtaaaacaagaacagcatgatgatctggagcatgctctaattcagaaagacactgacttaaagtttcccaaaaactcgttaaactatttaattgctcactaagtgctggtagttcgtatgtagcggtctcagctgattttaaattttccttaatagagttcctgatttgaacgatgactcttagcactcgcaggaaaaatacttgactagacgatttggaagttaagggaaccatagaaggtagctgcaattcacaagatgcttttactttagatgaggccgttattactacctgttcattagtgaacctattattaataattccctttgatgttgaggttccaggctcctcacgtttcctcttttgcgaattaggtagtatgatacctttaagatccttaagcatgaattggatttgagcttccacaatattaccaatttctatagcaccatttaagagaaggtttaatattatgaaactcatatccacggaagaattggctaggttaagtagtaaattagttataaactctaggccttcttctgaacagttcttgtaagttataacattaacagccagtcgtaacgcatgtgtaggcgggttgtttacagtgtcagttaactggacttttgctttactagttttagtaggtttgactaattcaggcattccagaagtggtaactgacaataacttcaacagattatcagtcagctgtgtattcttattaactactggtgatgataacatatttagtaactttccaaaaactgtgtgttcaaagtggatcggaccatcattatctataacagtagtatgaatagtgttcttttggatgctctttccctttttggtagctgaatctaaacgaagaagaatatcccagaattcaggaaatgattcaggtctaactcgaattggggttacacaagacttgtcactatcatctctgatcgatttaa

SEQ ID NO: 6479 - DNA, 2893 bp, Diabrotica virgifera
  SmartBlast Evalue=0; Info=Transmembrane GTPase Marf n=1 Tax= Camponotus floridanus RepID=E2AJ70_9HYME
tcctaggttcttagatttttcagaatataaaaacgtttaactgaataaaatgtaatatataataaggtataattacttaaatatataatgttaattctatcacaaaacattaggctacgtgtatagaggtatcgtcagaaaaaatcgatcaaataagataagataataatcagaaaccttaacaacttcggttagtaccagattcttttttaagtaaataaatttgttttgcagtttttgttaaggtttcttcaaaataaatatagataatttacattttttttctttcatattctcgctacactgagccatttaaataccaatatttaaagtcaaaaatctaatttggtaaatatcatttctagtgagtcatcctaagatacgctttatcgaaaagttctaattcatgggttaaatagtttgccttatttctcaatactttagccttactacctgcactttctaaacggtttaattcttgttctaattctactaattgtttgtccattacactggtggtatcgtctatgacttgacacaatcttgcgaaggtaccacttagttcttgttggacttgatgactgcaattggcggatgtcagatctataatcatccttaatttcttggaggcgtgctgcacatactgctttttaaaagatttttcttttgctttgtttgtccacgttaaacgctcgtacaggtagagacaaccgtacattgcaccagttatagcaagaattctccagcctatagtcttaaacaaaaatcctgctaccagtaggccgcccattgtgccctgcgaggaggctcccataatggctaacctcgagagcaacgaccactcgtctatgctggtgctggcgtagagcaatctaccgtcgacgacatctgtgggagttgaaggaatattggggctagtagggctctcccgtttgtttctcagtgctaggaaattggccccgctaccggcgtatttttgaataaggctggttaatccccacgaaaacctgaactctaaatcctcttgaaaatctgcacagagattatcgcagtttaatctgtacaatatttcgaaaggttgtcttcttggcagtacaacgctggacgccatcttatgactttccggtattaaagcttccattctctcagtcatttctttctgactagcttccatgttaagggccaacgcggtcgataatctagctctcagattcgaaccgagccccgtttcgacgtgaaggtgcagttcttttttgtagacgttgagcactaatggttctggatggaagggtaggttgaattcgtccactaacgtacttaatctgcgaatttcttcacttagtgcttttgactaccctttgttcaacatcttctaccatactgtgtatctttttcttcatttcttgagttactaccattagctgctgttccgtatagttaattttgtcatttaactctttacgttgacataatttatcttcttttaatttcaaagcatcggacaatataccttccaatatgtcccgtaattcgttcgttatatatttccctctttgcgaatgctgttcgaatttcgtctttaccgcagatttagaaatacactcttcgaatttcttttcgaagtcttcaaattcaaaatgtctggtttggaaaccttctggtagggatatcgaattggattttccttcggccatcctcacttgcaacatttccttcgcagaaatgaagaatattcgttcttcggcctctttgggagtgcacacttttagttctttgacgaggaaatcgactgctcgttcttgatgctgtttccggacctgatctaaaaattcgggctccgaagccgaggcatcccatcggttattcaggatgaaaatgttaggtttggatagcttggttgatactttgtggaagaagtttttctctgttaccatcaaagtggattccgcgttagctaccaaaacaaatacgtcagcatctaaacaatgtttgtcaatccattcgtccaaatttggagtgacgtccactccaggcgaatcgacaaacacgacatcatctcgaagtagaaggcacctgtttttcggccaataaaccttgaccagggatgattcgttaagtttttctttgcataatgcatgcgccagttgtcctacagattctacagcacaatgttcatctgaaccttctaaaactagatacggttcatctgaaggagctccctctacctgtaagaaacaattggtagtatgaccaatcccactaggtaaaatttatctccagcatagcattaattacagaactttttccatttgatgttctgccgaaaaaggcgactttcatgtgatcccgctgtaatacatctctgatactgtgtactttgctaacatactcttctgtattctttactttttcactattcactatcttttcatccttttcaatttcatgcatatactggacagtatcctcgacatactcctcgatctcgccaaatatatcattaatcttcttcttcgccttgacgaatatctgcaaaggagaattgtcaagtgggatacgttttcctcgttctgtcaaaacggccgtgacgggtggtctattgtgtggtccgtcaccaccagacatcacggatattgtgcgatttatataagcggccatatcatgcgtgctggtattgtgtacaacaaactaaagttcaaatacagtgagacacactcagcatgcactggcaatcattcgaagtaacgatttcagtagagccgactttctcagtttttccaaatagataaaaattaagggtaaaaataaacttggcagactttgccaaatttatgacattaagtaatcaaaatctctgttttcgattgtttgcagatgacactctagatctaat

SEQ ID NO: 6480 - DNA, 2885 bp, Diabrotica virgifera
  SmartBlast Evalue=0; Info=SWI/SNF-related matrix-associated actin-dependent regulator of chromatin subfamily A containing DEAD/H box 1 n=1 Tax=Harpegnathos saltator RepID=E2BM94_9HYME
ggctggataaggtttttggtatttttctgtagaggtagagtgcaattaatggaggtttaaagttttattaactaagtacctcttttaaaccagaagaacatgtctgatgaaggaggtcctaacgtaaaaagtcttcgtgattttcggtatcaaaagaaaccgctacttacacaagatggtctcagtctcagttcttctccatcatctgaatcgagaccccgaagtcgaattttgccagtctcgtcggattcagataccgaaactgaaacaacaaccaaaacaatacaccctgaaacagcaaccaaaacaactgaacctgcaaatatagcacaacctgcccctacaacaacaaccacaacaactgatcctgtgaatacggcagagcccccacaaaatgaaataatttctgaaatgaaatggagcgaagtggatacatcagtatccactgattcagtggccaattcaagtctagcccagaaaagtgatacagtatctaacgcagcacaacagtcagtgccacagccagtcactcctgtccaagttgctaataacagcattgttactatgaaattcaatggttcctatacaccgaggactacaaagaatccttcggttttagagaaggaaaagcaaatgaagtttttgttggaaatatttcccaatttagatgctatgaaaattcataactgtctttccaaacacagtttcaatacagatgcagctgctgcagaattgtcaaagttttacaacaaacctgttgaccatgcttacacagactggagacaggatcacgacaagaagatagaagaagccaagaaatatgaattggccaatacccaactgtttattagaaatgttcagcaaactcaacaaaaccaacaaattcaacaaactcaacaaactcaacaaaaccaacaaattcaacaaactcaaggtgttaaaagggaacaagaggaccagttaaaaaagaagaaagtaaaacgaaagaaaacttatgatagtgatgacagtactggaaatcaagagtataaagatgacaaagtgtttgatagcgacgaagattcagatgtagaaattagttatgaactgacaggtgataggaaaaaagtatttgactttttccagagcgctactctcaatgaattgcaattgattagcacttgttccaagaagaaagcagaagctattgtagatttacgaccgtttgctgactggaaagatctgataacgaaaatagagaacagcaagaacttgggtggagatttactcaattatggccaagaagtgattcacactcgaaataacgttaagcatttaatgaagaaatgtacaaatctggcacagcaattagagagagctgtggctgcaggggctggtgttaaggagcagcctagtatattatcctcgtctctaaaactcacgagttatcaaatggtaggcttgaattggttagcagtgttgtattctcaaggcgtcaacggcatcttggcggatgaaatggggttgggaaaaacggtacaaattatagcgttcctcgcccacttaaaagagactggagctgctaccagtactcacctggttatagtgccttcgtcaacactagataattggaaaaacgaatttgcaagatggtgtccacaattgcgagtatttatgtattacggaagccaagatgaacgacggcagttcagaattgacttatctaaagggatgctagccgagttcgatgtcatactcacgacgtatacgctggttggaaatagttcagaagagagaaaaatgttccgagtgacaaggatgcattatgtaatcttcgatgaagcacatatgttgaaaaatatgaatactcttcgatatgaaaatttaattaagataaacgctaaacataggatattgttaaccggcactccgttacaaaataatttattagaactaatgtcgctgttgatatttgtgatgccgaatatattcgctgaaaaaacggtggatttgaaaaacttattccaaaaaaattctaaaaaagcagaagacgactctctacctaccttcgaaaaggagcaaattgaacaagccaaaagaattatgaaacctttccttttgcgaagactgaaatgtgacgtccttcgggatcttcccaagaaaacggaccacgttatccacgtacctatgaccccaacacaaaaagagaactacgaacaattggtggcttcctacaagaacgttaacgcaaacggcgaaaattcgtataccggtatgagtattatgacagatctgagaaaattggccaatcatcctttactgatgaggttccattacgaccaagaaaagatggaggaaattgccaatttgttagctttagatccaggttataaggataccgtagtacaatatattgtggaagatttgatgttcatgtctgactttgaaatacacaccttagccatggaatttgagtgtttaagcagatttctactgccagatgagtacatgctagcctcgggtaagttcatacagctcgacaaaatgttggtagaactgaaggaaaacaatcatagagtattaatcttcagccagtatgttataatgttgaatatagtgcaagaatatttaaggattaggaattataagtatatgcggctagatggaagtacagccgtaagtattaggcaggacctcataaacgaattcaccgacgaccccagctacttcatcttcctcttatcgacccgagctggaggtctaggaatcaacctgacgtccgcggacacggtcatcatacacgatatcgacttcaatccgtacaatgacaaacaagcagaggacaggtgtcaccgaatgggtcaaagcaggccagttacagtgtacaggttaatttcgcaagggac

SEQ ID NO: 6481 - DNA, 2885 bp, Diabrotica virgifera
gtgtttccaaaatttgaatgaattttctatgaatcagaaagataaaagtatatttatcttgtataaatatataaacactatttgaaaaacaaatattttagaaattctcaagaaagaattccctgtagttggctgtataccattaatcacaaataaatttaatgaaaaatatctatataaaataaaataaatataccttttataaaggaattgttcattaaatttatttaaatattttagaaatttggaacaaatattttagaaataatatggaacaaaatattctacaaacaagagcagattttaaaaattcgaatcaagatgacttcgattctttcaagcaccagatacatattttatataacactgttttttacttaggaaacatttcgttgcatttctgatataagcaaaacctgagctgttttatgaacatgtgctcattgctagatgtagcttactgatccttttataagtctctaacataaaatagtaatttggtccttagactttcataacttcaaaactcataaaatatgtgcagccagaaaaaaaattaaaaacctgagcaatagaaaacagaaaaaaatgaaattgttttcttgtgacatgctagagttaaatatcatatttatatgggattaaaccacattttattttaatgagaattatattttacattggttcctgaagtttataaaaattataaaagtcgtttgaaaataatttccagattggaaatcaaaacatcaaaaaagatgtaaaatttgattctcattacaataaatttaacatagagaaaaatcaaaagctattgaaaaaaaattcaaaaatatattgcgcaggcacagatattcaattaacaaaagatgcatattaaatatttacattacatgattttgatacaaattatatagaaataaaaaattacctattaacaacttgaacaatatttgtattacaaactatgtcttttggttaatattgaaataacacaaatcagttaagctagataagccaaaaaatcaaatattagtaagcagacaaatattaccctcaacatagacattattatcattgttttcatatgggaaagcataagctaatcaattaagggtttgcaagaataacaatgaatttaaaataaaaaaaatttacaatactgtaataaaaataaaaaacccgtaatttttctcagtgattgtttttctcttggtaatgtataaataatgattttctttagatataaataatactttaacaacttgcttcacttttttattttaattaactccatcaactatcagcattattagaagctgcttcatttttttggactaatattttggaaaatagagcggaacctatttccaacactatctaacatagcattacatctaggacagaaattttcatgattagctgtatattttaacaaaacaaatcacaatttaataatatcaaatcttaaatgtgctggaaaattggttcactgttatgtgatttctttttcacaggttttacgtttacattttcgtaaaaaagtatggagtaaaaaagcatttaggaatcaagagttaccatcaatatcaaaatttctacatcttatcatataagaaggcacatattattcaggtaaataagggtttgaaaaatcaattataggtgtagagtatatactatagaatatagagtacctagtaaatttcgtttttataagtaatacaaaattattaaatgtttataaaaacgtacagtttaacttaatcatctatcgtatcaaaatattataactactttatgtatcaaaaagtaaagccagttatcattagatcaatgctttcagcctgtctaactgtttttctttatgtctaaaacttgcacattttttttttcagtaaaatgagacatttctgtttggtctattcacataaattagtccaaaataatgatcagtattatttctctttctcgaaaatgtcattatttatttttatcattatcaatacatatttttcttctgtacaaaacaaaacaagtacaaatggaatagaattcccttcaataatgacataatctacgagtattaatgttaccagcatatctgatctaagttgctcatttaaaattcatattagctaacccaatcctgttttccatatattttttataaaagggtggttctctgttgcttaacacgttcgctgcgggacttttgggcctgtgctggatgaagcatattatattatataggataagaactaacaaagagctcgaagaactttacacagacgccaacatcataaaataaataaagtccagaagactccaatagggaggacacctcagaagacattctgaccaaagaagagtgaggctggtgtgggggaagtcccaactgaaagaagacgtcctcgactccggtggtgagataatatagcaggagacctgaaagctatgggcgtggagaattggatagaggttgctcaagacagagaagagtgaaggcatgttgtcgagtcggctaaaacccatgaagggttgtaacgccacggagtaagtaagagtaatagaggcttctgaagtaaaagaatcttattaatgtgacataactagccacacttatttctctcgtccaatacaaaatatgtgtatggtcaatagtagttttgtataacaacatattaatgcatttttgccaaagtatggtcagtcatatattttctcaaaataggttaccagtctagtgtatgtcttacaattaaatgtgctagcaatactttggaaaaacctgtttatataccatgatgccaacatgagtgagacagttgaatattttacgaaatttagatcgaatcaaaaaactgaaaaacataggttcaaca

SEQ ID NO: 6482 - DNA, 2888 bp, Diabrotica virgifera
  SmartBlast Evalue=1E-114; Info=CCR4-NOT transcription complex subunit 4 n=1 Tax=Camponotus floridanus RepID=E2AHI7_9HYME
taattgtaaactgttatctcaacaatataaataatcgcattaaaacgtatagaacaacactaaacaaaagatcggtacttgaaattagattattttttgaaacagatttgtttaaaaaattaaaataaaagcgagacccatacgttcctcttctatcgacgtctctctcaacattcttgctgtttagtcgctgtattgttcctgaagcccggtggactggatatctgtgaatttatatcattgctaaaccaattcagattctgttgtgaatttatatgtgaaaaattattgaaatttggctgtagttgttgtgtgaaatttgagaatgcgttatttgtatactcgtacgaccgaagtggcggaaccccgccgttctgttgtatctgttgttgagtacctatttgtgataaatttgtataatctctaagatgaggcatatttgctaatggataatgacggctagacgataaaatcgctggatctaataccttccaatcgttacatgtgttgtttatatttttctgttgttgctgcatattggaattataattactaggccaattattttgtgttgaactatttatttgttgtggactattagacacatttagataaggtaaaattttactaccaaatgagttcatatgtgaagggttttgttgaacgaaaccaggtggtggcggaggcagatgcccattctgattgagatttaccccattaatttgactatgacctatactattatgtgatttttgattctgttctgtagccattaactctgcaaatgctttttgtgtctcttggaaaggatcaaatcctaaatcgtcttctgaagttcttgcgttttgtttaacattagatgtactattatataatgacccatgcaaatttccgaatcctccattttctccgtttgtgttatatattggtgtatttatgccgttctgataaaccgaattggaactaccatatccttgttttaaactaagttgtaaaagctgttcttctaattgtttttgttgtaataacattactctatctgaattgcccgctactccagagaaaaagcccggatgtacaccattaaatccattattatactgttgttgctgttgtcccgtactaatatctttattgtttttgtgaaattccatgaagaactttgacatattttgatctaggccattcatgccattgtgcgtatgacttggaggagcttgaggttgtggaggatttagtttatatggtgggtaagtagggggcgccttgacagagagcatgtccattaaattttcatctaacttcgaaggcatttcataaaatccattgttatatggttctactcctttactaaatcctgtactgtggtttactacgccaaatcctttcctaaacgaatctaacatatctttgtcttcccttttccctaaattagcctccgaatgtctagaaaatccaaacgccgccacccagtcttctgatgtgttgatatttggtagagtatctgtcaatatactagaaggatgcgcctcgccatctgtttctgtcgcgtgttcctgcgccgaactattggaaggtaatttttgaaacgaattcagcgaaaagaaactagtattatcgtccatcatgggcgtagttaatttcggaacagacagctgtgactctagtaacataggaggagatggagtttctgccggttcactgagaggcggagatgtgtttttatctttactgtcagtcctaaaaccactatcgaacttaacctcgctctttccgctactgtaagattccttcctctcgcccttcctactcccgctctcccccttacctttactcttctttcctttctccttgtctttcttttctttctccgtatttaaatgcggccagttctccttatttgtaccactactgttagatgttgtgctgctactactgctcacactactcgacagcgccgctgtcatattatctttagaagacgatttatatgttgaatttgttgtgggtatagggatagaaggtttagaattgtcacaagtgttggattggttgttgttgttggcggtgcggaggagtaggttttcgtggagtttcttttcgtattcctgatgttttccggcgtgcatctgttccttggtaaaactagcctctggatcaccaaaatcatgcagatacatacagtctggcttgggacaggtttggtttttcataaaatgcgaacaatatttcgtagttcctaaacttgattttatcactctactgtctatcgtaatattattgacactttgtatggcccttaaagcatcatcacttttcatataggttacataggcacttgcactgggcccttgcgagccagcgtacgaagtcgattgattgatcaccaccttatgtattttgccgaacttgccgaagtactcgtgctttttaagcacctcgggatccgccaacctcatcggtagtcccacaacgaacaccaggttgcgctgcactaccctcacgctggccaagtgctttcggctttcggtcaacttggccttgcgctgctggtcgcgctgacgcttctccgctttcaacttagcaatctgctcttgagataaaggaatgaagtcggcaggatcttccgaataagccttacggcaagctggacacaatccattttcatcagttctaatacgatgccagcaaaaacgacagatctgataaccacaggtacaagggaagaatgtaagatcatcaacctcaagtggttccatgcacagcggacactccacctgctcctcgccactctgatttaatactgacatcttaatagtttcagtagtgatcactctatagaagtcgaaaaacttcctttgcttaaatttccgaattagacagttacc

SEQ ID NO: 6483 - DNA, 2878 bp, Diabrotica virgifera
cataataagtaataatgcggtagatttcagtgatatgaaatttggcaatattgcaaaggtaaagacatcaattcacatcatatcaaatgacattaatgccaaacccataattaactattcacctgtaggaaaagttgacataagcaatattacagtatttacagcttcaacaggttcatttgttaacatgagcgtaataacaacatctagtgacatctatggtagagttaaagtatcaagtgatgatgcaatatttaatcttaattatgttactgttgaacctaatgtaaatactagttttatattggctataattaataatacaaataaagatacttataagatttgtgcaggaacaaataacatatgtgttagtcatagtgtttatagatctgagcctatcaatggcggtactgacgatcctgacagcaaccatgataatggtcaaggagaaaaagaaaaattcacagcattcttatcatacatgtatacaggaataattagttctatattatgtactttaatatttttattactagccataatagcaataatattttgctttaccttctttgaagttctaaagaaattctttggtatcatattactcctactaacatgcggtaaaataaattatacagatgcccaaataaataataggatgtattttccaaaagaagatttaaacattacatcttcgatcagggcaaacttgtttgagaaatgtgatttttcagatgaagtaggatataaattgttaggaatattatcagatatcaatccgtacttagttataagatattcagattatataaaagatgataaaacatgggaatcccaatttacagataataaaataagcctagcagcaggctcagggaaatatactggatactgtatgacgataaataaaaaataaatgcattcaacaagataggaaagcaaagtagactaactatatcaacagaagatgctttaaaatttaatatcgaattatttgatggatgtggatggactagtaatggattttctcattcttattccctagataattggtggaatgataaaaaatatagttacgacggtgtatatggtgatgatagagaaacttcattgcaagattacatattgcaattttttgattatgacaatatgatgcaaagattaacaagcttaggttcaaaagtatcaaactgcttcatatataagaatgatgcagcattagatatagtattagcagtatcagaaaaagaatggggaaaagataatttagatgtaatgtatgatacaaaatatttgttaattagtaaaagtccagtagggatagatttaaaagtttcaggaactaagaaagtcaaggtaaatggagaagatatacttgaagtaatcatagctattagaggaggcacaaaagatagtgtcataacagaaatagttaaaaatactataaagacgtctggagatgctacaataatacatagcagtccacctgatgtcggattacaattgagcaattttagaactgtatatagtatcagggctattgtgatatgtaagggaatatgcaaaataacggtctctgatgatctaatcaatgtacaagatgggggcaaagtattgaaagttgcaaataataaaggtctacttaagaatagaagaatatcaagtttgaaatcaaatgctactataatttataacaaacacataggttatacttatgaattaataggaaatagtaagcattatagatattctgctcatgatactttgaaattattagggaatttttactttggcaatttattaagggaaaatgaagatgggagaaggagtgaaaaaagctatagacagtcagagataaaaagcaaatattatgaaaagaaggatacattacaattattattaagagatagtaggtattcatcaatattgaaaagtggcatgctgatgaatttagtagcagatactttgataatagacaactctatctttaaagtgaaattaggaaataccataagagccgaatgtgataatacaaatgggacattgatactatgtaacacagaatttggttatgcattgctgaataatactaataaaaatatattactgatataaaaagatataatgaaattagtatggaactaaaattatttgtttcaacaaatagtaaaatcattatgctagacatagatgatagtgaggtgttaggttctttgtactggaatacagatggaggtttatcatgtgtaggtggtccatgcatagtaaagaccaatcaaacagggtcatggagaatatatgaggaaaataatgaactaataactgatatatttgatgacggtgacaagaagaaaaaaggatctagccatttgatcaaaatgctaacaaaaagagaaataaaacaaggaataataaaagaaagtgatggatgtaatagatgtggctttatgtgcatgatgtcttgtgccaagttaaagatgaccaattcttataattggtttttttggtctcctatttatagtatagccatattattaatcatatcactaatagtaactatactagatattatacttgtatctggattcaaaaatggaagtaaaagcttagttgtcggcagctataaaaaattgaaaaagtacggaacattattggggaaaggaggttataatattacatttagaagaaaaacaagaaacgttaattacccacaaaaggagggtacagaaaatagatctatatataggccgcttgtaaaattgaacaaatctaacaaatatgtataatgacgaaagggtgaggggtactttaagtgcccaacatatgatatcataataatttagcttatttccgatctggatttctgcaaacccaa

SEQ ID NO: 6484 - DNA, 2886 bp, Diabrotica virgifera
  SmartBlast Evalue=0; Info="Ubiquitin carboxyl-terminal hydrolase, putative n=1 Tax=Pediculus humanus corporis RepID= E0VXR2_PEDHC"
gctttctcctccatactttcgtctactttcatttcgttatttatcaccacttcctttatacttccgtttgcattatcttcacatttaacattctctagcatttccattggttctccttgtccatagatcgttacatctacgtgtcttgcgttatcggtacgcaactttgatggatccactacttccggtatgctatcttcactttctacgtgttccgagtattttattcgtaagtctggactctcggatcgctctggaggccttatcctgatctctggacctccgccgtaaatgttgtaaaagaagctccacaggctttctggtacgtccgcggcttctttgaggtccagctggtctagattaatttttgagttgtctataggcccaggaggatcctgggttcgtttatggacaaaattgtgccactgggtataccacgacgtcgaaagaaagtgagtgttgggagcatcttcggcttgagcttctcgactgacctgtaagaatgtttccatctcgtacaataacctcttctgcattgccgcacacgccggacacacggttaaatcagtaaaaggaggacatccgccgaatttactatgtaagaactggtaaacatctagaggaataagcatggctatcttgtggatgtcgatgtccctctcgggactgacggctccgtgttggcacaggaagtccgagttgtctatcggacctggttcggcacagaaataaaacctattaatccattgcttagaaatatacgtcctcttcataacctcattgacactcttctcggcagtattttctaaaatcttttcggcactttctctaataacttcggcactagtattgactttttggtaaaatagaacgtaggcttcgcacccttgtactttgtccgcagacactttggtaacatactggtcatcgaattcgtaccactggccacagtttaaggcgaaacaggtataatgtccaccaccggcagtgccgtggtggcatattactgaaaacaattcgtacgaagacaccttagaaacacagtccgtgtgaagatacggtcgcatttccaaaccttttaaaggaaaactaactacagaggaaattttgctactaaacatcagttcatgcctaaatcgttttagatgtatacatagaacttcaggtaattgtaaaactttactgaacttaataccattcctcaatttgttacacttttcgcaactgtacatattatcccctttcagctcgtcagtactaaaaaatgcagctaaacagtcatgtagtgttactgtcggaccgtaaaaccaactcctcagccacgccagtatccacgtcatccatccgtcttgtaccggcattaaagcctctgaacaggttgcacctgtactaattggttgtgcagatgtccttccatgtaacaccaccaagtgatctctcgatggaatgggaagtgagaggtcctggaatgtttctaccttgctagatatcctatcacatgttaaacattgaacggaggataataactttccgtcaaatatatcagaaataatcgaacggtactttggttgcttcttattcgggagatttgaattggaattcgatgttgttggttgagaatctatcacagtagtactttgcatcctttgcctctgccgcctattaggactaccacatcgactcaacctcctctttggctgactaggttgcctctcagtgtcatcactcaaactcgacctctcactaaccccagaatcgcacgtttcgtattctccttcgctggaatcataaccagcgggggatggtacgaaaggtactgaattgggttcctccatcgctaaactgaacgtgtcagcatcgggtgcagaaccgctggatgaggtcgaatgccagttggtgctgtttagatttgttggagaaggtagttccggcggggcgagctgtttcagttcttcgtggagttggtccatgaagtttcgaaggaattcttgggtgtcgtgttgttggtagccccgaaacattgcgtggacgttgcggatgccatacagaatacctgagggcgaaacataaccatggttaaccttcttaacccaaatatcacgcataagggcctgataagtcctactcagtcccggtttcttgccgtcgctcaacagatgtaccatttccgtgcagtccagaaaaaactttgtcaagggcgccgtattgctcaacgcctgcagagcggcgttcatgtaacacgtatttcctatattttgtaaacctacgagtccacaaggacgctccgaagcatagtcacgatattcctcttcgccgtcactggaatctgatacgtcaccgcccattcccactgtctggcctgctgccctatccaacattggtcctctttccggggtatttgtcctaagcgtgctataacttccatggcccgagtctctggatcttgcggtgaaagtgtcgacctcttgatcgctatcgtagttttgggaatccatgaacacctctcttttacaatcgtaacaccatattctccgcgtggagaggttcatatgaacacagtgagtgggattgtttgcattatgtatggtgctatgatcatttgatttttctgcacaacctatcctcaaacaattcttgtgcaagcatatccacaaatgaggaccacggcagtcacaatcggcacatattatctctctagaatttaacaaagtagaaattggaatgttctccgctacagccacatgactacacgaataaaccatttcccttaataaagagaagcttctgtttattcaaaattctaatttgttaattaaattagactgcagtttaacaaacaagtaaaatttatagatttttttattaaaatttcatgtttaattgttg

SEQ ID NO: 6485 - DNA, 2887 bp, Diabrotica virgifera
  SmartBlast Evalue=0; Info="Tpr repeat nuclear phosphoprotein, putative n=1 Tax=Pediculus humanus corporis RepID=E0VTP4_PEDHC"
ctcttttatccctagatgggccttcgttttctccaccgctttcagaactagacataatatcgcctttactccttcctttaccctttgctgcttttttctcggagggcatatcttggaatataattgcgttctttgttttttctttgtattcttgtcgtttttgcaccagttgttccttgttgagcctctggaactctgcgaatttcttttgttcttcgatttgtcgcattttgaatgctactcgctcctcttcttgttttcgtctgatcaatcgttcttcctcgtcaacgcgtctagctcttgcaacgtgatattgagcttgagataacagatctttacattgtctggcttctaattctgcaactgcaacgtcgtaccgttgtttgtcagctaattctacgagataattgaaatacttaagagataagcccagctcgtgcacagcctgcaatacagttgataaagtggacttttcgtcttttaaaattacggtagccaatctctgcaatacaagtgctatgttgtataaaagtatcgtgtcttggggagctactcgtcttgcttttaacaataccattttggcttctttgaattttcctgctttgaaataagcccgagcgagatactgcaggacttctacgttattgtatttgtagaattttctcaaacaattttcatacatttgaatcgcgcttacaaactgcttctgctcaacgtaaatatgagcaatattcaaccaaacatctgaaaaatctgctgtagcttctctaacttgggcaaaaatatctcgagcctcattaactgcgtttttatgagccagaacagctccaacgccgttagcagcgaaaatatttttagggtctattttaagtacttgtttgtataacattaacgctctatcctgatgcctttttatcctgtctttatctttggtgggctggtgaacggtttgcaaccatacgttgcctaatgctatcagtgagtaagcatcctgggacgttgatggattctttaagattctctcatatttcttctgtccggggccccattcctgtttcgccaaatgaagattaccaagtaaagaccatgcatcagggtgttcagtatctatcctaaaggcttctttaaaccaatcggaagcatcatacacgtgacccttgtctctagccatacaacctagtcgtaaataacaatcaacataaatgggatgttcctttaaaatatccttgtacaatttttctgctttatcgaagaggcacattgcttcattaagtcttgctagattataggtcatggtcactgaaacagaattgtagtattgtggatcgtgagcagcctctgtttttgctctatttatcgcttcttctatgttctttttagcctcgtccatattgttaagcctgtattgtaaagctccaacgttattcaaaatttctacaggtacctcagattgcacattctttttcaataactgcatggccatctcataggcactcaaagaagcctgcaaatcgctctgttctaaaatttgtgcaagttcaatccaagcttcaatatcatcaggaaactgatctgtaacctttttaaggtgaacttttgcaatatctcttttcgattgggacgaggagcttgcatataatgaacctaaaattttcatcgtttcatagtttcccggttgggcttttaatactttttcaaaacattgtgcagcattctcagtatcacctctgtaaatatacatctgacccagtccaaaatgcggaagaacaaaggaggcaggagaaaactgagttgcttggtagtaatactggaaagcttgatcataatctccttgaacttggaaagatctggccaactggtaacaactttctgctctcattgcttcattttctgtattgtgaaaagcatgaagtgccaagtgctgtactttgctgtaatctttcttgaaaaagaaatggttagccagatgatttagaaccataggatcagatggatctataccgtaagcttttgataacatctgtacacctgttttgatagattctggatgttgtaggtttaattttaatattgccaatcctaccaaagccccaacacattttggatcaagctccagggctctttcaaaagctagccttgccttctccaaattatttaatttaatgaaacagtgacccatacctaatctcactgcagctggacaatttggatttgtacgcagggctttcttataaaaagctaaagcagccctgtagtcctttctgttgtaagctatacatgctttacccaataaagatggaatgttattttgtgactgattcagtacaaaattaaactgtgcatcagcctgttccattttatctccttcgagaagacagaagtaggcccttcccaacaagtggttctggtcatacataataattttatctgctgttgtatacaaaagcgtagcctttgtaaaaagttctcttcttctatctttatttttttctttattagccttctgtacataatatgctgcaagcatatcaagagctcgcatttgatccttttcaaaatctctgtattcaatatttccatcattttttgagcagtcaagtattttaataaaatcatcgatttttccttgtttataatactccaaagcaagattgacccaaactgacaattgggtcttctcttgtcgtaaaatacccaggacctcatctccgtctggtagttggtccgaatataattcaatgacctcatctgtatcccgcaaagggatttcaattacgcttgccatttttctgtcaaaatgttattgtgaaaggtattacgacgactgcgacttctaataaactatcattctcaccttctcacaaatctctctgaccataaacatctc

SEQ ID NO: 6486 - DNA, 2882 bp, Diabrotica virgifera
  SmartBlast Evalue=0; Info=Beta-mannosidase n=1 Tax=Camponotus floridanus RepID=E2A2D8_9HYME
ctgctcgctatcttgcattgtagttctcattgaacgtgataaattgaacttcagtacattatttaaaacgaactaatcggcaacacaaaaaccatctgatctaacattacaaacacaatcaaaatgtttttgagcgtggtgtgttgtgtgctagcgttttctaatttgtgccagggtttagaaattctatcgttaaacggaaagtggatactgagcgacagcacaaaaaagtataatagcataaaggcgttagttcccggtggagtatacagtgatttaatgaacagtgaaataattggagatattcactatgggcttaacgaccgcgatttgaaatgggtgcctcgattaaactggacttacacgagaacgtttattttatcgcaaaatctcataaacaatgaaaatatacacttagtatttgacggtttggacactttttctactatatatctaaacggagctaaaattggtgagtccaaaaatatgtttgtccaatacatctttccagtaaaaaatcatcttcaagttggtaataacactcttacaataaacttcttatcaccgatagaagtttcttctagactagcaacagaacaggctaagaactacactgtaccaccagactgtcctgcaacagagtacaatggagaatgtcacgtcaatatggttagaaaaatgcaagcttcgtttgcttgggactggggcccatcgtttccatcagttgggatctggaaagatgtttatattcaagctttcagtgaatctgtgattcgatatgtggttagtgatgttagtgaacaagatcaggacaattggaacctcaacgtggatgtttacctagctactaatatgaaaaatatagtttctggtaaaatcttagtggaaatagcacttaatttcgttaattttgcaaaggtgatagatgttaacacaactgcaaacagtaatcaagaaattgttgctgctattaatataccagtaccaaaattttatgtgaacagttggtggcctaatggctatggagaaagcaagctgtatcttctaaaagttacttacgaaagcagtgattctaaagatatcagtatacaacaacaaaaaatcggtttcagaaaagtggagttggtgcaagataagttaaccaatggtctttctttctattttaaaataaacgatgtgccaatatttatgaaaggtagcaatgagataccggtggatattttaccagaaaagggtcagaatcaatcaaccatcaaacgactccttacagcagctcgggatgctaatatgaacatgatacgcgtttggggaggtggtgtttatgagtcggactatttctacagtcttgcagatgaactagggatactgatctggcaggattttatgtttgcgtgtggtatgtatcctgctacagatatatttttggacaatgttttgctagaagtaaagcaccaagtgaagaggttatatagccatccaagtatcattcttttttctggtaataacgagaacgaaggtgccttacgtcaaaattggtacaacacacttttaaattttactattttttatcaagattatgtaaaactgtatgttacaacaatcaaatcagaattcttaaaaataacacatgatagaggactctttataacttctagtcctaccaatggcaatgaatctgatgcagaaggttacgtcgctcaaaatccagctagttccctctatggagacatccacttttacaattacattttagatcccttcaatccaaatttttatcctacaccaagatttgcttcagaatatggatatcaatccttgcccagcattcaatcgtggttatcggttaccaataacctcagtgatattaacattaacagtgcatttatgaaccataggcaacatcatccgctaggaaatatacaactacagatgcttcttctttacaacttcaaggcaccatctacaaattcctcatattttgatgaagccttcatctattactctcaagtggtacaggcaatggctacaaaaatagagacggaacattatcgcatctaccgaagtaatttgaatgcagcaggtgaagggcatacaatgggcgccctttattggcagcttaacgatgtctgggtagctccatcctggtctggaatcgattacaagggaagaagaaagatgttacaatatcttgctggtaatttcttttccccagtaattgtcgttggccacattgatagcaaaagggatctaatgatttatatagtgtcagacctgttatccccaatagagaatgtcactgtatctataagagtcttcaactggaccagtttccagccaattgatactactttcataaacgttactttagaaaatggatcgtcttctttggtaaaaacaatccagactgataactatttgtcaactttaggctgtggtctgccaaacgtcgccagaaataattgtttcttttatctttctctcgcaaattatggagttgcaatagctcccgataattttgtactaccagctgctgtcaagtacataaatttgacctctgccgaagttagagtaacatcagtaaacaaactaagtgacaagggagagtttagaattgaaattaccagtgacaagtttgcactgtttgtttggatagactcgccagcagtaacagggatattctccgaaaatggattcctgataataaatactaaaacagaagtttattttaagaccgaggagccaactactgcggatgatttattgaaaactttaaccataactcatattttgaataaaaattacttttcggtgtgataatttatgcagtatttaaactaaatttagacagataaaaatatacatatttgcatttgtactagtta

SEQ ID NO: 6487 - DNA, 2876 bp, Diabrotica virgifera
  SmartBlast Evalue=0; Info="Coatomer, gamma-subunit n=1 Tax= Culex quinquefasciatus RepID=B0W2E2_CULQU"
tgtataattctaaatattgtctaggaagaatctaattcttcaaaattgaatcgtaagcttggaaaacgtaaggtgcgacttctacagatctagatttcaaactaagtgtagctgtggttaatcccggttgaagtttcagttcgagtaaaacccagatattgttcgtcagcttcagtgattggtataacatgtcttggccttccacattgcgtttggctatggtaaagatgttattcagtgtcattttgctagaaactccatctgtgtttcctttgacatcattaacagtgtattggacctcattagctgccggaatgtctctccaagtggtaaggaacaccctcttatccaaagtaccgtcttcggtgaacagaatctgaatgggaatttggcaggcgtaatagaagatatcgacgttgtttttgatggccacttggagagtggtgagtggatccatacgttggactggtccggtagtagccaacgctaaattgtattccaagctctgtccgggctggagcgcaggcacggtgagtggtgagccgggaactatgccgaagctgtttttgttgaattggatagcgaatgcagacatcgcctgcatggctttgttggtgaacgtcaaatccattgacatctgtccggctcttcttgaaaacgccccatgtatttccaatccttttcctttttcagccggtaaccatatagttttgggtggggtatacatggttggagcagttggtattccaaaaatgtcaccaagaagtcccgtagatgtaggaggtgcgggagtggtaccaatatccaacaaagaatccaatcctccacctaagagatctacattactggctggtacagctgcttgtgcggccgcaggagctggagcgttaagatccattgagagcaagtcaccgataagactctcttgattaggaataacggttggttctggagcgctactagtgtcttcagcagatccttgtctagctggcaaagacttgcggatacctgcagatcttccttcgacgaaggcagttgggggtttgtgataaacactggctagggaagatatatggcagatcagttcgtcaagaagtgtaggttctagtagatcagtttcttcagaaatcagaggtttgtctgcgagaactacttctttggctgctgcaggatcagtactcaacaacctccaatagataaaaccacggtctcttagatctgggttatcggaatcctgtgtagctaaacttagtacatgctgaactaagccttgcgtatgttgggggcgtttcaaaaacagtttgaccacagctgtcaataattgcaactgtacttgagcattttcatctccgaaaccttccaggaaactgtccaatagctcatcagcattgtcaattctttctgcatattctccaataatccataccatactggctctagcttcgggctcatcaagagtatccaaattttcgcaaagtgtactgataatactttcatacttattgggatattttctaaatatatccttgataacaacaatagcttcttgaacaacgtagttgacttttgtttgaataaggtccaaaagtgtagccacacatctttctgccgaaggttcaactttgatggcacatctaccaatagctctaactgccttcctgacgaaatctacatcaacttcagtagcatactcctttaattcactgaggacttgagcaatgttgacttgagatgctagacggatcattatgtccaacttttccaatttaacgtagattggatcgttgtatttgacgaaaaatactttcatctcatgtttaagtatgtcgggcttcttctgaacaattaagttgatattccttaatgccacgtactgcacttctggttcagaactaagcaacgttaccaatggaggagctagtttcttgcttaaagtattgcagaaatcagtatctccagctagaatctccatcattttgatcaaaactttaacagcagacaaaaccacagcagcattagcatgcgccaatctcggagtaatacgttcacaaatactttgggcctcgcgctcatcacgaggggtgtaatttgaaagtgaatcgaggatgaacacttggccccattcggtacattcgtttagagcggtaagaagtttattaatagtgtttgtactgagttcaactagaggttgaccagtaggactgctttcatttatctcggacaaagctgcgacagcgttagcaactaccatagggttggaatcactcaacaattcttttagctgttctaaaaagccttgatcctctaccaaacctgacgaaatgtcatataatttggcaacacaaacagctgctgtttttcttacataaggatcttcatcttttagacatttcctcagtggctcacaaagatattcagtgattttatctactctaatacaacccattgttctaacagcaagtgctcttattagaggattgggatcttcgcagtcctttacaaaagtatttactgccataatagccatgtcaggttgagatttagcatagttcattaaatataaataaactagctttttgagctccaaattatcagtctgcatgcagtttacgacatctggaaataaagctgaaacatctttgcctactgtcatagaagcaataacctttttaacagcttcttttttcttctcctttttatcattatttagctctgactttaattcaaatatttctccctttttggtagtagtaaaatattttgagtcggtcattgtaacggtttcttaataaaattatcccaataaaattgctgtaaaaatgagaaaatgagaatcaaatatttatcaaattcccgaaacgcctattatttttgac

SEQ ID NO: 6488 - DNA, 2866 bp, Diabrotica virgifera
  SmartBlast Evalue=1E-143; Info=Microsomal triglyceride transfer protein large subunit n=1 Tax=Camponotus floridanus RepID= E2A7J6_9HYME
atattgtaaattgtaagatatttatggagaatggtattaccaagaactagataaaattatcaaccgattagaggattgctgattgaatcattcattatcaataccggagaggtcaagggctacatcaagaaaactaaacacaagatagtggggataactctaattacttttcaacagatatttctaaacaaccaaaaatttaaccatttagaaatgtgaacagtgtttgtgcgtgtggacagttttcaaaaatgttcggtttcactaattcttattctattttgtacctactgtttactatttcgctgggactttgctatggatttgtgctactgtcctctgcagcgggcgattttaatgaaattaacgttttcgcaaaaggtgtttctttcaaatacaaactgcaaagtaccgtattattgaatgagaagggccttcgtggaaaaagtgtgggatttttcatcaatggagaacttacagtagactcggtctgggaaaatggagatcaaaagctgttacgaatggagttaatatctcctaaacttcatattcgctcgagaaaggctcctgctccagatggattcattcctcattcctccaaattggatactatcgaaaacaaaccatttttggtagattggaataaaggaaaaatcagtaaaatcttcctgtcaaaaagtgagccagtttcgataaaaacgttaaaaagggcatggcaagtctattccagtttcagcttctcgatggagacttaaccgaaatagattcttcgggaacatgcacaacatcttactcttcctcctcaccaaataaatttgcaaagattaaaactaactgcaaatctgatgacttaccatatacacataataaacataacatgttaggagtggaagtagaatcaagtcgaatgacagaatacgaattgggttcaaatgcttttgaaataaaatctataacgtcgaaagacagtcacatagcttatttggcagctagagaagaaatgggcaatcatattgaatcggagcaaaccataactttaacagatacaagtacatcgaaatccttggaagggatcaacattgaagaagttgttcaaaaaataggcaaaacctctggtattagctttcatcaagaaactttattgactgaaaaggaaccagcatctgaggagatcttaagttttagcaaaacaattgagaacctcaggaatcaattaaaaaatgagaatatcgggactctaaaacaggctaaagctcacatagaagcagttaatgctggaagattagcaaaaaaggaagacattttgaaagctctatcatcgaaaaagaataaaaacatactgtctcagctctatgatatcttaggttacgtacaaactcaagattcacacgaagctgtaatgaaaaccctccattttgataatgaaaatcaaatagattttagcgaacgatatctctgggccctgtcgttttcatcgcaacctaatccagatattattaaagatatcttgaaaaagtatacaaaaaccgttaacatcccagaaaaggttaaggaaacgatgatattgacaatagcgtcgatgactcataaattgaccaaagcctcaactaatgacaataggtttagtttagtccgcgatgtagaagaaacaatactcaacgagttagactacgccaaagatgaagacaaattcaaatactttagggctctaaagaatttaaaatcacaaacaacaattccaacactattaaaatatattaaaagtggaacccaaaaagaaggtgtccttgcttggaatgcaatcaaatcattcgattcgtctttttggaataaagaagttttaaaatcggcagataaatcgtttttccaactggacagaaagtatgactctagttctagaactatagcaggtgatatacttctagaatctcaaccaagcgacgaagtacttaaagacttgttaaatttcttaaccaccaatgatacagcttatgaagttaaacaatacatgtaccaaagaataagaatgatttcggaatctgacaaatcttttaaatctagagttgaacaaataattaaaagtaataaatacttgaataattattctgggttgtctccaagaggtttgtcaactgctttgagcagaaagtttttaacgcatccttcggttaatgggagtctggtgactttacaagaaatgaagtctggcattgctaaaaggggtactattgatatagttcttcaaaaaggagatatttctgatgaattattcagcttgggaatattctctggaggtcttagcagcttcatatctagcgacagtgaaggtgaagaaacggaagaagaaagtgctactgccggaattgaattgactgttttagatactcaaattagaccatttgtattctttagtggtcaaggtgaacttatgggacatgtttggtcgggtacagcttcagataaaactcctgccttccaggttcaagccctactgcatgaccatttagaatacatacgactaggatctgggtatattgctgcgattaactttaaagggtctacatcttttgacttatccggcaaaatagaaatatctctttggaatagaaatgcggaatcattggtacagaaatcagcaggagttattatactgggtacaagcactattgataccgtatttgtgaaatctaaagctgaatttacagcttcgatagagtacaggttggatctgcagaccgatattgatttctcctcaggtgctcaattgtgtatgagacttacacaaccagacaccttgtttaggcacaatattcataaagtggaaaggattccaggaagtaaacacaagatgaggatatctagatac

SEQ ID NO: 6489 - DNA, 2862 bp, Diabrotica virgifera
  SmartBlast Evalue=1E-72; Info=Cactus n=2 Tax=Tribolium castaneum RepID=D7EHY7_TRICA
gccctgcctcttggactattaaattaaataggatgagatagttcttgtgtcactcaattcttaaaattttgcgcgattctgaccgtttaaaaatggctatcctttcttttggaaagaataaccttttctttattatttacaacaaactattacatgacagattagctttcaaatgatattttacatgtaatatgttgccatttttccataaaagtttaatagccttaatactatcaacttattagtggtaagatctttcaaataaaattatcttacaaaatggtacctgtccgccattttagttctgtcattgaaatatcataaaaacaaagaacaacatcttggattagtccaataaactttgtaatatacattttatggttcaaaaaattaaaagagggagtatgacttgaaaatcacactgtggtatccataaaaagtatgtgtatttggaattatgttcttattatcatgttatggctcctattggtggttatttaaaatttcaaccaaagagacgcttagttctacaactatcaacatggtgtacgaaaccgctgaatcttaagattattgagtatcaataaatcagtggtttgaaacattataaaaataatggtgacaatgatatggctggatagcaatgcaaaaacagcatttgctggaaacagctatgcaactggattttctgaagttggtaaaatgttttaaaggatgaaaagggtttgctattgacttgaacagctttcattactagtttttacatggtattaaagaccacaataaactaggaatatacatactaggtgtacccgaaaagcaaattcttagatttcgagacaacttttcaattttcacatacattttacgtacaccatatatccagatggtataagagaacctattgtacgtcacagtaacataacagttaattgtatacttgaaatttataatgtgcgaccatctggatgaactacagtttctggtggcatgaaatagaactattaaacatccctaatgtatctgtatggtggtagataatcttttcaccgattttaggcgaatgttacagacaccattgcttatttccctatgtttaaagttactaaccgcccaaatatgtaatgcctattgtttgcactagataatttatatttattatattttccaatacaaatttagctacaattttatgatctccatgtgcaaaaaatacgctaaattataactacgttaattatgcaataaaaaggtataaaaataaggcaaaataatctgcaaaatataaaaacaaaaaattaacaatatcccgctaaatcaagagctgtaaaatcatttcaaatgacggtgtaacacccagtatgctaaataatgccatgaagatgtaaagatgtgtacaaatttcatcacagtatttttcttttttggcaattctacctctcctcttcttataatatgcctgtcaaggcgacctgaatcttgcagacttcttctttcctgcctcatttaatccctgggtcttttaatctaggcgctggcgttgaccatttgcgtgctgaagacgtgactgttttcatacaccatctcatcttcgctggtatcggagtcgtattcgtcctcactcgaatagggcgaaggtagacccttgtttattaaagcttgcctaattgtttctgacacgaagcgatggttgatttctaaagcatctttgccgccatagctcatcgtttctacgtcaatgttcttacaacttaagaggaattgaactacgtcttcgttgccggtttgaacggcgcagtgaagaggtgtgaatcccatacagccttctctagcgttgatattggcgccataccagatcaggtttctgagcacttcgagatgtccgtgcatagctgctacgtggacgcacgtttgacctaagaaattccattgatcaaaatcacaagtctcgtacaaatgtcctggatagctgagagccagctggtccctctcctgcacttgaacgggctcgataatagccctcacgctcctgctgtcattcttccgtgctgctacatgaaggggtgaatcaccttgaggccccctcggtgagggcgtcgcacctgccacgatgagccatctgacgatcctccattgtcctgtctcgacggcgaggtgcaggggagtttggttgtcgtcgttggcggtgtctaggagcttcggatggggtacggcacggatcagtgctacggccacttcgaggaatccttgggcgatcgccatgtgaagatgtgtgtctccttcttcatcttgctcgtagtagatcttccatggaatagcctcggcaggcttgacctgctttttggtaaaggaatcaacaggtgccgttggttttttcgtcggattgttcagatcgttcactccagactcgatttccttaatgcttatcttggaaaagctctccgtaaggcacacgccactgtccagaagcatgggttcaactttcttttcctcttcctcggtaaaagaagctgtggtgttgaggggtttgtcgacgtcttcgattaaacccgaatctaggatttcctcggatatttctcccgatatgaacccgctgtcagtcttggaggattcgtagtagatagcctttttgtcttcgctggctgatgaagcacttgtatctggaaaattttgttgcttagacatttttgtaagttcttgttcaatgtggttaaagggaaaactgattgtcactttataaacgttcgttacgacacgataatagggtaaaaaagcacttaaatagtcaaacacagggtaaaagtcggttaaaaagcattcgtattcgaaaagtagctcgataaatgaactttactctttcac

SEQ ID NO: 6490 - DNA, 2853 bp, Diabrotica virgifera
ggtattaatgacgcacgggtaaaggaccatggactttatgaagaaaccatagagtatacttggtttggacattaagaagtgaatagacaaactatctagggtttatgttgtaatatcgcacatattaatgtactctgtttagtgttcaattgtattataaatttttaataaataaaactgtcagtatcgagattggaatggaacatccagactaacttttttacttaattttgttgttaacaccagtgaaaagcggtctgggctactttattgtacagtactattcttaaggttttaaaaccattataaaatataaaaactctttctaaaagactatacgttctatagtttgcaactataagaaaaattgaactgaaaattcaaatattaccaaagattcatctacgatatatcggaaaactaaattttgtactgtgaactgatgaaatacagaagtggaactataagcgctttgtcacgattgttttgtaggcattattttcacagaaaagatatggcttatgcgcgagtttttaaaaaatatcatccttaagccttatttacctacttaaacggtgtaaggcattcgatgttttggagtagaagcctctccatatgccgcggttcttgaccatcgattccgcctgtctcgcgccttgccaatctcgctattccacgtccttgctgatctgcttcttcttcgttttttgtcttctactgcttgctacactcgcttcactgttctattatcatccatacggaccatatgatcgaaccacacaagttatcttttgtgaagtttggggttgttagacgaagacactaccccgaacaaacaaatttaaactttttacagaaactttattcttatataattaaatgtacaattacattacgttgaccttgagataggtcgggaacaacccatttctcggtaactatatcccctgactacgcgttagagagtgcaacgacaacaacgatgtctcaggtactcgaccttcctatttatatctgttatagttaaaaacagtgccaatatgtatgaccatatatggtgaagtactatacgtacattaagaatgacgtgtgctttctttgcagtctttcaactttgctactatcgtaataaattatacaaattgcaagtataatattatgaccttatttttataacaaataaattaggaaaattccgtgagggttgtcgtgtaccatcacacaatcactcacttcaacaggatttagaaaggtaagcgcaaaagtcattcttagccatcgtcccgcgtcggagctttcatctttgtacacagctgttagaacaatttgttgaatttttctataccatgcttgcaaaagatgaaatcgacagcctattacttgagccaaaggccaaacttgttctacagtcttatgtagaaccttttgtcaaaatcgacaacaatttcacaaatgtctaatgtaacgctattgttgttacagatttttttaacaatattaaataacttttaatatgtctcattacgtttgttgggtagtaacaaaaaaattaatgggatatagtggccgttataccgcaacattagtttgatgtcccatgtgcttaagttgccactgaaatccttaccgtgtgtgatctcgcattatgttgcattagcagaaaaccattaccaataaacccagcataatatgagatcatattatggtgttgtaggatatccgttttgtatcggtgtgctgttaatgtgtccctttcaatcaagacgagatccgtatgtgcttcaaaaaaatccccgtccaaaaccaccaccaaaagcaactcggtgtgactgagtgcaggcagcataacgttttcaagcacttctgtgggcctttcgaccatctttaccatacattgacattctacacttctgtagccaatacttttcccaatcgtctattgtccagttgacgtgttcgcgggcaaatgtaagtcttttgtgagcagcagtacgtaatggccccattgctgtattgcaagctatcaaaacctgttctgttctttgtcgaacagtaaaacgctgattactgcaccttggacttgctaaatatggctttggagcattttagcagtttgcatccggttttacaatgcagcaatagtgagaccgtgatcttctataactgttatctttctttttgcatacgtgccgggtcgccgttaatgaaactcggtctcaagagatagttggtaagttgtctgcacaattggacgactaacattcaatagtcttgccttgcgacatccctttggcttgttccattttccagcaatgtaacaatctgaacagatgatgatgatgaactcaaagacgatgatgataaacattttttttaattatatataatggtggtattttaaaaactaaactaagaacactaaaaaatataaacagtgtaaaagtgaggttaaagagttgattattccaataaccgcagaaaatttgttgcttacttttgacaattcaagaattgtctgttccgattgagtaatggttggtacaatataattctaaaataaaaccaaatttggcaatccaaaaaatcaattgtttatttgttggtgcaactggacatcaatctggagattattattttcagtttttaatgcccatataataagacagactttaatatttgaacatatggggccgattttgttttggtttacatgagaaaaatattaaaataacgcgtacagacaattcattacatataactacataaactgttttaattgtgcaaaaaaatgtactgaaaagagattgccttttctgctatgtgatatgtcagatgaaaactccagcatttcaa

SEQ ID NO: 6491 - DNA, 2860 bp, Diabrotica virgifera
  SmartBlast Evalue=0; Info=Zinc finger RNA-binding protein n=2 Tax=Formicidae RepID=E2BI21_9HYME
gaggagaggtgtcaggtgtcaaatccaagtcaatcaaacgtgattgcaaaaatggctacaaataattatttcggatttactcatggaggaacgcagtatacggctgctgccaccggtgctgcgtatcaggccgggcaagcagggtatgctgtagcaactcctgcgagtgccgctgctacgtatggaacaagggctactggctacgagacaacctaccaggctcaaccaactgcttatgccactgtgggtactccgggggccacttcctatgactatggttatggtcagacagctgccgcaggctatactactggatatgatcaaagtgctgctgtagctgcagcagcagctgccaagcctgctacatatgccacaacatacagcactcaaagaactacacaaccacaaactgtccaagtttcggctacctcctatgttcagccagtaacacagacaacagtagtagcagctcctcaagtgacgactcaaccgaaaaccacaatgtatgttccacaacatgctactccaaaaccagcaggaggttggcagaacttcagaaaggctggagtaggtgtgaagggcgtcagcagaactaaagcccctccgaaaccacagcaattgcattactgcgaagtgtgcaaaatcagctgtgctggtccacaaacatatcaggaacatttggaaggccaaaaacacaagaaacgagaagcagcctcaaaaatggcagcagctgtcacagtcacaagtcaaaacagatctggaaactcactcagatgtcaactatgtgatgtgacttgcacaggtaatgatgcatatgctgcccatatccgtggcgccaaacatcaaaaagtacttttgcttcacacaaaactgggcaagccgattcctccacaagaaccggaagttttaggcggtagtaagaagtcgatttcaggtgattcaaagatcaatttcgtggcagggggtggtctaggttccacaccacaaggtaatggagacgcttccaaagatgacgatgatgacactccggaagctgatgtgcagccggttggacaagattatattgaagagataaagagcgatgatggaaaggttatcagtttcaattgtaaattatgtgaatgcagattcagtgatccaaatgcaaaggaaatgcacatgaaaggtagacgacatcggttacaatataagaaaaaggtcgatcccaatctagtagtggatgtaaagccatcgctcagacaaaggaagatacaagaagaaaaaatgagaagagccgctatgcgtgaagagttttgggccagaagaaatgaagaaggatactgggataatagaagatatgacgatgagtatatgggcataggtcccttccacagaggaagaccctatcaaagtggtccattcttcgttggtatgcctcgcagaacagaatctagcgatgataaacacgtgatggctcgccatgctgaaatatatcctaaagaggacgaaattcaatctatcgaatccatagtttcgaacaccgaacgggctctgaagattgtatcagatcaaatagcagacgccaagaatcccgtcaagaagttggatccagctgcagcagccgctgcggcagccgcagccaaagctgaagcagaggccaaacagtcagatacaccgcagaaggaagacggacgtgataaccaactattcactttccaacaaggcgacaacaccagaattctcaagggcgtgatgcgcgtaggacatctctcaaagggactgattctccgcggcgaaatcaacgtccagctggtcgtcctctgcgccgacaaacctaccttaaccctcttaaagaaggtggtggaactgctgcctcccgctttgaaacagatcgctcctgaagaggcctacagagtggccatcaacgctcccgaagcaggtttgaacgtgaccggcaaggatggcaacgttttggtacagttcacgagtcctgtcatcagagaacagcaagaagctgcaagcggtgggttcgaccgggatgttctgtcacgcggcaagtgtctccaggcgctggcagccctcagacataccaaatggttccaggctagggctctgggtctacactcctgtgtgatcattataagaatcttgagagacttatgcgaaagagttcccacatgggccccgttaacatcatgggctatggaactactaacagaaaaagttatttcttcggtgcccggcatgtcgcatttgtctcctggagacgccctacgtcgagttatggaagccgttgccagcggtattcttctgcccggaggtgtagggttagctgatccctgtgagaaggactcaccagacgcctgtataaccttgacggcacaacaacgcgaagatctcacttgctctgctcaacatgctctgagattgattgcatttagacaaattcataaggttttgggagtggaacctataccaccacctaagaacatatataacaaagaaagatttgggcgtaaacgtcgtgctgaagaacaagaaggtgatggtggtaagcagttcaagaccgaggcagatatgaattctgtcaagtaagaaactaggaatctgattagtattttttttttatatattcagaatttaatgtaaacaaatagatagtttatattaatattgtacctataactactttcatattagaaattctgtgaaaaatctagtttgggaaagattaactggaattttttgtataaatgcatgatgaatatttaatttttcatttagatgaaattctattttgtcctcaatgagtttgttttgtaaggatacactgtaatttaatctgccttttacttggaattcattcaagcaaataaaaaat

SEQ ID NO: 6492 - DNA, 2848 bp, Diabrotica virgifera
  SmartBlast Evalue=7E-36; Info=Probable RNA-directed DNA polymerase from transposon X-element n=1 Tax=Drosophila melanogaster RepID=RTXE_DROME
catcctcaacggctcagaggtgcaaccaggatgatactaagggggggtgggttacaacaacttgatggtctctgggggtatggaatagtaatggtgttaaacgtatagagcccaaagtacatccaaatgggggggggagggttataaccccaaaaccgccccctagttacgcctatgcaacggctggctcggttattgtatctggtatattattggctgttggtagagaagcatacctactatccatgcagtttttctggtataatttcttttttacataatttcatcaaattcaccttttcctggttactaataggccgcagttgattgtaagctttaatttcattcacacaattttgtcgacctcttccgtgtacatttagtacaatgtaggactctgtgtgactgtagcgaaattttattatgtctggattgacatttccatatcgcaaagattttcagacgatttttaattgtgcgttttgagaggtctttaaggtccaagatatcagaaaaatgcagctgtttgacagggtggggattgtcggagcttttgtttctgttcgatctacccttttttagtatgttcatccactccataacagaactaacagacacatgccttttttccctttcaatgaccctatgcatgctgtcaacttctatgaaagaatcgccgaattctaggtatttctgctctatgatttcaatatgagtagtttgggtcaaatacagcagaagcgaagagatgtgctgattgcgattttgacccccacatgtgtctgaaaacaatgaaagctctgtaatattctttggaagtccattaatccactgcattaaagctgtatcaatttcattgttgcctcttttaccattcacctcagaccacagcatgcaatatgcttcatttggaaaccgtgactcataaacagtgaaattataaaggcagagtttacgacagtaatataacagatattcttcaccagtcggtatttgaagaacactctgtaagtcacttttcagatcggatctcatctttttctttagcaattgtggcctgcctttttctttctaagtgggcattgtatttttgttctaattcaggtattacagaatctatttgttttgcgtccctaaatttactacagagggtaccttgatcctttttcgacacgaaaaatgaaaaattgcagaaagaaaaatgaaaaaagaaattcagacagacttcatattcattgcttataagaaagtatgctctgctgcactttctctttttattatttgaaacatttgccaaaggtcttgccggttcttttgtttgaaccatttttaaaatgaaatctttctttcttttataattagaaagagaccagtactttttacaaatgctgatcctatccatttccgaaaaattttgactagatttaaatttacaagatcgacagtttactcgttgtggaacctttatacccttacacacttcgttgttttatagggcaaacagttaaacttattattcttctcaatattttttgaccatttagagggatcagcttttctacatcgggaaaaaactttctttagaggtgtattctcatcattattcccaacagaattatatatgtttaactattaaacttcaacaatcagttgttataacaatactaacaagtaacgtcaccaaggaatatttttttagaaaaataatatgtgttcactcactaactgcatatcaataactgagaaatagaagagtaaaatcaaacacagcagtggtttattattatggacaaataaatacttgggcacaaaattggagaattaaattgaatgaacaaaaatcaaaccatattgtttttacaaaatgtcacggtgaatcacctacagtaacaataaataataaggcaattccctcagttacctctgtaaaatatctgggcatgcacttggacaggggattaacctggagaacccatatatggaacaaacggaaacaactgggcataaaatttagtaagcattattggcttctagggcgtaagtctaagctcacgacaagaaataaactgctagtctacaacacaatattcaaatcagtatgggcatatggtctgcagctctggggaacagcatccaagtcgaatgtatccataattgagagattccagtccaaggtgttacgttcaataatcgatgctccgtggtttgttactaacagggatatttacaatgatctggaaacgaaaaccgtcagtgaagtgatagtggagttaagtgcaaaatacatcgtacgtcttgaaagccacgcgaatgtgcttgcaattaatttgttagacaacagtcaggaaacaaggcggttaaagagacagacaccattagatttaccgcatagacattaacattgttacagtagctaagttaatatatttatgtaatacagtaatttaatattatctctgtagagatgtgtgacgctggtcacaatctctcttcatgtcattatttctaagataaaatgtgcctattgttatatgttataacagattgcctaataaacatgtaaaaaaaaatgattatggaaaaagtcactaagtgccattaatgagttttaacgcatatctctacaatttattcgtatgtaaaaagttactaagtcaggtatttttggctacttaatattttctgtattaacgggttagtgatttttcaccacacagaaataatcatttagaaacacatttagcaagtagtgacttttataatagaaagatataatgaatttcattcgatcggtgaaattaatgagttttttcacaatgtcagttagtgacttttcgccgggatatga

SEQ ID NO: 6493 - DNA, 2847 bp, Diabrotica virgifera
  SmartBlast Evalue=4E-53; Info=Aquaporin AQPAe.a n=1 Tax= Camponotus floridanus RepID=E2AGV0_9HYME
gcaccgcaggcttattaacatcgtgcgtgagtgtaatttgttgtgatttactttttgagtgattaagagcaaattacttgggaggaaaatgggagaaaaagatatcaaaggtgcaccaaatgccgttaccatgttcgcctcggagttcattggcacgggtcttctgatgtttataggctgcatgggatgtgttcctgaatttgataatcctgcagcagttcatcacatggcatcgttaacgttcggattagtaatcctgcttatcattcagacatttggtcacatctcaggggctcacttaaaccccgcagtcacatttgcagcagttttcatgaagctcgtgtcgccaatgatgtccatagtatatattgcagctcaattcttaggtgctactctaggtttcgccttactcaaagtattattgcctactgacttttataaagatggattttgtatgacgctgccacatcccaaaattactgcaatgcaagctttagcaatagagacgattatttcaacaactttgatattaatagtttgtgcagtttgggataaaaggaacgaaaagaatacagattcaacacctttgaggtttgccttaattatcgctggaatttctatggctgcgggtcctttaactggtgctagtatgaatacagcaagaacctttgctccagcgttacttctaggaaatttcaaagatcagtgggtatactggattggtcctaacattggagcaattctaggctgtgggatatacaaagttttatttgctctaccagaagaagaggaaccacaaactagggatgaagttctaagccttcaagacgttaaaagtgaaaaatcataaggtacatatttatgatttcaagcaagaagtgtataaacattacatccaagttttggtaccatagtgagcagttacttgacaaatattctacagagtatgaaatgttccctgtaaaataatccgattaatataatttattgacacaaaatgattatttttaaacatataaaaagtagatcaaaaataactggactttttaagttgttaatttgtcataaaatgagattttttattattgatgttttttatattcgttatcacaaaataaaactgactgatgaatgtaatcgcaataataaccagttttgcggtaatagaataccttgctgtatcaattatctggtgaaagatcagatcttttattgaaggatcttgtttgttttgtctgatgttgctgacaatattactaacccagagataatgataaaccctaatttacaaccaatacgctgtattctcttataaattaagttattctaggctgttatcgaacatccaaaattaattgttttatcagtctttaagtaatgtacaaacaaaattcctctcgcatcccaaaaaactgatgtgcacgatccttcttggttcgcaccaggttcacaaccactctttctcctcttgttttgatttatgatcaaaaaccaagtctcattcatagtgatggatcgagaagcaaaatttactttatccttaagaacgctgagaaactcgtatttcaatgtgcttttgttccatcgttagcgaatacgacacccattgtgaacacagctttctgaaaccaaatccttcagtcaaaatattgcttaaactgctcaatgaaatgtatttgcttctactaaatctctcagtcactcgacgattttccaataccatattctgtattttttctatgatttctggtgttgttgttgtttttggacacccaagatatggcgctccatagctctctgagttacgcgaatcttgttcactacctttttttgtgagtgttaatgtttcagctccaaaagtgagtacaggtagcacacactgctcaaagattttccttttgagtcatatgggtaagtctgatttaaatacatagtttaatttaccaaacgctgcccaggctaggttaatcctatgcgacctgggggctcacatgtctggttatctctgcctaatcgaatttcatgtcccaattacttattagatgcggtctgctcaatattcatcaacaacaatattgcgatttagcaccagattagccatttccttttcacagtagatctattgtaagatatgcattttttatatattatgtaaatttaaatttttacaaatctgttaatgtgatgtagggaatacagttagtaaaataaactagaatacttagagatggtgttactgacgacaaataaaattgattcagtggagggtcccgtcaaaaaatcctgttattattgatccattctaatatagtaggttgttttgtataaataagttgagtatgcatttaattatgacaaaatgtcatattgacattttagactaaaaatataccagaaatatactaaattattttataattttgatttaatttagtttatacatatcattttaaactttagatattttatgtaaccaaagcaaaacaacatctaatgacacatccgataagatgtatgaatgagaatattttgaattttgtttaaattacaaatcatagttgatggattaacaagttgtttatatttttattcgtaataactaaatactgtaattgccttttaccatcttaggactctaaactgtcacctaaagagtacatgctaactttttttagtcaaatattgaacaaatgttttgcttttcaaagaactattgatatggataaatactttaccgatttaactatacatagtatctgtataattttattaaactggcaatacattttagctaaaagttactttctgttttattttatttttgttttattgtttaaattttgttaa

SEQ ID NO: 6494 - DNA, 2831 bp, Diabrotica virgifera
  SmartBlast Evalue=0; Info="neural precursor cell expressed, developmentally down-regulated 4 n=1 Tax=Nasonia vitripennis RepID=UPI0001A46D6C"
gatatcgattaatatataataatagacttgaattatttacaaagtatacagaataaaaacaacaacttacatatagctataaaatatataatatatgtataattcaatagactataaataaaacttaagttaccagtattggacagattttttaaggtaaaatgcaacattttagattaattatagatactaatcgacacctgcaaagccctgcgaaccttcgattgctttgattagcttatcctttaagtgtgtgtagctttcataaggaggaagatctagtcgattgaaacaggtatgagcacgtggataattatctggcgttccccatttttctatcgtaaacaactgcggtccattgctgccgtacaattctttaaaaccgttcattggtactcgagaagttccagtaacaaattgtaacaacctagctctcatttcattactaaatgataacacaaccctccaaaaccattggatcacaatatgatttgcatgataatctcctttgtacaatgtgttgactttccaatctttaacatcaatatgttgaataccgcacatcaataattccaattcgtgttcgtcgaagatttttataagatttaatggtattaaatcgctgaatccttctagaaaagcgttcatttgttcttgtactcgtcccacaaacctccattggattatgcatttaatataatcatctttgttggaattatctaaattaatgtcagctcctccttcgataagctcgtgtactgatgtatgaccaaatgattcttcatctacagaaaacgttaaatctaaatccgatggatcattctcctttatccataaaagagacttataatattcagaatcaaccgactccatatcttttagatcaatacttttcgttaacatcattttataaaaaggtcttataaagaacgcatctaataattttccatggtaaacggccatgcctgctactcgtcctataaatttaaaatagctgagatgatcttcgttgcaaagtcctgagaacggatttatttgtaaagtgtaattgtccattgcagaatattcaaagagaccataatacggattaaacatttcttttgataataggtagaaccattctctagctaagccgccataatctaatcctacttctccctcgaattccacccataattttgttttcagtaactctattctagatactgatgttattactcggtaagaatcttctaatatactcctccttcttattttaatctcaaatttatttggaacgttgtttggttttttaagttgagttttcatatattcatattttctcttataatctctggaataaggtatagcaggtcctgctatttgaggattagacaacctagggtcttcccattgcgtggtccttgtattatgatcaatgaagaatattcttccatcggaatgtactctttcctcccatccttcaggcaacggccctaaatcatcatctggccgcttagtgatgactggagctgccggttgattaggcatcggactagctcgtccagttctgggatctacccaagacgttgtccgttcattatgatcaataaagaaaagacggccatttggagcccgttgaatactccaacctgcgggcaaaccttctgacaaaccatcaagattattttgagagttgctagttgacgttgaaacagttgagtctcttctggacgaattatttgataaactgtcaggttgatcatcactctgatttacatcaccacgatcgtttgattcttcatcggcacttatgtgaaaacgacgttcaaatacttctctttgttcttcggtttctccactgtgaatatcctgattgctcaatgttggtctctcccactgagtagttcttgctatatgattgacataatacgttcgtccattggcatcttgtctttcttcccaaccagatggcaacggacttggctgcgagtctgtcgttggagtgatgtataagggctgcgctgcttcttcctctcttccttcgtggacgatctcccaatctcgttcatcgctgggttcttccggagcagctattggaggtagatttgaatcaaacaaaaacgcgtggtatagttccagatgacctctcacccttgaacgggcactgaaatcactcctcggttgcagcaaatacttgacaggtggtatatttctttctggttgttcttttggtaaatttagcaggggaagttcaaccatacccaaaaaatcatctctagttaaccgattttcatcaaaaacttgtaacaccaacttgtgttctcctggtttaaccctaaatataaattcctcattccactcaggactaagagtccttttctttgtttttgtaaggacagaatcgattgtctcatcaccattaacgctatttaaatcaattcttacatatggatcacttgctccaaaaatgtcctttttcataagatttttagcacaaatgactctaaggcgcaacttgcttgtaggttcttcactaatccataaagatctcctagggcctctagcccctaggtcgtaacttgggaccgacgttgatgcagctcggctgtttgcttcattgttcgaccaagtgttactgcgctgcctgctaatgtagcctgaggaactggcctgttcgttgttattttttcgactaggcattttcgactaagcatatttctattgtagcactgattaaccacaatttacattaaaatgaaactatttcactatgcatcactttcacttttcaaatcatgttttcttcgacaaaaatcaacgaccctggtgatgacgacacgtcacaaaaa

SEQ ID NO: 6495 - DNA, 2828 bp, Diabrotica virgifera
  SmartBlast Evalue=6E-80; Info=N-acetylmuramoyl-L-alanine amidase n=1 Tax=Camponotus floridanus RepID=E2A0U6_9HYME
acatattaatctctctattttacacctatacatcatataatggtaacatcatatatagcaagacttaacatcgcttccaataattttacagtgctaatctaaaagtatacaaacagagtacaaaaattatttgtttaatccaacgcaatcgttaaaattacaattaaaagacaataacatacaaacaatggattttatgtattttatacattttattcagtagtatatttctttaaatactaaagggataatagtttacctaaaggaataaatacaattcttaattttggaacacactttggatctaaaatttcttgttttatttttataaaaatgatcttacctaacaaattaaaacaaaattaaaactttaacagtaaaaataaggcagcaattaaaataaagttagaaactatggcaaaggcactgcttgtgcatcccacgctgtccaacgagatgatgtatttaatgttgttgggaaatcggcacgtggcatcagtacagcgatactgtgtagaatttccatatatagacaaataaataggagaacagtctctcgcgtagttgccacaatagtttgagaggtcgtatgacttgacactggactgtagagtttgacaatcgccatttaaacttgttggtctgtcgttgtcccgcgatatacagacagtgatgctaccagtacttggttcagtaattcttaaactccttccattgcttccagtggcaaagtaataaggagatattttatagtagttcgttccatacaagtctactgaatcggagtaacttgttgtgctggcactgcctacaaagcttgaaccacaggcaggattgacaattgctcgaggaattcttttaattgcatccacaacgttttgtccaatgttcttaagattatcatcgttagttgtacttgataaagatataaaatcttttgaaggattaaggagcatggaagaatagtcggtagatgatccttctccaagaacaagaagggagagatctggtagatactgctttataatttctttcctctgtttcacaaacgtttcttgatttccggttggtgcattctttgttatcaggagtatgatggttgactctccaccattgtaagtgttgttgttaagtttcgactttgcaacagactccagtttttcatatacttttgaatagtcaaatgatcttggcaaacgttgatgaacacttaaattataactgttatgaaattccaacaaatatgatgtactattagtgatattcgaagcatctgctccactaaatagtgaatatcttgaagcaaacttgttaacatcgatgttatccaaaatatacgataatataggttgaattgttctgtattcccaatttggatctataaaaattagtagatcagtacggacccgttctatcccagaatccaattgaggacattggagatcgacattcagtcgtggtagatatgatgcaaagttgttaaatgctgcttcggccagtgttggatatttttcaggaacaatatatccaggatattggcccttatcgtccattactgacataagattgttgatatttttttgtagagttttagaatcgaccaattcagaataaagaatatttctgttacatgccctaaaagatgtattaaaaactcctttttgttgaggagagtaatacatatctaggacttgcgaaattttaacgtcagtttttcctttgatgtcatttatttttagtgccatgtagagtccatctaatgatcctctaatgtcttgatcagtcaaatccaaattatcgttctgctggagaaaataatattttggatttgttgtgctattccagccacctgaaccgccaagctgaaaaggtggactcatttgaatcaacgctgcttggcataaatctcctgctaacgtagctgcatatctattgtccacgttgttaggatcaacttcttggttcaatccagcagccaatccctgaatcacttgtccagccttaaatggcccataatcgttgtagactacacctttttcaatcgggcatagactgggttctccagtagaaccgaacgattggcgggattgcttctcaattgtttctacatcttttctactagtagccctggttcttctcatttgataccgagcagacctaatacaagtctggtcttcatcacctctaattgttttattaattgaatttgagatcatgtagtgaaatgcgcacacgtcagccatagaaagatctccataagataatctgatttgtgaagtaggtagatattcgtcaaaaatgattgttcctttaagagcgtcttgtccagttggtgcataaggtaaagcaatatttatgttaactgctcttcgtgtttcttctatcccattttgtctaagcttttgtatcaataaagctgccaagttattgattcccatcgctgggttagcatcttctattcttcgtaatatttccaggaaaacattcaaagtggctggtggcctattattagcaatggtaatcccaggaatggcggattcattgtaacaaattgctaagacttcagacttgactgcgtttaactggcactgaataaccacaggaagagctagcagtactattatttcaacatttaatttcagacgcattttgaaatggtatggagtgtaacaacgttaaacactgtatcttattacaaattttataatacaaacatctcactgtataacaacttttactaaggtaaatgtaactgataatttctaatacacgtaagtattaatggtagaaactgtatatctatattcatgggactagttcagttatct

SEQ ID NO: 6496 - DNA, 2827 bp, Diabrotica virgifera
  SmartBlast Evalue=1E-113; Info="Succinate dehydrogenase [ubiquinone] iron-sulfur subunit, mitochondrial n=1 Tax= Camponotus floridanus RepID=E2AAP1_9HYME"
gagtgtctgtgtccgagaagaaaagtattttatttttttttaaagaaagtcaagtcattaagataaaatttgttaatgattgtctataaatctggcattcattgttgaccactttcttatttaaacattgtacaatgtctagagaaatgcagttattccgattatggaaagggaggttagcacaagttcgtcttattcacgttgccgcaacttcaaacgccgctgcagctgaagcaaaacgagccgagaagccagctagaccaaaaacgtttgccatttatcgttggaatccagacaaacctgacactaaaccttatatgcaagagtacacagttgatttgaattcttgtggacctatggttctagatgctctcattaaaattaaaaacgaggtagaccctactttaacctttagaagatcttgtcgtgaaggcatttgtggatcttgtgctatgaatatcggtggtgtaaataccttagcctgtatcagcaaaattgagacatccagtaagtccacaaagatttatccactgcctcatatgtatgtagtaaaagacttggtgcctgatatgaataacttctatcgacaatataaatcaattgaaccatggttgcaaagaagcgatgacagccaaaagaaaaacactgaatatttgcagagtgtagaagatagacagaagttggatggtttatatgaatgcattttatgtgcatgttgttctacttcttgtccaagttattggtggaatggtgataaatatttaggccctgctgttttaatgcaggcttaccgttggataattgattccagagatgaagcaacaaataaaagattggataaaatgagggatccattttcagcttatcgttgtcatactattatgaattgtactcgaacctgtcctaagggcttaaatccaggtagagctattgctgaaatcaagaagctcttgggaggtgtagctaagaaggatgcacctcaattaaatagcgcggcttaactatgcagtgtcaacatttgtactgatagaagtcttaattaaattttcaaaataccatatagaaaaagaacccgagaaacttaatattcactaatctaagcccctaaattagtatttccttatacaataagttaaaaaatatttattttcttttagtttaattgtttcgtctgtagcactataagattattaaataatttgtgttaattactacttaaattacaaagtttattgttactctagactctagacctaacaaattatatgttatcttaaaaaaatagtgtgttcactgcatgatactccacaaataagaatagttcagacagtaactttcttttaactatcgacacataagataacatttactccttggcaagttcattggtgccctaatcaatcacaatagggaacttgcacttttttgttttattatataatattgtttagtttcctttaaaaataagatttccaaaatttcacgcctcaaaatctcataataacttagaagtacaaatttaaaatcttctatgtatttaaatcatttcaaacgatctaaaaatcgcgcgaattcttgtgacgtcatatgatcatattttgtatgtcatttctaacgtctcatttaaattacatacaattttgtttactttggagttcaaaaacacagtttttgaagagatagtaatgaattgtgtgtatttttattatggaaaataaaagtaaatactatgaaagtgttgtttaataacattctgttaaattaaaaccattgaaactcccaataaaatatttattagattaccagcggataagaaacggagattaataaagtggttacaaaggacattaaagacatgttagttcattctcaaggtcttcatggatgcgaagctaatgctaatataggtgtctgttgttttaatgtaatatgtgttgtctgcttaatagtctttttttataaatcaagtatatatagatggaaaagataaaaataatatataatatcaattgtgtgaaaaattttcttccttttgaaaatatgtggcacctggacaacataaatatatttacaatgggtaaagttatcagactgccctttaggaaaaccctcttcggtcattttaaaaaattgtcttaacaaaaacactcaaatattatgaaatatatagttcacagcaactatctaaagatttataaactgaaatagaccataaaatgattacaataatcataaacaatattaaacaaaaacttaatgaattaacgacgctgaatttaaacattataataatacgacgtcgcgaccaatcaggtcgccttttgggctggccgctataatgtgaattgtctctcgatattaatcatctttaggggccaaatgaaagaaaaaaacaacttttttcctttggtatatattttaaattatggtctgttgggatttatagcattttgtcgaatttaaaattctatgtaagttccctattcatttaggattgatgagagattgtaaagatcaattatgtcaacaaagctaaaatcattgtgaaaaagtggttatttacatagctacataaatagctttttcttacatttgtcaaagaatagagttgaaagggacactacatagtcttaaaactaattatttcaagaagtattattcattgtcttgagtatttcaaactgaaacatcgtttcaggttgtgatgagtttacttaatattaaaatttacttttaaatttaaataatctgcataagcttgaacagtatttagatttcaagcaaacatattgtttattatcttgcttgatgtattttttcctgtgtt

SEQ ID NO: 6497 - DNA, 2818 bp, Diabrotica virgifera
  SmartBlast Evalue=1E-66; Info="Protein twisted gastrulation, putative n=1 Tax=Pediculus humanus corporis RepID=E0VZT4_PEDHC"
gcttgaccattcttcatcaacaatctctttaagttttcgcgtttcagtacaatcgaacagtgtcataacgggttctaaaacataagtgcatttggttatgttttagtaattgtgcgaccgatgtaggtaagcagtgggtaccttcaaggtacctccatctttaaaacaaagtaattcgccatgttaatccaatttgtaccgctagctttgctaacggcatccctgttcttgctaatagacacaggagaaagctgcaatgaggccgtttgtggtagtgtcgtcagcaaatgtttgctaacgaaatcctgcaactgcgacttgaagaactgtacgtgctgcaaagaatgtattaattgtctaagttatctctacagcgaatgctgttcttgtgttgatatatgccccaaaccaaacgatactgcgacggatttgagccgaaaatcgcacgtagaagaattcgatgaaggagtccctcaactattttccctcttaacagactttccggatacttacaaaagatgggattcgaagtcgtttccaatagacatggaactgaattattacgaacccaagaaggaaatcaaaatatcgatgttaagcgtggagcaagaagtggacccagcaaagcagaacaccataacggtcaattgtacagtcgctttttgggcgcagtgtatgagctggaggaagtgtaagactagttgccagtcgatgggcgcctctagctaccgatggttccacgatggatgttgtgaatgtgtgggtgaatactgtatcaagtacggtatcaacgaaagcagatgctctgaatgtcctcaaagcgaagaaagtaaacaggacagcgatgataacgaagacgactacgattacggcgagcacgatgaagatgacgaagacgatgattttcacaacagtccaaatctctgataattgtaagaatagtttaactttttaagctatatttattttcgtgttgtagccaacattgtgatttagaatatttaaacctattaatgccaggtattattctaaatgataatgatttatgttgaagataattctttaatatcaacaacgaatttattttttttgaagaaagtagtctttctcgtttttaatttttgttatcccagtgtattgaaaataactttactctaataattataattttattttactaactaatagagttagaaaatacgtacctatactaaaatcacaataggtatgcactacaaatagacaaaccaagacgggttgcatgtcatgaggagtactcccgtattgtgatttacaatgtataaactttgtaaatcatgattagggatttacaatgtgtatacattgcaaattatgatttgggaccgctcctcgtaacattcaacgtgtcttggtttgtttatttctagtacatctttactgttattgtagtataagttgtttttttataagataacactaacccgtataaacgaatgcagattaattattaaattaattaagaaaacaatgaggtatattgactttcaggttaatgttgtgtgcaacacttatttatattatgtacaataatatgatgtaactagttttagatgcctacatccctaaaatgtttatatgtactatgtttagatatgaggtgtattggctattatatttaactattgattttattactgctttaagacacattctgacattattgtgcatcactttcaaatattttatattcaagtgttactttgttatttgagtacagttatatgaattcttattgttttgcattttggtttctaaatgcttgaaattatatttccaggctacacattttttttaaatcaatgggtgtatattgttttcctaggaggaaataaccttcctccatttcagctcagcgtttgaggtagaggcttctattatgtcgttgttccgaagtctttcttttggcgagaccaatgttacaaaccttcaaattgttttccttaaattgcaaattgtatttcagctggacatgaagaatttaaatttgtaggcacagggcaaatttctagaagctaactaagaaagtctaatattcgattatctttcgctgtcacctatcacacaatgttcgacttttaaaacggctacatatttattattgaaatcattatcttcatcttccattgacatgctcggaacatcctctgtgtcgttttcctctagatggtacccgtttcttgtactatttcagctaccgtccgaagcaacaatttcgtctttctttccacttctctgttctgtcttggcagcacagaggtactaatactctttcctctttggaccatttgcatggtttcgattaggttcttatttgtacaaattgaactcaacgatgtaacactgtttctaattgagtcacgaacatcgggagaagattctctcaaatcttgaatattttggtttatttgagcctctttgatttgcaacatgtcccgttctgttttcaccaactgcagtttttgttaagtctcgatttagtcctttcggatgccttctatagtttttacaaaagcatacactttctttttcctctgcattcactttcatcatatctttgccaacttcttcactgtacaattttaacatcttctctttagaagaagcatggaccttaaacgcacctagcaaaaacgggaggttatcttttttttaattcttgttttagtaattttataagcccattattaaaatttaaaacaaaatatttattgggaataagccagaattttactataataatgttgacatttcaatttccacttcggaggtcgttctc

SEQ ID NO: 6498 - DNA, 2817 bp, Diabrotica virgifera
  SmartBlast Evalue=0; Info=Ubiquitin conjugation factor E4 A n=1 Tax=Camponotus floridanus RepID=E2AKX1_9HYME
tgttcaggtgcttctgccaaaacttcttcgttcgctttatattcacttgatttttccgcaaccttggctgcaacttctttcagttcccctatcaaaggcccgccgcctattctaaccaggacatcttccgctaacgagaagagactaggactatacgaacggccatcttgagaaacagctaggcaaaaagcggcgctttctttcaggttgacgtatatcttacatatttctagaaccgtatccgcaggatcgaagtgatattctttggcatccttcaccttaaagttctttttatttggtccaacaagattaagtaagaaataatttaacatagcagctatcctgtcgaccatcgtcgagtgggtaaaaactagattaattttagaagttaatttttcaagcatccctatggtatctttgcctaaaatattatcgaagcgagctagattgccgatgtgatgcatatatgaagtgttttgggttctttctctttcgttcatatttacccattcttcgctctcttgttgctgttgcatttccttcaacttcgccatattggctaaggcttcgtcaagtaagaaaatggcatcgttaattaataaatttgcgaattttaaaaataagggaggattaacagcttccatattcctctcggcatcttgagcgagttttctaatactttctaaatactctggtatctcccacaaatattcaaatacagcatacatgggtctacggtagttgaatttttgctcaaactctacactttgacctgtcatctctatttctacaaagacgttcatcaaattttctacaatctctcctttatgaggatgttccctaaacaaccgtagcctctgagtacttcctatattacttctttgagtgtcgtgtttgtggtaaggtaacatagattccaaagcctcagctaacctagctctaacgtggggattcttcatgtgtcgtctagaacccatgaatactaatacaaaggtaagaatagggcacaatttttcgtagctttgctcctcgaagtctttcggtgtaaatcttctcacaaatattaggaatgatacaatgttttcaactataaattctggaatgcattttaaagtatcaggtacattacaatctaatggaaatgtgactggcaattctttcaaaggggcgaaggcagttgattccggggtatgttggtgcattgaaacctggcataaccagtaagacgtagctgatattaaatcgaacattttgcttattacatcaggatccgagagggcgcattttaaggataaatactttgtgagctcatcgctcattctatctttgatagttcccacaaaatcagcattcccaccggcttgttgtacagcttcattaaagagtctttggattctacccatttcatgattttgtcgcattagtttatctactccaaccctatatcccaaatctaaagacttgtgagccatgaaaaaacactcggtaacaaaattgtaacttttggcagtcaatcgtttttcctccaaggtatcatcagaagatactggtaaaaagcaagtttctgtagacatatcagacatatgaatgcctttttcgactatatcttcattagtaacagcacaatacgtggggtcgacttttaaaattctttcatcattaatcttcgaacaaaatggttggcacaaacttaacaacaaattacttaaattcaacataaacccatctgttacgttcatatacatagctagatttatctgttgcacatgtgtgttccatagcttgcctctattggcatttcttttaagacaatttccgatccagagtgtcattttctctttaactttcggactacactttaacatagctagaacgaatttgtgcaagtttttgttttgttttgaaagatatatccaaaggtattcttccgttccgttgtttacaggctgatccactggatttgtaaagtgtacatactggccatctggggtcttaggtaaagcagagttgttcaaaatggcccctaacagagtttctgcaaaagctgaccctatagtattctctggagcacagcaatctataaaaacttcggctaatatttcattattaggtacaacatctaaatagttaaaaattgaagggttaacatcagttattgtcgaaggagccaattctgctattagtattttattgatagctctaacaaaagtagttattgaagttgtgctgttttcttctgcgtaaaccttgttaacagcattaagaaaaaatgtatctgctccaagttcagcatctctcaacaatcccaacatgtcagctgcaatatcttgtccagaataaacgtctggctgtataatggacgtcgccgtattttgcataattttatccttaatatcctcatattgctcagcagttaactcacttttgtgatcatttaaattttgtaaacaatggtataaatacttgacaacttttgtttcgtgaatactatcactgtcgctccgtaattccgagttttcattgcacaaaaataatctttcgaataaagcatattgtagtaaacttaaatctaaatcagttttttcgtgaactttgtaaacatcttctagaaacagaaagtctgagttagatttgttgggatctatagtaaatttgaaaatgccttctaaaacattgctgacattagaaatctttgtggaacttgtattgccgaacagagctgaaaaaggatttgaacctgacatagttgtttaacttcataaatattgcaaaaaacaagatttttgataaatcatttgattagttgtcatgttagtt

SEQ ID NO: 6499 - DNA, 2811 bp, Diabrotica virgifera
  SmartBlast Evalue=0; Info=Titin n=1 Tax=Harpegnathos saltator RepID=E2BUG0_9HYME
atgaaagatatattgttgatgaatcccagtcagttactctaggtgcaccaggtgcatctggaactgtgaatggatatttagctgtaactggttctgtgctttccaaaggttcactaataccatactggttttcagctctgattctaaaactgtatttcctatttggttctaagctcattacatcgtagtgagtattgcgtacgaaactgctgactttaacccaaataccattggtgtcaagtttttctacaatatagttggtgatcggcgaaccaccgtcatctgttggtggtctccatgcaagagaacagttatcaggtgtaacatctgaaatatcaagtggaccttgaggtggtaatggtctgtctactactaaaactctgcaagatgcagaatctgaaccttctgaattcgtcagtttaatagtataactacctgtgtctgatcgtttagctgatttatttacgaatacagaagtaatatctgtagtttccattttaattctggtgtcagctataacatcatctccattaatggaccaagatgctttgggtttaggtgtagcagtaaatggaactgtgatctttagttcttcgccagcaatgacaatcatgtctcgtatactcaaatctgaagtgatctttggtgcacttggagcagctctagcacatatggcgtcagaagcagaactccaaggtccttgtccggcagcatttaaggcagctactctaaattcgtattcatgattttcaattaagttaataactttaagagttgtatcaggtacttgagcgtggcaagctttcgtccatttatcttcagtaatcaatcgtttttcgactacatagcctgtaatgggtgaaccaccatcatgtctgggcttggcccaagtaatagtaatagaatcttcagtggtttcaatacctcttggtgctccaggtgctcctggaggatcaaatggatgtcttgctttaattggttctgaagttacagctggctcagattgtccgtattgattttcagcaataactctgaagtcataatctttaccaagtgtaagatttcgtattctaacaaatggaacagttacataactgctcaccttagaccatgtttgtgatttggcttctttcttttcaataatgtaattggtgatatcagcaccaccattatctttaggtggttgccaataaagtgtgagagcgtctccagcaaattcatcagctctaagattttcaggtttgccaggcctatctaatactttcacgtttattgtggcggtgtcgaaaccagatggattctttaattgcaatctatactgaccgctatctgatctcttcgaattcttaacaataatactagcgtaatcgtcggctaattgtgggaatactcttgtatcagattcatcaagaagtttatcattagcaaaccatgaagctgtaggtttagggaaaccaacgtatggtacatgaatactgaaatcttcaccagctctaacggtgatatcacgaacacctcccaggtccatgcgaggtttgttaggttgttcttccactttaatattgctgcttggtttactaggttcagatctacctacatcattaacagcaatgagtctgaattgatatgtttcaccttcgtttaagttaggaactgtatatacagtgtcattaactggagtggcatttacatctgtccatttatcagaatcaataggccgtttttgtacaacgtagccccttattttagatccaccatcatttcttggtggcctccaagatagtgtaacactatctttggtaatacggtcagctttaggtggttcaggagcatcaggtacaaatcgttgagtttgagcaatgattggttcagttggttcactaggttcaccaggacctgcttcgttgacagcaacaacacggaattcatatttgttgccttctcttaagtcttgtacagtatattgagtatttggtgtagggtaagtgttaactttgacccagtctccacctctttcgcgtttttcgacataatagccagtaataggctttccaccagtagatgttggaggattccacttaagggaacaagaggaggctgaataaccagtaacttgtggtctactgggtgctcctggaggatcgaatggactcttggcgatgactggtttaccttctaatggttctgacacaccgtatatattttcagcacgaaccctaaatacgtatttctttccttccgttaaacctcgagctgtaaatgaaggtcttggacagaatcctgggcatgggcgccagctgtcagttccatattcgcttacttcgacaatgtagccagttaaatcaccacctccatcgtcatcaggtggattccacgacagtgagattgtatcttgcgttgttgaagtatattgtagtggacctttaggcattccaggtttatctacaacaactacttgaatatctgcctcatctgtaccatattcgttagatgctttaatggtgtaagtaccagtatcatctctatttgatacttccacacgaagtctggtgtgttcactgttggtttcagtgtatactctgttggactctggtacagtaatcttgtttttgctccattcgcattttggtgccggtgctccagataatggaatattaatgttaataggctctccagcacggaccttgatcttgcgtccaatgataccatcaagccacaatttgggtttctctttcataggtttagccgtaaatgtattagaagcatcgcttggcttaccattaccagcagcattgactgcagatactctgt

SEQ ID NO: 6500 - DNA, 2804 bp, Diabrotica virgifera
  SmartBlast Evalue=0; Info=Eukaryotic peptide chain release factor subunit 1 n=23 Tax=Neoptera RepID=ERF1_DROME
ataagtcattatttattaatttaaaaacaaaaaaatgccaatggttacaaactaaaatagaatgaagaatttccaaacctgatttattacctcgttaacaaaaaaaagtaaataggtacaaaaaatattctgttctaaatatataaaaaccaatgaaaaaacaagccactgtagaaatactggtctttttcactattaattataaacacttgcaatatacatacataattttaacaattaaataataaatatcggtaaacattttttgagacaatataatttatacaaaacacatgatcactccgatattattgtaatattatttccaaatctacatttttattttatataatttatacaaactactaaaccgatctgtgtgtgatccgacacactgacaagtacatagctcgttttttcttctttaaatccctactgctccgagtaagctatgactctcagtcttgggaaccgttggtaatggcgctcctggtcacacacgtggacaaaaatggatgtgtaacttaggacagtatcacgggcgcccatataaaaatttttagggggagggcagacgtgaagatgttgcacattaccttaggtatgtatactttggataacgacatatagtttaaagcacccgaaaagccagggggccacgccccctaccctgcccatgggtatgagcgcccatggacagtatgtatacgaatcaagtatgaatgtaggctttcgcagccgttttgtaatggtacattgttttctgagcgtataggtcgtggtctggaattatctattgtcatcttcaactgtagtagacattatcaaatttggaatttcgtgtgaatttgtttgttgccgtaccaaacaatccggaaatttctatactttcagttggtgtaaagggttatcctaactatctttatctttgtgctttgtacattttactaacatagattaatcaataaataaaattaatcaataatacttattaatttaatgatatagttaaaacttttcatggaataaactttcaagtttgtgaaagcataaatttggaaataatattacaaaaaagcacatcatattatactcctttaggataaattagtatattgccatcatttactttttacacgtgtttattacataacgggcccacattgttttaaatgaaaatttctacaaatttgtctctacatttaataatcatctagatcaaattcttcgccgttatccatatcgtctagttgtaaactttggaagtctactttgtaccggagcaaacctccaattccaccaaaccctcgaacaaattgggagccctcttgagatttgtctgtaataatttctaaagtggcaccgaagttcttgtaattattcgccaaccattcaagaagaggttgacactcgaccaattccaattctacaccagtctctttatccgaaaaatgtgatttatctttttcttgttcaggagttaaatgcagtatagtttccgaacctgtagcatggtttttcaatacatatcgctgaatatctaaattctcccaacagattagtgtttctacagcacctaattccaagcccctaagagtatcttcaactccaaaacagtatttccccgtatcttggctaatttcatcgaaatatctgcctatcagtttcttttcttgaataaactttacattttgaagtgattcagctgctaattcgatggcttgattaaatccattctcaccaccatacgagacatctactagtttgattactttagcttgtaaccttggatcaaacatatcagattgactaagttcagtcttaaaatcggcactacccgccaagatgagtccagctatgttaggtttgtcatttgttataaataattgcgtagctacttctgctacttttcgaacatagttatgacgtttttccattctcagacgggcaaaacgaagtgcagactgacctcctctaccgtgtttcttgggtaaatctacagtaaacttgtgaagtacctcccttgtgtttccttgtagtgtaccgaataatgcaccattaccatccataactataaaaccaaatttattatcatctgccaataatgctgtcagggcttctgtatggaacttattgtcacataaatacaatgaggtattaattggtttgaatggttcaaagtctatgtttactttcttttcctttccttcatcagttacaatagttccacagtaaatgactaatccattaggagggaccttggtatatagttttaaacggtgctggactgatgtgatagcaccaagaactgaaagtctatttactcgagacttaatattagaggctgtaccaaattcatcagctaacattttgcttactctagatatttgatcttttggaggaattataagtgagatcatacttgttccattccctcttgctagttccaaactttttataagtttctttattttccatatctcaacatttctatcggcagatgtttcttctccagacattttgataaattaatagactaatttactgtatataaaatccaaaaacgtgttctcaaagcaaaatggcgtggtgtcagcctcttagctgatcaacaagaggatccaggaaagtcacttttcactagttattaactgaaaccaactggttttaactggatattcacggccttaactgtaaattcaggtaaagaacaatattctgtttaggtgatttggcatatccaattgataattcagttcagatatctgtcataaaaaacaaaaatttgaaaattgggattttat

SEQ ID NO: 6501 - DNA, 2803 bp, Diabrotica virgifera
  SmartBlast Evalue=0; Info=26S proteasome non-ATPase regulatory subunit 2 n=3 Tax=Aculeata RepID=E2BBF9_9HYME
gaatgcttggcatgactgtgcaaatagtcggtccattgtgcatgagtaaagtgattctaaccataacttcaaaacgctttagttttaaatatttgtgaacattaataacagaaacagttcattcaaaataatctataagaatgggcgatacaaaggtagaacctacaaaggtggataaaacaaaggggactgaggacaaaaacaaaaatgaactgtcggaagaagacaaacagcttcaagatgaattaaatttgtgtgttgagaaactccaggataacgatgaaaagagatacctacttgctttgcaagctttatcaaatcatattcaagcctcaactacttcgatgacttctgttcctaagccgttaaaatttatgaggccccattacgaaaccatgaagacagtacatgaaaaaattactgatcctgatactaaaaaagtctgtgcagatattatatctgttttagctatgacaatgggagaaggcagagaatgtttgaaataccgtcttctttctaatttggataaaattggcgaatggggacatgaatatgttaggcatttggcaggagagattgcaggagaatgggccgagactgattttatagtgaacactgaaattagggaaaaacttatcttactaacaaaacaaattgtgccatataatatggcacacaatgcagaagcagaagcatgtgacttgcttatggaaattgaaaggcttgatctactagaacagtatgttgatgaaaacatctaccatagagtgtgcttatatctcaccagctgtgtaccctatgtggcagatcctgagaatactactctactgcagactgctcttttactgtttagaaagtttgatcagtatccccaggcactgagattagcaatgcagttaaatgactttggattaattgaagaaatttttgtcaactgcccagattcggacgtacaaaaacaactggcatttatgctaggacgacaacagatatatgttgaaattcctgagcatacgcctgaatacgaagatctaatcgagataatggcaaactgtcatcttaataaccacttcttgaacctcgctcgcgagttggacattatggatcctaaaacccccgaagacgtttacaaatcccatttagaaaatagtcgtcctccatttggtggaaaccaagttgattcagccagacaaaacttagctgccagctttgttaacggttttgttaatgctgcttttggtcaagataagctcttaatggaagatgggaataaatggctttacaaaaacaaagaacatggaatgcttagtgctactgcttctttgggactaattcttttatgggatgtagacggtggtcttactcctatcgataaatacttgtactcttctgaagaccatatcaagtctggcgctttattagcttgtggcattgtaaactgcggtgtcaggaatgaatgtgatcccgcacttgcacttttaagtgattatgttcttcacaacacaaacataatgagaataggagctattgtaggtctaggtttagcgtatgttggttcaaatagggaagcagtattatctctaatcacgcctgtgctatctgaccctaaatcaaatatggaggtcattggaatggcggctctagcatgcggaatgatttctgcaggatctggtaactcacatgtgacaacatcaataatgcaagttcttatggaaaagtccgaaatagaattaaaggacacttacgccagatttttgcctctgggtcttggattgtgtcatttaggtaaacaagaaagcattgacacaattatagcagcattagaagttatacctgaccctttcagatccatggcgactactatggtcgatatttgcgcttatgcaggcacaggaaatgttttaaaagtacaacatttgttacatatatgttcagaacattacgatgctcctgaaactcctgacaaaacttcaaaggacaaagataaaaaagaagcagagaaagaaaaagataaggatctttcagctagacaagctattgcggttttgggtatagctttaattagcatgggagaagacattggtagcgagatggctttccggacatttggtcatttactaagatactgcgaaccagcgatcagacgtgctgttcccttagccctaggcttaatctcagtttcaaatccaaaattaagtattctcgatactttgagtaaattttcacatgatagcgatgctgaagtggctcataatgccatctttgcgatgggtctggtgggagctggtactaacaatgcaaggttagcagctatgctaagacagttagcacagtaccatgccaaagatcccaataatttatttatggttcgcatcgcccagggtctcactcatcttggcaaaggaactttaactctcagtccattccacagtgataggcagctgatgagtccagtagctgtagctggtctaatggcgacactcatcggcttcttggatgttaaaaacattatattggggaagtcacactacttactgtacaccttagcagctgcaatgcaaccaaggatgttagtcacatttgacgatgagctaaatcctctaccagtgcctgtcagagttggattggcagtggatgttgttggccaagcaggaaaaccaaagactataacaggtttccaaacccataccactcctgtgcttctggcttatggtgagcgcgctgagctcgcaactgaagaatacattgcattgacgccaattatggaaggatttgttattttacgaaaaaatcctgaatttaa

SEQ ID NO: 6502 - DNA, 2800 bp, Diabrotica virgifera
  SmartBlast Evalue=0; Info=Eukaryotic translation initiation factor 3 subunit C n=3 Tax=Aculeata RepID=E2AJV3_9HYME
ataggcaaccgtaacaaagccataaaaagaaatacaaaagatctatgtttattaataattatcttttcctttctatccctgtctcgacgttgcctatcccagttttggttatttccgcggtagttctgcctatctcctcggaaattgccctggtttgctccccttaggaagaagtttccttgtttggattccaatattctttcgttggaatcgacgaaattgttgattttatccgccagttgcaaagccaaagattgtagacgggatggttcgcttctgtgcattacaacagtttgagtcgggtcgtctaaagatgccatcaattcttcgttaatgatcatcttagaaataatagaatgcacgacgggtttgcccaactggaacatttccgccaaagtggccatcgaaattgaatcgtaaacgtgggagtaggtaaacaaatacgtcctcaaagactcttcttttatcaatttcgtcaacatggatctaacttggtcggcttggtaaaacagatcccacactttggcattcatcttgtcgttaatgataaaagtgttgcatgccgcccaattgccgttcctcattgctttagccgccgcgacgacgtgctctcgcatgctttccggaggtcccactaagctttgacgttcggaagaacgcaactgctgatagaaggtcttagaaatcatcctgcgtctggcgtcgaattcatgcgcagccatatacgggatttcgatcaacatggcggagactaaatacacacattctaagagttcgagattgatgtgcatgtggaagggcatttgacgctgtttctcgattttctcctgttctttgctgcgttcgtgttgtctttgtggaagcaaaccttgtgccagtaactcctttggttttccagtcatcatcaaatcaactaaacagttatgggcatccttaatgttagcgtgtctaaatgcacacaatcccaaatgcgccattgtccggttatacaaaatttgtgtgctgggatcagaatgctgaatcgtttcttgtagatgtgacatcaataccaaatcccttgcttggaaccagttgtcatgcagagcgtgatgatatatatgggacaaaatagctctagttctcaatctgtcagtactatcttttgcgtagataaatttgcatagtttctccatttcttgcacggagttcatctcgtctttgggtactacgagaggatcagctttttgctgtaatactctaggatcgaatttgtaatacaaatgctcgatttttcgtaaatatatcctacatagttcggaagatacgttactcctttccaagtatttcattgttttatcgatgatactagaaaccttacattcatcctttaaccgttctacatactcgttactgtgaggatcacactctttgagtagtttagtaaactcgtcatccagtctttccactgatgttagtatacagcccctaatgcgatacgggggttcttcaagattttccatttcttcagtaattccatcagaaactactagattggtagtattcaacaacatgcccaacatttcgctcatcctctccaacaatttcagccaatactccggcttcattgcgtcagaaactttggggttgtaatcgaaaatggcagatatgatggcgagtttaattttaatgaaaatagccgctcccaattggtgttgctcagaaacattttggagttcgtgcaggagttctatttgttcgcgtctatctgtgcgctttttgcctctagctgccatgatttcgctgagtttcttgattacaaggtttagatcgatttcggcgtccttggcgaacattttaggtttttcactagggatggcgaaacctcgattaacagtctcccacttgccttcaccatcctcctcctcatcctttttcaacttcctacctttctcctttctctccttccttttctcctcctttctcctttccctttcttcatcttcttcgtgagcgggcccagttctcttcaagaaacgctcccttatgctctggtatttgccttcgtcgtcatcagatgatgacagactagattcagagtcagatggccagtcatccgagtctgacgattcatctttgtcgtctacaacttgtttgggtggagctttgagaaacgcgtttttggatggagcttcgttctcggaatcctcagctacttcaggcttttcctcctcttcctcatcatcaggctgttctgggttttccttaaatttagccaagtcatcttcaaaatctttcaaatattttctcaacttctgtctcatagatgtgagtgatttgctattgtttttgctcatgtttttcctcccatctctatcttcccacatttcattaataaagtcttccatttcggccaaacacctaataaaaaatcttggagtctggccattttcttctttgacaataacaggagcagctttttggtatgccttttgtaattcctcaaaactattcaacatgctagacatatccttaattttcttaaaatttctgatttgtttaatagtatttgtaagttcttcatagcgcttttctttcgctgatcttactacacgttttacctcctcctcatcgtcactgaaagtataagctggtacttggggacgttggataatctcttcttcggatgagctatccgaatctgaatcggatccagcgaaaaatctactcatttttactgttttcccttattataataacactaaataaacttttctcgaattttggaaaatacctcacatatgcaacgtgagttaaaagagcg

SEQ ID NO: 6503 - DNA, 2790 bp, Diabrotica virgifera
  SmartBlast Evalue=0; Info="Coatomer subunit gamma-2, putative n= 1 Tax=Pediculus humanus corporis RepID=E0VLD3_PEDHC"
ttattttggtcgtcggctgatgtgacgtgtaaagaaattaaatcaaattattttaaagtttttaaattaaaatgggtacttttaaaagagatactcatgatgaggacgggggatcaagtgcttttcaaaatctggagaaaactactgttttgcaggaagctagagtttttaatgaaactagtgtaaatccaagaaaatgtacaccgatactaacaaaactgttgtacttattgaaccagggtgaaactttaagtgccaaagaggccacagatgttttctttgccatgaccaaactgttccaatcaaaagatgtaatattgagaaggatggtttatttgggaattaaagaactcagttctgttgctgatgatgtcattattgtaacatccagtcttacaaaagatatgactggtaaagaagacatgtacagagcagctgctataagagcattatgcagtattactgatgctactatgcttcaagctatagaacgttatatgaagcaagctattgtagatagaaacgcagctgtcagttcagcagcactaattagttcattacatatgagcaaattagctccagatgtagtaaaaagatgggtaaatgaagctcaggaagcagtaaatagtgataatgcaatggtacagtatcacgcattaggtcttctataccatattaggaagactgataagctagcagtgacaaaattgatttccaagctgaattcaatgggtttaaagagcccttatgctttgtgtatgttgataagaatcactgcaaaacttttagaagaagaggaccaagagtcactcctcaactccccatatacaataatatttacaatgggcttaaggaacaaatctgaaatggtggtgtatgaagctgcacatgccatggttaacctgaagttcacgagtagtaatgtgctagcacccgctataagtgttctacaactattttgtggatctcctaaagccacactcagatttgctgctgttagaactttaaatcaagtggccaccacccaccctgcgtcagtgacagcttgtaatttggatctagaaaatttgattactgatcctaataggtcaattgctacactggccattactactcttttgaaaacaggtgccgaatcttctgttgacagactaatgaaacaaatcgctacttttgtatctgaaatcagtgatgaatttaaagtggttgtcattcaggcaattaaggtattagctttgaaatttccaaggaaacatagcacgcttatgaatttcctatccgccatgttaagagatgagggaggtttagaatataaagcatccatagcagataccattataaccctaatcgaagataatcccgaagctaaagaatctggtttggcgcatctttgcgagttcattgaagactgtgaacatgtttctttggctgtgagaatcttgcatttgttaggaaaggaaggacccaagaccaaacaaccatcgagatacatccgttttatctacaatcgcgtcatattggaatgtccttctgtaagagctgctgcagtctccgccatggcacaattcggagcctcttgtcccgatttgttagaaaatatccaaatattactttcgaggtgtcagatggattcagacgatgaagttagggacagagctacatattatagtaatatacttaacaaaaatgataaaagtttatacaacaattacattttggattctttgcaggtttcaattccttcactagaaagatcgcttagagaatacattcaaaatccaactgacgaaccatttgacattaagtccgtacctgtagcagcagtgccaacagcagaagaacgagaagttaaaaacaaatctgaaggactgctagtctctcaaggtccagtccgacctcctccggtgtctagagaagaaaacttcgccgaaaaacttagtaacgttccgggtatacaacagttaggacctttgttcaaaacttccgacgtcgttgaactcactgaatctgaaacagagtattttgtccgctgtatcaagcactgtttcaaacatcacatcgtcctccaattcgattgtctgaataccttgccagaccagcttttagaaaacgttagagtggagatagacgccggtgaaaccttcgaaattttggcagaaataccttgtgaaaagttgcactataacgaaaccggtaccacatatgtagtagttaagttgcctgatgatgatctccccaactctgttggtacgtgtggagccgtgttgaagttcttagtgaaagattgtgatccatcaacgggaataccagattctgatgagggttacgatgatgaatatacactggaagacatcgaaataacattaggggaccaaattcaaaaagtaagcaaagtaaattgggctgcagcctgggaagaagctgcagctacttatgtagaaaaagaggatacatactccttgaccatcaatacgctaagtggcgctgttaagaatattattcagttcttgggattacagcctgcggaaaggactgacagagtaccggagggtaaatctacgcacacattacttcttgctggtgtattcaggggaggtattgacatactagtaagagcgaaactagctttgggcgaatgtgttacgatgcaactaacagtcaggtcgccagatcctgacgttgctgagcttataacttcaactgtaggttaagtttaaaggctacgttaatgattatattgtattacaattttccatatgtataaatattttgatttatttaaattttatt

SEQ ID NO: 6504 - DNA, 2787 bp, Diabrotica virgifera
  SmartBlast Evalue=1E-52; Info=B-cell receptor-associated protein 31 n=1 Tax=Camponotus floridanus RepID=E1ZVU8_9HYME
aaaattttaattttaaaaatagattagagccacatcagagattgttcagctctttaaatagctataattaccaatctcactcttgttatttcgttttagttaacctcattccaaatcgccaagatgagtttgcagtggacgataatcgccgggtttttgtacgcagaaatcgcagtagtacttcttttggtactccccgttgcttccccaagaagatggaactctttcttcaaatcgaagtttttgcaaggtttacagaagcaagccggattttacttcttgatgcttctgggcattctggtattgttccttcttgacgccattagggaaatgagaaaatattctaatctagaagctgaagaacatggccatgcccacctcgatcgtgagatgcaaggcagcatgagactcttcagagcccaacgcaacttctacatctccggtttcgctttgttcctgtcacttgtcatcagaagacttgttattctaatctctgaacaggctactttacaagcccaatcagaagcttcaatgagacaagcccagagtgcaactactgcagctaagagcttgttggcccaacgtggagaagtagcacaaaatgagagcaatgaagctcatgaccaggtaaacgaactcaagacaaaaattcagaaactcgaggacgaattaaaaacagaacagaaagataagactgccataaagagccaagctgagaacttggccaaggaatacgacagattggccgaagagcacagcaaactacaaaagaaggtgacaatccagggagccgagaagaaaggagaataatgtacattaaaaaacgttgattgcacatcctataactatttataataaaaagctttggttgtaacaagctctagtgtaaatatgataagatttggtgattggctatagtgagagatatgctattttttaataatattcgaatagtagatgaaaaaatttgtcttaaaattagttcttcaaaatctttgtttccattttcattagaggtcactggagaaagttttttattaacaaggggaagaattttgaaagactgcactgcttttcagccaagaaaacgccacttcaaccatttacattaggtaaacatacattaaggggatttgtatatctattctatcatatattagatctcttctgccgatctggatagtcaagccagatcaattcaaaaccacataaatatctttgatatgcctcatatgtgaacagacgattaagtaattgcaaaatctttttcattttatcaaacgtaacataaagctctctaatagggcattccacaatgctgtaaaaattaaatcaatatggcggctgggaggcaaacaattttgttttttacatgaattaatttaatattttcactggaagaatccactttaaaaagataatatgcctcatttctgttgtgttttggaaaagtatggaatgcgaagtaatcgtgataaagttcagttttatcggttaccattagtgctacattttaagcataaaaccaactgaactaaataagttatgatctgagagacataaacaatggttaaatgctataaatgtcctataaaaatgctaaataactatttccatgttacttacgcttggaaaactgtctccactgtaggttaagtcagactccttgatggaaaatgaatatatattatttattttgccaatcttttgcttgtacctaccagcaacatctgtattgtctagcaacaactttcgaaaatattcacgtaagtttatttaaaactaaataaagtcgttcaagtacttctacaactaaaaactacacaaaagcaacaacaaaatgttgggaaaatacaacgaaaaaactattaaaggtaaaaaacgtaagaaacacaatgtggtacaaatataaataaataagtatgacactgcctctcagcatagtcataaacgtcaaagtctttgaatgccctatacctgagtgacgcctgtcaaattcaaataagagtactgttatcttctatattttatatagataacacaaataatccctaaactctgaggaacatactagtatcaacagtccttgttttacttatccagcagaccagacaaatcttttaaaaatctacttttgtgtgtaccttttcacatacacgaatatattgtccttagaattattatgtatgtccctacaattgttatgaatcgttttgacagatgttttttgacataataagtgagtgtgtacacatggtaaatatttaaatcgtcaagcacaatgtgtacagtctaacaggctctataagagactcattcattttcagttcagcggaatgctattgttggaagtgcaaagttatataaacaagggatcatttcataaaacaggcaggttctttgtttatggaattgtacaccttcgaacgatagcatcccgctcaggtgaatattaatgatttgtgtagatgccttgttagattttttcatttccaataattattgattttgttgaatttattgaaaataagagtcgcaggtgtttcatgaacatttgtgatgtggtcagcagttttcgttgaatttgaagagctcgttgtatgtagcagatgtttgagcttctagtgtctactgcacttaactattatgtcaaatacaggaaaatgtttttggttttctgatgttatctttgtattccatttgtttttaatttattataagatttattactattttttttttttgaataacatgagtttgtataatttaataaaataaatccatttt

SEQ ID NO: 6505 - DNA, 2776 bp, Diabrotica virgifera
  SmartBlast Evalue=3E-66; Info=Protein phosphatase 2c gamma n=1 Tax=Aedes aegypti RepID=Q17L51_AEDAE
tcgtgatcggagcagtagccactttctgtgacttgctgtgcgtggagtaaatttctgacttatttcgtatactttaagatgacgcacgggtaaagaactctggactcaactgtataatcccccttgaggtctgttgattttttggcattaattgggacgtgccgatacccctaacagccaagagggatgatagttgtaacaacatttaaaagtcaaagccacaaaacagtatacattgactgattaaatatatttgtattcggcatttttagttcatattaatgaaatgaaggtatagaaattagttgaaagtgactagtaatcatctctttgctaacgttttcctattcctaatgatatttaagactattggattctttttccggtaaacggcatttgctattggaataaacataactgtgggcaagaatttagtgctaaataaaggacgtacttactaaaattaagataaatattaacatgatcttaagtataggaagattaagacaatagcgtgagtatagagagaagtggttgaaagtaggagatgaaataaagtagctagagactaaaaaatcaggcgccctaacaaaataaactgccaaagagtgtaggcttttgcagccgggttttttgataatacattctttaccttaagtttttatgttccttagctacacggtactattcctctaaaatataacagaaactaaagcatctggaatttgaagcaaaattgatctatttttgccttttcttcccactaattattacttttactgtgtttaatttcagttttacaatcactaagttaccgttgattttaaagaacacaaaagaaagagaataggatcatattaataagttcatacatttctataaaactatggaatgtaaaataagaatgatgtattttatatacagttacactttaactcttttatgaactgaaactgaaaccaacgaaatctcgaccatttttagcattacgaagtatcataacaaaattataaaccctgcaataatttcaaaatactaacaagcaatctatgtacccgatggtattaaatttaccaagaaaaaatgcttaactaaaaacatctttttacaaaactaattggaaataacataagtataaacatactgtcaccaattcgtatagattgttccatttgagattatcaatgttttcatggacaacttgaatttatttgtaagtatacagtataatgtccgtttgtatctaaagcaattacaatttttttaataacatcgcacatgtttgtaaactgtcaacaaacatcagatcatttcaaaacaaatgcaattatgatgttaaaaatcaaaaagatgttatatctatcctttttttgaggctttcagaaacaactcacttagaaacacttcagaaaaaagagcattactttgttaacatttttgcatatgtaacgccaatattaatgatattcgactgtgttccttaaaattgttgtaaaagagtcttctaaaacagcgaagaagtaggtatctaatgtatgtaatttaatttttcattttgcattgactgtcttaaaggttctgcctgtgtttttttctcaagatgagtacaaaatatgaatgtaatattattagccaatttcgttacagcaatattaatttaattgagaacagcttttaacaatatgaatcttctaaccaaaggtaacatttcaagaagtctactatggtaaagacccaccgttgaatattgggtggtatttttcaacagagtaccatcaataaccagttctcttctcaccgaagttgaaaaaattgagcagatgtttcttataacaagtagctgtaatgggtattaaaatgtccaatattaacaatactaaggtactggataataagtatgatccaagttaatcaaaccagagcaaattttcaatgggacaatcttcgttaaatggttacagtaacaataaaaaaactttttttcacgcgaccatccctgattccattttaagtgaatcatcttcagtcttttccacaccggtttctgttttactcacatcttcgttctgtgtcgcaccagattcagattttaccgtttcttcagtctttatcttttttactatatcactaggaacgggggaggcagatctttttaaaatgttcgttttaaattggactattatcgctgtcatattgtcacaacccgtgccatctcctaaagtatggggcgccaaacaatgatcgaacatctcttcacatatagttgagagcttggatttggattccaatattcttggcctaatgaaatcaacaacttcctgactagacatgaaattccaaattccgtcgcaagccaaaactaaaaattcatcatcgacgggattaatagtcaacgttttgacatctggtaacgctgtaatcatctgttccttatcagataattctttattttgtttatatgcgtgatctcctatcgctcgtgagagattaagaccaccattaactctaccatcagctgtaacttttccaccagctttcactatccgttcccgttctggttcatcttcaggtttatggtcgaagctcatgtctatcgccttaccgtctctacacacaatacaatctggaatcacctgcgttagcaacatacaattcatttccttgcaagagtgctactactgcagtacatccactatcagatcctggctcatctttcatatttcttgcgaattccaaatcttctgcattatctatttcatctgtttcatcatcttcc

SEQ ID NO: 6506 - DNA, 2774 bp, Diabrotica virgifera
tgtaaccttatatggctacaaactgtagtgcctatagtagattatagtaatcgtgaaatcagctcattaagggaatttttttctgcttatttaatcaattttgtatttattatactattttttatatgggtccctagattctatttttatatgttcaaaaacattttttgttaaataggcaagcattgacgtgtttacaagctacaaacatacattctttgagatataaatatgagccatcaataatgatgtttcaaatgtctcttccatcctatcctcaaatgatagagattttcattgatttcaattgattttatagctgctactagaaattacgaagaatttaggcaaatggagcctcatgatatctcatggcatctgcaaaacctattaaaggaaaaaaaaacattgagttccaatgttatcacctatttttccttgtacattcgcaagtacaatgtggaaactgttattgaaaataaaggtaactaaggggatacatattacacctttatagtccagagatcgaactagttgtcagtgattcattttgaagttcgtagattattacggaatttgaggagtaatttcactggcgtgtaaaattatactataatgtgtataattgtataattttataattataccattattttagtaagcaataagtaacatttcatgcaacaatttcctgccaacaatttcctgccaactatttcgttatttgagtatagttgtcttgtcgtaatatgtatgttcccctactatgagatactcgtttcataaagaagcgtatacaaattgtaaaactactgaaacgactgaaccatacggcggcaactgaaccatagcttagttgatatctgaggaatcttggagttgtacagtgaagtgtaatgtgatagagaaatatctcttaagcttaagaggcatatttctaaaataagccaaaacagacaattgtcattcgaaaaagtagagaaaaatgtcggaactgtttacgtgggagtccactgaacattatatatcgaaatagagcgaaagtgatagtgaattctttcaaaaatttgttatggagggacttcttatcaaatgaataagtgcttaaacgcaacctatcaaccgctgtacaactattttcaatggaaagtgacctttttgatatcattttactcccacaaaagtcagtttaaactgaaattaattaatttatagaaaaatctgaatatactagtcacccctcatgcactccttaatccactgtccaatatctttctaaaattacttggggaattaagattttcagattgttctatgtaatcgattttatgctgcattttactgtgttaattaggaggcaggcgttcctgatgatattttttaaaaacattgctatagatttctaatacttttttttctgcgactccccataaacgtacttgcaaagttgcgttaaaaatgttctattcagtttaaagtatgtgatacattgaacactttcaaagataaatcatgtctgacggttgttagtttacatatatatttcagcgagtgaaaaatcgaactcaatatcttaatgatctaatgagctactacattcatacgaatatgttcatctggatgaatgtcgtagagaaaaattgacaagaacaccatttagtgagtcgaaaacctttttaagatcagcagcaggttgtaagatatggagaagtaatggatatggacacgatatgcatttgtaaaagagaaaagaggagtcaaaccattcaaagtcctttaggaaaaaatctaaaaatttgtattaaatttatcgtctaaagcctttacagcttgcaagtatacctgcaagatgcaagaaagttgctaaaaggcatgcacagtatgtcgtcagctgattatttcctgcaacttcttgcaattgcgcaataatcggtttggtgccattttctgttcaagttttcatgcaagtctagaggaatttgcaggaaatttgatttttccacaatctttcccacaaagacatacatgccgatcagctgtttttgagatatcaacattatttcccattaagggtaaaaatttcaacattaattgcaagctgtaaaatcacacataaagaccttgcaatagacttgcatgaaagttagtcatgcaagaaacggcagcaagttttcttgcgagctgtaaaacggggttaagcaacaacaaataaaaatacttgtaagagggatttataaaccaagcaagcaaaagaaaaattttaacctggtcaaggtaaatcgtgtgttgtgcatgtaacgggtggctctgttagacaccagactcagtaaagcacaactttaattcaagtaaaaatgtcttctgcataaataaatcactaaatgaaattaatttctctgtacaatagaaataaaatatcaatcccgtcgaaggtttcaacaatgtcacgaaccactgttgattacctgcgaacaataaatacagttaattgaagtaacaagacgatgagttatgtactacatacacacatcaaggagaacaaatgatggagaacggtgctggtatacatttagagttgggacggatcagtcaatacttaatcaccgcggcaggacggtttggccttaaattaatactttaagagcctgatgtggaaaccactactaaatcaatcctttagcagaggcgattgacctccagtcaacaccctttggcccgaaaaagttgtaccagatcaattctccggcaaaactcacgtctttattgtggcggac

SEQ ID NO: 6507 - DNA, 2771 bp, Diabrotica virgifera
  SmartBlast Evalue=0; Info=Integrin beta-PS n=1 Tax=Camponotus floridanus RepID=E2A0M9_9HYME
tgagcacgtcattgtgaacgtttatcaatttccgctaatgtttggaaacatttctaccacagacaatccttaaagatcactgctacgaaaatgttaatccgaggtgctgtgttttttcttttaggacttgttagtgttatcagaggacaatcagaccgctgtgcatttgatacttgtaaagaatgcatacaagaaaacgggtgtgtgtggtgtataaaccctctttccccaaatggcaaacaacttcctcattgccgccctaacaacaccacagaccaagacacatctagctggtgtagtaaatccgatgatgttgtttctccaaaagctgaattgcatatcaacacagatgaggaattttcggaagaagaaggaaaaactatacaaatgaaaccccagagagtacaaatatctttgcgtaaaggtgaaaaggttgatttgaagtttcaatttaagaacgccgaaaactatccagttgatctttattatcttatggacttatctaagtctatggaaagctataaaacaaaactggcagaacttggaaacgaattggcgaagcagatgagaatcattacaacaaaattcaggctgggattcggtagttttattgataaacgggatttaccatatgtcagtactgttccttcaagattactgtctccttgtgaaactgatgggaaaataaaacaaaagtgtgccagtccgtatagtttcaaacatgttgtttctctaaccaaagatgaccagaaatttgtggaggaagtaaaatcagctaacgtctctggaaatttggattcacctgaaggtggcctcgatgctcttatgcaagtcatggtttgtaaaaacaagattggatggagagaccaggctagacacttattaatattttccacggatgcagaatttcacatagctggcgatggaaaattgggaggagtaatagaaccaaatccaggaacatgctattctagtgacgacgaattcttaatctacgattatccttcagtatcccacataaattatgtagcacagcaaaacaaggttaacataatttttgctattgtaaaaaagggatctggaataaaagcgtcataccaacaactgtctaacaacattgacaactcaaaattcggtgaaataagcgagggcaaagatagtaatatcataaagttaatagtggataattataatacaatagcgcaaaccgttagttttagatccaacgctacagatgaagtagatgtcacattttcgtcaagttgtggaacaggccacacaaatcgttgcagcaacgttacagtaggtcaaattattgactttacggcaactattgaactaaggcagtgtccccaagatggccagaagacaaaaattatagctatccaaccagatggtattaatgagagtttaatgattgagttaaaccttttgtgcgactgtccatgttccgaaacaaacattgaacaaaattcaggaaaatgtaacggaacaggtgctttgacatgcggagtatgcgactgtccaccaggaaaatcgggcaaattctgtgagtgcgaccttctcacacaaagtaaagtagaaaatgtcacaaaatgtatgaaagaaggcagtaatgaagtgtgctcaggagcaggaatatgtaaatgtgaacaatgtgtatgtaatataattcccaagagtaatgatcaaaaatatacaggaaaatactgtgaatgtgataatctatcatgtaaaagagaaaaaggtttactatgttccaacagaggtaattgtaattgcaataaatgcgactgttttcctggatatatgggagatgcgtgtgaatgtgaaacagctgtaacgaactgcagacgttctagtagtgacgatatatgttccaataatggaaaatgtgtatgtaatcggtgccaatgtgctataaaggataataagagatattctggaaaatattgtgaagattgtccgtcctgcgaagcaaagagatgtaatgaattacgtgcttgtgtcgaatgccaagcttacaagactggaagtttaaatgcgacgtgtgctacgtcatgtacggagttccaaacacaaatcgtacacaaattggaaagtgaaggtctggaagatgttaaaaaatgtagagtcccctttaatgagtcctgcttcatacatttcgactattattatgtagaagataaactggttgtaaaagctttggaccgagaagtctgtacgggtccagtggatcccttaccctggatattgggagttattgcaaccatccttatagctggatttattatgttattgatatggaaaatagtgacttcaattcacgataagcgagaatatgccaaattcgaaaacgaacgtcagaaactcaaatggggaaataatcaaaatccactatacaaagatgctacatccacttttgcaaatcctggttacaaaagagctagtgcaagattttcatttaggaaggagtaaaaatgttatttcaaattgtagggaacaatgtttaggacatgtatatttattaatacttgaagcttaaagtaaaatccatgacagatttgtattttagtgacgtagttaaagtattgttaaaggaaagacaatcttcattatttatatacaaacaatggcataattaagattttcatcagttagtaaaacatatcaatttattagtaggtatagcccgttttatttttaggcgataatttcagtttttgtcaatgcatatgagcaaatacattttaagagcttagttctattaa

SEQ ID NO: 6508 - DNA, 2768 bp, Diabrotica virgifera
gagcgaattcagtataggaggtattgtcacatcaccgacgcagcgtaaacataaaattttggatggcgttatgttatttgattcttttttgcttttgtgcttattttgatttcccaaccagttttgcaaaatcaaatgttttttttataataaacaaaatatacgtatatgttcataaacaaaaatatatagttactctacttaacgtagtttggtgtaccttaactggccaactctgataacagatagatagtttcagagtagattggatataaacgtcacatgtcacataatacatgacatataacgtttatactgttttaagctattttaaagaaacctattggtttaaaattcgatagtaccgacagtcgttagtacacatcgaataagtaaccaaacgtgataggtattaaacagctactcctttttggtattatattattattaaagatatgtttcgattttaaaatttgactgttaaacaacaaacactgttggtcctaaaaatcgattgtatcacagctacacaaaattcagaaacttggtgtaaaaaaactacacttcaacagtataatttcttgtcaatttgaatgattaatactaaagggccaaatatggctattaatcgcttttgttttgtaaccttgacatatgacgtataatatatatatatatatatgtatatatgtatatatatattatatatatatatgtatatatatatatatatgccataccaatgacgtatgacgtagatatattatatgttatacatcaagggtactaaacaaaagaaaagcgataaatagccttatattgaattccatcataattttcattgacgacgctacaaatgaaaactcgattttcttctaaaaaaagcataatgtatagtttagttgtcagtataaattaaaattgaggttaagtttgttgaactatattattaattgttaatatgtttgttgtaaagcttcattaaatactaaattgtgttttatgacttctgaagaaaatgtgaacgtaaaattgtcgaagttgaagcctatttttaataattttcgtctaataccaaccaaactttgcgacgttcttttgtgaattgatagtatattagcgcactaacaactggcgtataagtgattattttctctcttttttcttatttaaacgagtcaggtatgaaataaacgtgaaagctccagttttatagttaacatggaattaacgaaaaaaatgttaaacaactatttaggacgtaactacagtaggtaaatacagaaaactcgcgttttaacgaaacaaaaaatagttattacctcacgatagttcttttatgttcaaaatgttagaaagtattctcagatatccttgtttttgtattgtagttacttttttctagagtttatttttttattcattcagctgagaaccaacgggaagagtgaatacagtttaatattttttcttagcaagagcagtacgatttttgctaccaatatggtggcaaaatataaattgcagtataacgacctcgtagattgtgaagttgccagttggtacacgtgccaactgaattatttataacgacagctttagtattaaaggggtgccggttttcaataccccttcagggagagtcttgaattgatgacagtgtctctttcagcggttttcacttgcagtaagttcaatgtgtcaaatttttaatgaactttgataaggtgctgtaattctgtcctgttgaattggttaattaaacaaaacacttgctattttgttagaactgtaatggaatttgaaagggcaagaaatagaatattatatgaacatttgagtgaacagctaccgtaaaacaccacaacaacgacttttcacattttaccggcgttctttgcgaattgcaacgtggagaatactctccgaaaaaacatagattttgcgtatctgttcgttacgagtctcgatattgatagctcactgccacttgcaccccgctaacgaattcagtccgtcgcgccggcaggcgtggattaacactttcttggaaattggtctacagacactgtgtaatgaagttatttatgttttgtcagaggcggcgcggtatatttattatttgtgaaataaaattatttggttggagactacagttctccaacagtatattatagtaacactaaagtcttaaaaataaccttataatttatacctaaagtagtaccggctatcaaagagactcattaatattcagctcaatggggtgctattatttgaggtgtggaatttcgtaaacaagggatctatctgttttatgacatgatcccttgtttatgcaatgttacacctcggaacagtggcaccccgctgagctgaatattaattagtctctagatagctggtgtgagtatacacttgtgtttctttgtgttaagaaataaagtttaaaaaactccaatcttaaatacacagagtacacattattacttggcgaatcagattgtttcctgtaatgtagtcagatctatatttaactcaagttcggtttatactaaataatacattatatatctattcttagcgaggtccctattagtttaattcacgctttgaaataattaagcataaatcaaaattatgagattctgtaaacaataattgtctaattttttgatatctacaaatcattattttcttctcaacagtttagaggtttacttgctgtattaaatcttgaatgtattatgtatatctaaatagcagct

SEQ ID NO: 6509 - DNA, 2760 bp, Diabrotica virgifera
ttcatttcttgaaataacttttttccttcaaaatatcctttttctttaattttctctacatttttttaaatatgtatattcctcgtcttttttgtatcaacattgttataagcttttttattaaacagtattccaggttttatttggaacatttgggaatataactttgatccagaattattccagtctgagtctgtattcaatcttgtccagattacagagatgctctagtaatcgtggaagcttagcagtactggaagactaggattttgattgagatgtgataattttgattctttgaagtaaatattggattatatatttttttaataatcatatagacgaaacaacattttagtcttgattctctcgtgttatttgctcttactgaaaagtattgatcaacttttaaataaagaaaatactgtacctcaaaaattatgtatttaaaaattcggtggatgttatttggtaaaggattaccaaataacacttttccttgaatatatatatattgaactttttattttgtaaatttttgttaggtttagaattattgagtaattttacaacatattatctaatttagagttttagatttgtaggtaaccttgaaaatagggtagtccctttttagattattagattttggtatacctaaacaagagcactagaggacgcatttaatattcagttcagcggaatgctattgtttgatttgtgaaattatacaaacaaaggattatttcatgaaacaggtaggtcgcttgtttgtggaatttcactcgctgagctaccccgttcagctgaatattaatgactttcttagttctctggttcacctatatcactaattgaaaacaccttatttaattttacagtatacttaaaaaccataaaatacatcttcgtacattgtcttcagttatttaatagtaactattaagtgctctactcagtggcaacctcacctttactttcagtttatcctttcattataaaacataacaaattcttcttttgtatcgataagtcctggtccttgtgcaatgttatagtccccaagaattttttattgtgttattattattagaatcctgttttgcattacttattatttttaatataatagatctttagcctatgatcatcatttcatcacagacatcttgttttattgtgctgctgacacttctagtccatattttaactctatacagtaatatagtaaacaaattatatataccctattccatgaatatatgactgtcttgaattggggcgaaaaccaatatttcactgtgaaaaatatgaataccgaaagtaattttcaaattacattgttgtttattggaataataattagaacaaccaatttactttcatacttatgttggccactaaaatattcgttgtcgcgataatccaaaacagtcgtatattcatggaatagccattattgttagttatatcagtatttttttgtaaaaagtaacctactgtttgtattacaatctgtccttgtaagctaccttatagaagatgtgataaagtactttagtatgctaccagatagtgtgatactaatatgacaaaataaacattactgtttttaacaagtcagtctttatttctttataatgatttctatatggaagaacttgtgaggataattctgaaacaataaatttcaatactggctaacatttagaagatattgttaaaaactatactagcaatggtatgttactcaaaaagatcactgaagcttacagcttcaatctatactatagatatatcaaattatcagttttgtgataaaaactgatggaatttcttaactgattttttatgttgagtcttttggagactgtatgctccaaataattaatttataaatactatagtgctgtatataatgcatatgattaaattttttatatgttctgtttaaatatcaaaattcaaaaacaatcaatcatcacataatacatatttatttgtggtgcttatctctatatttgctagattctagactacatatctaaatttactgaattaaacaaaagttttagttaaaagactagtattgtcagtattccaaaaaaatattttttaataaaatattcataatacatagatacatttttaaattgctgttattttcaaggttgcctgcaaacttaacaatatttattagcatataccataatgttaactggccctttcaattaattatttgtataaactgtgatagtctgtcacttacatgctctagacgaatattatctaaacaaagattctctaaaaaatattccctaaaaaactaataattaatttcaaagtgttctgcaaacatcatgtagcagctgataatgttgtatatataaaatttatattatattatattgattcataattatgttgaagagatgtttttatgaaacagttcttgagcagtttctttgcattatggttattgctttactacgaattaaatatatttttgttctgtctttgctgtaatttatttttacattgcaaaaatattgatattttaatttgagcaccgttctttatacattagcagtgaaatggcatgtggcaagatggaataattatcaatacataattaatttgttacaatttatagtacactgaaaatatgtttccaacttcacattttttaagtatttgtattagtgttaatttaactttttaggtttagataaatgtcatacatataataaacctaaatgt

SEQ ID NO: 6510 - DNA, 2754 bp, Diabrotica virgifera
aaattaaaattatttattctcatttaaatacttccatacaaacatgaaaaaggcacttctgtcttttcacaatatatttaaatacaaaaaaccgccgttgtcacaaacttcaagtatctcgaatggcaatcgtccaaaaaacgacgaaataacaaattccaaacaactgtcacatcgatgtgaacaaatttacggaactaggtgtgtcggtgtgaagatgtcgagaatttgtgtccgaaacgtcgtcttttggacaacggccgtcgaatacttgcgtcactttacaaaatcttgtataatatacaatatatataaccgtatcaaggttgaacacaattcgatataaaatacaatacaattaaaaaattggcgtacacaggatctgtccaaaaccaacaccccgtatacgttaattctacataaaggaaccccaaggtgttgtgttttcgacagttctttaatttcacttggagatgtagttagttatatgtatggaccttaaagctaaactatttcctaatcatcacattatgaattatataaaattggaaaatattattgattcctaataacagtaaatatataggagcacttctatgctgaagatggtttaaaaactgttcaaaaatgagctgtttttaattagatatatttgtttatgtatcatttgaaaatagctgcacttttttaataaaaatagttgctaagggcaaattttgagcattacggacaaatccgattttttttattaaaagaattgcctagagtctcaagattttcttaagaaatgtctctacaaaaaataaatccgaactgttttttgcttttatagtgtgagccaaaactatttttgagttttgtcacaccctgtattgtgcatgtgtaaaatagaatcaaagctaatgagaatctaacttgtatttaataaaacatgataaaaatgtttgattaaatacaaatgttaaaaaaaagttgtataacttgcgatataaaggcacacttagaacaagaatgtctaatattgttcggaaactattttcttgtggaatcttatgtaatttactacatattttgcttggaaataagctaaatagttagaaattaagtttatttgacgtttcgatttccacttaggaaatcgttctcaaaatacaaaatattaagactcatttatattgacaattcagacattattttaaagtagatgactttaaaattatattgccaatatttataagttgcgttcctgggacgacttggaagatagttcattcgattacatgaaatcaacttaagaaagatcataggacgtgatttgacaagacaactacatgcaatgatgacagtaaaattctcgtgttataagctaaaacaaagaaaagaaaagtagctatattttttatggaactttgtcataagataaaatgaggactttaaaaaaacgaacatttttgaatgaaacttgaattttgatggaaatgtttatgctcttacagcgcaaaaaaaagcaaataaacctattagtacattatttcacggtttttgctgtaaattttaaagaaccgcttggattgacatgaaatttggtacacggatagctaacacgtcaaagaaaaaaggtgataatgtgccgatgtgtgcttttgccacgggggtgaatttcactccctgtagggggtgaaaaaatatatgtccaaaataagtcctgaaatggataaagtgaccaattccaagccactcctattccatagagttttttcaccaagtcaacacttttcgagttatttacgagtgaataatatgttcattattcaacaaaataaccacgtttttagacggttcttgcaaataactcaaaaagcaagtattttctagaaaaaaacactcttagcaaaaatacagcctgtaaaaaactgaaaaaaaaaatggtgtatatgctagggctctatacctagcagaagcagagctatagctaacgaaaaataggttcatattcgtcaaattacaaatcgaatattttaccgtgaaatatccaaaaaataagcacttttcggggaaaactcattaaaacttcctaaagtgttaaaaaaatatttattcctattttataaaaaaatttctagcatcaaaagtaaacaagctacgcccaaaacaaagttggtcccttttgttttggtaaaaaaaatcgggaagatcaccccctaattagcaacttaaatgaaattaatcgttaccgcttcacaacttactttacctacttatgttgtgttcatatatgatctgtaagtttcattaatttaaagtgcttattttgaaaaaatttggttttaaagtataatttaaaaaaattttaattttgaaaaacatgctttgtttcataataacttaaaaattgtcagagacaccaaaaatatgcaaaatattctgaatattttgcatgtttttatttttctgtaagacaaaaactggttaagatttcgtgtttctaaatttgcattcactcgtgattagtgaatcattcaaatccttttaactgcagccctttcaaaaataaaaactttgaaccgatgagacctacagatcatataaacaatacatatacgagtaaaaaaacttgtgaagtggtaacgattaagttcattagatatgctaattagggggtgattttcccatagatataactatctgttatatctatggattttcccgattttttatcaaaacaaaaggaaccaactctatcttgagcgcaac

SEQ ID NO: 6511 - DNA, 2726 bp, Diabrotica virgifera
  SmartBlast Evalue=1E-110; Info=Yellow-d n=2 Tax=Tribolium castaneum RepID=D1LZK3_TRICA
ttcgctaatcaaaaaaagttgtatttccactatcgtcattcgctcctttcaatgcaaataaaaacaaaaatctgaaataccgcgtttatcgtcgatgagagagcatcttcctaccacgttcgaagaatcattattttccgaatcctgtttccgtttataaaaccttagagagcttcttcgaatagtcattgtttaaatagccaagtttgcaaacagaaggggttgcgtgatataaaaataataattgttattaattagtaatagttttagtgctttctactgtttaagtgagtgataacttgacaacttaactgcaacgatgagtatacaaaaaaaaggctcttgtacctcctgttgacgatatgtctctcacaaacattttcccacggtgtgtcaccattatcagataaatttaagatattgttccaatttaaacaactggacttcgagtatccaactgctgcggcaaggaagtcagatatagatgcaggtctctttattccaggaaaaccagctccgattgataccgatgtctattacccagggggaggaagggcgcccatggtattcgttacgatgccaagattccaagatggtattcctgcaacattgggcaccatcgaaatcgataaaagtggaaattcacttattagaccttaccctgcttggggttggcaaagaaacccaaaattgtgcaaccgattaagaattacgtctgtatacagagtgatggtcgacgaatgtcatagactttgggtattagacagtggacaacttggagatactgttggatgtcctccccaacttttggcttttgatttaagaacacatcaacttcttagtaaatatgaaataccaaaggaccaatggaacataaactcaacctttgtaacacctgtcgttgatattataagcaaacaagataattgcaaagagacatacgtctatatggctgactgtatcgggcactccatcgtagtatatgaccatcgctaccggaaatcgtggatagtcgaagatgaaactatgaaacctgatccaaaatttgaaaagtatacgattgacggtacatcatttgaattacaggatggggtattaggaatggcactttctccatttattcctggagaaggcagacgactttattatcactcattgagtagtgatacagaacattatgttaaaacttctgatctgaaaaatcggtatttatgggaactcagaaaacctttcccaactctttttaagacttatgctggaacaaggaaaacacaaagtgctgcagaagcaattgacaggaacggagtacagtattttggtttaatgaaagatattgaagttgcctgctttgtcactagaggagagtacggcataccgggcaactattcagatatcgtagcgaacaatcaaaaaacgttgcaatttgttagtggtataaaggcgatcaagaaccctgctggaggagaagacatatatatggtaacatccagattccagagagtagcaacgggtaccttaaactcagcggaaattaattttagaatccaaaaagcttctacttatgagctgacagctcatacaaaatgcgatccacgttactctccacccattccaccaagaaccacgggagcacccaacgtcagtccaggaccagtcatctttcctcaagatagatagaaaatgtacatcaataaaccaaaaatttttattaatgaccagtgaattaatttatttctgttttatttattgattacaaagttcaaatttttatcaaaatttatctaataagagatcgttgattgtttatttcaaatagcacctatttgtaaaacaaggatataaaattacccacaatatttaaatttctacagaataagcttattaaaattgttaaaataaaataatttttctgcataaaggaataagagacaaaacagtatgtcagtgattaattatcttattacaatgttgataagaaaccgtgttactaattgagctgggtttgttcttataattgcctcttttattcattatccatcgcttgggatatgttttaaattttgaagttgcttctgtgttacgtttcatattatgaccaacatcatcttcaatccgtacgcgtccactgctgaagatatgtctccctcatctctttccatctgcgtctgttttgtggggatttcatccatttgtcctgcccaattccactgtagcgacgcgattctttcgacagcgtctgttgtttttgttctaagatatatttcttcatttggcattcggtctctcaggagacacaaaacatctggcgctccatagcccgctgagtcacgcaaatcttgttcagtacctttttttgtgattgttaaggtagttcagtttaccaaacgctgtccaggctaaataatccaatttcatgtcctctaaattttgaagttacttctgtgttatgtttcatattatgatcatcatcatcaatccgaacgcgtccactgctgaacgtaagtccccctcagctctttccatctgcctctgttttgtgcggcttgtatccatttgtcctgcccaattccactgtagctacgcaattctttcgacagcgtctgttgtttttgttttaagatatatttcttcatttgggattcggtctctcaggagacacaaaacatctggcgctccatagccatctgagtcacgcaaatcttgttcacttccttttttgtgagtgt

SEQ ID NO: 6512 - DNA, 2730 bp, Diabrotica virgifera
  SmartBlast Evalue=1E-155; Info=Casein kinase I isoform alpha n= 2 Tax=Formicidae RepID=E2A2Y7_9HYME
caataacagggcagcgactactataagggcagttttggttcaggtaaaaggaggcaacttaacaataatttacgtggaagctttagttcataggaagttgtaattttggtgaatacaaagattacacatagtaacaaactcagcaaatatgtagactaaaaagttgaattgagtaattttgaaaataaaatgtagccgtcttttcgaataatatataagagagtggaatctcatagcggagatacaattaactagacctaataatcgatattagtgatacattttaggaataagtggtatgcaaacaactggatcattaagttcactaacagggcaaggactactagaagggcagcttttggttcaggagagagaaggcaacttaacaataatttatgtggaagctttaattcataggaagttgtaattattttggtgaatacaaacattacacatagtaacaaactcagcaaatagacaaaagagttttatcgaaaaaataatgagtaattttgagaataaaacgtagctgtgttttcgaataatatataagatagtgcagagtttcccaaccggtgggtcgcggcgtggttcttacagtagctgagtagagtacagtgaccgtgtaatttattttattctatcatcatgggaaagggatgggtcgcgaatatgaaaaaacatcaaaaagtgggacgtcagacattaaaaccactgagatcgtggaatctcatagcggagatacaactaactagacctagtaatcgataatattagtgatatgacatgcttaaagcgagtctacacacgaagttactcgacgaagtactagagaatgttgtccgaagtgcatcgctacacactcgttcaacttcggaggaacacattcgcgcaaggagaagctaacttcggagtcctttaactcggtcgcaagaaccgacacagaatggaagtagcccgaggcgaagcgaagtcgcatgaagtacctctctacactctcgtgctcgctgaactttgatcaacttcgcgagtagtatagtgggtgcttaagaataaatggtgtgcaagtgactggactggactaagtttaatagcagtatataataatgaaatttaatgttgataaagcctgcgtgcagattatttgaatattccgatgataatatcctggagactggtcccaatctttgcattttttaaagaacagactggtctgacatttacgtactcacttattatctcgaatccgaattacatgttatactacctaagaatatttaaataatacagcctgacttgcattcactcccgcacagcattcgactcacattcgttatccaagactacgacctgttttgtaagcggtcgccatcttcagtatattttttgttattttattatattttatacaatatccgttaaaacgacgtgtagataatgtaaataataattcgtatatgctcacttataataaaatttaatttttatataaaagagtcagacgtctttttgtttttttaaagactgaaataggtcaaccaaccataatatgcagattagctcaatcgatgccgagtgttgggttaacgattgcctaagtgaggacctgtgacggacgcttgagcttgatgggcttgtgtcgaagcttgtcctgccacagaactgccagtaccggaggcggcgttttgtttcaacatagtccaatcgaatgtgtagtcgtactggtggttcagcgtacggaatagaatacggaacaattgccgcaaatacatgtagtcggggttttcttcgaagcgaagtccacggcaatagttcaggtacatggaaaattcagcggggaagcccttgcacagaacttctacgggcgtggacattttcttctcgctgatcttctcatatttttgtttctttgtagccgccttcaatccctgccatggcaaacagcctctattgaaatacatcaatacatatcctaaagattccatgtcatctctacgtgactgctcaataccaagatgtgcattaatggacgcgtaccgggcagtaccagttaaatttttatcttcacggtatattatatgcattctagttctggtgtctctaaatttcttagccagtccaaaatcgatcaagaataatttgttgcaatgacggccgatgcccatgaggaaattgtccggctttatatcacgatgtatgaacgatttgcaatggacaaattctatacgagtgatcatttgatctgccaacatgagtacggttttaatggtgaatctgcgggtacaaaaattgaagaggtcttccaacgacggaccgagcaggtccatgacaaggacattatattctttttcttgtccataatatctgatatgtggtattcctatgcctccatgaagaattttatatagtttactttcatataaaagctgtggatgccttgctctaattggttcaagttttactgctacttcctctccattcgtaatatttattccaaggtatatgtcaccaaaagatccactaccgattttacgaagtagacgatattttcctccgaccacataatcaggctttccgataccgatgatactacttgtatgtacagccattttaagcgccatctcaacaatttaaagaagtctaatagaaaattgtttgattaattttgaataacggaaaaccaatactttttacaacaacactatcacttgttcctctcaacacgccgac

SEQ ID NO: 6513 - DNA, 2728 bp, Diabrotica virgifera
  SmartBlast Evalue=3E-93; Info=Bicaudal D-related protein homolog n=8 Tax=Sophophora RepID=BICRD_DROME
attttccgtaaccggaaccggcctctttctactttaaacctatgttacaatcgttagaagaatacatagtagaaatggaaaaccgtagtgccatagaccaatcccatgcgggagcagtcaacgaagacatctggacacaactgcaacaaaaggaaaacgacctggttttagccgccgaattaggaaaagcactcttggagaaaaacgaagaactgaagaagcagaaggatgcgatggaggaggagtattcgaaaaaactagagtcaatcgaacaagaccgtcacatccttcgacggaaactccactctaaagaatcagaactagatgccagaataatcgaactccaaaacgacgttgccgaactcacatcaaagcttcaagccaaagacaaccttctgaaacaatgggaacgagacaagagcggcctcatggcggagttgacagctcaaaacaccagattgacgtcgcagctgaaggacgcagcacataaagaacaacatctcgcgagagagatcgacgaatacaaagagaggttgagtttgggaaaaagcagtttacaggaacacatgaacagtgtcggcggtcttagagacgaactagaaatagccagtgaaaagaaccaagaactcgaaaggcgcctacaagtagcagcatctgatagagacagcatagccctagcgttagaggaagcctccgatagaattctgatgttggaaaggcacgctcgggagcaggatatgcggtaccaacagagtctgaaggaatacagcttgccgcaagaaaaattatcgatagaggaaaggcttagtgctggtgaagagcgatctctattgtcagaaatggacatctcggagcccactttgtctcaggagtgtatgtccgtctaccgccaacttagatctctggttctgcaactgaagtcccattccgacgacgatagcggccttcattcggattgttcaactgcgtcgatggaagattcttcgaggtttgctccaggaatgctcacggaagttgctcaagagctcgtcggcttagtcttagatacggacgtggtgaggatattagaaaggctagaacaagcgcgaagggaaatacaagagagggacgaggaactcgctagaagaagcgaacgacttatggagctcaacacaaaagcttcggtgtgtgaggtcgaactagcatcagcattggagcagcgagacagagcaatgcacgacgcttcagattcttcattggctcaagacgaggtggtagtaaaagcgcgcgaagaccgggacattgcggttcagagacggatcaaagtagaggtggagttggccaaaactagagtggaacttatgcaagccaatagccagttgctcgagacggttcaacagaaggtggagttgagtcaacagcttgaacagtggcagatggatatgcacgaactgctcgacgaacagctcaagaacaagctgtccaaccaggaaataaagatgaagatgcccagtgaacccgttgctccaccgaggagaagacttctgttacggttcttcaaccgatagcatacatattatagcataaagctagaccaattagggaaatgacgttgtagacattgtaaaaacgtattatgcccatttttttttcgtatttttttaccgaattaatttttatcgttacttaaatttatttaacacgttcggtgcctataacgcacgagtagcgtcacgaaggtttcataaaaggtatggctcataagtggcgtcagtagtaatgtgttactaaatgaacgatttaagtgcctacgtggtaccagccaagtggcgcttgttcaatattggcaccgaacgtgttaagagagaaacagtaattgtttaatatgaattcgttgttaatagtgccttaattatagtgacgggagcgtttaaaatttttaacatgtttcaattagcttccagttttcatttttaggcttctaaaattgttagtccaatgaccattgtgtaggtggtcaaccaacgcttctcttgtcttccaataatctctttgtccatggcccatctgtcattctagctatgtatcttgaccgtttccattttagtctggctatactttcgatgacgtcagtcaccttagttcttctgatctgttcgttttttattttgtctcgccgagttatttctgacatggatcgccccattcttttctgtgtgactcttagtttggtagccgtggattttgttaaggtaagtgtttttgctccgtatttcaagactgggaggacgcactgatcaaatatctttctcttctcggtctaattatccttgtcaatcatgtcctaggtatttataccgcatctacactcagtcctgttggacagggaagtgggcagcgtgaatgtgtaaatggctcactcgcgctgccgctgctaatgctactgccattgcacggcgctccctcaaaagtcggttttcgagatggaagtcaaaggactggcaacgcgagcgcgagtgagcattcacattcaactactctctctctcacttgctgccggcaaagcggcaagtgagtaagcgaggaagacgatgctgtcgtcacattccatttttgagagtcgttcggtaaatgagttgtgaggacattggcgaggaactgatgtgaacacctcactcgcgtcaatatcgtatttcgggcaatatttctggcaaaggcagaagcagtggcaatggctgagtataaatcc

SEQ ID NO: 6514 - DNA, 2729 bp, Diabrotica virgifera
  SmartBlast Evalue=1E-44; Info=Cytoplasmic dynein light chain n= 1 Tax=Aedes aegypti RepID=Q16PZ7_AEDAE
cgtctttaaccatatattattacattgagaaatacagtttttaaacaacaataattgtttttaagaagtgaagttgtcatttttgtggatatattacattcaaaaatgattcgggataaaaagagtgatctgacaaaaagtcctcatcaacaaaataaaaacaaaaatttacaccctcagaggagcattctattcagtaaaaaaatatagcgtgcgccaaaactttttgccaaataactcaaaaacaaaaaaaatacgaaaaaataatcagttctgaccctaggaggcaacaaataaaatcttggcattcgagaaaacaaataatctgtttcccaagaacaaaatatatctacatataggcaatattttctgaacagttcttttaaaacacacaccgttcaaattatctacgcctatctcatcttttttaaaagaactactaagaaattttaataaagattcgggatacatactttaaatattttttatagagtggacgtagaaatctgtcaaccaaataattgcggaagaatcccttgaagctcaacgaagacgttcttgcaatttgaggtgtcaaggaactcttctcaactgagcttcctctatattaacaagaacattttttattattggttgtcattttattatttttgttaacaacttaattagtcatatatacaggtcgaattatttccaaattaaaaatccctttaaaaatatttcgctacatcagcaatatactgataaattaaatataagttaaaatagatttgtgcaatttactacaattattacaactgaattgctctagaattttttcaaatcaacgctgccaaaattattttaaacattatttggtgtaagaaacgaagaatgatgtcaattttctccttttaacccccttaaactttacgagataactgtatttaaatgtttgtataactgaacagatttaactgaaacaaaaggtcatttgcaccgtgtcaacaaatgtctgtcgtgtcttcgaacgtcgaaacgtcaataaaatcatttttcaacttaaattgtggctatttctcaattagaatggtaaattacataaatgccacaaagaaatattaagaaaaattgtagcttattccccacaaaaaatagcttcaggaatattaataactcatagctctaaaagctttccaaatttataaactgttatctctactatgcaatctgaaacattgacataattacagacaaacaaggaatatgtcatatcatctgggtttaataacagctttagtttttctctccaattttattatatttgttattctttcatctttctaaatatcccaacctttatttcaatattgctgcttttaatacttctgataaggcagtctctttcttcttctacctccccctctccacaaattacatataaaactcataaatcaagaacatataacaaaatatgttgacaacggctatctctgtaacgttttccaatcaatagttattccaccagattgttacaaactgtaaaacaaaatactcctatatgctcacatctcgaaaggaatgtacactgaaatacacagggcgttccaaaatattttatcagtctttttgaaatgccccataagatcggtttatcatcttggtttacaaacaccaaatctcacagccagattcgaattcaattcaaaaataattcgagctcgaaaacacaaattttagattttccatgtgcaccaaaccgaaaaagtttgcaagaaaattggaaaaacaaggtaattgcacttgaaaacttaaaacggttaagttaattattaattataaatatgcaacaattaagattcagctgttgtttttttgctagcttttaaatacattattaatccgaatcgaatcaaaaactcggttaatggtcaaaattgtaagaagagtttcccatttatccaaatttcttgcatcaatcgagaaagaaaaataaaaatttgtgcgtcaccttacttttgcccaaaatccctcattttaagtgaaaaatctaaactgcatcaacaaaataattttattccaaaaggttataaaattatcgtctgagaaaaaactcataaatttttagggcgcatcttcacatccatgtcataagatcttcaaaaatacgccccagatcgaaacatatacttaggatgtttgaaaaggtgatcatctaatagtggaatactggaaatggggttagggaatgatggatagtttgtttggggggttagaagtcaggtgaaattggggctttttggagattaaccactcttgaacaatagtatcgccacttgtcctaggtaaaagtagatgaagtggcgggtctcgtgggtcacgtatgatccgaaatttctaccgacgatacaatgccatgttggattgtattttttgtcgaattcttttttaatgtaggcggcaatatccttttctatattgtatttttctatcgcctgggtagcgcagtctacagcatcttgctgcatgtcttcgctcatatcggcatttttaataactgctttgcggtcagtcattttgggtcccttagtgtctggagaatttgacgtgaattttacgttcgttcacaaacggagaagtaaaaaaagtgttcgatttgtgacttttcacgttctataattttattattttgttgaataaagcgatattcaattttttgataccttttctccctggcgcgtatgatcaac

SEQ ID NO: 6515 - DNA, 2727 bp, Diabrotica virgifera
  SmartBlast Evalue=1E-139; Info="cAMP-dependent protein kinase catalytic subunit, putative n=1 Tax=Pediculus humanus corporis RepID=E0VA03_PEDHC"
tacgtagaaatgaattagatttattttgttaattaatggaatttacctttactgtacattatgaagagtgttccttaaactacgaacgtagctccgaaggtatggaggttcatcagggaagtataaacatatttagacattacacaaaatctttacaaaccatatgaagattttaccataccaaaattggagcgcgttttaaaataaggaaacgaatgtttcgacacgtaaagaaagtaaaaaagacttggacagaggtaagaaaaattaaaagtgcagaagaaaagagaaagaaaaaccgacgaaaaatgaaaaggcacaaaaaataaacaaccgagcaagagaacagccgatcattcagggccacattcattcaccacctattttgaaagggaaagtcatgaaaaatatgtttttccatgatttttttttaataagaaaaattagtaaaaaaatagatttatttcaactatttctttaaatgtccgccattttttgttgtattttcgattaaaagtggttgattgtcttgtaagggtcccttctttaagtaattccattgaaattttttgtttcaaatgtgctaatcctgagaattagtgttcgccctcggccactttttttttgagacgttaacttagacgtcccctagaaaacgtgaactattttttttttatttaaagataaatgtttcaaaaaattaatgtttttatctaggtaatgaagtagctgagaattttttttttgaaaataggaatttatttagactagtctgtactagtaccttaaagaaaaatactgataacattttatattttatgtcacctatacacataccatattccaagaaaacaggaaagaatatgagtataactttgaccggtatttatgaaaaatttaggtttaagtaaccagaatagcattgacaaaaaatattaggtagagccagatagacaggatatttaaaacacccatttcttcaaccaacttcatgcaacccaatcaaacatgggtttttaacaaatagctttttgttgacttgctcgtaatagacgcaacattacaggaaataaacatatgactgatccttttaatcaaaatatgataatctaaatttttttaaatacttaaaatacttttttaattttttaaaagagaaattttaaaccatatttctacagtttctaaatgctttaataggaccaaaatatttctgttgtaatgctatttctattttgacattttatctttatacagtaactttatttctaagggtgcaagtaaaactgtatagatttaaacgatgcacaacagcgtccaagtaatacataaatgcacttaagctaatttaagatcagaagtaatatattaaaatactataaataaacgtaaaaaaattgcactagttggttgtaatggcgttctttttccgcctcttattaagcaggggattgttggagttttccaacgttttgatttgaacttggtcatagtccacacgcatggttgccagcgagcgggtcatctcctcctgtacttcgggccaaagttcaacagtttctttcaaaactcgattggtgtgaagaggagtttgtgggacggcagcgtattgcgcgatccaacggttattcataacctgatcaatagtaaatcttttggttggatcaacagtgagcattccggttataagatgcttcgcgtcaggactaatctgtttccattcggcatcaggaaatgtgaattgaccagctcggattctacttttcataccaggtgacatggacagcccgtggtcgctgtagaacggagggtaaccgcataacaatatgtacataataacacctagcgcccaaatatcacagcttttatcatacttctgggaccccaacacttctggagcaacataataaggtgtgtagcacggggtttggagagtaactaaagatgacgtttccttggcaaaaccaaaatcagttaatttcagtactcctaacggtcctggtttggaatacaataagttttcaggctttaagtctctatgagcgatatcgcgatcatgtaagtatttaacagcaatgcatatatcatgcattatttgggcagcctccctttctgtaaacgctccttcagccttatcctgaattctttggaacaattcaccaccctccatgcattccatcaccattaaaacggcagcgtgccttttgtatgtgttttcgtagacatcaatgatttccacgacatgccggcacccagtagctttgcaatgtaagtcagcttccctccaaccttttgcgctgtctggcaatattttcagtgcatatttctcctttgttgtcttggagtaacattcaaccacttttccatttattcctaatcccaggactgttctagatatttcatagtcttcagttattggattagattttggaagagctccagtagacattctgttagcattgctcatctttatttactttcttgtacttatggtatattgtgttgtaatcctattttaagttgctatcacaagttattgcaagcccattcgtttactaaaataaaaacaggtttttgcaaaatgttgcacaatagtgttattctacaaaactgctcaaaatttcctattttaacgaagagatttaacgaacgtccatatcatggcttgcttccatttcatagggatgaatatgaaataggatgttgtatcttctatcttcccctaaa

SEQ ID NO: 6516 - DNA, 2718 bp, Diabrotica virgifera
  SmartBlast Evalue=0; Info="Acetyl-CoA carboxylase, putative n=1 Tax=Pediculus humanus corporis RepID=E0VSX2_PEDHC"
cccgtctattctttgtttggtgtaaccttattggcaaaccttgaaatctatcgataatatcaaatgaaaaatgaaactaactacatagttttggttttgcttacttgttgccgtattattaaataaaaattccctgaagtataaaattctaagaaaatatcagtcctattttgtacaatctaatctatattttctagcgaacctaattgggatagtgttcgtatcacttctgctttttggttgtcacttagtttttctattatagctacgaccgcatctaatgcgacatctggacaatcctctaaagtagatttaatattattgagaactgcgtctttctttacagcatgtatattgtggctaataatggattcgtgtgagggtttctgtaactgctcttcgatccattgaactactacttcattcttgtcccatttgtatccctcagcagcacctttgtcttccacaaaccacctcctgagcattgcttcaccttgtcctactgccaattcaggttggacttccataagtgctttgattactctttcttctagtagacgtctcctcagtcgccaatagattattttcctagattttctccacggtacaatttcactgatagcccctttctctaacatcctctcaggagtatcgtgtagatctgcgaaatgtacagacacttgatggtacatgggtaaaaggaagttttctctttgtttgattttcttttctagctcaactacttctggaggtttcggcctttcgacggtggcagtgatgctggcagatcgttcacgaggttgtgtaatgctagcagaacgatctcgaggaatttccctcattatttggttgacttgctcgtctaattctttgatggttggatctacgcggtggatagctttgatgagatcctttttacggaatttaatttcgactataccttcgggttccaaaataccacccctgctatcattatctgcaaacatctccatatacctagaattaatagttggatctacgacggcccaagctcctcctcgaagttcaccgttaggtggaatatatataataattggttgtttgtattcccttaatccgtccacgatataagcaccaaatttgacaatctgttcgtacatatctttcattcctccactgaaacctctccaattggcgaagattattaatggcagatcttctctagaaaagtctttaatagcttgagatgttttgtaagcagagtctgggaaccaaacttgaccagcttgagacacggtccttgattcagaatccaaattggcgggatcggcaggtagcgtcagttctacagtcctagtttctactgcaataactcccacaggtatgcctcccaatctagctctaccagcaaccacggtctgggcccacggctgcattatttccgcccaggaacctttatcgaagaatccactctcccaaatgttaccgtcgttgggagattgtcttccttccagcatccaccttggatcgtaaggtgtctttgttggagtgaaaataacttccctgtcgattggatccactggactaactattggtacgggagacattttgtcctttggaatatatgaaagccatctacatattgtgaaaatgccctctaaatcggtttggtccgttttgtgagtgacaccgttgttgtacattatttgaattcctccaagttgattatttgaggcatacacttctcgtcccagcaatttattcaaagcagcatatccggtgagaataataggagaattttcgatttgaatagttctctgtcctagacgaactaagtaggaaccaataccaatagctctgcaagttaccatcgagatagtaaccacttcttcataagctgcagatgtttcaccggctatcataccggcgtatttcaagttttcaacacctaatccatcctctttgcctataatatccgtaattttgtatcgagattctccctcatcttcaattaaaacagcccttaccgaattcgtggagcttactttggcataatcttcgggagtcaggtataaatatctgaagcctctatccggctccttattatcttcccatgcaaccctgaatatggcctttacttcttctgctaatccgattctggcaccactgttagccgaaagataaattcttggaatctttaatttccttgctatctcactcgccaatccatataccttatcttcacgcggcccaaaagatccaatcaagtaggtaacgtcattggaaataacgataatgtctctaccggttggatattcaggtgtatacagagtgagtctccacgctaccatgcctacgttattttctcccggcactctcttttgttcgatcagtctactttcagtttctgggtccagaatgagttccacgatgtccatcaacttgtctggaattgtgatgttttcattcaatcttgcttgcgtgaattgcttccactgtaaatccaccacttgtctgaacatatcggggaaatcgtaaacgtatgtggttccgatagactgagcttggaatcgtttctgttggagatagtctttgggaatgtatggggtcgaaatgggtaagccgtgcattggtccttgcttatctccgtaagcttggaacttcgataatacccgtttccggcatcaggtacctcggtatacatactaatatctaaataataaccactgtcgtttgcta

SEQ ID NO: 6517 - DNA, 2718 bp, Diabrotica virgifera
  SmartBlast Evalue=0; Info="Exportin-7, putative n=1 Tax= Pediculus humanus corporis RepID=E0VMR8_PEDHC"
atcggaagattgcgtcctcctttagagacactcaactattcgaaatttttcgcctttcttgtaccctgctaggaaatgcaagagaaaactgcaaaagtcttaattttaacgatgaaaatcaacacggattgatgacgcaacttttaagattggcgcagaattgtcttacctttgattttataggtacatccaccgatgaatcatctgatgatctgtgcaccgtacagatacctaccagttggcgaccagcatttttagattttactacccttaaattgtttttcgacttgtaccactcactcccaaccaccttgtcatctctagctttatcgtgtttagtgcaaatagcatcggttcgacgatccttattcagcaatactgaaagagccaagtttttgactcacttggtcaacggtgtgaaacacattctacagaaccctcaaggcttgagcgacccagccaattatcatgagttttgtaggttgttggctagacttaagtcgaactatcagttaggtgaactcgtcatggtggataattatcctgaagctatccaactcattgctaaatttacagtgcagagtttgcagatgtggcagtttgcacctaacagcgttcattacttgctcagcctttggcagcggatggtagcttcagttccctacgtgaaggcgactgaacctcacttactagaaacctacactcctgaagtaaccaatgcttacatcacctctcgccttgagtccgtcacggtcgtagtgcgcgagggactcgaggacccgctggacgatttgggaatggtgcagcagcaattagaacaactctcagtgataggaaggtgtgaataccaaaagacttgtatgctgttagtgcagttatttgatcaggctgtgagaaggtattccgaattattgggaaaccctagtcagacgttagaaataactattcacgaaggtcagttaacgtggttggtgtatatcataagttcagcaataggcgggcgagtttcttttaacagtaatgaagaacacgatactatggacggcgaattagtatgccgtgtcttacaattaatgaatcttaccgactccaggctagtgcagggtggctgtgaaaaattagaattggctatgttgagtttcttcgaagcgtttaggaaaatctatgttggcgatcaggtgcaaaagaattctaaagtttatagaaggctatcggaagctttgggactgaacgacgagcctacggttcttagtgtatttattaggaaaataatcaccaatctgaagtattgggggcgtagcgaacaaataataagtaaaactctacaacttcttaacgacctatctgtcggctacagttgcgtaaggaaacttgttaaacttgacgaagttcagtttatgttgaacaatcatacaagtgagcattttcctttcctcggaaactctgtagccgttaccgaaatgcgatgtagatccatgttttatacttctctcggtagattgcttatggtcgatttaggagaagatgaggatcgatttcatacttttatgttacccttaacagcatctttcgaaagcataggaactttattagcgtcagcagattctccgatgttcgcctcagacgaagccaaaaaagcccttataggattagcgagggatttaaggggattagcgttttcgtttaacaccaaaacgtcttatatgatgcttttcgattggatctatccgaattatacaccaatattacttagagctatagaattatggtatcacgatcctcaagttacaactccagttttgaagttatttgctgaattagtacaaaacagatcgcaacggttgcaatttgacgtttcctctcctaatggtatattattatttagggaagctagcaaaattatttgtagttatggtagtagaattttaaatgtagaagtgcccaaagaacagacgtatcctttgaagttgaagggtatctcgatttgtttttcgatgctgaaagctgctttgtgtgggagttacgtcaactttggagtctttaggttatatggtgacgaagctttagataacgccttgaatatttttgtaaaattattactgtcaatatcccagtcagatttattagattatccaaagctttcgcagacgtattatgttctactggagtgcctggcccaagatcacatgagtttcttgtcgactttggagccgcaagtctttttgtacattttatcttcaatatcggaaggattaactgccttagatacaatggtttgtactggatgctgtgcaacattagaccacatagtaacttacttattcaagcaattaactcaaaaagtgtaccctgggaaagagcaacgtgtaggaatgacaacaaacagtgacatgttcctaaaagtcttggagatgcatccggaaattcttcagcaaatccttagtaccgtgttgaacgtaataatgtttgaagattgtagaaatcaatggtcaatgtcgcgtccactactaggactcattctacttaacgaagattatttcaatcaaatgcgagaaagtataattcgaagccaacctcccgacaaacaagcagcaatggcgcaatggtttgaaaatcttatggagggtatagaaaggaatttacttacaaaaaatagagaccgatttactcaaaacttgtcaatgtttagaagagatataaatgattctttgaagggac

SEQ ID NO: 6518 - DNA, 2713 bp, Diabrotica virgifera
  SmartBlast Evalue=7E-71; Info=Rab11 family-interacting protein 1 n=1 Tax=Camponotus floridanus RepID=E2ARS5_9HYME
gtctgtggtaacaacggggattaaatatgtatacacaaaacagtaaaaagtatcctacttggtgatgatgaaggatatggaaggtggtgaaacctgctgagcatcagtcatttgttttttttttcgcttcaaaatcaacaagcatttagtttttacattagaagacttttaatttggacatatactggaagctctcaaacattgacaactttagcttgcaatgattgacaaaacctaacctaatgtaatcttaaatatgaggcaaaataaagcaaattgaaagagacttgtgttctgctgtggacgagaataagttattaaatattatgtgtaacaaaagtccagtatacatttgatcctttatcgattaaatattttaattattagtgtctttaagaagcatttgggtttttatttttttaaggatttaatgtcatttaaatgtatgtcatttaaatgtaaaatatataatctagaacaatacaaatcatttgtcaaaaatagcactcagttgagtctagtcaaatgagcattacaataaaaatattttaaaatgcgtgactatgattgtctagcaaatgtgtttgagacatgaaagaattattaaataatcgtcattattaaaaaattcctgaagatatttcttcgtgtctttatacttaatcttataaacgcatgtctttatctcaaaatttacgaatgtctaaggatgaaattaaaaaaaaattgttattggccctttttgcaaatctggagactctacactattactgaaagtgataaatcactaacaaggagtttaaaaactaataattaacaaccaatcaaaaatacattgagttcaatatgaaactaaactctaggcaatatcaaattgtgtatattccaggccactttttcttttaatttttctggtgacattaatttactggcacttaaattttgctgctaaggcacaaatgtgtttaactcgtcatttttgagtattctgccattttgcaagttacataaggattctgcaaaatacgaggtgatgtttccattacacgcaataacaggtcgtctaaatagtcttctaggtcttttaatttctttttctgtttctctaaagcattttgggtttccactaaagaaagtatcaggtcttctcttgatttcccctcaaacttttgttgcaattcatttgaaatccgattattttgagatgtgacttttacttcagtttcacctcctataataatacgttgacttgaattacctgttggtttatcattgtcgttcaaaaagtcatttttatcttttctgaagttcttaaatttggagaacattccctcctttgcttcttttctaggagtttctggagatttggtggatcttaaacttatagtctcaaaatttttcttaggtacatctaacagctctgcaggctcttcttctatttgtgaagctagttttgaggaatcccaagatcttctatttaatgattcactactaccaggcctcaaaacgcctcgaggtttatttccaaccagtttggattcccattcatcctggggttctttttgatctattcttggaggcttaactggtgctacggtacttttcttctccacatgaactatattctcaacagaaggattctttaagataggtgaagcagttctattaacaactggatggtttaaagaactagctgaactcttgtgtgacaaatcgtcaagagtgaaatcatcatcgtcactgacaactccaggatcggcatcttcaatggactgcttacttttaaaattctcctgggcgcttctaatattcaagctcccaatactaccaatagaagaaccatcgtcatcatgatccttctttttgcctcttaaatttattttggaaccaatcgattttgcaaatttctttattccttttctttttttcggcacttcctaaactcattagactccctcctaaagaatgagctacattggagactgatgacttgtgtttttctttttttgctcaaattggttaaactacctgattttactgagaatctaatttttacctctaaattgcctctttctttgctctttgctggtttacctggtttgctctgtaacgtaaaccatttatttttaggtctttcatacacatctaacgtatttaatgggatattaacacgtcctaaaaattcatctattcccaaatagttgtgatgtaaaactgttaaaacgatctctgctgtatttccttgatctggtatgggaagttcacattcttcatgccattccactagctgcccagatttttccttaattgatgtttgaaacttagttttccccaaagcaatcgtaacaaagcaatcatttgtattgttttttcctttgacaagcagcttctctgctcttagaacagttacttgaacatgggtgggtacccacatcttcgaatttaatggtacaactgctgagaaaattgttcaaaaataatgtgatgtttacaggtagtcagattactatcactggataaatagggataatagagatggaatatcacaatttaaatacacatcaaacaattaaaacacaaaataggtaaacatcgttttgaagttgaaaagtctgcaagtattccaaatatttcgaggactatgacatttcaaaataactgttttttagaatattttcttaccctgacttgccctgactgacgtgtgacgtct

SEQ ID NO: 6519 - DNA, 2715 bp, Diabrotica virgifera
  SmartBlast Evalue=4E-59; Info=Rasputin n=1 Tax=Culex quinquefasciatus RepID=B0WWT8_CULQU
ctctaactttacttacttgccaattttatgaagtttacacccgtgtgctttgcttctttggcatagtctgaaaacagttcaatttttaataaaaactaagccaaaactctttcttacacataaaactttcaaactgttcccatcataagcattagggagatctgcgaagtgtgcaggttatttgtccagcaattatttcggttaaagcaaatcgttaggaatggtaatggaggctcccccatcaccccaaagtgtaggaagagagtttgtgaggcagtactacacactgttaaacaaagcacccacccatcttcacagattctacaaccatcaatcatcattcgttcatggcggattggacccaccaaaccgcgaaaccagccctgtcatcggccaaaagcaaattcatcagaaaattcaacagttgaatttccgggactgtcatgctaaaatcacccaggtcgactctcaggctactcttggcaatggtgtggttgttcaagtgaccggagagctgtccaatgcaggtcagcctatgcgtcgtttcacccagacgtttgtgttggcggctcagtctcccaagaagttctacgtccataatgacatcttccgttaccaagatgagatcatttccgatgaggaatgtgatgatggcgttcattctgaacctgaggaagaagtttccactgggcaaggaattgttgaacaccaaccaacaataactcaggcggctatagctccatactacaatccaaatgcagcccagttgcagcctagtattccggctgtcccaattcaccacaaccagcaacccccaccacatgtaatgaacccaccggtaccaactgtcaatggagctattcatccagatgaaattaacgttatgcaaggacaagttccagctcatgttcccgctcctcaaactcaaggaatcggaactactcttccaactatgcaacaacaaggactcggccaaacacccatcccacaaccaccaatcgaagaacctgagccacccatggaggatttggttgaggaacctttggacaacagctacacagaacaaccagaaattgaacaggaacaagatattggtatcattgaatcaggttatgaaaacgattataaagacgctttcccaacttccaatgaacccaagacctatgcaaacctcttaaaatcaggttctggtctaccttactcttcaccaccgtctcagacatcagctatgccgatgtctcagaatttgattcgtcccgcatcgccaccagtatcgggaggataccaaaactcaggattgcgctctaatcagaacaattcaaataatcgcaatgtttctggtggagggccaaggccaggccagcagcaaaggatgcccaacagacaagattcgggaagaaacagcatgggaggaggaagaaccatggctaatgatgatatgatatttgatgaaagacgaagatcccaaagccaaaactttaacgatgtcaatcagttgttcttgggtaatttgccccacaatgccaccgaggacgagctgcgaaacatctttagtgattacggcaacatcattgacctgagagtccacagtaaaccccccaaatctggaggaccacctggagctcgtgctccacccaattacggattcatcacatatgagacccagcaagctgtggagaattgtttgagagcaaaacccatatactacccaaaagatgataaaaacggcatcgttctcaacgttgaagagaaaaagatgaaaggcccctcttacggaggcggtcgtcccttgggaggtgacaacagagacaatagagataacagagacaaccgagaccgagacaacaggagcggtcgaggcgacaacggcagtcaacgaagaggcatgggaggcggccccgggggcgtaaacaggaacagcagcggcggccccggcggtccacaaggccccaacaacagaacgaacacatacagcaacagaagttcgggtggagggcctcccaaccggggcggacagaatgcctacaaccgccgctagtagtccgcccccccctcccccgtcgtgactgagtgactgacattgccgcgagttgctctagtttgtgtgcaagaggagtatactggcgtgaaatagtgagaaaaatatcggagccgtgttacttttgaaataaaaaatataaacgttagtgccaattgtgaacgatgagctgaaaagtttatttactttgagcctcgcccgcgaccattctaaagaagccaatctctcttactagtagttattgtatttattttgtagtctatcccaaactgctggcaaacttaaaccttttctatctttctacaacagttttagaaatatacagggtgttagtgaataggtatgaatttttaagggcttattctacatgaaaggacaatgccggtttgctctgtaaacatgtgtccgcggatgcttcgtttgcaggatgcggggtgttggaatttttatttcaagctgccaatttatttattgctctgggaccggttgagctgtgaaagtggaatttggtgagttttaggaggtggttgttgcgcattttttgacatacaattgggaattttgtattcatcgttgacgcgcatgcgggtgatggtctgaatttttttctttaaaaagattcggaccgttgcccgtgggcgcgccagtggtgaatgcaaaattcttggttgtatgtc

SEQ ID NO: 6520 - DNA, 2714 bp, Diabrotica virgifera
  SmartBlast Evalue=3E-80; Info=ADP ribosylation factor-like protein n=2 Tax=Endopterygota RepID=A8C9W7_PHLPP
atttatggtacacatcactaaagtattaatcaccacactttataaattcaaatttttagagttggaatctacaaagttagtgataattagaaccattgtggcattcagaaacggtctaaactttcaatgttagcaaccttttgtatatagctacaataccgatataacagtgaactgaaaaactctagtgtagtgatacaaagcatttaccatgggtcttaccatatcagcagtgtttaataggttgtttagtaaaaagcctatgagaattttaatggtaggattagatgccgcaggtaaaaccacaatcttatacaaattgaagcttggtgaaatcgtaactacaataccaaccatcggcttcaatgtagaaaccgttgagtacaagaatatatctttcacggtatgggatgtaggtggccagacgagaatcagaaaactctggagacactatttcgccaacactgatggactcatttttgtggttgattccaacgaccgagaccgtatcgcggaagccgaagaagaattgcacaatatgttaggagaggacgatttaagagactgcattttgttaatattcgccaacaaacaagatttaccgaactcgatgtccactgctgaattgaccgataagcttaagttgcacactttgaagaataggaggtggtacatacaagccacatgtgctactcaagggaatggtttgtacgaaggactagattggttgtcgaatgaattggccaagtgaataggtagatgttgtgaagagtagcttttatattttttattgataatgtaaaatcctgttttatttccctcagtttggtagaattcatacaatattgcttctatgttgataactttatatgtttctatcattaaaatatggataattttatccaaaatctagctaaaccactatataacgcgttggctgtgttacgagacaaatagacctcgtattatactaacagttggctctgtcgactatgttgtaatacactgtggcattactggacatatatgcctcgtaaagcactcaatgcgggcttataaatatctctaaatgcagccaaagtattaatcttagctttaactcttgatatttttcaggatttgtgtataatttattgaaagtttagttaaatattacatttttcttcgattttgttcatttaggcaatctcacattatttatatgtaacatgttattgaatcatacccgccatagccaattatatacccgccatagtctaatttcagagattatttttttgttttattgacgtgagtacattttttaagaaattcgtttcaacatttttgtctctcctctattcattcattcattaaagccggatttacatatacaagtacttggatccgagatatcagtagaactgcgaatttttacattaaataccagtgattcaaaggaaatattcattatatctgcaatagcttcatatgcattatttattttgttgatatcacaatattccttgagtttacattccacaaacattcaaatgatcagtaaaaactaataaactgtcccatctgttctccagacaatcttagttccacttttttttttatttgtaaattacatgtgctcttgtattgctacttggtttgtgttcaacttccatccatgctcgtatccaagtaacaagaggccctgagaaggcgtttatacttctgacatgcactctgagtagagtaactcgaattcaagtacttgtaagggcgactttagagttacaatccctagggattatatctaatgccatggtgttcaaaatcctatgcttaggtgaggtggattattcctttgtgtcatgtatagtttcctgtatgtctttgctgctgttgtgactctttttcatttcttcctgtccttgcaccgaaatttcgagtcttgttttgaatttaatagtattttgtattttgacaacgaaacccgatttgggcttcgaaacgttaataaattcattttttagtaaaattgtggcttatttcccataaaaaatacgtaattgttttgaattatttgctcaatcttatcaattgttacatttacatattttttatttgggtcgattttctttgtttattcacaaaattgttataacctgtctgagaaatctttcaaatgtttttttacatttccattattcaatattacacaatatctctattgggaacgtgcttagtttatctctattaggaagactagttttaaaaactaaaaatgttttcttcgatagtaaaataaacaaccagtgtttaacatctttgccacatttaaagatatttataacactacgttgggtgcgtcatgaggcatatatgtcccgaatacccccatttgccactgtgttacgacacagttgacgtagccaagcgttagtgtagtacgaggtgtcccgtaacacagccaagatgttaacaataaacataaacaaaatacaattttgtgctactatctaaataagatgtcaatgagttatagaacaaagaatattgtatgaatctattcgaccatatcataaactgactttttcatgtagtaaacaacgtttctgcaattccttcttctgtgaattcactttttgttctacctagatttaaatatttatataaataagtttcctattatatactatttacttttattgtataaatatgttaataaatataataaaact

SEQ ID NO: 6521 - DNA, 2702 bp, Diabrotica virgifera
  SmartBlast Evalue=4E-17; Info=Endonuclease-reverse transcriptase n=1 Tax=Bombyx mori RepID=D5LB38_BOMMO
attgccggatgtttcttagccacgatagttttttccttactagacctctctttccctcgatctttcctttctctattagttgagcatattcgtacttattatttctcggtatgtagcctaggtatgaagtgtttctaacttttactgtgttggaaaagttctcgttccttacctattatatgcagaactttgtttgatgttagtttaacttttccttacctattctatgtccatgaaattttgaatattctcagatatatccaaatttcgaaggcctccactttatttgcggttgctgttttaagtgtccacgtctcaactgcatagagaaaaaaagtccatcattttgataaacttactcgatttttgagttttatccgagaatcacataacagtctttgtttttttcgaaggattttctgacctgttctattatcggtcttatttctagatcaagatttatgctgttatcgattcaacatctcaggcacataaatctattgacctgttctaaaagtgcccgtttattgtgcaaggttgaggtgtgttataatattagtcgatcatactcaattatcactttaaaacgtttgatgtcttgcgattcctgtcattccaatcagtatcttgccggtctatgtctcttattttttcatctgttccacatatataaattcttgtgttgtccttgacttttctgctctcgtattggaattgtaatgcctcaatgatcgacagagtcggaggaatttcttacgacactgaaccaaataacaactgatcaatataataaaaagacgcaagctggaatagctggaaggcctgcaccttaaagaaataaataagcgatcgacttgaagcattcgagatgtggacctaccgaagaatattaaaaataagttgggtagatagaataacaaatgttgaggttctcagaaagatgaaaaaggatatcatgaatacgattaagataagaaagttacaatatctcgaccacgttatgagagcggataaatatatgtgttgctacaaaccataatgcagggaaaaccaagtattggaagaagacgcatctcctggctcaacaatctgagaaagtggtataattgcagtttccgtcgacttgttcaaagctgcaatcttaaaagtgaaaatagctgtgatgattaccaacctccttagaggagacggtaccttgaaaatagaaattgttgcccctcattatacagggaacggtccaaggtaaaggtggacttgacagaaggagaacttcctggcataaaaacttaagaaaatagttcgaataattatcacatcattattatttgaagttgctgttaatataacgacaataaagcaacgatagcgaatatagtagccaacttgtcactaaacggttaagaacaatgcttcgatagttatcaaatctgtttctaccacctttctttatttcaatcgaccgcattaactactgaggttattagcaggataattatttttgtgtattgtgtggttagtaaatgccttgttaataactaagtcatcttaattatcgttataacaagttgcattttatatccaaacgaccgtggtacttcgggttgagtgtcgatctgacaatgagatttttttgcctgaaggtgattattctcaccattttaaatatttgaatggaaatgttggagcggatataagattagaagaaccttatagacgtctaggtttgtatattgcatcacttatattctaacatttccattaaatgtagcagtaagtacacgaccatattacacaggttcctcagtaagagaaataagtaatcagcgaaatcataactcacctcaaattacatgtattttgaaattgtatcattttttaacgtacaaaataaaccccaacttacagtataataataatctaacaaaaattcaatggtcaaatacaaaattacaagaaactgtacaatcaaaaatatgccgagtgatttatttttggattcctaagacaactttatacgaaacaaagcttagtgtttatatatttttatcgcggctctttgtaaacaagagcccatagtctcctagaacatgtagctatgttacatacaaaaactttggatggagggtgttaagagacactctctgcaatagcagtagttataatgtgcctttttttattctaccctgacctccacttcgtacatctttcatcgacattattgtctacacgaatttaaacaaataaatacgttatttctgtaattttctggaaacaggtgggtgttctcgttcttcgtctttcaatctacttgttatgccatatattacgttcgtaatatacggcattggttagtaataaaaagagtattgcttattaacggatttacgttatatttatcacttttgttaatcaaaaaagcataacaccaaaaggacataaatgatgttttaaatagtaggcaaagtgctatttaatgttaatttaagaacaaaatgttaacaatataatatttacaaaatgtctgaaacgttatatgccttacaaatgtttttaaacgttttatgcttttgcagtaccatttttgttgactaagatttttaactaaaaaaaaaaacagatgacaaaaacacagtaacttaaactatcaggtccggcaataacgggccttcaagagatacactgcaggttagcgcccctgtttg

SEQ ID NO: 6522 - DNA, 2705 bp, Diabrotica virgifera
  SmartBlast Evalue=0; Info=Glycogen synthase n=1 Tax=Locusta migratoria RepID=C0KJJ5_LOCMI
acgatgcgatcattttgggttgtatggttgctgaatttttaggagaattcagaagaacctcagaagattatggtggaggcacccctccgcggatagttgctcattttcacgaatggcaagctggagttggtctcattatgatcagaatcagacatatcaacgttgctactgtcttcaccacgcatgctacacttttaggaagatacctgtgtgctggcaacacagatttctataataatctcagtacatttagtgttgacgaagaggctggaaaaagacaaatctatcacagatattgtatagaaagggcagcatctcatctggctcacagtttcacaaccgtatcggaaattacaggttatgaagccgaacatttattaaagagaaaacctgacgttataactccgaatggtctcaatgttaaaaagttctcagctcttcacgaatttcaaaatctccacgcactctccaaagataaaatacacgaatttgttcgaggccacttctacggacactacgactttgacttggacaaaacgttatactttttcattgctggccgttacgaattcggtaataaaggagctgatattttcatcgaggctttagccagactgaaccactacttaaagagcacccatccggacgtcactgtggtagctttcatgatattcccggcaaaaactaataatttcaacgtcgaatcacttagaggacacgcagttactaaagctttgagagatactatcaatgatattcagaataaaatcggaaaacgaatgtatgaatgttgtttgaatggccgattaccaaatggtaacgacatgttagaaaaagaagaactggtcagactgaagagatgtatttattctttacaacgggacggtctgccaccagttactacacacaacgtgcaagacgactggaacgatcctgtcctaaattcagtcagaaggtgtagtttattcaatactacacacgacagagtcaaaattgtctttcatcctgagttccttagttctacaaatccactattcggtctcgattatgaagagttcgtaagggggtgtcacttgggagtttttcccagttattatgaaccgtggggatacactcctgcagagtgtaccgtaatgggtattccaagcatcactacaaatttatcaggttttggatgtttcatgcaagaacatatcatggaccccatgtcctacggaatctacatagtggaccgtagatacatcggcctcgaagattccgtcaaacagttagctcaatttatgtacgacttcgctaggctcagtagaagacagaggataattcaaaggaaccgtactgaaagactcagcgatcttttggactggaggaacttgggagtgtactatcgtcaagcgcggatgaaagccttgcacaaagtattttcggactacaaagaagaaatggaatacggtctcgaattcaaatatcccagacccatttctgaacctccatctcctagttccagtaaagtaacgactccagctgcttcggtgcacggatctgatgatgaaggagattcggtggactcggaagcagagctggaagaacttagaagagctctatagaaataatgccatatgttacaaaatacccttaaataagtaaagaagctatatgcagtggcataggacctacaattgtacagggttattcataacgaattggtattgttttatctatagattttataggagaaaatattaatttcttatcaataactgggtggagttgccactattacacaatttttcgattcttctgtatgacaattttagaccgaactcttattctcgaattatttatgtttgacgttatttgtgcttgacgagttttgtggggtccagtattagatacaatggggttagagttacccaaataattcactaacattgttaatttttttcaattatcccagctttcacacttcctgtgtgaagtttcggatattacataatcgttcgttgtgaaaccttttttaagtttagagaccagtcacacggtattaattctggcgaataagtcggagcaatttacaccttaatgtcataattttgtctgcgtaaaaaagtctaatagactgcacagcacgcgcaaattatggttatatctttttccaaatgattgtgtgaatagcacaaaaagactttcttttcataaaagaaagtcgccattgccttttcagtctatcaggtggtttagaccttcgcaggttttttccacagtctccgataatcacatgaatacaaaaacttttctaaaataaagtttgtattcaaaatactgaaatataataatactactgaactatttttataaccatgtatttaatatttgaccccagttattaagaacaatataatattttccggggtaacatctgcagataaaataatgcccattctttactgcatcatcctgtatattgcgcaaagtgcaatattaagtattattcatacttatcaaaaagttttatttaaattatgtttttgttttgttggacccatgactttatatttattaaattgttatataattgatatgtgccaaaatgaaaagtacaaaattggtatggataatacttgacactcaactgccagctatggaaaccaacgatgatgttattatccctttacaggatattacctgcgttctattggtggacataa

SEQ ID NO: 6523 - DNA, 2704 bp, Diabrotica virgifera
ccacccagttacgcagaaagtgtttaattagatgattcaaggtgctgtctctaaactttgttccaataatctgtgcttactttataaataaagaaagacaagtttaaaaaacatagaacaattcgaacgattgattacccacttctatcttctatcgattcttcagttttttttgccgtgaatattagttaatatctttgataattcaataagtatttcaattcaataagaataatcttaataatcaaattaaaagaccaattgaggctgtctacgtgagaagggcacatacgacaaaatgggttttgagaaaaaccactttgaaattttaacttgttgctatagatactagtttgttgtttacaaattgagaatgctcattatagattaaaaatattgttctagaaagtaattttctaaaatatgaaatcaataaaaatgaagcttatgtttaaaaattaggaaacagaaaaagctgttataagccctttttacatagaacaggggaattttgattacaattaatttgcatgtgaagaacaagaagcattatagaattaaatacttttataatacattacataatacaatttaaacaatttttacaattattaaactatccattcaacatttcattgaagtttacataatcttcatttaagaatctgaagaggcttgtaacagccttaactttcttctggttcgcctttggtctggggcatttagttgtagtaatgaaactattgtactccttatttccaaaatctgcatagttcaaagttttctgtataactttgggaacatgaaacgccaccgctacgatcgcactttataatgtacttttgtggcaattttcgtcttgctaagacgcgtagaataatatattgcttgtactatttcagcgactttaaaacagtacttgcggttgcaattctacaaccggaagtccgaggtcaaatttctcatctttaataccatccttgggttataatatgtcattggacccctcacttgtcattctatctcttttaataacgaaggagttatattcccagacaatgtcatgaaaccggaattatatatgaattgcttatttacgaaaggatataagtcacaataatgaagttttgagataattaaaaaaactgtttatatttgaaacaaataagaaatttgtcattttttctggaatacgtatttgtttattataacaatattgtatgtatattgatttttttttaattaatagacattttattcaatattttattcgtctgacacatcttttcacgaattaattaaaaaaaaaatatctaaactattattttttgtaccgcatttgtcgaaattatcaaaaagaaaatgtttattggccaactttattaccagttattaacacacgaaatattttaaactaaaaaaataaaaattaaaagcagttttttataagatactcatacgttcagtactttccacttcagtggttggccaaccaattatttcctcataaaattcttaataatattctggaagacacctagtaatcttttgaatatcaatgatttttatgttaattggaattttttccataggataagctcgttcctttggaagttgaacattttggttgttatgactttttagaacaaaagaactggttagtgctccatcgataaacttcaatgcttcaacaagtccttttttgtattgtgattgtagcggaactccataaagctggaaacggcgaatgactccccttgtgaacgttgaatacatgtagcggaagtttctacaaaatggcacgttttttgtaatatttggaccaccaatttttaaaattcaaaatgtcattagttctgtaaattcgtaccgttcttaccattcgtacagtaaatttctgcctctttgcagaactacagattgcttcaaaaacttccattggagtattcagcttatccatgcgattgagtttgcgtttggcaaatttatgaaacgatataagtcaatgacacttatatcttttcataaataaatggaacgttctgtttactacttacctatcaacagtacctactgaagactagacttatattcttttatgactaaccgctagatataagtattgaaaacaaatttttgtcataatctcaatttacctaaaatagtgacttctatcctttcataaataagcgattcatatgttctcgtcttgctaaggagcgacaaataatatatcgcttgtactatttcggcgtctttaaaacagtacttccggttacaaccctaaaaccggaattccgaggtcaaatttttttagctcacttttaatatcatccttgggttataagctttcatttgacacctcatttgtcattctacctggtatagtgacggaggagttgtgtttacgtacggacggacgtggataattaattgttttcatttttttttttcaaaatgggtgaaaacaataaacctcgcaagacaatacaggtacgttaacctcactgccctgcacagcctgcacactaatattcaaacagttctaccaacctcatttttaaagataaacacatggaagttataccattgtaaagggggaaaacatgacagacctaaatacccattctgcttacaaagggcacgtaaggctatgtgcccttctcacgtcgaccgcctcaatttaagagattctgaaagtaac

SEQ ID NO: 6524 - DNA, 2700 bp, Diabrotica virgifera
  SmartBlast Evalue=6E-96; Info=Amino acid transporter n=2 Tax= Culicini RepID=B0WV85_CULQU
cccacagatcgccaaaataaagaactttaagtggttaaatgaatttgcatagttttgcaattaaagaaaagttacaggcaatatcataatcaaaaatgtaggcgtctactgtaagtacaattaactcggaaaatatcaaccgcacgaaaaaaattgttaaaaagaaactgtaataattttaaatgcaatttatttggaacaatttcagttcctaccatttttgtctaaaagttgaaaatgtcagaagtattgaaaaaaacaactgctataaaaccaatcaggtcctgattttagaaaaaaaaaatgaaagaggttaaaattatgtaaaattgaattctctccatttttgtgtagatacatttttgtcataaaattagtaataaataagataattaaataaattatgccctatcattattttccccttaactcggaaaacatactttttgtcgaaaagttgaaaatggcgtagatattgggcaaaaacggttctcttttaaaaccaatatggcagctaacataattcattcgcgattttaaatttacactattgttgacctccctaaagactataaaaataaaatttggacagttcggcatgcaaggtcaaatgctaccccgactggaccatatatttttgactctgatattcttacatgtacttaactttttttgtattgcaaaactataccaattccttcaaccacgtaaagtcctgtgttttggctgtgatttgggcaaattttcaaccaaatcgaagaacatgtatttttagaatggaggaaaatgtaaaaaacggtatattaacgttttctacaaaaactacaaaattttatcaaaaatttgttttgaatcaaaataacttattatgccttataatgacattttagagttcccctctattaaaactgattttctccattgatactttacgataaaaaatgcaaatttgtttaaataaacaccaaatcactatacaaacgctcaaaatgatatttacagaagaaaaaaaaacacaagaagacttacctagtatgtcttatttttatgttaaacagtagctgtacaccaaatttcagacaaatcggagatccaaaagtttttgtctgagttacttgacatggaatgtacataatcatctaaccatagtctgctgcttattggataaaatggagaacagcataataagctccaaacacaaaaccaaacacgaacatggttattataaataaatctctgaccaaaatccaattatatctaccccaatttttccaattgacgataatatctagaagagatgggacaaataatcccaaagtagaaaagaaaactgcccccatgagatctattagaggtcctaggttatctccagctgcggcagccactcctactatgaaggttagtgttagagttctccagacgatttgtactaggttttctttttcctttgacacatatggttttattctcctccatgttatatcaattggtacatagtattgcagcataaaggtgaaaaatatcgctgctgagatagatgcttgagcagtttgagccaatatttcatcgccaggtaaatttaaggtgatggtagcttctgttttgtcaccataagcaaaatagccacaaaaaccaattaccgtataaaaaactacgacagaagtcatagccgtatttagaacacctggacatcctgtgaacctgtcttcaatcatggaattttccacaggcattattgttccgattccctccattgcaaaaagaactgtagtatagaatgttggaattccatatatatctgttgctaattttcgttcttttatttctacatgcatcaattcttttatcatgtaatatcctgtaattgccaaagccaatgtcatcgtcacgtttgctataaatgagaatggtaccaaatgtttaagttctcttatctgacagaacaatatcaaaaagaacaatatgatcagtttaaagtactgtccccagtgtaacgccggtggatggtagaatccaacaagcttagcaattgactcggaaataaatacaacatagactgcatttccaacaaagtgtgtcatggttaatgatatctccacaaacaatcttgcaacttgtgaaaactttttgaactggtcgggtccgtgttggaatactgcttcagctgtttccgcgaagcctagactaccaatttttaaatctgtactaactcttttagacgccgttaccagaagatgtattgcatatgtacaaataaatcctacaaccatcgtgcctatgactcccaccagaagtcctgcactcataaatgcccttggaactgctaacaatccactcccaagggatccttttagaatatgtattaaggctccagtaaatgtgtttggatgcgcaagggttctgtggtcatatggattgtaaggttgatctagattactttccacactaacttgagttgatagttggttttggtcatttttcgttagtgttgtcgtcgaattaaaatttgaaattgatgacagatccactttcgttttcgtcattttgttgattattttatttaatatcaggcactaaaagttttaacttaaattttcaccatttactcaacttcacaccaaatttaagttctttttaaaatactagtaacaccggtagccataaaattgcacagaccgcggaaaagtgactatcgcgctg

SEQ ID NO: 6525 - DNA, 2696 bp, Diabrotica virgifera
  SmartBlast Evalue=4E-23; Info=Immunoglobulin superfamily member 10 n=1 Tax=Harpegnathos saltator RepID=E2C614_9HYME
tttaaaaacatcatatatttttagtcatttctgcttgtacaagtagatgaatcatgggttttagatatattttctttttcattttgttgtttaatgcaaaaggtgcagtaattcaatacgagtgtccaaactattgtacttgtgatgttttcaatgattatagacgggctacatgtcaagataaaaaacttgtgactgttgaaatcggtctacctcctgtagttgagctcttggatatatctcataatcaaattagaagtttggaggatgaagtatttactaacatgcacctcgcaaatttaaaactactcaatctatcctacaaccaaattagccaaataagtttacacagttttgaaggtttagataatttaaaagtatggatctttcattcaacagcattcaatattttttgggacaatggttttttgacttacgatcccttagggaattatatctacgagggaataatttacagaatataaacgaacagccacgtatagagttgccatatcttaaggttcttgatttaagtgaaaataaaatagcacacctacatccaattatttttacatctttacctaatcttgaaatactggatataagtggaaactttctaatagatctccgtgtggaaattatacgaccactacctaatttaaggcttttagtggccgatggaaatagcttacagtgctccgatatatcctttagattcctaagacgttacattaaggaaaacgatataacatatgtcggaccttgtaaaaagaagcagagattaagaccaaaaccaacagaacccgctcattttgaacgaatggaaatgacaaaatttgaagagaaaataagtgataaatatagaggtgataacgaagttaatgatggcagaaaaaatgataacaaacctaatcaagatagagcggaagacaaaaagtcattcactaaaacatcagatgatgacgatgataatgatggagataatgaggaaaatgatgtcggaccaaaggataacaatggaaaagaaagaatcacaaaattgccgaagaagcataatcaagataaaacggaaagcagaaaatctttcactgcaccattagatgatgacgatgagaatgatggagataatgaagaaagcgatgtcaaaccaacggataacgatagaaaagaaataatcacaaaattaccgaatagccacaatcgagataaaatggaaaacagaaagtcattcactgaaccattagacgaagatgctgaaaatgatgaagataatgaagctaacgatatgcaaaataaaaacaacgaagcagaaactgtaacaaaaccatcccataaaagtaataaacagaagaataacgaagaaaccgatgaagatgagattgtagttcctgtacatccgagaaaaccaaataaaaatcacaagaaaaccactcaaaagaacggctggatggtagatgacaatgaagaaaataaaaaagctgataatagcaaaccaaatattaaatatgttgaagtttgcaataataaaactgcgaaacaaacaaaaaatgcagaggatctatttaaaaataaattagacaaaatggctatgaaagtaatccaaatttctccatcaggatttgtagtacttagcatgttgcttggagtaatggttggtgtgattgctagcaatacgggcaaatcaggagatttaaaaaaacgtatcaaacaattgaacgatgcactcgaaaaggttcaacaaaaatattttcctaatgcaaaaaatccattcaaaaagggtggaggtggtaataatgaaaatctacccaaagatgatgtaaaagaagaggtaccaaaagaaaaaaaagatccccaattttcgacacccccaaaacctaagaagaaagattcagtcgaattaaatatccagtctgactgttcggattgcctggatgatctagctaagtttaaaccacgtcctaaaagtaggagaattccagagcaacaatcattattagatgaagaagagccaccattgggttcgactccagctatgagcaaaagaatacctccacagaggattcagcggtctccgagagattctggatctgaattggatgaaaccttaaaacctacagcatttcctccaagaagagaccgcagtttaggaaaatcagataagtctgattcagaaaattctgactccaaacctatatataaacctggtagacgaaggggtcaaagcaaaggaaaatcagataagtctgattcaggaaattcggactcctggccgaaatctaagcctggtagaagaagaggtcaaagcaaaggaaaatcagatgagtcggataacgaagatattgctttaaaaccaagatcgagatctggaagtcctttaaaaccaagatcgagatctggaagtccaaaaggtagacaacgcgaacagggaccaagtttcggcgaccaacagaaacttgaaggttggggaaaggaaagtgaaggggacaaataaatgttaaattattcgtttaaatacgattattttatatacttatttaaaattcatgcctattatttaggttaactgaagagctaccatgacaatttaactgagagagacgaaagctatcatgataatattatagtttagattaactttgtaaatttgtaaatttttttaaattaactttgctaattggctctgccaaaggcatttt

SEQ ID NO: 6526 - DNA, 2689 bp, Diabrotica virgifera
  SmartBlast Evalue=0; Info=Tubulin beta-3 chain n=6 Tax= Endopterygota RepID=E2A682_9HYME
aactactacttctatcaaaggtgatccaaatcaattgtaatataaatggttctgaagttgtgattggtatgagagtgatggttagctcaaaccaaatcaatatgaggacaagaaaaagtagttcgtcatttgcatttgagtcataggtatctacgattgaaagttccagtttctttcaaattcaaactccagttacctgtaaataaatattttgagatgttcctttcatttcattttctatatttctttatagatttccttttatattagcaaaaaattggaccatcttgttacactacaaactaactctactgtaaaaatatattttataaataaacatataaattttagacaaaaagggactagtcaacaacactctagcatgttgcaaataataaacaaactttttggttaaacgaaaaaagcaattttttacaatcgtgggggccttggtccattttagaagtgatttggagagggagaatgactcaaaacatgatattgtgtatcacaaatatagtttgttctaagattgattattgtaaataatcatttatgcagacgtataaaactttcacttgaataaagctgtataaatgcagcaataaataaaaaaaccgataactcatttgtctttacatctagagatagaccagaccaaatgttatgatagttgctactattcgtcattgatcacgatttctatagtaggaaggctgctaaaaagaaacaaagttagtcccaataaaaaaatataacagaaacgaaaccaacgaatatctatgctgaaaggcaagtaatttatgcagcacaataatgtttttgttcgtatggtcataactgctatatttacagttataaaaatgaatgggtatgaaaatgtatgtaatcttagaacaaacgtgttcaaatttttatgtgacaaaaatcttgaaaatgttaagagattttaaacaattcttacaattaaaaacaaggaggttgttaaaaaatgtagtatacagtccgtttaaattgtctaattatttctgaagatttgacagtatctaccttaactaatactttttctcaatttctaaaacaaatgcggattggtaccacctacacaacagaacttggacaaattctccaaatcaccgcattttccactaacaatcaatatctaaacggacgtagaccaaataaataaataatttccttgctttttctattaaattttttaagtttctaaaaacattgttgagtagggactcagaaaattcgtcaacaattgaagtcatccgcagcaggttcctcttcggcttcgtattcatcatcggcggtggcttcttgatattgttggtactcagacaccaaatcgttcatgttggattcagcttcagtgaattccatttcgtccatgccttcgccagtgtaccaatgcaagaaagcctttcttctaaacatagcggcgaactgttctgaaattcgcttgaaaagttcttgaatggcggtcgtatttccaatgaaggttgaagacatttttaatccaactggaggaatatcgcacacggcagtcttgacgttgttagggatccattccacaaagtagctactgtttttgttctggactgctaacatttgttcgtctacttctttcattgacattctacctctaaatactgcagcaactgttagatatctaccgtgccttggatcacatgcagccatcatgttcttggaatcgaacatttgctgggtcaattctggaacagtgagtgctctgtattgttgattacctctggaggtcaaaggggcaaatccaggcatgaagaagtgaaggcgggggaaaggcaccatgtttacagccagttttctaagatcagcattcaattgacctgggaatctaaggcacgtggttactccggacattgtcagtgaaactaagtggtttaagtcgccgtagcttgggtttggtacctttaatgttctaaagcaaatgtcataaagagcttcattatctatacagtaggtttcatcggtattttctacaagttgatgaacggatagggtagcattatatggttccacaacagtgtcagatacttttggactaggcataactgaataagtgttcatgatcctatcaggatactcctctctgatctttgaaatcaacaacgtacccatgccagatccagtaccaccacctagcgagtgtgtcagttgaaatccttggagacagtcacagttttctgcttcttttcgtacgacatctagaacagcgtccactagctcagcaccttctgtgtagtgacctttggcccaattgtttccagcgccggattggccgaacacgaagttatcaggtctgaatagtttgccgtacattccagaacgtactgcgtccatcgtaccgggttccaaatccaacaggatcgctcttggtacgtatttacctccatttgttgaagaagcaactgacgcttcattgtagtatacattgatacgttccaactgcaagtcgctatctcctatgtatattccgctaggatcgattccatgctcagcagatattacttcccaaaacttagctcccacttggtttccgcattgtccagcttgcaaatgtacgatttccctcatgttggaactggatctgtgtggcacgtaccttagtttgtggcgaacggaagaggaactgatcggc

SEQ ID NO: 6527 - DNA, 2684 bp, Diabrotica virgifera
  SmartBlast Evalue=0; Info=Dipeptidyl-peptidase 3 n=1 Tax= Camponotus floridanus RepID=E2B1G2_9HYME
ctcagtttcaaaagctgccatattgacattttttatccaatcaaaaaattcctaattgacggcatagaaagtaacttctatttcgataataactttgaaattttatgtttcatgatctctattagtaccaatcactgcaacagtggagctatgttttttcgcggtgccagcagatggcacataaatcgtcaattttcaacattttctatgaaattttgtttacgtgtacttctttttatagtaactgcccatgcaaattttcaaaacaactggtacagttctttttattttagaaatttccaaaaacgtatatgaatttcgcaccttcacactaggatagctccttaaaagtgaagaagcgaataaattatccatttatataaatataatacagttgtaatacaaaacggttataataacctgttaataatttacggcatttttaaaaatgagcagcatcagctttcgaaagttctaacaaggcatcatacaacggttgtggtgttgaaaacctttccacccaagattggaccaaaccttctagcgatggttcgtatgatttcaggctaacgccattttctgctgtagaggtattggcttggacaaacatttttcttggttgtttattggctagtacaattgacctccaactcaaccatggttctgtcacttcggcgtagtgattgtacagttcctgggctttttccaaatttccagttgctttgtaaatttgtaattgcaacaggaactgacctatggctaccctacctgctccctgaattgctgatcggtccaaagttaccaagaggtcattttctgaaggttgtgtgactgacactactccagcttgaatcaatactcgggatagtacgaaacgtgcctgtgaatgtgcttgcaaccatcctttaccaggctcccacatttccaatccccttccagctccggcccacacaagggaaagccaattgacgtaagtaatttcttccgcttgctgaccttcgtgtccaaatattcttagtacatccggatcgagacttaaatagagtcctacggcttctgccctgcattcttcataagtcgaacttaacggaccgaatttactatcgtaggtgtcacctggttcgtagcatgatgccggaggtttaccggtaagagggtctagaagattggaggggaagttgaaagtaccgtctttttcttttcttaataatttaccggatccgtgtcctagaagttcgtgaagtcctacctgaagttcaaaagcagggactcgccatttttgtaggaggtctgcgtcttgttgggttaaaaatggtgttacagatgcttgataactagccggaattacatttcccaaggaaacatttttaaatccttcctcttgacggatttcatcataatttggtatatttataccggctggtattccactgccagcgaaagtgagaacatccaatgatgtgaaatcaggtttcaaaaatttgtccttttcgaatcccttattccaaggaagaagtgtcaagaattgttcagcattactgaccaacgttgcaaacttggctgacattgctctatttacagctgccacaaatccttcgaattctcctcttacaccagcgggatccctgtaagtttctataaatccaatataactttctacagcaggtcctttatctttaatccaatacctagaacccaacttgtgatcatctagggacccagtttgaaatgatgaaatgtaagctttgagcatatcaacttgattctgattagcagcgtgttctatagcttggctaaggtctttggcagcttgtcctattaaaggagaataatctccacatgatatctgatatgttatattgccatcagtgtgcgtctttaatattttcttgtcttcagacgccagtctaatatcataggtaatcttgtcacctactacagttttgaacagtcttgtattatagcattccatatcctgggatttgagccagttctgaaccttttcattatcttctggagtacaattatgtgacaagtacgtagtaataccactggggctgtatcccaaacaacattttccattttctaggtcatataatctatctttgaactgaagccagattggttctaattcaggccaaattggactgagttttaataaggccccaaagcggtctttctcgaggttcggaatgaattttgtatctccaaaacccttataatttccagagttagtaaaaactccacaagtgtacacaaaaacagctgtcacttcgtcttcagtgaatccagaacttattgctttagctttgaagtctgttggtgactgggaagaaaagagtttatgtaaaagcacgaatactggtcccgattcggggctggtttggaggagtgttattaggcccccatgccatgaagctttgctaagatgatgtgcatataatttttcctttgtagttaggccatcgaatgcagacttgacttccaaagagaccacaggctggttgttgggcaaaatatactgggaggtatttttgttactcatggtacaagccaaaaaataaaactaaaaaatagaacaaagagcagttattttccctacacaagaaatctttctaaaaaaccaaagcacagattatctattttatctagaaacaataccggctagcagatgacaccgacac

SEQ ID NO: 6528 - DNA, 2689 bp, Diabrotica virgifera
  SmartBlast Evalue=0; Info=Chromatin-remodeling complex ATPase chain Iswi n=4 Tax=Apocrita RepID=E1ZUT6_9HYME
gtttaaaataaataaaaaaaatcttaaaactattgtttcttctaatcgtaaatattcatccacattcatacacacaatcaactgtaagtcattggaaagtaaagcatgtttcatttttttcttctttttcttttctacaccaccagcagaagtgtcgttcttccgtttctgtgaagatttcgagctgatttgggcaggaatacctccaagatttgaagatttggaaacttttttctttttatcaattttttctctttcctccaattcagcattttctctttctattaacgttatcaatgtgttgcatctcctttgcagctccatggcagttctcgattttaagaaccaatcaaatctgaattgtggtgacgcacgtacagctgctcttaactcttcataaacgttttctctatcgaaacccaacttgtgcaacatacacaccaaaaacctgtcttcgtcctccatgtagttcttgcctttgttggtgccgtaagaaattctcagctgatggaatggtgcacgatatcttgccattttagcatcaagtgccttcttaatactagctcttctttgtattttagtttctcctctctcaatctgggccattattctatcaatatcctgtaattcatgacatctttcccaaaacaccgcagaatattccataacttcttcaggcgttttgccttcaacatccttggcgatgttctcaatatcgtccctaccatatttctcgttggctttgatgaactgattgaaatcgcgtttactccaattggtgaaaccttgcgttaacaagttttctttttcttgctgttcgtcttcggtgagcggttctgactcatctatttttctttgctcttctttctgttgcttggacgcgtcaggtccaagttctaagtttttcggaaccttatatcccaaagatttcctgtaaaagtagatctcctggtccaaaagttcgaataatctcggcgggaaaaactggaaatcttgtacgatgggctgttttggtggtcttggagccttaggagctttaggctcagaaacccttaaagcttctctgaagtaagcatcgacggcatagttggccttcctttctcttttgggaggttctatccagttgctcaagccgatggttttctgcttctcacgataatcttctccttcgaattggtagactgattcagtgggtgtttcgactgtgaagttgcgaagtgacgattcgcccatggtttccatcttctgagctagctgagcggtcttcatttctcccttttccaatatactatcgatatcttcatctgttatttcggaatccttagaagcaaatacgtggttggcaccgtgccggatcatgttcaacatttcgtctttgtttagagtctgtgctttggaatcggctaaacgaccctgctggataactaatttgtctaaacgtaattttacttcagctctttcgacgattttttcttccacagtgttttcggtaataaacctgaaaactctgacttgtttcttctgaccaattctatgcgctctgtccatggcttgcagatccatctggggattccaatccgaatcatatataataactacatcagctgtggccaaattgatacccaatccaccggctctagttgacaacataaagataaacttttggctattgtcttcgttatactcgttgatttgtctctgtctgtcttcgtgtggggtttgaccatccaaacgacaatattggtactgtcgccaatgacagtaatcttcaagtatatccaacatacgggtcatctgagagaagataagtacacgagattcctgttccttcaatttgggaagcagtttatccagcaacaccattttaccgcaattgtacacgagatgttcatcggttgtgtaaggtggtccgggctcagcgccatcaaaaaggtaggggtgatttgtgcattttcttaactgcatgagaatattctgtagtcgcattttttctacctttcctgcaccattcactatatcaatatccttcatcagcactttggtataccattctcgttgcatcttgctcaatcctacatacacttttaactccttcttgggttttagccgtttctccacttcagctttcaatcttctaagcaagaatggttttaatacagcatgcaatctctcgaccaaggcgttgtctcccagacattgactggtgttgaaccaggcatcgaaatcatccgatgagttgaaaacatctggcagtaagaagttgagaagagcccagagttcgtgtaaattgttttgtaatggagtacctgttagcagtagcctgttagtagtcttgaactccctgagaatttcggaaagcttagatttttcattttttatacgatgagcttcgtcaatgaccatatatctccagttgaactttttaaatacagatttttctttaatacacatttcgtacgaggttacacaaacatcccattcaccaggcatcatcgtatctctgataaatgagctcctagcctcttgatcaccaatgagacaaacggctctcaaggttggacaccacttctcgaactcattcatccagtttgataaggtagatttaggaacaatgacaatatgaggaccaggtgtacttttatagtgcttcatatatccaagcagagatatggtttgtaaagttttaccc

SEQ ID NO: 6529 - DNA, 2686 bp, Diabrotica virgifera
cttttcacacctttccttccactgatatatttattcaacatgaaagatttagcaactaaacgccatactgtctgtgtgcacatgcgcgcagtatcatgaagttttactctcaatcgcgcctaaagaagtataacttcaaaaatcgataatgatgcttcacttatttataattcagttgaattccataattgtaagcaattaaaaaggtggttcaaatgtcatggacttccagaaaatggaaaaagaagtgagctgatttgtgaggttaagattaaacaattactctaattctgataataatactccataacaatataatacaaacatctgtttcctcaaatccttgatcgagtttcccaaagaaatatgatttggttataataaatcaaagatatcagattaatacacacatgcacaaaaaactatgcttcatctgatatgacattgttgaatttctgttttgaatactgttctttattttttcaattttggattttaaaatttttacatgaccaatttgcgaagttgtgagatttttaaatgtttattgtatagcagttaattaagaatactttagatatattgtatattttactatttaaaacacttgaatttatatatttattgacaaaatcctgaggttatcatgcgaacgaagatatttccaaatttagtggtcgatatgtatattcaaaaattatgtcttctgattattgttgaatctttttcggtggtagcctctctaatttgaggttcagcttatatagaaactattccagatgagacaagtaagattagcagttacatttgcgggatgtatactttttaatttgaacttaaggctatttttaaaagagcaaagtagaatcaaaaacagacttgagaataattagtctaagaaaatttatttatactcatcaattgattatcgtaagacctggttttaggccataataaacaagagaccataggaaaaaataaaagatttgctgcgggcaaaatattgaccaagaatcactcgagattgaatacatgaaaaaacagttagcaacaaatagactacataagtatagtgaaggtagaatcaaatagcaacattatattttcatttcttttgctactgatattttgctcttcgacccttacctcggtttagtatttttgtaaatcggatgaaaagtgcagtttctgtccttatgacttaattcttgcaaacgtttgatgtgtttctcatttttgggaacattcttattgcttaatttactcttctgtgacatccatccatttcagtcatgaatcattacaatccgtaggtattatagcatagctaacttcatggcgttcaaaatcctattttttattaaggtggattactcctctgcgtcattaatagcttgctgtgtatctttgctgctgttgtgactcttttccatttcttcctctccttgcacggaactttccagtttcattgctcttatgtcttcttctacgtcatccagccatcttcttttaggtattcctctacacctgggctgcagtggtgtccaattagttaccctcctcaacatatctatccattccaagcgaagatgttttatgtatcggactatattttcttctctttctcttcttcttcaatttcggcgtttgttttcattcttatttctcattctcttgttacattgtggcccagtatcgttcccattatttttctttcaaattttagaaggctatcctcctctttcttttgaattttctttgtttccatcctatatgtaactacaggtgacatacagcacaaatatatttttattttcttttgtcttttagtatataaatagcttataaataaattcccatatcaggagacttcttaacttctcagtcggagataaagatgcgattactataacaactgatcttttttgtggcatgcctcttgacataagttcatccacttgtatttttattgcaattttattcgatttattattgtcttgtagttgtagctgaagtaaatgaccaaacattgtgtaatatctttttagactaaaaagtcaaattaaggtataattcatgatagatgatgaattctaaaagaaaatgagatgttaaattacaaatgatatgttaagattataacttttcacgaacttctgtttatattgggtaaaaaatacagcgaggagcgaaaaaggaactcatataatttatttttatggtattttgtaaactaaagatacttgcaatggtggaaaattggacacattcacgaaatacatgttcttcaattaacccattcgctgccgataacgctccagcgcgtgatatggttacttaagtcaggtgccgttcaacagaatggctcctagccgagttccatcctcttcgataggcagggaatgtgttagggatgttcttaaaaatttttgaagctcaaattaaaaagtatacgttctgaatagcgcatagattacggtttttacttaaatatacttttaggtaaacaattctgttttttttgtcagtatcgatttatactaagtaggtgcatacagtttgttgaattcgagggtactaaaatttccgtctagtacataagtgtgaaagttttattatatagattttaatatatattaaataattatgctttaaaatgaaattattgtagagactacactgttct

SEQ ID NO: 6530 - DNA, 2676 bp, Diabrotica virgifera
  SmartBlast Evalue=1E-161; Info="Diaphanous, putative n=1 Tax= Pediculus humanus corporis RepID=E0VPZ1_PEDHC"
ccaaactagaactcgtccagggtcgagcaggtaccacacaaccttccggaaaactagacccagctttagtaaacaaaatcaatgtgccaccacctcccccaatgccaggcgccggtgcgcctccaccacctcctatgccaggaatgggaggcggtcctcccccacctccgatgcccggaatgggtggcggtcctcctccacctccgatgcctggaatgggaggcggtccacctcctcctccaatgcctggtatgggtggtgggccaccaccacctcctatgatgcctggaatgggcgggggaccgccgccgccacccatgatgggtggtatgcctccacctccacccggcatggttcccttaccgggtttggccaggccggatttgttaccacacggtttaaaaccaaagaagaagtgggaagttacgggaccattaaagagggccaattggaaaacgattctaccacaaaaaatgtccgaaaaggccttctgggtaagggcaaaagaggaagaccttgccgaaccagatattctcgacggtttggctaagaagttctcgtctaaacctgccaaattaccagaagatgtgacagataagagcaataatacgggaacgatgaagaaagttaaggaacttaaagtgttggacggaaaaactgcccaaaatattagtatattattaggtggatcgctcaaacacataccatatgaagatattaaaaacgctctactcagatgtgacgaagctattctatctgataatgttactgaacaacttattcaatacttacctcctgccgatcaattaaacaaattccaaaacttcaaagagcaatacaaagacctgactgaggctgaacaattctgcgtgaagatgtccgaagtgaagaggctgttgcctaggttgaaatctctcagctttaagcatcattacgtggaaatggtgcaggatatcaaaccgggaattgttgctgctacagctgcttgcgatgaagtgaagaagagtaaaaagttcgccaggattttagaactaattttattgatgggtaattatatgaatacgggaagtaaaaatgcgcaagcgttcggatttgaaatgtctttccttaccaagttaacctcgacaaaagatgtttcgaataagcaaacgcttcttcattacattactgaaacgatagagaacaaatttccagatctgcttaatttttacgatgaaatgcctcatatagatcaagccagccgagtatcgttagatacgatacagaaagcgttacaacaaatggacactagcataagaaatttaaagacggatttgacaaataacagggtacctcagagtgaagaagacaaatttttagaagttatggagaaattcgccgaggaagccagagaacaatgcgacatcatgcaaaaaatgttaaagaaagtagaaaacctctacagcgatctagctgaatattacgtgtttgacaaacagaaatacgcattagaagaattctttgtggatttgaaaacgttcaaaaatagtttcctgcaagccaaagccgataatcagaaagaaaaggaaatcgaagagaagaaagagaaggcgaggttagcgaaactaaaacaagaaaaagaaaaggaagagagaaacaaacgaaggctgattgatatgaatccttcagaaacgcaagaaggagtgatggacagtttgctagaggctctttctacgggtagcgcatttggaagggagcagaaaaagcgaagaggccatcgaccagcaggagctgaaaggagggcccagttagttagatctaggtcgagaacggccttaatagctggaagagaattaactagtgaaatattggcgtagcattaagtaataataaagaagaacgcacaacgacttgaacgctcaaaagaaatatattatataaagaaatattttatacgttgtaataatttattttgtaaattgttttccatttgtaaataataatccgtatatgtatatttagaaattgaacgaatgaatctcttatatatagttttagttttatcgcagattattatgtaaatatgataaagaaataaaaaaaatcagtcttttgttaaactttatattgccgtaaaagtagattagttttttatatattgtttttgaaattgaacaaattcttgtacgttttgaggtagtgtgcttttataatatgtaaaatgttgtaattattatatactttactgttcgaatttttgttaggttttgattttagttttatttatttctttaaaaaaaaatgtgtatggttaattaaccaaatatatgcgtactgttttgtttataagtcattttaagttaagttcaaaaagctctttaattggacctctgttcttgctattttttgtagtgggtgacatcaaatacaagatggcagataagtttatttcagaacagaattttcattcctaaaaaatcctataaaaccaattaaaagatctgttgcgctgctatgatgttcttcctttcactgcactaacagaaagagtagtaccctgtaccagtatcttcctggatcattcactctccctggaccactttttgttacaaaaagaatagtactagggagtcatcattatttacgtttgtcgctatacaggatgttagtaaatgagtgtgaagggctttaaggggc

SEQ ID NO: 6531 - DNA, 2675 bp, Diabrotica virgifera
  SmartBlast Evalue=1E-34; Info=Prickle-like protein 2 n=1 Tax= Camponotus floridanus RepID=E2AAI0_9HYME
aaaggatgcaataaaattacacattaaaattattgggcgtcaaacttttaacaatgagtagtgaaattgtagtgcctgaaacgccgaactggctgcaagaacttgaggctaaacgagagaagcgcttaaaagcaagattgggccatgaagcgggagcaggggccccttgtttaaaatgcgaagataagtgtccagggttggatcttcatttctggagaaaatgttgcaagatatgtaaatgttccaaagaagaacatcaggttcaagatgatgacatttatggatgggcacagttccagctactggggagtaaaccaaataaaatcaaaaccaaaattgtgctacccggcaagaaagatgaaattgatttggactgggttcccaaaggtcacaacgacactgttgaaaagtatcttaagactcttcctccagaacaactacccgtcaaaggttcccaagcagctcaagatagaaaacaacttcttcaaaagcagattcctatccatgatattgatcccacattgtgccacgaattaacagaagacgagctggagaaaatgaaggagtatattgcacatgttaagcaaactagtgcaggtgtagggcaacttgttagtttgtctagtataattaggggtaagctgcacatgcttagtccttcggaagcagctattttagcaagtcgttactctaaagggattccagtatcagagattgttaaattacaatcacaaaataaagctggctcattggcgcataatttagacaaaatgtctctaaagcacaagactcttccacaatataaccccaatagtttaaatgaatctgaagatgtctcaaatcctttaagttatactaaagtgcatgatagagagtatcctatgtataataacgatattaataccaatgcaccaaatgctcaattttcaacatcacttggaccaaaacaatttaatatcaatccgtctaatgcacaaatcaatcctgttatcgatcctaccattgatccaaaatatttacaaaatcccaattttaattcaaaaaatagacctagcaactttgtaaatcctaattctgtctataaccaaggaatacacagagaaaatgcaccttttgttaataacccattggactacaactctgaaaatagtgcctttgtgccgtatcaaaaagtttcgtcaacatccaaaccaggagatgtttatacggaaaatagttctgtaactgatccacggtatgctaagagtattcctggtcaaagtaaaggtgcaccttttaacatgaatccaagtcaaggggaagttgagaataatgcacaaatttacgaaaatctacaggatttacaaaaaccttcagcaaatatgccaaattatgcagcaggaaagtacaatacatattctgatacccagtcgccagttaaaatgcctaaaaatgttaaagatttagcttacagcacatataatactgacacacatggttccaaagacattgaagaccaagagaatggttttagttttggaaaatacagacaaccaggctcatactctgataatatatcaaaaaataacgctggatttagacctattgaatctggaaatgtatcatcttcacagcactttaatccagccaatccagctcaattattaaaacctggagatcgtaaggatactagagatcgtggtgcttacagtgcacagtttgaaacaataaatcctcattcaagtttgagccactccactggaaccaggtccggaaatactggtggttacagttcaccaatacagccaaatatatccagtcgctcatatcctggtctaaaagtagaagatgttgcaaaacacgatgctcagtatgaaccggccattgctaccaacgttagacctggtggtttcagagaatataatactacattagatccaaactcatcttatgcttcttctatagcagaaactagtgagaatgcaccttcagttaattacgcgttcgatcctaacaatccaaactatgtttacccccattcagaacatttagcaggcatgacacctggtttgtccgatcctttgaatccaaaatcaggtgcatttagacctacaggtaattctggtttgtctagagagacatcgggccacaatcatagtgttggtagcatggatcaaagtctgggttatcagaaggcacctggaatgcaaagttctttggaagcaggtcctggcggagtactgctacctaataatttattaaaatctgacaaaaaactgtccgagcttcacccaagtgatttaagaattaatgaagattttgttaatccaagtcaggtcaacgtaggtctcatacaagatattaactacccagagattaagacagcttctcgcgaagttgacgatttttatgaagagtacagtccagatagtattaaagaaatcttgaacaatgttattttaccagattgtcattactgcaaaaagccattcgaggaaaatgaatttgctgtatcaatagacagggctaatgtgctcttccatgctgggtgttttaaatgtgcaggctgcaaccagatacttgctgacaatatgtatttttataataaagaaagcgataacatttattgtttgagggactacgcaaagataagaggtctacctaggtgtaaggcttgcgacgagttgatattcacc

SEQ ID NO: 6532 - DNA, 2669 bp, Diabrotica virgifera
  SmartBlast Evalue=1E-108; Info="Transcription factor CP2B, putative n=1 Tax=Aedes aegypti RepID=Q17K77_AEDAE"
ttttttaatattacatactgtctccttcttttagtatttatatttgtaaagaggtccttttccctttaaggggaaaggcaaaaaagctgtcctttctatttatttgtccgcttaagcagtaatacgtaaccactttcctgtgaaataacttgcacagaaaacatcgtttcttccttgatgtgctccaaaacatcgttgtttaattgaatgtggatcgattgaggtccttccaaatagacgtcgcgtatttgatgttgggacattcctatgaatgacgaaagcttttgaataagttcttcgttgctatgtgatgtcaagaatatggcgttaaagattgaggagttttctcgacatacgtagattttcaattttggtggaattgtttttaggtgaattgcgttgtgcaagcgaatgccgtcggcactgccacaaatttgaataagatcttctctggacatcctgaacatatcgtctcctgaaaatctttcaaatgtgtccaagtacttttcgaatctgttcagggacaaccacttcgtggtttcttccggggaggaatattgagtcaactggataatattgttggtatgtacaacttccttatgttccaatccaggactagatattattttaggaataattttcccactatctgccgaagtatctgccttggacacaagtaaattattattctgaactggagggttactatctatactgttagcatcggtacttataggtgagagaggtggtgatggcataataacttcgtttggtaagtcattcaaaactgtacattcgtaactaggctggtacttctcccgctcggaaaggggacgtttcataatcttctctctatcctgcttgtgttttctatcggcccccttcagtttgaacaccttcacttgacaagctgctgcatggagtatcttctgcgcgttatgtgtattctgatcgctgttctgaaacgtttcaacctggatgcggaacggaacacctttttctccaccatgtttcttggctgtgaattctgtgctgatgcagttaaccttaatatatacgccgacttctttagtaggatcccagttaaaatgaatcatattcagagcattagttggttgggtcagatcataagccccataagaaagcggcacatctacttcgagtattctgtcacctgggcgggaactctgccatgataatatctgctccttttccatgtattgaagacgtctctcatggaaacatacacgaatgaaagtcttcagaatttttcccctgtagtaagacaaatccccaagcttcttcaatttaatttcataactctgtccctgatttaaatacgttagcgtgtcttcgttttgtttagtagctatgctagttgcagcagcaaggacgtactggaatcgcttgtcttctatcagattgaagttggttgatgttactgtgtagctatcttgtgaattaggagatggaatatttgaattttccattacattttgcaatccaaccagatttccatggctaagcaactgactgatggtgttgttgaacatattttgactgttgttgtcttccattgtgctattaacggcgacattggtatgtgttgttggactgtgattcttccgtgctatttgtaacgtggtgacatcgctggatgtgggtgagggagcttcttgtttgaaaatagtcaaaccattcatggacaatacattttcgctcacactataggaagttccaaccagatcgttggttccaatgttcaattggttctcgatatcagtgttcaaatctccataatcatcaacctgccaatgctgcatttttattgcatctctatgaatctctttctttgccgtcaactggtcgctcatctgcggctgcactttgaccatttgtttgctttttctctcttctgtttctccaccgttcgacagtctcctcttcttcaaaattctctcctgatcctcgatcttcaacgtattccatccgaacaaatccgtattattgtccatgctgcattcacttggtaagttccaggagtttttggaattattcgaattgtcgttcaacaggatgtcggaattttcgtaaagttgataatccatatcagtttaaaaagttcttactaatatcttctacggttcactctaatcttctattctactggttctactaccaagaactcttcgcgatgttctctttaaaacataacgaagaaggaattatacagtttcttaatcccggtagtttccctttgtctatgattttgcaaaaggctggagtcaatctcaagcattttttttcagcaaaaaactcgagtcaatatccatttatcacaaacgaaacaaaatgtaccctattttttaagggtattctcacgctggaaactgtgtagggtttgctaatgtttgcagtggcaagccgttttggcgaatcggacacgtcactatatagatatataacgatttaagacatccaaacacttacaatgtttaaagtacaactgtcgctcggcgaccaaacacttgaattacttaaattggtttaaattggcgaacagagatcaagtcaaattgtaagatgaattgatgatggatgtgtggtgcgtttaaatgaggcctttttttctttccctttttgtatgaaatatccgcagatacggagga

SEQ ID NO: 6533 - DNA, 2669 bp, Diabrotica virgifera
  SmartBlast Evalue=0; Info=Phosphatase n=1 Tax=Tribolium castaneum RepID=Q5F303_TRICA
tattaatttgtaataaatgaaaaatttcctaccctgagattcgaactcacaacccttggaacaaaacaattctacagtttgttactcgttaaatcaagaaacccttctttttcggtaacatgcatgcaacggcagcatgcattttaataaaaatggttgggttttttatttctgttagtaggtataaaatttcttctcttttcatttagaactgaaatatattttttaaatacttgggactgggactggcataatcctcttgtaaaatgaagactaattgagattcaagtgttaaaataaaaaaactaataatgaaattaatttaaaactttcccggtaaaggatttcaaaattcctgtctcaacaacaaccaaggttagggtattttcacatcagtttgtatgtttatacaataaacataatataaccaaaacccacgcccaacaaaaaaatcatttaaaattatagtatcttttaattaatatgaatttaactcacatataaatttagtataacaaaatgtttgacaaaaatgtacttgggtcacaaactggcctaaaacagtatcttttataattgctaaactgctaaaaacgctatattacacttgttttttattgaaataaacgagcacaacaaatgtgatattacaatctatttaagattaattatattaatatgtataatatttcaattactttgtttctgatcttttgttaatcttatccttgaagaaaggtggtttcttatgttcttcttactcaacctaaagcagcaatgcccatgatggcttcggacgctgaatattttacatccacatcagtgtcaacattcaatttgtctagcacaggcttgacttgaggctgtatgactgattgatccaattgcggcgctatccgttgtaaggttttggcaacgttgaatctgacgtttgctactttatcgttcgccatgctcagcacggtaggtaaaagcacttttgtggttatgtcactaccgcaagcttcagctaagacgtttatacagaataaacatgtcattctgtataaataattcggatccctagacattgctagaaccttaggtatgattgtactctctgcccattctgctccaaactgatcaaccaattttcttaaatttaatgtggcagcttctctaatagcaaacacatggtccatcaaccatgtcatgcacaaagcatttaatttttcatcaaaaaattctctacccagttggccagctaacaaaggcatgtattctataatagccgatcgtaccctccattttgaatcttctgccagttctacaatggctgggaggagagactgagatagttgttgaatgcctattacttcatttacacagtccaaattagaaataatattgagcctgacttcaggacattcatctttgagttgggttagaaacaatggcaataaatgctctattgtattatgtctaccaagaattgggctcaagcccataataactgaggccaaggctgatttgacatgctgatttggatctgctactagttctttaacacatggtagaatatttgtcattataatgttttcttgatgagccttgtccaagttttgacaaaaatcttttactttatttgctgctgcagctctaacttcagcttcagtatctttcaaaaggctttggaaagcattaaccaagtcagtccttgtaatttcaggtcccacagctttctgcaattctgtaaatctttctgctaccatatatcggactctccaggatgtatcacctgtgcattgtctaagagtgggcattactagttgttcaacatcttcttgttgtaaaagtgttgcaatactaacacaggcttcaactgcaagaagtcgaactgaatcctgttcatcttgggctaaattaacaaacataggtattaggtcagatttcagatattccaattcaacaacttgagccaattcaccaagtttggttgcagcagctcttcgcaccataggtgtatcatcttggcatagagccctaaaatgagctcttagttcacccttaactagtgctgagactcttggataacatactgaaaataacccacaagctgaggttctggttgtaaaccaatccccagcagccaacctctgtactagaggtacaaaatgtgtctctagatcagcaggactgtgctgctgggctacagctcttaatgattctactgctttatctctaactacagtttcttcaactgtagctaaactttccaaaggtggtagaagacaataggcatactcagaacctcctactaaatttatgaaagttcccaattgttctgcaagtgccaaaagaacctcatcttcgtcgtatatagtttctgtcaaaaaaggtattagttctgttcttgtgcgttctactccaagagccaaagctattgttgaaagtttttttattgagtttagccgaagctgcacatcctcatttttgagttcgtcgattaaaacagcaatgggatacaaagaatcatcgcctgcagaatcgctggctgccattatagacccgagtccggtggtaatcgccgatatcgtcgtttttactcgtttgtaaacacgtcgttacacacaaattttttaaaagctttgtcgacttcgccaaaaactgacctgtgttttgtgaatttt

SEQ ID NO: 6534 - DNA, 2672 bp, Diabrotica virgifera
  SmartBlast Evalue=0; Info=DNA damage-binding protein 1 n=4 Tax= Apocrita RepID=E2BJY1_9HYME
aagctcgtaggaagcgatgatccaaacatgttactgatattcagtaatttaaaaaattaaagaatacaggattattttaaagtacattaaaggatgacccaccattatgttgttacggctcataagccaactgcagttacagcctgcgtaacgggtaacttcacatcaccctcagacttgaatctaattgtagcgaaaaatacaagattggagatttatttagtaacaccagaaggtctgagacccattaaagagatcggattatacggaaaagtagctgttatgaagttgtttagaccacaaaatgaatggaaagatttgttatttattgtaacattaagatacaatgctatgattttggaatgtgttactgagggtgaaaacatagacattattacaaaagctcatggaaatgttgccgaccgaattggtaaaccctcagaaactggaatattggctgtaattgatccaaaagctagagtcattggtctcagactttatgaaggacttttcaaagttattcctttagataaggataactacgagttgaaggcaactaattttaggatggaagagctccaagtatatgatgtagagttcttacatggttgcgtcaacccgacattaatattaatccatcaagatggcaatggccgccatgtgaaaactcgtgaaatatccctcagagagaaagaattcgttaaaatcccatggaggcaagacaatgtcgaaaccgaagcatcaattattatcccagtaccttccccccttggaggagctattataataggccaagagagtattttgtatcatgatggtattactcctgttgtggtggcaccaccggtaataaaacaaagtacaataatatgttatgcaaaagtcgatccaggaggtctcagatacctccttggtgatatggcgggccatttgttcatgttgttcatagaaaccgaatccagaggtgatggcaacgatgcagttaaggatctaaaggttgagttattaggcgaaatcgcgactcctgaatgtataacgtatctggacaatggcgtgcttttcattggatcgaggattggagattcgcaattggttaaattaaacacgaaagcagacgagaatggttcttacgtaactgtcatggagtcttttaccaatctggcaccgattttggatatgtgtgttgtagacttggaaagacaaggccaaggacagctggttacttgttctggggcgttcaaagaaggatctcttagaattataaggaatggtatcggtattcaagagcatgcttccatagatttacctggaattaaaggaatgtggtctctccagataggaggaagtaagcaggataatactctcgttttgtctttcgtcggccaaactcgaattctaagtctaaacggagaagaggttgaagaaacggagctgccaggatttgcatctgaccaacagacatttacttgcagcaatgtggttcatgatcagttggttcaaattacgccaatatctgttagattggtgtcggcacagaacaaaacattgctagctgaatggaaaccaccaacagagaagaatattagtgttgtgtccgctaatacatctcaggttatagtgtcgaccggttcagcattatattatttggagatacatccgaacgaattaatattaaaaggcaatactgtgttagatgtagaaatagcttgtctcgatataagtgcgttgggggagaatcagacgtcagattttgtcgctgtgggcctatggactgatatatccgtacgattattaaggttaccagatttagttgaatcaactaaggaacttttagggggagaaataattcctcgttcattgttaatggcgagcttcgaaggtcaaaactacttactctgcgccttaggggatggatccatgtactactttacccttcataaagattcgggatcgctagcggaaaagaagaaagttacattgggtactcagcccacagctttaaaaacttttaaatctcttagtacaacaaatgtcttcgcctgctctgatagaccgactgtaatatattcttctaatcataaattagtattttccaatgtcaatatgaaagaagtcaatcatatgtgttcgctgaacgcggaagcctatcctgacagtttggcgttagcgacggatacctcagtaaccataggaacaattgatgaaattcagaagttgcacataagaacagtacccttacaagaatctgctagaagaattgcgtatcaagaacaaacgcagaccttcggtgttgtgacagcgcgcatcgatattcaagattcaactggcttgaatccggcacgacaaagtgcgtcgacgatggcccagtcagtcacaatttccagcagtgtgggatctctaggaataagtaaatctggtagcagtagtttattgtcgagtcaggcacccgactatggacaagaagtcgaaatacataatttacttataatagaccaaaatacgtttgaaatattacacgcccatcaactgatgcaacaggagtatgcaatgtcgttggtttcgtgtactttaggaaatgatccgagtccgtactttgttgttggtactgctaatgtaaatcccgaagaagcagaaccaaaacaaggccgtcttctcgtttttcactggaacga

SEQ ID NO: 6535 - DNA, 2664 bp, Diabrotica virgifera
  SmartBlast Evalue=1E-157; Info=Basement membrane-specific heparan sulfate proteoglycan core protein (Fragment) n=1 Tax= Harpegnathos saltator RepID=E2BPV9_9HYME
acctagaatttagctaaaaaggacagcggtattgagattggcatgaactaaaaatcaagacgaaaatgttggtatcagaataaaatcaagaaagtacttggacattgctcacagcagattaaaatatatacatttgaaacaggttcttaaaaagctaaagaatatgctgattttttgacaaaaactgatgatgctgtatacaacactctaaaatttgtgaactcaagtaaaactggggtcatcactgggattgacttgtcaatttccttcgaaatcttcttctgagacaagccataaatagtaatgttgttggttgtgaaatgtacttggtctcgcgggatattcaactggaatagcaccataaaaatgaaagtggaaaaagaacattttcgtaactgatatttggaccataatcttgtatcaactttcatctaaagtattctttttttcctagactattatgtaaaatggcacgatatctttatcaactattatacaatatgaaaacataaaaaacagtacaaaaaagtaaacgaagagaaaaatggcagttgtgaaagaaatatacaggtttttgccgtatttcgagcaacttagagcttaataacattaacacaaaaagcaaaaaatagtgaaatacagcaacaatgttgatctattagttagggcttatagttcaacatcatgtgcaaaatagaatgaacacaaaatagtgaacacttaatgggtgaaaaatttacaaaattaattaagtattgactgaacgactgcgtttatctattctatgttttcttcagtttaccagatcatttgaccatatgtctcggcctataaagctagaacaaggcttgacgttcaagccgtttatagcctttattcctaaatctaatctttgggaattttgtaattcgaatccatggatgcatccgttaaagcctttcgtgaacttatttcccgtcatcctggagatgttcggcgtgccgccgatgtagatgttgccttcggcgttgagcgacgtcgatgatccttcggcctcgccctcttctacccaagtgttgtctacttctatggaaccgcgtttgccgtcgcgcttcaagatgacgctgtgtctgtcgccgtcgtcgatgcggcgtttcttgttccttatattgactgcgccattgccgaggtcgaagctgtattcgaggtatccgtttttaattgctaaggcaatgtagtcgtggccatttccatcagcatctggagtctgcccgtgccagaaaataagtccgctcgattggtttgtggataattccagggctataagttcttgttcaccatcacggtgagcgagaaggtctctgttaaactctagataaccatttccatcaaagtgggcgtcgtttcgaagttcggtaacttggtcacagttacgtccagtaaatccaagggcgcaatcgcatacgtattgggaattcttcagactgcaggtaccttggttctcacatggattgggatcacacttgttttctgaggtttcacagtttctgcccgtgaatcccggagcgcaagcgcattggtattcagtaggcgatagagggtagcattgtccaccgttctggcatggtttgttggaacagctgacgtgcctgaatggtctttcggtattgccaccggagatggtattctcgttctcgtcttcggcgctgcagtcacgtacgttggccgagtccgttatgttttggatcagattgatatcgataccagcaagattaatatcgcctatgcaaccattgaaaccggagtaaacttgtactccttcgttaattctgatgtgatgtttgtcgtatcctcccacatacaaaggcgtttgaaggttgatcgtcttgtaattaccaggtaatcgtccaattgctggtgcttgtccgtcaaccatcagtctgccttcgctcaatgatctagttgctgtaagtacgtgccagttgccaggtatcagttctttttcgtctctcatcacagtgacaccatttccagcatcaaatctgaactccaaatgcctgtctttgatagccaaactgatgaagttgccatatccttcctcgctttcaccgcaatacaacaaaattccgtcttctaggttatttggtttcactttcaaggtgagctttagtttcctagcaggttttggagttggatacgcaatgtacgcgtcattctggaatgctggttcgattactgagatttctctttcacaccttcttccagcgcgaccaagaggacattgacattcgaagccgttgtcggtgtcgatgcatctgccaattccgcaggcgtgtggtgagcaagcttcccctttcagtttattgcaagttggtccactgaaccctgacgagcaaatacacatgtaaccttccttggacagagcttcttggcatgcaccttggttctggcatctactttcgctacatgattcgcacgtggtgattccggtcttattcaaagcctcgcgtaaaatgtccaagtgagcgtggcctaccttaaagcgactgatgcaacctacgaatccatgatactgttcatgattaagtacttcaggtgagattccgttatgacttggtactcctccaagatacataggctcagtcaagtctaatccggtgtattttccttcagcaacagctacaa

SEQ ID NO: 6536 - DNA, 2669 bp, Diabrotica virgifera
  SmartBlast Evalue=1E-93; Info=Inter-alpha-trypsin inhibitor heavy chain H4 n=3 Tax=Bos taurus RepID=ITIH4_BOVIN
cgggattctcagtactcagttaaaagtgttttggaataacctgaagttgtagaaacaaaaatatcttgatggtataaatattggtggtttgagttgttttcttgagtatctttttttgtcaccgacgaacacgacgaagacaagtttttatttagttattaatatgaaatataagattttatgtttttgccttttggctttattaaatataaaactaggacaatgcgctacaggagatgtgagcttcataatattctcagataatgaaaacaggggacatttaatagaaaaacgggatgccgaggagaaaccgccaattatatacgagatgaacgtcaactcaaacgttactaatcgtttcgcgacgacagtcatcgaaagcagagtcaagaatgcacacactacggctcgggaagctgtcttttctgtgattcttccagaacaagcatttatttcagagttcgtaatgataataggcggaaaaagttacaaggcgtacgtcaaaggaaaggaagaagctaaaaatatttatgacaaggcagtatctagcggccaaagtgcagcccatgtagctgtcagtgctagggattcacacaggtttacagtatctgtaaatgtagaacccgaggccaaagctacctttttgttgacctatgaagaattactggaaagaagaaataaccagtacgagctggtattaaatattaacccgggacagcttgtaaaagatttaaatgtgaaggttaacatcagtgaaagcagaccactagtgttcgtaaaaactcctgctctacgttctggtaacgaggttagtaaaaatgaaaacaaattgtcaccttctgcaaacatagaaaagattagtcccacaaacgcaattgttacattccaaccagacgttgaaaaacaaaaggtatacggaaaagaattggcaggtaaggagtcagatggacttactggacaatttatcgttcaatatgaaattgaaagggatccatccggaggagagatcctattaaaagacggctactttattcacttcttcgcaccaaaagatatagaatctctacccaaaaacgtttactttattttggataccagtgggagtatgggtgggattaaaatacaacaactaaggaatgccatgaatagtattttagatgaaattaaaccagaagacacgcttaatattgtagagtttaacagtgaaacttttgtatggaatattgaagcagaaacgtccgtaaatgttaaatttagtaattatactcatccttatgaacaacttaaggaaaatgacatgcctggacctcttccagcttcacaaccaaatattgctaaagcaaagaaacttatttctaatatggctgcaacaggaggtacctatatgattggtgggttagaaactgctctatatcttatcaaatctgaaatggaaagatcagtaggcactgataatactagacagcctattgtgatctttttaacagatggacaaccgaatgttggtttatattccacagatgaaatcaccaaacaagtaacacatttgaattccgacggtataaatgtgcccattttctctttgtcgtttggacaaggagcggacaaagcctttttaaggaagctttcactcgagaactctggattttccagacacatttatgatgcaagcgatgctgctctacagttgcacgacttttataaaataatatcatcacctctaatgaccaacatcaactttaaatatgacacggaagccaaggaactgactagaatccactatcccatatactttagaggaaacgagattgctattgctgggaagtatacaggaaacaagctaactgctgaagtaaacggtttaggcagaagaggacccattagattattaccaaaaatcgaagaacccgttacatctttggagagattgtgggcttatctgaccattaaacaaactcttgaaaaaagggaagtagccgaaaataaagacgaattgaccaaaaaggccttagaattagcacttaagtattctttcgtgactgaggttacttcactagttgttgtaaagcccaatgcaactaatgctgttgatactgaggaagcttcacaaaatagaggaggtcgttttggaggatcagtaagaggctacaacaaaatggcaagaagacctgcgattggtcattcatatttagcgtctgcctcgttttcgcccagtctccacatggattatgctccacgacctgcaccttcatattcttctcaccatgctcgtgttcctacgccaattgccacctcaactcgtcctgatgtaaaacctaaaattgaggatagtttaccttggctagcatcagctatgaattccaacagaacgattactttgcctgatggtgtttttgaactgggagataacaaccttgttaattatccccatggtgtttgtccaaaaaccccacaaggggttgaaggtgaatgtgtattaatcaaagactgtccgacagttttaccttatttgaccgatttagcagcatacaccaaatacttttgtccagtagaatcaaagtatgctggcgtatgctgtcccaaagtattgaaacgacctgctagggggttataataaattttaaactttgtaatatgtattgttaaatgaaaattatatttttatatta

SEQ ID NO: 6537 - DNA, 2664 bp, Diabrotica virgifera
  SmartBlast Evalue=1E-171; Info=Vitellogenin receptor n=1 Tax= Periplaneta americana RepID=Q8MP02_PERAM
tcagattgggactcccataccattcaaacttgtgataagtttaatggtaaaaatcatcatacactcgtggaagaacataaaaatttaatctatggaatcagtatttttcactatgctctcgaaaagcgtctagtgaatccttgtgagcatgcttcctgtagtgacatttgtttattgaaggctcagtcatatgcttgtgcgtgcccagagaataaagttttggatacggatggtcatacgtgcaaagaagtacaaccaacgcaagcacttgttggaggaactggacacgtcttggtatcaattaaacatcaatttctaggcaaacacgatgtaaccttcctaccagacctggcgaaacacgtaggaagcttagcgtttgatagttataaaaacattttgtatgtaagcgatttggaaacaaaatgtatagttgcgcttaacatgaacatcggagttagcaaaactcttgagatcgacggtcttggcagagttacttcaatggattttgatccaaaaagtaataatttatacatttgcgatacggagaggctagtcgtagaaataattgatatgaatagtctagaaagaaaaataattgtccatgacacatttggagaaactcctgaaagcattgcgttggtaccggaagatgggatcatgtttgttagctttaaacaagggaaattgggaaatagccacatcgaccgttttttcatggatggtactggaagaactcacgtcatcgaaaacggtttagtgggcccagttcgtgtagtatacgaccgcagtctttatagaattttctttgccgatctaagtactggggtaatagaatctactagcgcgaccggtgacgatagacatcattttcgtactctgactacccatccagtaagtatagcagttttgaaagatgacctattgtggacaaatcttgactccaaggatttatattggtctgaaaaaagatctagcgagtcttatgagaagaaaattacgataggttttaaagaggataacgtcaacatccacttagtgtcagtaacacgtaaacaattagaaatcaatagctgtcgtgttaataataatggatgtagtcatctttgtcttcaatcccataaatcgatagtttgtgcatgtccagctggatgggagctatcggcaaatggttttacatgtaataaaagggtaacctgcgacaataaagagatgctttgtcctcattccaatacttgcgttctgaagagcttaaggtgcaatggttttaaagactgcgcatttggtgaagatgaatgggactgccaaactgtttcccaatgtttacctggccagtataaatgcgacgatggacagtgcatcagtgaagatttggtctgcaatcatagttatgactgtaaagataagtctgatgagtatggatgtgcagataaaaacaaaaactaggatgtcctcccggacattttacctgtaaaagctccgaatgcatatctgaacgctttgtatgtgatgctttccatgattgcgatgatggatcagatgaactaaactgcgaaaataatatttgtttggaatctcagtttaggtgtgatgtcggaacttgcataccaaaagattgggaatgtgatggagaatatgactgtactgatagttcagatgagcattgttcttcagaagtttgtcagtctaactattttaagtgtgacaacaacagatgtatcgatcctaagcttcagtgcgatgggtttgatgactgcggtgatcactctgatgaaaaattcgagaaatgtttgcatcactcgaaagcaccaaaatgtacattggaagaattcgcgtgtattactaatgcttccatttgtcttccaaaatcagctaaatgtaacggaacgtcagaatgtccgaataacgaagacgaaaaggattgttcaaaatgtgaagaagatgaatttgagtgcaagcataagcattatagagaatgtattcctaggtcctggatatgtgatggtacagatgattgcggtgataatagtgatgagagtatggaaacctgttcttcaaaacttaaacctgcggcagataactttgctgttactgactcgtgtctaaccggatatagatgtcatagcggtgcatgcataaatatgacctcagtatgcaataataaccacgattgttttgatggctctgatgaagatggcctctgttcttcatcttgtgtcggtgtgaaaaatccttgcaatcaaatatgcgtaaaaacaccatctggaccaagatgtgaatgtaaacctggatataagttgttaggagatggaaaaacttgtattgatgataatgaatgccaaacggatccaccaatctgtagtcagctatgtcacaataaagaaggaggctattcttgcgattgttacaataatttccttttaagttctaataaaaaatcttgtaaagctcacggaccaagaatgaccatatacttagtgatttacggaaaccaaatccgtcacctaattcctaaatcaaacacaatggctgttctttacaccaatccaatgataaaaatatccagcttggatactctggttaaaccaaaactaatcttcttcagttcttatgaactcaagctatttataaacttgataccaccaccaacatgatgcactacatcag

SEQ ID NO: 6538 - DNA, 2646 bp, Diabrotica virgifera
  SmartBlast Evalue=1E-146; Info=DnaJ-1 n=1 Tax=Bombyx mori RepID= C7AQY9_BOMMO
ttttattccttgtttagaaagatggcagacaacacactttatgatattttaggtgtgcccagaaacgcaccagcaaacgacattaaaaagcaatataggaagctagcgaaagaatttcatccagacaaaaacccagctgccggcgacaaattcaaagaaattagctatgcctacgaagtcttgtcagatccaaaaaagaggtccctgtatgacagagtgggcctcaaaggtatgcaagagggtgctcacgatggatttggtggagacgatctactttcacacttattcggcggtggtttatttggaggattcggtggaggggggccgcggaggagactaagaggtgaagacacagtgcatcccctaaaagtatccctggaagacatgtataatggaaaaacatcaaaactacagttaagtaagaacgtgatctgtaatacttgcagtggtaaaggtagtaaaagcggaaacaccgagaagtgcagcacttgtaatggttgtggattaaaagtaacgtatagacaagtggttccaggaatggcacaacaaactcaaacacgctgtccagactgtcatggtgaaggtgaaataatcaaggaaaaagatagatgctctagttgcaagggcaaaaaagtatgtaacgagactaaaatactagaggttcatgttgataaaggcatgaaagaaaaccaaaaaattttcttcagaggtgaaggcgaccaacagccagatgtagaacctggagatgtagtgattattttgcagcagaaaccccacgaaagattccaaagaaatggtgatgatctacatgttaaacataatatttccttaacagaagcactttgtggcttttcctttgtgattcatcatctagatggaagagatattcttgtaagacaacctccaggagaagttattaaaccaggtggtgtaaagtgtgtaagaggtgaaggtatgccccattacaaaaacccattcgaaaaaggtaacatgtatatatcattcgatgttaagtttcccgaaaatcatttcactagtgagaataatctaaaagcattagaaactcttttaccccctagatctttattcacaatgcctgtaggagaacatgtagaagaagttgatttacaagaagttgatccaactgataaaggccattcgtctcgaggtgaagcttacgctagtgatgatgaagaacaatcacatgggccaggtttacaatgtgcacatcaatagaatattactttttagttattgcaaatctgtatgttgttctgcgcttctttctgacaaaggatattgtattgaaattgattccgtagaaaaatgagtttttatttaatattattttgtaatttacataaagatggcaacttcagactgtagtgtagaaggtaccattattgtttttcatcatttgctcttatttattgcattgtatacttctgttactcatatttctacatagatgaaataatacaaattattttaacataactttgttcttattttaacatgtgaattcaacaggaattctgcaacatacattttttgccaagaatctcaatatctaggatttttggagatttaatactactgatactgacaattttattgtaggatagaaaattttgaaacatcaaactatcaattaataacaataacccttctaccctaaagtgggaaatacaccattcaattcggttgaacaatgtggatgattcaaccaaaatgaatcatgtattttgcaattcaataaaaacttccaataaaattgacgcatttgtcgattatgttcaattcaaccttttattttgacttgtgctgtgtgattgtcatactttattacaagaaatacgtaataatttcatttaacaataccgccctcttgagtaacattttgccatatttgagtaaaatgttttgtaatggggtgtttgtaccgatacacatcaaatttactaagcgaaacaaatgtatctcacgttgttaaagcggtttcatgtgagatacatctgtttgcttggtaaatttgatgcgtattggtgtaaacatcctattacacaaccttttacgtaaatatagcaaaatgagttacattattttggcttaggagggcagaatagtgcatagatgaaaagacaaagagactccgatatttctcgacttatataaaaatcatgagtgcctctggatcaacaaattagaaaattataaatacaaggttttgagagagaatgtaagaaagacccgttttatcaggattaaatattgcggaactgtcagaaaatgacattaaattaaaaataaaaagtatttgaacgagatatatatgccagaactactaacaacaatgtaatttaatcatccacatggttcaaccgaattgaatgaagaataaattgaagcttatatatgtatgcttttcaattcggttgaacaatgtcattgattcatccacattgttcaaccgaattgaatggtgtattttcgccttaaggtgttggtagaatttcaaactatcaatttaatttgaaattaacaaaaaattgtttgtaaataagtgtttattatagaagtactatattaatacaggaactaaataactaatatcaatattgttctgcagctattttcttgtggcat

SEQ ID NO: 6539 - DNA, 2664 bp, Diabrotica virgifera
  SmartBlast Evalue=0; Info=Dolichyl-diphosphooligosaccharide-- protein glycosyltransferase subunit STT3B n=2 Tax=Formicidae RepID=E2AG81_9HYME
ttaaaggtttagaattgtatttgcattttttacagtttatcacatagtgaacaaagaatttttttaagttttctgaaaaaacatttaaaaatgtgaaacatatgtaactccctcttctgaataaaaatcttttgtaatgtaaatgaaaaatctaataaaaaaagaaaacaataacgagaacaacaaaatattaatttatataactattttatagattttaatctattgttttgtagacagtctctttcctttaactataatgggcttgtttttaatgctacccttcttacgtttagtattcttttttgatacgtagttactcgttttaactactctgtttgcaacggggattctaggtctgttgaattcatctggttttttaaccctgtatactcttacgagccaatgttcggtagtataagcctcttctaagtaattgagctggaaatctttgtttccaatgacggcgtttctagtacggtcaaatcctgcgggacttctgtagtctaatttcaattctccaaatcgataatagctcaatttgtacataagacagttcaacaatgtgggagaaccttcggcgtcgattctaaattcaccatgttccgtgaagtaatcgctttccctgatatcctttggatgttctccttcagcgatacggaccatccataaaaatttattaatatcatcacctgaatatccgatgacaccgccaaaaataactaatacataatcgacgtctaaagctgtcataatttcgtaggcagcagattcgttggatgacatcgcttttcccaccaaagcaatgtgactgttattccacgtgttattatcaaccagagtagtcctattcgccataccagctatttgataaccatagtcccaccaactcataactctggcatcgtcggcggtattttgagaaagccaaaagtaggcctctctgaagtcatcaagaatttgtctagatccatcacttccgtaagaagccaacacgatgcttggactcgaataagcattacttgtaacccaagtacaatggacggcaaacaacattaacaataataggattaccacagttacaatacttctcaaatttggtccaatgctgtcaggctctttcgattgttcatgtttcatctttggcacctttccagccttatcatacaaccttttacatggcgtgcatggcagttcttcttcactgtcttcacttctagtggtatcttcatctctcaaaaatagttctaatagaccggagaaagctattccactcaatatgcagacaactggagttaatgtgagcatgagacgaaccataacgccagcgaaatagactgcacttagagcatataaaacaacaaatactctttcgtcattgatatttttaatggtataccagaggccagctggaaacgtgacaactaaaatatgtaagtcaaagaagaaggaaaaccatgttgtcggttgatgttctgatacagaagctataattggtatgtgtattttggcatagccggtgtcccataatgaatagaatcttccactccatggagctacatatcctgcataagtaagtaaaacgacacctaagaacactaccgctgccgatataagtccaccaaatattacgaaggatttaaattctgattttgacatcattgattgtaagtacttcaaagccccaacagcaaacatcagtgcaaacacacctccggctgccatgtgttcactggttctgataggttggaaaccaacaaaaggaatttgcatcgagaaaatcaaccctagtatataaaatgtggtgtaactcgtaaataatcggttagaatatctacccattaaaagtagaacaaatacatgtagggggatcaagttgatgataaaaacgtaaccaccccatgctgacaccatgtagaaatatgacaatgaagctgcaacagaccaaaacactgatccagttttcacagatttaatccagagataatatgtaaactgtaaggcaaaaatggctataccttcattgtcataactacctgccactgaacgacttatataaccaggcactatggcaataaaacatgctgcaaacaatccagctccagctgaccacaattccttcgtcaggtaatatgtggaaattgatgtaaggccactgaaaacaggagccaaaaacacacatatatcacgaatatgtacatttatgtggagtaaatgaagaatgtaatgaatactccccgatgttaacatcaaacctggataaacagtacccccaacaattcttcccagagggtaccatgctctttcatcaaaccaatttaaaaaattataaaatccatgttttaccatatacgccgtggctctgtaattgaaccagggatcaaattcatgaatgatactttcgaatctgattactgcaaatagacgtgaagaaaaccctgcgatccatgctagaagtaggactacgaaaattattaaactacttattccagctttgctatttatttttgatcctgatgactttttcagaccggcttgaaccatttttgacaaccatcaactaccaagcaaagtcatgacacgcacacagtctccaaaacctcggcacaagagtcaagaggttacttatttttccagtcggcgtatcgcgattggtggatacga

SEQ ID NO: 6540 - DNA, 2663 bp, Diabrotica virgifera
  SmartBlast Evalue=1E-113; Info=Surfeit 4-like protein n=1 Tax= Bombyx mori RepID=Q2F649_BOMMO
tggcacttttggtagttagctgactgcgtggagctttttgctcaaaataaaataaaaaataaaaatgaatattccaaatgaatatgtttcaaacgccgaagatattgcagataatgttatcagaaaattaaagcacatactacctaccttggcaagagtatgtctgatatcaacattcttagaagatggattacggatgtggttccaatggacagaacagagggaatatatggacttatcttggggatgtggcaaaattttagccacactttttgttatagttaatctagttggtcaattgggaggctgtgttatggtgattataagatacagagttaatatcgcttgtggagtattgttcttcattgttgttctacagacgttagcctacagcattctctgggacctccagttcctgttcagaaacttagctctcataggagcccttttgttggttttagcagaaagccgaggtgaagccaaaagtctattcgccggagttccatcactcggcgataacaagcccaagaattatttgcaactcaccggaagagtgttgttggcgttcatgtttatcactctcatccgatttgaattgagtttcttgcagataaccttggatctcgttggttctctcttaatggttatggtaacagtaggatacaagactaaactagcagcactgaccttggttctacttcttggcaccttgaacttctaccacaatgcctggtggaatattccagactacaaacccttgagggacttccttaaatacgatttcttccagacattgtccgtcatcggtgggctgttgatgatcgtttacttgggacccgggggtgtttctatggacgagcacaaaaagcggtggtagaactatgtgattccaactagtgaacatcttgtgacaacaggtttataaatccagaaaaactgtcgactcttttttataccattatatacgcgttccttttttctctcaacattaaaatattgcaaatgaaaaaccaactggaattcgagagatcgctgttgtgttgtgtaggagcaactgcgaatgcgtggtcagtaaatgttatacaagtttggctagacagtactgataatttggttattttgtataatagttcttccgtatccaatttttttaaccattttattggtgtatttataatttttcccatatattcactcgtaactttggctaatactacgatatgagtagtaggcgttatcaattctgcctgttagagcatatacatatagctattgggaccgtgcaagttcggaagagccacacctagtgtcatagcatcagcaacatttttagcacttttaattatattggccaattatattattcctggttactggataattgtcaaagccatagcccaaaatagaataagaagaaaaagtaagattgaggttatgttattaaaagataaacattgtacgtagtaaataaaattaattattaaaatgcagtactacaagcaaaatacaattaattaaattcactttaataattgcatatcatgtccatattgtggagcaatatggatatgatatgcaattatatcaatatgcaattatatgcaatatcccattttcttcaatgacagtgggtatgaaatacacgtcagtttgacaatttcgattgacagtatgaattatttaagaaatatgttaagaaagttgcaagatttctccgctactcgcgcactatcgtttctcgtatcccctccaagtacttgcacacagcgaataacaatcaagtaataattataaatattaatgatataatactacataataatcacttttgatacagcattccaatttttaataaacgttgcattcttggattttagatttccctagaagtttagcacaaatagtctattttacgactttctcccccatttggatttatcgagtcaccactgttctgtgtggctgtagagaaagttgttaaaacgcttgccaatcaccagtattatgttatttcatgtcattgtgcaactttgctattttttaatttattaaataaccactttatctaatatttaaatacttcaaaatatttaaaaaatgatgaatcgggaacttaatgaaagaaagctagccacaaaacaattctttctagtatttgtatacatgttcaccagtaaggaccaatatcttcgtaaaattttgcatcctggtggctctacacaactttgtactgcgttacttcatcttaaaaatttgtagtcagttgaagttcttattttgggcattaaatataattaccaggcaaagcaaataaacttatctgttaaagcgaataaattaaaatatctagtattaaatttaaacatggtgttcagggatcttttgagttttcgttggtttttctagtacacgagacttagcggtcagatcgatgtaaaaatcagtgttatacacttttttacttttaagcaaaaaatagttaatttatacaagatttattttatacaaaaaagatatgtatatactctattgaggaatttttgtgaatttattttgacttggattcaatcggaacaccacgttccagagtttggttcggaaaaatgtcagttttgcatgtgtatagtctactacatatatttttataataaactgttttgttg

SEQ ID NO: 6541 - DNA, 2661 bp, Diabrotica virgifera
  SmartBlast Evalue=1E-176; Info=Lamin-C n=1 Tax=Camponotus floridanus RepID=E2AVV9_9HYME
atcatctccaaaaatagtttgattacctcgggtagacctcgacataatttgtgcttcgaccgatctctctctttgagttgtcgcttttcgaggtatttagttgcaggcgtggtgtatacgttgaaatagtgatttttgttaaaagtgagtaaatatggcatcgaaatcaaaaaaagggtcaacaccgttagcttcacagcggccggcgagccccttaagtcctaccagacattctagattacaggagaagcatgaacttcagaatcttaacgaccgtttggcgggatatatagatcgagtaaggtatttagaaggtgaaaacaacagattaacgagggaaatacaaagtacccaggaaacagtaacaagggaagtttcaaacattaaatctatgtatgaccatgaattatcagatgctagaaaactattagacgagacccaccgtgaaaaagcacgtttagagatagatgttaaacgtcttttagaagagaatgacgaactcaagtctgagttagcaaagaagaacaaggatttggctctagctgagaattctgccaggatatacgagaccagatgtaacgagttacagctcaaagcaaatcaagcggctgctgatgctaagaaagctattgcagatgctaaggaacttgagaaagaacgtgataagctacgcaaacttcttgataatcatcgtaaacagttagaagaagaatcattagcgagagtggaagtcgaaaatgccaaccaaagtcttcgagaagagctgtcctttaaggatcagatccatcaacaacagttgacagaaactcgtactcgtcgtcaagtagaaatcagcgaaatcgacggtcgcctggcagaaaaatatgaggctaagcttcaagaggctctacaagaactcagagatcaatatgaaagtcaaatggccaacaaccgtggcgaaatcgagttgctttacgaacagaagattaagaacttgcaatcagctaatgacagacatgctgcctctgcctccggtgctcttgacgaattgagacaagttagaaccagaatcgatactttgaattctcgaattagcgatttagagaaccagaacgctggcttagcagctcgtgctagagatttggagaagttgttagagaatgagcgcatgcgccatgtggaagacctcgcaatgttagaaagagaattgcatagactccgagaagaaatggctaatcaacttcaagaataccaggatcttatggacattaaggtttctcttgatttagagatagctgcttatcggaaactgctcgaatctgaagaagctcgtcttaatattaccccaacaggtagtgaagttcatgaagtaactcacagtaggagccaacgcagctcgtcgcaacgtcgcactccagtcagattgggagccaaaagaaagcgaacactactcgaagaaagccaagagtcaagcatgaatgactatacggtgaacagctcctcaaaaggtgacattgaagtcgctgatgtcgatccagaaggacactatgttaagttgcacaataaaagtaatcaagaagtcgcacttggaggatggcaagtcattagacgtgttggtgaggaggaaactacattcaaatttcacaggtcactaaagcttgaaggtaatggatttgtaacaatatggagctctgacctcaacaaagatcatgaacctccaactaatttagttatgaagagtcagaaatgggttgtaggtgataacatggtcaccacattattgaataataacggagatgaagtagctgtctccgaaagagttaaaaggcaattaacaagctcccatctaagacacagagaactagcagctggctacctctcagaagaactccaccatcaacagggtgatccacaagtagatgaaagatgtaggcttatgtaaagttaacacatctcatttaatttttttatttacagttaaggttggaatgttacagaagtaggttgtgctccttacttacgctttttaaactattttttaagtgatgttcttaatattataagattctaggacagaaggaacacaacttatactgttattgacaaaaaacttactgaaaattgcaattagacaacagtagtaagtttaatactaagaatacaggatgaggtaataattattattctttatataaactgtctttttaggagttttatatatattttttaaatatcttgcatataagtcttgaattacagttgtcatttttataaatttaaacctgaaaaatacattatttcgcattaatacctcatcctgttcgatagtttcttaagatagataacaaactgccagttcgataagttttcttttaactaacacaattgtttattagtataatataattttgaaaaattactgtactgttgtccccaaaacattaaagtgttctgcatttatttaaagaataataaactttttatattaatggtagttcttttgtttttgaggtttttcactcagctgtttacgcttgttttagttagataggtgttgcaaaaactatagggataaaaatctagatttggtttcagttacttgtattatattttattgtatatctttattcttgatcttcgaaacttaaatctgtaatttaattacaaaatacagtaatgtgt

SEQ ID NO: 6542 - DNA, 2659 bp, Diabrotica virgifera
  SmartBlast Evalue=0; Info=Glycoprotein 93 n=3 Tax=melanogaster subgroup RepID=Q9VAY2_DROME
ttacaataaataattatttataatgtaaaacaaaaatacaaaggaattgtaattacagtcttttcagatcgtacaattattgtacttaacacttgcacttcacacactcaaacaaacaagacacttaaagttcatcgtggtcctcatctttggagtcagcatctgcatctatttgctcttcttccgaaataccgtcttcgggtaaatcttcttcttcttcaatttgttcgtctaatggcactccaagtgttttcctcatcatcgcttcaatagagtcagcgaaatctaaggtttcctggagcatatatccagatctcaacgtggccgttctgaacatcatcttggccatatctttcgctgttgggtcactggaatcatcaagtactcgtttaagaagttctttcatcaaaggatgtctcggattaatttccaaagttttcttctggttaaggtagtaagtacgttgtggatcgtcagatttttgatgagcgttggataaagccaacctttccatatttccggtccagccgaacagactagcaaccaaagcgcaaggtgagtcagacaatctttcggaaacggtggcctttgcaacttcattcttcaatgcatcatcggctaaccatttggtgagaggttcgaacgttttctttaattgttccaattgttctttacctccttcggtttcggttagactgaaaccttctttagctacattctggaacttcttgccttcgaattcgggaattgcagagattgcatattcatcaacagcttcaaccaagaacaatacttcgtaacctttacgtaataacctttcaacgaagggtgactttgaaacttcgtctttggatgacccggcaatatagaatattttgtcttgctttggtttcattctctttacgtaatccgacaagttggttaaaccgcttccgttggatgacaagaatttcaacaatttggcaagccttgtgcgattggcagggtcttcgatagctcccagtttaatgttggtagaaaattccttccagaatttgtcatattcgtcatcgggaagttttttcaacatgtcaagtactttccgaatcaattttttcttaattaccttgattaatttgtgttgttgtagcgtctcccgagatacattcaatggtaaatcatcagaatctacgatccctctaacaaaactaaggtaagatggcatcatatcgttgaattcatcagtgataaatacacgacggacgtacaatttaatattgtcagttttagttccatacctattaaagctttctgatggttgcacagtaggaatatataacaaagctttgaatgtaacttctccttcagcaacgaaatgaattttggtaagtggatctttggtgtctttggtcaatgcctgataaaattcattatattctgcatcctcaacctcagttggttttctggtccaaatcggtttgctgtcattcaacaactcccaatcccaaacggtcttctccacttttttagtcttaggtttatcttcttctttttcttcttctactgccgcatcatcttcatcggcagacggagatgtttcttctgaagcatcgtcatctagaggttcttcaactgtttcagtgtgactagtccataagtaaattgggaaattgatgaattgggaatactttttaacaagatttcggacggtctcgtggtccaagaaatctctggcttctggtttcagttccaaacttacagttgttcccctttttaaagtgtctcctcttggatcatctacgatgctgaaggatgctgaatccgattcccaaatgtattgtttgtcttcattatgtttactgctgacgataactctatcagcaaccaagaaggccgagtaaaatccaacaccaaactggccgatcatgtcattcatatcttgtgaagtatcagcattttgcattttacttaaaaattctgctgtaccagatttggcaatagttcctaaattattaacgagatcttgtttagtcattcctataccagtgtctgttatgtgcaacatgccagattctttatctgcttttattcgaatattcatctctggttggctatccagtacactcttctctgttaatgacagcattctaattttgtccaatgcatcagaagcattggaaatcaactctctaaggaaaatttctttgtttctatataaagaattgataattaacttcatcattctgttgacttcagtctgaaaagcaaatttttcagacttttctcgtaactccttaagttgggcaacattgagtccatccaatttgattgcctcttcttctcttttaacgacttcatcatctgttcgagatccttctctgctagctccaatatctaaatctatggtttctacagatggttctccgatttcatcgccccttacagtaccaattaagacaaataaaccaatagttaataataaaaactgcttcattttgcagccctgtttttaaattttagttcatcaagcaaaaaatattacaaataccggctcggtgtttttggtagatgatgggagaaattgaattcaccagaaaaactacacgataagtgtcacaggacgtgaaccaataaaaagtctacagacaaactcatgtccatatggctgcctggtattggc

SEQ ID NO: 6543 - DNA, 2656 bp, Diabrotica virgifera
gtcttatttggtcacacaaaccatgtaaacaataaattaaaaattccttatgagtgtttaacgttgtaaacaggattgtttggagtcaaataagctcctcccaattttgtgacgtcaagacttaggatgtccattcactattataggtgtaacttttcaaaggatacgaagggggaggggacttttgactagcactgtataacaaactaacgaaatattttatatcaagttgatgaaagacctttgaatgcaggtaagtatttaaataaaagctggcttttatttagttggtactccgatatgttatttttacattgcgtacaatctgatttttaaatacctaacatagatagcatttatatgtcagatgttccaatatgagcattaataattgtgtattgatgttcataggcgtagatagggactacaaataatgaaatttgccgtgcgcaactttgttgatgaatgtttggagggtgttgtactttgaatattgctctgaatatttcttttggtttccacaaactagaatttgcttttaattttacattattaacatattttctacagctgttgtattcagagttcaataatatcttttagtggtaggaattttgtaacgggatggatgagaagtactctattttcgcctatgttgatgttttaaggtgcgttaagatttttgcatttgcacttatagttgggtcttaaaagattttaaagctgttacaaggtattttgcttctaggtcaaaagatattgatctgtcgatacctattataaaccaagtttcagattatttatataatgaactgggattaatacaatattataaccaaacaagacaaattttggactgaattgattattttttattaaggtgtcataaattaaatttttattgtaaaaatctgtgagtctattcagcgatatgcggttattaaaaacttttctgagatattcaaaagatctgtatgatatttgatcataaaatgtttttaacctctggatattttgagcttctccaatgtgataactacagtactttaatagtaaaaagaagattatacaaaatggcgtttaaaaccgttcaagttcccgtccgactaaggctaacctcaggtatgatgtccttgaactttaacctagttatgtgacctacattaacttgtatcagttttgtaccgaagctggaggattctggactgaaaggtgaaaataagtatactacgttcgttccaagatcagcttagacgccagtttcagatacgtgatggataggtgtcatgtcttcgcagcttacaagatgcgattacacgacacatctaccgatcaggcgtctgaaactggtgtctgagcttacctttggaacgaacacagtgtagagaaaattacatctaaatagatcgttcagacctttgaaatatcaaaaaaaaaatgttattatatttctcagaaagctcgggctggtttccttgtcatttatgagctcattacggaaatttttgctggatttatttttattcaggtatttgaaaatatttgttatttgttataaaagtatgttaaccctttagaattcgtacaggagtattgctcctacattcatagttaatgtctgtgataactatgtgatatgtctaccaaaaactaaaaacgaaagtttgctaaacatttaaattctggtctactattggaaaaatcattttaatgtatagaatatcattgtactatgttcttaaacagttaatcctaaaatagttacatattgtacaacagaaaattaattttggtgtaacatcaaagatagtgtacacaggatcctctgggcatatctgattcatttatgttttgtgttaattaacaatgaaaaatattcaatttatccacttgaattttgttctcaatgccgtaataaaaaatacgacctattgttgatgcttattttattttaaaacagtgagtgtttttcttatttatatatcctatacttataagacaataatttaaaacctctatagctgtctaaattgccaatataccaaagaacttccacaatgttgtttactgttttattctgaaatctcagtattattattttattgttcttactgatacattcccaaagccttacgtctataaagattatatgaaattattatacgtaaataatttagaactgctatttttaatttgcaattcggacatatatggcccaactataactaacttgccagcgattctgtaattcccagtgaaactgcagatcatttctacagtttatgtagttaaggatttttatttaattatcgttttattcctttttgttttcattgattaaaaataaccgaaatcgattgggaaattttaaaaattatgacactccttcgaacattgcaaataaaagacggacatatatgacccaactataacccaactgtacttattgtgatacctaatttatagtaatagatttgatgttatttattaaacataaattgatagaaaagtattaaaagttacttatttttataaattttgtacagtgtaaccaattttattgactgcctagattgaaaatatatgattgcgtattttgtaattttgtttgagaacttgaaaacttttggaaattgtttatgtgaaataaatagaa

SEQ ID NO: 6544 - DNA, 2646 bp, Diabrotica virgifera
  SmartBlast Evalue=1E-81; Info=Ubiquitin-conjugating enzyme E2- 17 kDa n=15 Tax=Schizophora RepID=UBCD6_DROME
attttaatggtgatatcgctaatttgcaaaggtcatatgagtcattcttggccagccaaaatgagaaactgatgaaatagttacataacatgttacttatgtcctaagtaacaccgaaatttgacaccatttatgttattcggtagcaaaataatacagagaatcaattttgtattcggtaaaagattaaatgataaaacaacatggcaaaagacaatagagtgtctttaatatgggtgccgggtcatcaagggatgcatgggaatgaactagcagatctcttggcaaaacatggcttgagaaaaacctttctgtagcatcactaaagatgttacgaaaaacgagtggctgataaagaataatcaaacgaaatgaagagcaaatccagactaaaaaaataatcaagaatattgataaaataatcccgaacaatttgatgaacctaaataaacgaaaaataaaaacggacactgaaatggggactgcacattgccgtttaagcaagtttctgcgtcttttcgcggccctcgtcgaaacatggaccaatttgttctccagatttgattccccgtgactttttttggttcctaaacctaaataagtcatttgacgggcagaaatttaagtcgattgaggaaatcatcgatgtctcggaggtctactttgcaaacttcgagaaaacgtattttcgaccgagttaaagaagtttgaccatcgctgggtcaagtgtatccaattgaaaggagactaagttgaaaaataaatcgccacttttccaaaattttcctttttcttttatatgctaagtacttatcaaactgtcctcgtataatcagtttatcacttttacttttgaaacaaaatttgaaagtcaatgtatttttgaatcattttcattagaagcaaatttttcgaaaaaataataagaagtggtaatgcatgatttgtaacgtacgagtgaacttcatactatcctagtattaatttgagacctttacacatatttatttcaccaatacatgtttactctcagagtagtgtcagattataacgaataaacatttttctttttttttgtcaatgactagtgtcaagtcaaaatcatttatcaacacaataagggttcacattttaaataattataaggtcaaaatgtacaaatatggaaaaaattgagatagtaccccgcttgtcacttgatttttaaatatttgcaatctattgtaaacgtgataaataaaattcttttcaaaattactgttgtaatttttgctagcttaaaactgcgcattttacttttaattatctacacaaaatatgttttattgtacacattaaatattaacaattgtttttaacataaaacttgcacctactacaaagaaaaaccaattactaatccacattgtttgcactggtactttcaatatctgttaattataaatgaaatttttgtaaaggaaagcttctacagcgtgtttcataagttctattcctgactaaatgaagaaagtttttaatgaaataaaaataagtcgggttattgaattaaactgcatcaaaaattttactgacaccatatcattcaggtggtagaatacctatgtcatccacctgacaatccagatttaagttctggtgacctttctactatatcaacaaaaaacattactttctataataaagttttaactttgtgcacttgtggggtattgaagggaatattgaaaatattttatgttcactattttatatattcattatggccaacaccagagcaacgtctattagtcagtaaaagtgaatagaactttccgaaacattttatattcagttaagtttttggaaaacaatctttattaaaaaaaaagaacaaaaaaataaaaacgagttgattaaaactattagttactgagaaggcagggcctctgtaagaagtagctgtaattttgaagcgcaaagtgagaatcagttcgaataaataattcgacaatgacgatgagacaactgctaatcgataaagctctgttccacacatgccttcactcttttctcatattctcttctattttctttgtacagttgtgcggccatggagttggccggtgaattgggatttgggtcactcagtagagattgaattgaagttaaaatagcagatacgtcataagtaggactccatctattttgtaatatatctaaacatataccaccatcagcgtatacattagggtgaaacatatgactaacgaatctgactgttggtggtttatttggatattcttctgtaaactcaatagttagtttgaaagtaccatcttcgaagggtgtgtcatgggggccaaatataactgcattccagatcattatattattgtcagtaggagcaccactgactccggtaggtgggtcctcctgtaatcttttgaagtctctcataaggcgtcttcgggcaggagtagacatgttgtatttaaatttaatatattatatttcacctaaatatatttatccagagttttatatacaacaaaacacagtaaatttgcactatgttagaacattcaattaacttccaaatcccagaatatctttcttggcatgacatatatgtctaatacagtctaataacagttttgcccaaca

SEQ ID NO: 6545 - DNA, 2636 bp, Diabrotica virgifera
  SmartBlast Evalue=1E-162; Info="CG2316, isoform A n=5 Tax= melanogaster subgroup RepID=Q7JUN3_DROME"
acacggtatatttacttttaattaatattaataaataattattaaattatgctaggtaaatataccttgtttatttatctattaacgatattgatattatttatatcattttaaagtgcgcatgcgttttgctgctactttgtcgccgactagtcgccaacaggcacccgcgaacgcacttaataaggcaaaagtgatagcgcatacggtcttcaagatcttcttacacaagaatggatccctattgccccaaaacgatattggtaatttaattttaagaatgccaaggcagcgtcaagctgtattttacgtatacttctggaggaaacacagattattcttaaacacatttgttgttacatttttatgttaaaaatgttcattaaattagtgtacttgttaacttttgtttgattatttcattatagagaaatcatattacactgatattaagatgaattcattgctgactaatcaggcattataacggtatgccacttttaaaaatccaatcaaaattgatgtatatatatatatattacaaaaacactttgtgttctttagacaattgtgatgtgttttttgttcaaattgctcttaaactcattgcaatatgtctttttaaactcggcaaacctgccgaaccacgttgactagagtgacgtacggtgttgccaagttcttgaacaaatacataataattaccaaaattcactagattgccgtatagatgttgccaaatccttgactgaacacgtaagaattttaaagttgacattaaaatagaaaaaaaaaatgaaaataaaactttttttaaaatgctcagagtccttcatttaccggtattgtatagtccgaaaaattgtttggaattatcacagcactatcaccaggatgaaactgaaagagtaaaggcaagatttgtagttttaaatgattcgataggacgtagatgaatactatgaactcttctcctgaatatttgaaatctacagtaaatgcttgtcagttagctaatctctaagtagttatgaatcctctccaagtaatttgtttagttcgtccagtcttttcgatcgttcttcgttgttttctgcttttagaaggtcctccttttctttcttcaaggtaagtctgctggtgtggttcaactgactaaattcccatgatcctgtaccgtcgaattgaaggatgtgcgtatggaatttccatagtgtaggtctatgtgtgatggtgagtagagtaattcccatgtctatagcactttggtatatgaagctttcaacatcaatggagactgcagaagtgcattcgtccaagagagcgtatttcggtttgtgataaaacaatcgcgcaatagccatcctctgtttttcaccaccggataagatgtcagtccaatctttcatttcatagaatccgtccctctcgacgatatgatctagatgtaccatagtcattattttcagtaaattttcttcggtaatacctttctttaccatatccgtgtaagtatctgggtatattacttggtctcttaaattacctattaccatataaggcctctgaggaatataaaacattgaattttaggagtatgaagctctccaccgtaaataggccataatccactcaatattctgaacaaactggactttccacagccatttggacccgtaattagcaagtgttgtcccggagtcaattcaagacttagagacggacacactatatcgcaatttggagttactataggaacattctttaggatgatctcgttattggttgagtagatgattttacctttggctaaaggttgatcaccacggaactcaatctcgaaatcagcagacttctctttcttagcgacgagagtcttgtggtaaattccgttactagcttcctctaaaacctcgaacatgttggccactctggccgtatgaccagctaactcgacgatgttcttgtagctgctcatgagccgttctacagcatctgagccagttatcaacaggttcttggaggtagtgaagtagtgcgttcgttctgatacgctatcttctatttggtcgtcggctatgtcttcagcgatgagagattctgatttggaggagaagtctggtatggaaagaagacttttgttggagattttgcgtcgattgccggctgctaggagaataggcagagatacgactattatacctgctccagaccacacatatttcatcaagaattgctccaacatgatgaaccataatttcacaccgaacatgtgttccaagtgtttagataaaactctaaaagcttgtctaagttgactttcttcgacctgatggcctccgtagaaagcgatttcttcggcattgctgacgattcttccgtggacgtgtcgtagatatcctttcttctccgcttcttgggctaccaagtggccgaaccttggagacacaaaccttaaaagtaaagctgagaacatcaccactccgcaaataatcacaggtcctatcacaagattcgaatggcgactcttcaccaaattggctaaagctataaccatgagaagtatatcgaaacatggcttcgttatctgtccgtaaaggtgcgacacggtgttggcgacagtttctatgtcatct

SEQ ID NO: 6546 - DNA, 2630 bp, Diabrotica virgifera
  SmartBlast Evalue=0; Info=EH domain-containing protein 1 n=2 Tax=Aculeata RepID=E2C8F3_9HYME
cgcccgtttttcttcagttttttatggttaaaaaatatctattttttattttttggtcaaactgtggtaaattgtcatgttaaaaaccttcctttttcaaatgaagtacgatatccttgtttcagatatcccaaacctgagatcaactgtccgccatcatttttcgaggcttcgacttttgcgccctctacaataccagtgcacgtgcataaatgaaaaaagatatatcttctgtactctctaagagttagatattaacatgtaaaaagttttatgttcacctccaataaaggtactgagaaaaaaaattcttgaaaaaaatgattatttttggtcctctaaagtgcactagtaccttaagattgtagttctaaacacccagcggttatgaacccaaaaaagggataaaggtgatgctgaggttgattcccttcatctacattcgaataacatattcactagccaaaattctacgccgaactgagagatagaaagatacaaatgaaattattggtcttttggtttaaattcaaatgtaaactgaaagttttatcaaaattagaatgaaatgtacatgattttagagattgtataaacggttctactgtaaacgtaaaagataagataaaaaaagtggaattacacaggcagcttacatcactcatatcagtaggagacgattattgattaaaatatgtaatatgcaagcacactgtcgtgtatgtgtataacatattaccaaatagctctagatttggctaatatacagcccagcatgaacaacaatgttttgtggaatattcgatattttataaaaaaattgcaaaaagacaaaaggcagtaaaatcaatgtttgtacatacatgatataggcacaaaactttgaaatgaatagcacttgtggactataaataacgaaagaatataaatattaacgctttgaaggtggaattaaatgtgtgggcaatactgaaggtatatcattaccgtcgatttttatattgatcaagtgcattgctaaagcaaattcttcgtcgtccaacatgccgtctttgtctacgtctgcgagtttccatactttactcagtactgagtttggtagtttggatttcaccatctctgatttggcagtcattccagatacttttccatctactggctttaacgatttgaagatgtcatcatatttatctttctctctgcttacaatccagtccaactctcctgccccagcatctattccttcgcctctcttgtaaccaaaaggtgaaattgtatcttctacacttgtgaaggctccaccctgtaccatgttatcaccatttttggcagacttttcctcagcctctaatggaattttggccattaatattgatatgtcttcagctaacattctatccacaatatctaataattttggttttagtggattaaatttactgaaatcaagattggctaagacttcctgcattttctttatttctgggaaatcacctggagaaatctgatgttctctctgtagtttatcatatatttgacccaaattcttaatgagttctttcttcctagaatctttaccaaatacggatggcatttcttttcgtagttcagctattatgtaagcatgtacttttgcgagcctagcccttttaattaaatcattcagttttctaagagctgcattcctaggtaaagactgcaagtctttaaataaatcttgttcctcatcttcaaaaagtcttcgatttacatcataccttaatggctgatcccaaaatgaccctatgtaaactctggcaacttcaggtgtttgtaatacctttcctaaagaccacataagagctccatacactctcataagttgctgatgatcaaccatatctgccttgtttaaaacaatacgaattttgtcatcatggccccttaaagcttcaatagatcttctaaattcatcagaaatatcaagtttatgtgcatcaaaaagcaatataattctgtctactctctctgcgaaccactccaaaacaccagtgaagtcgtaccctctatcaaccctctgcttttctccagacagtataccaggtgtatctataattgaaatattttgcaatactggagaatcaactaaggaacattgaagacgattaagaaaagcattgccaaacttggacagaggcctaaactgcctcttaggatcaaccacaagagcattgccaggaatcataccttccttgttatcgtgcatgacagctataaatctatctgttgtaggttcgggtccaattcgtatgcctggaaattctctttccaacaggtatttgataaaagttgtctttccagtagaatactgtcctacaagtaggatcattggctttgcatcgaaatctgaatcttctaattttggggagtgaaaatcgtgaaattgataatgttcttccagtggtaacagtttgtgtttatatattgtcttaagaccttccaccacattttggtatatttcttctttattgttatcctttgacaaccaactgaacatttttgtactgttattttacgtagccaaatgcaaaatttattttacgtaccctagtgcgaaatacttaacactttcacaaatcttttacgaaaat

SEQ ID NO: 6547 - DNA, 2630 bp, Diabrotica virgifera
tttaattaatttaatggagacataattcccgaattaagtaaacttaaccatttggtatatgattatgtggtatcaccatgacattatcaataaagttcattacttatcttatcttatacatcaaacgatttgaattatggcacagtggctaatctaaatttttttgtgattaaaatttgcagtggaaacaataagaaacgacaaaaatggcacagttacctaataacgatctttttccaccctcaccctactgtaaaagttatgttaatgaggaggaaatcacctacaaaactgaaaatcctctcacgacgattatagtagcaaacccaggaaaaatattacaattatgtgaaaaccttactgatacacatacaaaaaacctagaggctaaaatgaatatgtattttcaagctgaagtagatgctaaaaaagtattttttataaatttatttaatgtgtcggatgaggcgataattcaagtagtgcaagataaaattctagaaactccaataagatcttgtttatgtgaagacacaataagcaacttagtagtatataaagatagcgggttaaaatgtgataatttagatccaaagatacaaactatgattgatgaggtcataaaagatgaagaagaacacaatcttataattgttcctgtaattgccaaagagaggaaagcaaacgttaccaaaaagctagtcgttagtccagtatatttaatatgtttcgtaaatactccaaaagattcctgttttgtaacgaagttagtgaatgaaaccttaaattatacattgacgctacttttaaatacgagcaatgcgaagaagaaaagagattaaagaaccaatgccagagcttactttcagtcgccagaaggctattttctcatcttggacatttaaatgatcttttaaaagaaattatgtcagaggcaagaagacttacgaacgccgaaagatgttctctcttccttctagatccagatcacatgcatcttgtagccaaagtttttgatggtgtgagtcctacagataaaagtactgaagtgcgaatagcgaaggatcagggtattgcaggtcacgtggcagctacgggtaaaacgcttaacataaaaaacgcttacaagcatccattgttctataaaggaatggacgaagccactggcttcaaaacgagaaacatcctgtgttttccaattagggatgaagacggtatcgtcggggtggcacaactttgtaataaaattgacggaaatttcgattattttgacgaacaggtagctaacgcgttcagtatttattgcggcatctccataatgcacagtcttgtctacaagaaaatacaagacactcaggccaggagtcagttatcaaatgaactgatgatgtatcatatgcgggttactgaccaagatgttgctgatgttcttctgtgtgagggctatcataatgttcccgattttgatagtttttcatttgtacctagaagggtacttcacagagaaataccttgttacatactgaaaatgttcgataatttgaatctattcgatcacttcagaattaaaagagatgttcttacaagatttttactgtatgtgaaaaaaggttatagggacttaccgtatcacaactggattcatgctttttcaaccacacattttgcctatttggctttgaagaatttcagtttggtggaaaaaaagtatatgacaaaattggaatccctggcttatttaatctcatgtttgtgccatgatattgatcatagaggaacaacgaatgcattccagcaacagtctgatactgttttagccagtttatattctagcgaaggttcagtgatggagagacaccatctatcacaaacattgtgtatactcaacatggagggatgtaattttctagaaaatttaaacagagaagactacattatatgtttagatctgataaaaaatatgattctcgctaccgatcttgccgtccattataggatacattcacgacagttagctatggcgaaggagagttataacaatacagatcccgaacacagatattatttatgcagtttactgatgacctgtgcagatttgtcagatcaaaccaaggactggggtgagactaaacgcgttgcccaactgatatacgcagaatttttcactcaaggtgatatgatgaagaaaatgggtaaagaggttgacaatatgatggatagagaaaaagcttccattcccgatcaccagttggaatttttgacagattgctgcatttgtatatacagaattctagccaagttattttcaagtgcggaatgtctggtagacgccatattgaaaaatattcaagcctgggaagtatccaagaacgttttcggtgctttatgtgtagaaggtactacatcttacgaagtattagtaagcaatgaattcgaaaatgccgtacaagaagctctacaaaatttgaccgaggaggaacaacaaggtccaaatggagaataatacatgtatatttaagtacaacttgtgcaataattgtagtgctgttgtgtttgtttgtgtatatactatacaaagcatctttgcaacatttatttttgttatattttaataaatgtttatcatgttg

SEQ ID NO: 6548 - DNA, 2632 bp, Diabrotica virgifera
  SmartBlast Evalue=0; Info=NADH-ubiquinone oxidoreductase n=3 Tax=Culicini RepID=Q16LR5_AEDAE
taaataaacagtaaaacacccaaattgaagagtacactgacggatgtaaaaaaatgaaacaaagataatatttcattatctcaaactaaaatattcaaacgagtaaaatactggtatatgacttatttacagaagtatttcactattataaataaacgtatttaacaaaacgactcaacaacttttaaaattgcttgaatgaaaaaaaaaacaacgtaaattttgataaaatgttaaatttaaatagtttctatctttataataatatgctttattgaacagtttagctgagatatataaaattgatgacgtatcgaagattttctaaataaagttctttaaatttaattattctactttatcacactatttatttgactgtttttgtttcaatacagcctgcacacacttcgccattgttggggaggctctactgattgcatcagtcatgtagtaatctttaagctctttaatcttcacatctacaggtgaattatgatctacgtctttgtctgtactcttagctaattctgcagcttgtttaaagtaattagcttcttctgcatgcccgtaacgggtaaggtgtggtgcaacctcatctagtctatccctaatttcacttaagttatcgtatggcaacttaactcccaaaatttctgacaaagctcttattatcttccagtcttctcttgccctaccaggtggggtaacagctaccaaagtttgttgagctctaccttccgtgtttacgtaagtggcttgtttttcggtataagcagcaccaggcaagatagcgtcagctatgccggctccttgatcaccgtggtggccttgataaattacgaagcaatcgtttggtaagtctgacttatcaatggcgccgttatctgctcctaaaagaaacagtactttgacgtctgcttctcgaatcttatcaacaccgggggtgtaaccaatatctaaagcagcaacctgacttgcaactttatgcaaaacattcaaaactttccaatctttgtttccactggctgtaccagcagccaatatttgtgctgcagaaagaatagcagcgccatcttttctttccaaagtttctgatccaataatgattaggggtcttttggcagcttgcaactttttgctgaaaggatgttgtccagaaacaattagttgtaggattttaggatcgtcgccaagatcttcgtgttcataggttaggtcgattttcggtccgatcgaagctacatttaaatcgttgtgaataaatcctttccttaatctggcattcagaagaggagcttcaaaccttgggttacttccaaccaataataccaaatcggcttcttcaacaccagcgattttgttattcagcaagtagctggatcgaaggtcggtaccagaaccgtccaatggaaaagtatgttcggtacagaggttttctgaaccaagtctatttaaaagatctttaagagcaacaagagcttcagcatctgctaatcctccagcaattgctccaatcttgttacctgcttgtttaatagctttacaaacagtcaacaaagctacttcccaatcaactggtttcagttcaccttgattgtttttaaccattggtgttactagcctttgtctttttaaaccatcataggagaatcttgatttatcagccaaccattcttcattaatctcttcgttcactctaggtacaattctcattacttctccagttctggttgatacaataatattagaaccaacggcatccaaaacatcaattgaatcgacttttctaatttcccaaggtctagctgtgaaactgtatggtttactagttaaagcacccactgggcataaatcgatgacattaccagatagctcagacataaataatttctcaacataagtaccaacttgcatatcgttgcctctgccagttgtacccaaatcgtcaacgcctgcaatttcagaagcaaatctaatacatctggtacagtgaatacatcttgtcataatagttttgaccaatggtccaatatctttgtcttctacagcccttttcccagaaaagtctatatcagtaaatcttgaacggtctgaaccaaatgccatactctgatcttgtaaatcacattcaccaccctggtcacaaattgggcaatcaagagggtggttcactaataggaattccataataccttctctggcttttttggtcatttcagagtctgttttaattctccaccctttcatcacaggcatggcacaggctgctactggtttaggagatttttcaacttcaaccagacacatcctacagttccctgcaactgctaatcgttcgtgatagcaaaacctaggaatttcaattccaatcatagctgcagcttgcaggactgttgtacctggttcaaccatcactggtttatcatctatgaatacttctattttttcaggtttttttacttcgccactttgacatcttgtggcaacaaataaatgttttgggctagctttagccccgctaaggacttttgaaaccgtgaaacgcagcataccttagtgtttaaaatttaaacaaatattcaatattaggaagaaaatgacatgatatccactataagggttagaaatt

SEQ ID NO: 6549 - DNA, 2624 bp, Diabrotica virgifera
  SmartBlast Evalue=0; Info=Acetyl-coa carboxylase n=3 Tax= Culicidae RepID=Q176P0_AEDAE
attgctgatatgtacggcaatgctatctctctattcggacgtgattgctccatccaaagaaggcatcagaaaatcattgaagaagctccagctgttatagccgaaccgtcagtttttgaggctatggaaaaagcggctgtaagattagcaaaaatggtcggttacgtctcagcaggtaccgtagaatatttgtacgatccctctggtcaatactacttcctggagctgaatcctagactgcaagtagagcatccttgtacagagatggtgtctgatgttaatttgccagctgctcaacttcagattgccatgggtttaccactacattatattaaggatatcagattaatgtacggagaatcgccgtggggaatgagtgaaatcgattttgatcaacccagacacaaaccacaaccctggggacatgtcatcgctgccagaattacctcagaaaaccccgatgaaggtttcaaacccagctctggtaccgttcaagaacttaatttccgttcgtcaaagaacgtttggggttatttctccgtagctgcttcaggaggtctgcacgaatttgccgactcccagttcggtcattgtttctcttggggagaaaacagagaacaagccagagagaatttggttatcgccctcaaagagctgtcaatcagaggagacttcagaacgactgttgagtacttgattacacttttggaaaccaagagcttccaggaaaacaccattgatacagcatggttggatattctgatatctgaaagaatgcaatcagaaaaaccagatattatgttaggggtcatttgtggtgctcttctcatcgctgatatttccatcaccaatgcattccaagagttccagacctctttagaaaaaggacaaatctcaggttccaatactttaactaatgtgatggatgttgaactgattaatgatggcaataaatacaaagtacaagcaacgaaaagtggggccaatacctattttctgcaaatgaacggatcgtttaaggaaatcgaaattcatcgtctaaatgatggtggaattttattatctgtggatggtgcttccttcacaacttacatgaaagaagaagtagaccgctatcgtatagtgattggtaaccaaacttgcattttcgacaaagaaaacgatcctactatcttaagatctccctcagctggtaaacttattggttttgtaatagaggatggaggtcatgtcaacaaagggcaagcgtatgcagaaatcgaggttatgaaaatggttatgaccttaacagccaacgaatcaggtatagtgagctacgtcaagcgtgcaggagctgtcctagacgcaggttccattattgcatctctagaattggacgatcctagtctcgtaaccaaagccgtcctatacaaggggcccttctcagatttggatgtatctcctgtcgttccagaaaaactcaatcgtattcatagcagtttcaggactgctttggaaaatactcttggaggttattgcttacctgatccatacaatgctccacgcttgagagaagttattgagaagtttatgtcatcattgagggatcctagccttcctctgttggaacttcaagaagtgatggcatctatttccggtcgtattcccgcagccgtcgaaaagaaaattagaagactgatggctttgtatgaaagaaatatcacgtccgttttggcccaattccctagtcaacaaattgctagtgttattgacactcatgcagcaagtatgactaagagaaccgaaagagatgccttcttcttagccaccgaaggaatcatacaacttgttcaaaggtatcgaaatggcattcgtggccgcatgaagcatgccgtccaagaactgctcaaacaatattacgaagtcgaaagtcaattccaacacagttcctacgacaaatgcgtttcactcttacgcgacaaacacaaagacgatatgtccgccgtaacagcaacgatcttctcgcacagtcaagtctcgaaaaagaatctcctcgtcacgatgctcatcgatcatctatggagcaacgaacccggattaacggacgaattagccagctgtcttacagaactgacgtctctaaatagaagcgaacattccagagtggcactgagggctagacaagtgctaatcgctgctcatcaacctgcctatgagttgagacacaaccaaatggagagcattttcttatcggctgtagatatgtatggacaggaattccaccctgaaaaccttcaaaaattgatcgtatccgaaacttcaatcttcgacattctccacgatttcttttaccataccaacagagccgtctgtaatgctgccctcgaggtatatgtcagaagagcttttacaagttatgacattagctgtctgcagcatttggaacttagtggtgaagtaccagtagttcatttcacatttaccttacccccttcacatcccaataggttaattaaattgagcgccgctatggaatcttcagaagaaccggttgaaccagaccctaacgaagtaaagattgtcgacacttttcatagaaccggttgcatggctgctttcgacaacttgcaacattttgagcaaag

SEQ ID NO: 6550 - DNA, 2630 bp, Diabrotica virgifera
  SmartBlast Evalue=1E-105; Info=Apolipophorins n=1 Tax= Harpegnathos saltator RepID=E2C0B0_9HYME
tacatccaacaacgacacctttattgtccatggtactacaactttcggtgacaaaaaatctgtcctgaacatcgaagctgaaacgcctataatgaaaatggaacgacccaaatttggcggtacttattcatatgacggactacagcgagatattgacggattcttcgaattaaccgatgccaaaggaaacgttaaagccaacttgatttggctttacatggaaaatatgctagtgcgagtaattggctctttcgaaaataagcaatactcaagccaatcatcgatagaaggcttttatgaaaatccagaaaaatcattccaacttctaaagggaggaggtgatatcaaattcgatagaatatgggaatctgggtacaatattacgctaaatcttccacaaagtaattataaaggcatggaaacccatttgaagctacctaacgaacataaggaaacttacagtctgtggtctaatgtggattataaaacaggatttagatacatagattattttattaaatacagaaccaagtattcacaacggaagtatggatcatcaggacagatttccactgaagacaaacagaacttatcaggaaacatcgaagtggaatggaatggagaacgcatcaataacttcgcgaatctgaggagatccgaaaaaacattagacttaatttacaaattaaaaactcccaaatttattgacaggcaactgctggtaacggaaattaagtataaatctttaggcgatcaccataacttaacatttgaagcatcctcgccggaagatcaatctgttgcatatggcacagtggattataaggaattggccaatatgaacggaatactgaaactgactatgccccgtaagcccttcaacaacagtggagcgtccttcagcacaaaaaccaatgccaacacgtacaatcgatacatcaaggtattttgggatgatgataatgcacttttagacagcaaatgtgacattcaaacaggccccactttactggatcgacacacgaagggtaaattaattattgaattacccctgtctacaagacatattgcgttggttgactttgattattctgaaagaacaaaagccagtgtaggtgcggcaacggtcaaatataatggagacaaagtcctggagggaaaatataaccgcttgtcggagtcccaggcgggtaaggataaggacacggtccatgtggaactccagaatgatctgatgcctgttggtgcggattatatctacaaacacaattacggaatgccagatgaatcggccagggaaaatcgtgcaattcatctttacaatttggcaaatcgaaggaaatttaatgtaagcggggaattggatgtactaacaaagtggaacggtcaagaatactttctaactgccgtccactcaaaaagaattgttaagctctggacggactacgaggcccaggataaagggtacaagcagcattcacgactggaattgagtcccacacactggatcgaatacaacctcaatgttttgaacaagagtctggatgaaacgtttgacgctcagaaagttgtcattaacgtgatctacccccggcgcagcttcacggctcagggtttctacaatataagtgattcaattgtatcaactgacgtgtctctggtgtatgacaaggacaataaaacagttcaagcgggactggattggcgacgtgcctcgcttcatcgcgaacaattattacttcaaattaagcatccttcttttgaaagggacatcacaatgagtagcgaatatggatacgataactcgtcaatcgatgggcaattgtcggtggtgtattcattaaatccagatcaaaagctgactctatgcggaaaagtaaacgataattctaactcagtgacctataactacacgtacaatgtttgggcggaacacattgcgacgaatttaaatttaaattccacgggcgatttttactggaatcccaatgctttgggcaccgaacatataacgaattaccagcgatcatatttaccttcatctgtatcggaaacactggccaaaattaacctgctaaataacgaaattgaattgaagagggataacattgcaagcggaaaatcctatttctgggcaaggtacaatggagaatatcctgtttatactgcaaacatgtcagccatctacgatactaatgacaccaaaggggagttttacattaatttcaagaagaagttgctttacctaaacctcaacatgacagaagacggaacccagagtttacacagttatggcgttattccagacgccagaagtgcactttttgatatttggcgcgactatgacgataggagaatttccgatgtagcgtattacctacgtcttaatcattccagactgataacgtcgagtttgaaatggagaccagagctaatctcggatgtgacgagtggaataaggggaagtctcagacgattctaccaggatacactagaatcaataaataataccaaacagtacatcaaagctgaaactatcgatgctcttattggtatctggaccgactctaaaccattcctgcaagattttcatagagatctccacaacttgactatcatagaagacgata

SEQ ID NO: 6551 - DNA, 2619 bp, Diabrotica virgifera
  SmartBlast Evalue=1E-129; Info="RING finger protein, putative n= 1 Tax=Pediculus humanus corporis RepID=E0VMW5_PEDHC"
tcatttcccgtcgccataatcgcggcgagatcgtgagagtgttttgcaacaaagaaatcgtcgttttcgacgaggggagtctcctgctcccgatcatttcggcctattcgttccaacaaatcctttttgtcattcaaatttgagaaattactgttattttacggttttttcttgtttgggattttataaacatggctttttaaaatgtctgccttcaaattgtgcatagccactccttgtggaggagcttcaaactccaataaattatcatctacttatactggaggacgtcgggatggagaagaaaggaaatcgcaatttgcctcttgcaaaaggctccactactgattccaaaaaagatggcattagtagtaaaccgtggccccgcggcagtagacgccgcgagtgtgcgggctctagtcttagttcaaaaccggaagtatcccggaaacctcaacctcagcgcgttaaaacctttgataaacgacctaggccccgtggtggtggcttgtgtggaaccctggctagaaatgagacgcccagcctagaagatacagatgaccaccaacaagtggaattgggttcagtttttttaccaggcagtaagaagcagagcctgaatcatttattgaatttctcttactcaccaagagacagcttccacaggtctgaaaggggtcaaggtaatgggaataatgtcaacaggatgatgggtactaagaagcataaatataataaggaacactttttacaagctaactgtcaatttgttgttaatgattctggtgattacaagcaatacttgaacaacccagatgccctagttgactggagcttagtggaacaagtaaacattcaagtatcggaattccctacatgcccgatttgcctatacccacctgttgcagctaagatgactcgttgtggtcatatttattgttggtcttgtgtactccattatttgtcgctttccgacaaaccatctagaaagtgtcccatttgttttgaaaatattcaaaaacaagatatgaagagtgtggtcgcaattccttatacatcgtttaacacagatgaaacaattaccttcaaattaatgaagagacctcgaggctgtttaatagcatatcctgcagatgccgaaaccaaaaacgaaaatgacatattcaacatgtcagatcagggttcaagagatgtttattccaagttacttttggcaaaaactgatgatgttctaacaatcatcgagagggaattcaacgaactcaaagaggagcttaaagacgacattagtccagaaagatgtttcatagagcaggctatggttttgttaaaagaacgagaaagtgtagtttgtgggcatgttattaagaacgatcacagtttggaaccatctgaagaaaatcaattggtagattctttaaaggaagtagaaattagtggtgatgatcagtataagcaaattacagacgaaattttggaagattgtagcagcatccagcctgcaaagtttcattatttttatcaagcctccgacaatcaacacatctaccttcatgccatcaatgcaaggatgttggagcacagctatggttctttggaatttggtccgaagacaattaccggaaaaattcttgaaaaggaaggtggctccatgacggaagaacttcgtaagagattaagatatcttcagcatttgcctgttacttgccaatttgaggtggccgagattcaacttaagactcctgttgttaataaggacacccttgagcattttcgtgatcaaattgagattcgtaggaagaggcgtcaaaagcgcgcgaaggaagaaaaacgccgcgaaaagcgcatagaggtagaagagaatcgtaaaatgggtaaatacctacatccaaatttgcatttagattcaaatattcagtttcctgagtttggattcgaaacacgtttaaggtcagaatctgaaagtacaatacctagcgaaagaagtgcttcaccagatttagcaggtacaccaacaagtgtgtcgctagaaggagcttatagtggtccttcatttgcaaagatgctagccactgagaaaaaatcatcaccatcttggcctggtttaaaagcgacatcatctacatcaaaatcaccagatttgatcaatgttactggttccaaaatgaaaatgctatcaaccgttcgggttcccagtgacaacgaacaagatccggatggttacgaacctgtaccttccttcaataggagctttggtgatgctatagcaaaagctcttgaacaagctgaaaaaccagaggaagaaagtatccaatcttcgggaaaaaagaagaaaaaatcaaaacaaaaggtattatttgcaactaatatggcttattcgggaaaataatttattggtttaatgcgtgtagaagtaaagaggtataatttaagagtagtaaaaccacattcaaactaaaataaaaccgaagaaatgaaaccgttgtgttaccttttttctcaaaaatattttttaatatattttgtttacaaattttatgtaagtcatcttattttatttgttttagtaatgaataatgacatgaaatatttgtgtttaataaaattgatttaatcttc

SEQ ID NO: 6552 - DNA, 2590 bp, Diabrotica virgifera
  SmartBlast Evalue=0; Info=Serine protease P153 n=2 Tax= Tribolium castaneum RepID=D2A5T8_TRICA
aaatgttctgacgatgatttccactgtagcgtgaactcttgtatttcattgacgctactttgtgataataatagggattgcgctgatggaaaagacgaggaaaactgtcgagaatacgtcgaaagattttcagttgccaaaaacaaacgtctagtagtagtagaaaaccaacgcatcgtcaacgtatcccatgcaacttgctctgtcctttgtattcaaaacaagaagttcacatgcagatcattcacttacagaagatctgacagaaactgtttcctgtcagacaaaaacataggactatctggagctctgcagacccatcattccagcgactactacgaactgaaagatggtactatagactgttctgataagaccaagtacttcgagtgtaataacaagaaatgcttaagtaaggattatgtgtgtgacgggtataatgattgtgataatagagaagacgaaaagcattgtggggcggaaaagtttggatacaaaataaagttggccgggtcgggtcagaagaatgaaggacgagtagaaattacagcatttggcagtaccggttacatctgcgacgacgacttcagcataatcgacgccaatgtcatttgtagagaactgggattccccctaggtgcagctgaagttaaaggccaatcgtacttcgccaaagacctaaaggaaagaaacactttgtatatgatagatgacctcaactgcgttggaaatgagagttccgtcatcgattgttcattccctggttggggcatgcacaactgtagagaccaagaaatagctggagttgtctgtaagactcctcaagagaaatgcgggaatgacaaatggaaatgcgatagtggaaacgagtgtattccgttcgagttcgtttgtgatgatgtcgaagattgtaatgacgattctgatgaatctgtacagcattgtgaggctcccactgaattgcgtcttgtaggaggttcttatcccggagaaggccgagttgaaatcaaacataacggtatctggggaactatttgtgatgacgacttcaatgaagatgcagctaaagttgtgtgcaagtccttgggatacaaagggaagagtttcgttaaaaaggatgctcactttggggcaggttatgggcccatatggctcgatcaagtatcttgtcgtggcaacgagactgagctgaacacatgtacacactggggctggggcgagcacaattgtgaacacagtgaagacgtaggagtgatctgctcacaggatgcagaagaggtccagattgaaagacactcaaacctgcctacaagaattgaagaaggattgccccaaaactgtggcttgagaaaagacaaccagtttgccatcaaggacttaattcaggcaagagtgataggaggaggtgttgctaagaaaggagattatccttggcaggcggctcttaaagtcagagtcaaagacaaatccgcccactggtgtggagccatcatcatctccagcagatgggttctcactgcagcccactgtctacagggttacaccaaaggtgcctacgtgatcgttgctggtgattataacacagacgacaacgacggaaccgagcagcagaaatatatcgatgagttcttcgtgcatgaacagttcaggaagggacacaagctcaataacgacattgctctgatcaaagtgaaaggtactgggttcgtgctgaatgacgacgtccaacctatttgtttgccggatgctactacggattatagtaagcagatgaattgtactatatctggatttggatcgatcaaaagtggagtttcagcatactcccacaatttactgtcagcttggataactacatattccgacgatatatgtaaaatgccccatgtatatggagatgttttgacaaacggtatgttttgcgctggttctatggatggtgcgatggacgcttgcgatggagatagtggaggtccattggcttgtttggaccaaggtgtttttactctttatggaataacttcctggggtatgcactgcggatacgcaaacaaaccaggagtttacgtgaaagttggacattacagaaagtggattgacgatactatagagaaacattcgaggtgaagggacaaaaataatcgagcttgggacttttcctatcttaaataataatctggcctgcatacgttacgttaattcagactgtttggttttcaattagatatatgacctataaatggcaacactgctacctaatgcaccagattcacgccgattcattcagtcattcgtcattctaccatagaggtatatattaacatagagggagcctatcttccgcgcttcctgacgacaagatctcatggactggtttgctgcatatctttctaacacattgtattgaaaatctatgacctatgatgacatttagtgtgaagataggcacggaagagaaggacaactgtagcagctttactatgcgtaagagtgagacagcactaatccaaataaaaaagatggtgtcgtcacttcgctctgaatgacactctctctatgctggtatataactctatgcattctacagtga

SEQ ID NO: 6553 - DNA, 2597 bp, Diabrotica virgifera
  SmartBlast Evalue=0; Info=Golgi apparatus protein 1 n=1 Tax= Harpegnathos saltator RepID=E2C6H1_9HYME
ataactcgacatcgtttactgaatcctttttcgtctttgttcgtcttaagacattcatagacgttttctttgggaactctagggcaatattggtcaatggctccagcacaattggtcaagagagcgtaatccacgctgttgtcgaaaatttctaatttctggattttgaagatatgtttaccgcatgcaggcgttaattgatcttgaggtaccatttggagacattctaatacctgggcttctcccgactgtacattcttacaaaatttattgatgtccgccttgcattcattgtttaacactggatcataatcgatcttttccctctgttgaaagatctgggctttgagctgctgtttgcagtcctttggtatgacgcctttatctccctttatcgtagcgtttaggatatgttcgctgagacattctataacggcacttttggtactggcttttgcacacaatcgttgcgcgtgacttttacaagccaacttaaacttgtacgtaaacttgtagtccttcagtgatatgatctggaaatgttcaatactggctcgacagtttggaatggactttacttgaggattgtttttgttttcaataagacagtccactacatcatcgtcctttccacaaagtggctcgataattttactacagtattttgaaatataaggattcaattccactcgttcagcttccatctcagtaaaagattcaacgatatcctgacatttttcttctagatcttctaggtggtcttgaagacactgcatttcctcacctttctttaacttgtcttgacagtagaaactcagatccttaacacaagcttcttctatttcgggctgcaggttcacgcttacggctctttgtcgcatcacgcgcctgatttgctggatacacgtcttgtcgatttgtagagattcttgggattgataagcgtgtctgtaaagacatggcaaaacttgtctggaataactgggccctacagaattgtcagactctgctacgaagtgacaaaatttagtcgcatcttgactgcacgctcggtacaactgtggatcaaggacgaaatctctggcaacgaaatactgtatttctaggagagcactttcgcaatcctccgtcataacgtccgatcgcatattgtccatcaggcaggagataacgcgaccattgcctccgtgaatatttttgcatgctagattgacaactgggtcacaagcttgacgtagaactgggtccacgttccagttttcgccagcgtccgtattatgaattaaatcttcaagtgctctcatacatagatgtccaagttttactgtatccttttctcctatgttcatagcatgacccatcagacagtgtaaagtctttcctccaactccatacccttcacagaatatagctgtttcattcttacacttatccacaacctcaggagacaagctgtaatcattcagcaacattttcctatgttcttgaatctcactctcacactcagagcttatgtgcattctgggattatttgaatcacttcttatgaagtcttccagacagagcaatatttgtgccaaacgcacagtcttatcactagacactctttttttgcattgggtctttttaatatcttctttacaagcctttaacagccctttactaactttaaagtcttgtgatatcaatttttctctcctacgtaagtgttgtctacaagttgaagctaattttgaatcatccaaatgaagctgcttaattaaacagggaaatactcttcctgtaccttctttaaattgggaacaatatctctggtagtcctccctacattccaaatataactgagcatcaagtttaatattatttgattgcaattctgataaatgaaacacttccttcctacattcttccgagacttctacaattttattttgcaaacatgctactgttctgatttgcgaaaagttgtctccatcgataattccacattgaaatttgttaatatcttgagcacattcatgtaaaaagtctgttatccacttgtagtcagtaaaggcgatgctttctaggcgatttatggtattataacaattttgatcttgtatattatttacatttttcactatacattgtaaataattattttcttggcactgcaacttatctaattccttgccgcattccggcaacaggcgttcttttacaccactggaactggtgaggttattcactctaccccatacaatattcatgcattctctatttaaacgattaacttggtgtggatttgaggataataaacattcgagaataagtaaatcgtctttctcacttaagttgtgacaaataattgcaacatcttggcatgctttttcgtccactatagagtttgatacttcccggtgattaattactgaacatgttgctattatccataatatgttaaatagcaagaataatgaaaaataatacatccttatactaccttgtcacaacgctgaaatattaggtattaagtgtatgtcttaaaataatagatacatttgaaaagtaaacactacatgacactacttcttatagttcttattttatctttg

SEQ ID NO: 6554 - DNA, 2596 bp, Diabrotica virgifera
  SmartBlast Evalue=1E-166; Info=Epidermal growth factor receptor kinase substrate 8 n=1 Tax=Harpegnathos saltator RepID=E2BC31_ 9HYME
tgggagcgcgactgtagtttgtcgatctgtgttgtatatagtttatttattcggatgtattcttcggattaattaaacaaaatacccgtgaactgtttgttttctatgaaaagttgctataatatggattattgataagctatcgctgggaaagaggactgaagatccagtaatcatggcatatcgaaacggttattcgggagacgatagggagctcgatcgcgaagacagaatgaccgaaggcgtaggcaaaccagttcacgttatcgaacatttagctacttttacggtaaacaaagaaacaggtatcatttacccagccgatggaatgaggaggctgctgcagttggagaaaagtaatggaatatggtcgcagaagatgcagctgtgtttagacaataactgggtgctgattatggattatgaaacagggagtgtgatggaacgatttcctgccagctcaatacaagaaccgagcgccttcatgagtcaagaccccatggacatgtataataatatactagtctttatcgtaacaaattcaaaccaatcccaccccacagaaatgcacatatttcagtgccagagtatatctgctcaagatttggtcgaagacttaaaagaactccgaatgggtaaagcaccgactagaagccgtaaaagtagcattccacctcccagccacaaaccaccccaaaacgtaataagcccatccagagatgtaactagagactactacggatcagactcagaactcacagctaacaatgacgactccagctctacaacaagtgaaaagtatgaaagagatgtcactatcctcaaccactgtttcgacgacatagaaaagtttatagccagattacaacacgcagctgctgctgcacgagaacttgagcgcagacgaaaaacaaggaaaactaaaaaacgcgatatgggtgacggaatgttaaccatgaggacaaagccacccccagaaaaggagttcgtcgatattttccagaagtttaaattatcctttaaccttttagcgaagttaaaggcacatatacatgatccgaatgctccagaactggtccacttccttttcacacctttggctttaattgttgaagctgcgcatgatcagtatttcgaccagcatataccccataatgtcatttctccactactcacaagggaagcagttaacttattaatgaactgtgtcactagtaaagaaaccgaactatggcattctcttggcagtgcatggcttattcccagggaccaatacaaaggtaacgttatgacgtatcatccggtgtttatggatggctggtcgccggaatatccagtaattgacgaaacagaacccaagtcataccaacacgatcagtatggaggagactatacagactacccctcatcaagccaagatgtctacgataggaacaaccaccatcagcctgataaggacattgcagcattaggagagagtacccgaagtgatatttctattgactcaattgaaagaaatggtggagaagaacgaggttttggaagaaaccaggaaagtttccttgaggacttacaaaacagaggcgctaccatcgttcaagttacatatcctagaacagcgaataatgagaaagagttgactgtcgttcggggagaatatttagagatattggatgatagtagaaaatggtggaaagctagaaatagcagaggacagatcgcccatgtaccccatactatagtaacaccttatatttttaataatcccttacacgctactcaaaactacagaagaaatgactcgccagtagaaagatttaaccgtgatcatagcaaccaagatcactcccctcaatctaagagtactacagattggatcagaaacgaaaggaccgaggtccaaaatactcctccccctcctcctcctcccccaccagctcccgaaccacccagccaacctgtaactccacagcctttaaagagaactcagtccaggcagtctttaatgtccacgaagtcaaatggagatttgcaagaagagctaatcagcgtgttaacgttagtccgggagaaaaataagcaaaggcatttagaaatcaaacaaactccagaaactttcatcgatcagagatctaatccaattgaggtacaagaatggttggaagctaaaggatttagcgaaaatattagaaacaagtttcaaggcgttagcggccatcaaatatttgattttaacaaatcagagctagaaagggtctgcggaaaagacgaaggaaagcggttaacatcacaactgaatatccagaaagctacaagtgggtaccaaactgtaaggagtacagaactaagaaaaattctggcaaaagtacgacaaaaaatgggagatatgtaacagcgtttctaggtaaaagtgtcatgaaaaattttgtatagttgttaaaatattaatcgttaccaaaagtgttatatagtgtacgtcatttcattttgtctagtccatatcactttatactcgttattgcaatagtaagacttggagagggctgtatttattcattatgtttactgttgttgaatataactatgatttaaaaaa

SEQ ID NO: 6555 - DNA, 2584 bp, Diabrotica virgifera
ggttatgtcacacacgtttacgttttatgtttaaagctaagtttggctttactaataaaacaacaccaacgttttctcactttattgattcaagatagtttttggacattgataatttaattgttttgtatatttaggatagttttgttattgctctttgttaataaattcgataaagatcatataattaatcaaaatggcttagtttccatccatttgtgtagttgtgatggtgctattacgtgagttgtatctagcaatgacaaattttggttattttgggaatttagtttaatagtttactgattcgatagattgattcaatgatcctatgagttaagagcaattacaaagcatacatctaaacatttccagagtaatgtcactcaacttttgactaatctcactcattgctacacatttctcttcatttatttaacacgttcgctaccaagcgactcatatatatgagccactttgatttttaccatagaccagcgtctcacaagtgagctggtgattgcatttcacataatggcaattgaaatagctctgttctgtgaggacgaaactgaaataccccctggtagcaatcaggttaaatcaatttcctataactgtggtattcacagttaatttacttaaatcaacaccaatcaaaacatgattgtcataaggtttgttccaacttgatgttttgtagcgttcttgaatcataggtgtattggtacatgaacgatgaattgcgcatgtccagttctgtatagttttggaattggataccagttggaatgcttataacttgtaaccctcgtcattggtgaaatcactatcgccttcagtatcactcattttataaaattctgtaaatgctgtaaatctcgaagttttaagtagttaaaacttcgagatttacagcaactcagatattttagaatatatatttatctaatcataacctacaaacggaaattgtttgttttgctcatgtcagaactatcagttcttcaaaaattattagtgaatagatttgaccttacatgaacggttccgaaatcaccaattttctagttggaacgtattttggatcattctgtgcatcatacaaatctagttgaaacgtataaaatgtgcacatgtgttgaacggttactgcatggttttgtattgagttggaacaaacctatagtgtttcgacaattcacagcttttcctaataatacagcgatcttatggcaagttctattgattattaactcatatttgtttatgtttgtaatcagtataatcggtatgttatgccaaaaaaaaacacaagcatttgattggaaaaaatttatacaattttttgtcccaaaaggagcaatgaggatgagagaacagttttttttttataaacaatgtctttattttgaactttataagcatgaaggcatttttcacataagttaatgtaacttttctacttacaatttgtaaaatgtgtaatcaattttgtatgtgcaacatacagtagactccctctataatgagaactgaaatggcggactaattacctcgttaataagcggacctcgttatatcagacaacaataatattgaaacgggttgatgcctcttacgtagtttattaagtgtcaatggtcgacatgaataagggcagacttcgccatcgtaaattgtaaatgtcctacaatattcaatatcggtcgatagataaacaagaagtttattacgggcggcgagtttattacagcacttgcctcgataataacacagatgttgggaatttttatatacaagcagttggggtgtttatttatagccattacacccctaaaaacaggtaaaaaacatattcttcggtttcgttttcgtcgttataatcaaatatgcctcgttatagagggttacagtccaataggaatttcatgagacacctaatgtacctcgttataagcgaaacctcgtaatatccgtgttcgttatagagagagtccactgtattatctactttacttatatagtatttcttctgtgaaccttctgtagctaatgtgcacgtcatgagagcatgttttatagcttaaaatataagtttactctttaaagagtccaactgttctatagtttattttttaaccaggaggagtaaactaaaaagacagattcacacccaagaaagtcactacaaaaaaaaacaaaatacatcttttttggttgatcatgtcagccctcaacggtaatccataaatattatattaatacgtcagtaaagagttctaaaaataactgctttttatataaagccagactaaaaatctaaaaattaaaggaataacacagaacacaaaaaatcgctgatataacctatgaaatgtcaatcgtcaaaatttgataaaggtcattagtgtcaaaattttataatcagtggagtaaacttgcctgcggttggaccaattacaaacaagcattacagcgcggtaaatttgaatcactcctcttggtttaaaaacaaaccatagctacagaaggtgatcacatataaatgtcttttatattagattataggtatataataaat

SEQ ID NO: 6556 - DNA, 2592 bp, Diabrotica virgifera
  SmartBlast Evalue=2E-54; Info=Zinc finger CCCH domain- containing protein 18 n=1 Tax=Camponotus floridanus RepID= E2AYQ4_9HYME
atcccagatcgccttcacctcagagctcctctcgtagctcgtctcaagaatctcatggacacaagtctgaccattgtgtaaatggcgaagtgaaagtcagaagcccaagaagttctggaagtccaagacaacgaaggagcccatcaccacaaagctctgtgagaagcagttcccccgattctccagaaagggctagcaataagcttcaagatcgtaatatcccgccaaaagatgatggtcctcttcgtcaactttcaaaacgttctagatcttcaagtgcgtctagcagttctcaagaatccccagataggtatgtaagaaaaaaacatccaaataacgacaacgcttcagtcaaaagtgacagtagttcaaaatctagtagacagtccagaaaatcggcttcatctagaggatcgagaagaaataggacgcggagaaagcgggcttcttcggattctagtgacagcagtatagattcgtctagtagaaaaaacaaacacatctccaagactgatacccaggctgaagaaatatctgatggtgacattgagtctgaaaatgaaaaaggtcgttcaaaacagaatgctcccaaacaagaaattaatatttcccatgatgacctttccgatgtgtctgatttagaagattcaatcggcggaccttctgagaatgacgatgccaagagtaccaaatcagaaaaaaaagtcaacagcacagaatatatcgaagaacaaccattaccagcttccccagaacctaagaaggtatcagaaaaacaaaccagaccagaagagggtgaggagcaactggactttgaagccgaagatggtgagtgtgaagtagaaattattaaggacaaagatgaaaccgaagaacgttccaaaaatgatgaaactgaaaagactgatgagaaggaaaaagaaaagaaggaagagaagcaaagagaagagttagaagaaggtgaagttacagatgaagacgatgttaggccggaagaaacggaaccaaggccagtttgtagattcttttcaaggggacaatgtacatggggagcaagttgtagatttttacatcctggcgttacagataaaggaaattacacaatgttcgaaatgatcaggccggttgtaccaggtgaatttcgtgacgagagggcatatggtaaagtagaaccgccagtcgtagagtcggcctgggagaggggacttcgcacagccaaagaaatgctccgaaaatcagttaagaggaaggaacaggatatagattttgaagaaaagaaaatgaatttgagtttagcacaagaagaatttgataaagaaaatggttattatggaagggcttcaccagaaccaaggtatgtgcgccatgttgagtatccggcacgaccacctccagaagagtattatggccgcagacaagttgtctacgaacaacaagattatatgccgccacctcgtgagagagctcgaccttatcgcgaacttccaccgcatcgtatgcctgattattatagcaataagtacaatgaggaggaagcgcctccacattccagcggaagtaccggtaaaagaagcaacaagccaaagcgagaagtgattgttcaaagggttgaaagcgagcgcccatcctcaggaagaggagatgaatggcaagatccttggatgagatccaaggatcaaggcagaaggaaagaaggaccaggccgtaagaggtcgtatagtacaggatcgtcgtattcatctagcagttcttctagttcctcggattcgagcagaagttcctatgcgtcacgaagaagggctcggggacgtagatcaagatcgcgcaagggaaggcccgtttcaccttcagttatagtgtccgagagaaaagcggccaatgaaagagctgctttaatgaacccaccagcaccaaagagaagagcagcttcaccaggtatgatgagactgagtgcagctgctaacccaccagctccattaagagatgaacagtttagcagaagcagaagcaaactagcagttgctgctgcgttggcgagagtaagaggccgcagggcctcgagatcatcttctggaagttcatcaggtagctctagcgattctgattcatctgactccagtagttccagcagcagggataatagtccaccatctagagggcccgttgatttggtgaaagctatggatgctttgaaaggaagcgctttagagaagaaacaaataaaacttaatttgaagaatccggttggacccaaaaagccggagaatccaagaagcgcagaatcgtctcaagccaaaaaacgacctgcgaattctccacctcccggtgatcccaagtcgaagaaggcgacttcgagaagagaagaactattgaaacaactgaaggctgttgaagatgccattgcaaagaagaggtcgaaagttaattagagcgaccgatatgtaatatcgatcgtatgtacttttaagcattaatagttatcttttgtatatattcgagtatgatgtagtgttgccgactgtttgattcaaattaataattacattttttgtattacttagtatctgtatggaagaaaaaataaaattcata

SEQ ID NO: 6557 - DNA, 2596 bp, Diabrotica virgifera
  SmartBlast Evalue=1E-134; Info=AMP dependent coa ligase n=1 Tax= Aedes aegypti RepID=Q17P68_AEDAE
aaaatgtcggtgataagacgaacgctatttcaaactaagtattcaaacttaaaaaataaagtagttttttaagaagtattgttaccggtgaacaccaaaatattttgaaaagtcaatctagtgatattattgttaaagatgttactattccgcagatgttatatgaaagtatggagccaaacctcaaatatattggagctatatctggaacgactggaagaagctacacattcgaacaaatcaggataaaaagtaggaatttttccaaagtattgcgcgagaaattcaagttaaaagacggagatgtcatagcaatgtttttacctaacgtacctgagtacgtcatctgtttcttaggatcattggaagctaggctcatagtgactactatgaatcccatgtacacagcagatgaaatagcaaagcagattatagatgcttctccaaaattaatcgtaactcaagctaatttggtcagtacggctagatctgcattagaactaacaaaacgacagctacctttgatcattgttaaggagacgcaagcggaaagtctgccagaaggtacaatagatttgtcagaattaattaatacacatttggacgtacctgatcttctaccaggaaaagcagacgacgtggccatcatgccgtactccagtggaacaacaggattaccaaaaggagttttactcacgcataaaaacatgacatccaatctgacacaaatgagccatccggacttctcttcagtggaacctccaacagataactttcaagacatgtccccagcagtgctgccattttatcacatatatggcttaacgttgaacttcctcttcatctgccaaggaactagatgtgtagctcttgacaaatttactccagaatcttacatagcagccttgaagaataaccctatcagtatgatttttgcagctcctcctctagtcctatttctgacagcccatccagatgttaaatcagaatattttaaaaatttgaagaccttgtcttgtggtgcagcaccgcttggatctcttgatgaagaacggttcctgcaaaaggttggaagggatgtaaatatagttcaaggttacggattgacggaagcatctccagtcgtttcgtttactccaaaaaacttagtaagatcggaaaagaatgttggatcagtaggaaggcttgtttccaataccactgcaaaaattataaatcctgatgatccagaaggtacaccacttggacctaacgaaaaaggggagattttattgaaaggtcctcaagttatgaaaggatattataatagaccaaaagaaaccgaaaatacgtttttggacggttggttaaggactggtgatataggatattacaatgaagataatatgttatatattagtgatagactgaaagaacttattaaagtaagaggcttccaagtagctcccgctgaattagaagaaataatcagagatcatccatctgtagctgaagctgccgtgataggtatcccccatccgctaagtggagaagtacccagagcctatatcgttcccaagaaagataaaactgtagatcttgaagaactagaccaatacgtgtcaaacaaagtagccaaatataagaagctctcaggtggaatccaagtagttgatgttattcctaagaatccatctggaaagatattgaggcgaaaactgaaggaaaactatctggaaaaagaaatatagtgaattatttaagataaatggattataagcaagaccgaacggctttgtatcgtacacattcatgacaagccatctcgtaacgcgacggttcgtaaccccacaaatggtaatgccgtcagttcgtcacggcgacagttcgtaacggtgacaattattcttaactaccacaattcgtaacggtagaataattcgtaacctcaaaattgagttattctgtttattttttacaattacaatttttaattgttacaattgaaattagttttttatcaatttatcgaagcagaatcaggataaacattttaacacgtgtcattttatatttcgttgagaaatatatttttaaaattatgtcttaaataaatatataatctaatagtaatgtaaattgtatcaattattatagtcaattcattattattgaactgtttttatttgtttatttattttacagacttagttttactactttaaagggataattcaagataaaagactttttttaaattctttagtgggcatattaacaagtgggacataatatatttaaaaagaagggatctgaaaaaactagataccattaattttaaaatgggaatgtatgataaatgcggttttgtataaattcatgaatactaaaattgcttaaaaacttaaatcttggcgttacgaattatcgccgttacgaaccggcagcgttacgaattgtccgttaccatttgtggggtcatgaactgacgcgttacgagatgttatggaacaatatgaggcggaaatatttacaaattttatgatggactgtttttattaatttaaccatgggccctgaattgttggtattaaataaaaatttttagttgcatttt

SEQ ID NO: 6558 - DNA, 2592 bp, Diabrotica virgifera
cgtgtgtgagatgtcccgttaaaacctgtggttcactgtcggaatttggacggcctatataaaatcgatcgtccaaaatcggtgtgtgtgtatttagcgtatggtacattgaatatgaattaatctccactgtcaatcatatgatacacgtggagtacatttatggtttttcgccagtgtgcaatttcaaatgttatagtaagaaactatggctatagtccgtcccaccttgactttacaatatgtcgaacataggcaatgcagtccttatgagagtttttagcgcggtgatgcagattttatcaggaagaatttgtaatcgaacattagagagattaaattgaaactagtttagaaagacagtctacaattttaggattcgtatgagtttaagtttatttgatatactatagttattacgcatatgaatcttaaaattgtaggttgcctttctaaaacagttttaatttaatctcgctaatgttcgattgcaagttctttttgataaaatcggcatcaccgcgttaaaaaactctcatgcattgcctatgttccctatactgtaaagtcaaggtgggaaagacataggtgtttcgtcagtgtgcaatctcatatgatatagcgaggaatacgaataatataaaatgtaatcctcattacattcagttgtggtttaatcccatgtactatttacgatagtagacattcattgcctttgaccatatcggctgcaattgcagaaaaaaataccgggaagaaataattgcgtaccacgctttataaactcccattacgttcttgtagtatcagtattgaattttatttggaatattgaattctctacattagaaaaaacttgctcaacatgataaaaaattccactttgaatcagctctaatgaaattttttatggaaacttttaacaaatcactactttcatttggtggtttatgtatgtaataattacagttaagtccatggttctttgcccatgcatcattatttaaaacatacgaaataagtcgaaaatttaccccacgcaacagcaaatgacagaaagtagctactgctccgatgacggattctattataaaatttgacgttatcaaataaataaaatgtaaaatgttagttttgctttaaaatttttgtgcagaattacagctacatttgaagtagcttaattcaaaaaataatatatattatagtaaatataataaccaggcataatctaaaaaaaaatcaataaaatattttctttttgtcatttctttcacttttgcggaaacttaacaaaaacggaaacaaaaccgttccttaactgtgttaactgaggttaactttgtaggtgtataatttaatggcaaaataaaataaacttatatgtacaccataaaatttcaaactccaatataaaattagtttaaaaacaactgtttgtgtaatataaataacttctaaagaaaaacagcataacaggacaaaaaacagcaaaaaatccaacaaactgacagccacaagtaaacaaaccagaaacgtcacaaattgtactccagttgaaaacattcccaagcgtatttttccaccacttatctcttttcgatgtactaagtctaaagcgttcataaaagtaacatgtgtctttacttaataacaggcggtagctggttggtctttagtttcatgcgtggaagacaatgatgctagataaaaagtatgtgttttatctcgccaggtattaatgactcacgggtaaggaaccatggactcaattgtataaagtggtttgcagtacttattactaagacaggctaggagaactagataatatattttgggaacttttaatgggtagttcttataaaacgatttatttttagtgttacaactttttaaccaatacaaatacccttgtaagattgtattattacagtatttttgatcgtattataatggcaactttattttaacaacacaggttttcctacactaattatgcttcactttacaaattatctgaattttgttgatgcaatttcatcaatttattttaagctggataaaacataacatatttttatgttgtgggatgaacttagtgcatttagtagttagtttgctgtcctctgttccaccatcttttaattaatttattgtagttttgacatactatgtgcaagcgcattgaacatataagaaagaatttgtatatttgaaaaattatgctatgaaaactcttaacaaacattgtagagctgatagatacgtattaatggacaataccaaaaataattgtctactttgtattataaattgaaattattttattttagtgcatttttcggatggtagtatttagtattggttaaaatattcaaataatacttatacaacgaactagcttttaatacgaaattaaattttggaatatttacatcccgattgttagataaatctgtataactttgataaaaattcaataggaccactagaaatatcactttatatgataatctgtatatcttcgataaactttcaataggaccacaaaaaatatcatgttatatgaatctataatttacatttttctaa

SEQ ID NO: 6559 - DNA, 2584 bp, Diabrotica virgifera
caatattgttacagactagtaaatgtagtcacagataatacctatgatagattttcggcaaaatgggcaattttaaggtactgatagcacatagaataattggaaaatgaaatgctgcttataagcgttaaaattctttgtatggtgacaagaaaaatgaattcctaacactaataaaatgaaggcacatctcgaaaattgttattgtcaaaaatcttcgtgtttaaaaaatagagacattgatctagactctagacgcaccaggttatttctctctaattatatgttttcgttttacgtaattcagagagataatagtgtctatttttcatcgcccaaggtagatggcgctactgtgtcatctactccgtcaagtagacaatttgattaacaattttatctttttctttctgctaagaacacaagtgatgtaattggaaacatcccaacaatagaatatctacgagatccagaaggaaaagtcctagagtttgaaaatattataaaagacacctggcatttagtcataagacctttgtaccatatcattttttttattaaagttccaatggtcctgtggtctcaataatggccaacagtttcctcgttcaattttaaggatctcttctggttcaaccctcaactgcctttctgcgtcatatcacccagcacattcttcacttattggttcatgtgaggcactttaatctctgacaacaagtcctaagatatttgtactatggtgctatcgacacagcaccagagaagaaaaacatacgatccatatgggtaggtttaggtaaacctttaaatctgtggccatttgccaaaagctgatatgtccactttttgtgatttggactttcttatgccagctgatagtgtgtgattatatatgctccatctgcccaaagcagatatgtccagtgtactgtgaaatgtagtttaccctccatgtttaaatctggatatctccacatgaccaaatcaacgtttgccaaaagctgatatgtacacttgtcagttgtaagtcataaataagtatgacaaactgtaaggagtaattctacataaaaaataagtacagtttgctcaataaatgtatgtccgaaaattcttcgtttccgagatacggggtgttgaaattttttgttcaagatgccaatttatttattactctaacaccggttgagctatgacaatgaaatttggtaagttttaagcagtaggtattgctcattttttgacatacaaataagaatattttattcatcattggcgcgcatacgggtaatgttttgaatttttttaaacagaaaaattgtacgccactgagatattcaaaattaaaaattatttttgaattacatggacaatttctgatattccgcaaaaaaactgtacaaccatctccctctacatcttaaagctgcaacatctttctccaaattccgtaaaatgacaaaagcctacctatctgaaagaccatattattcagtagaagaatttcttaatcaataactaagaagttactgtaagtatcttttgtacgagtagtatattttttttatgggtggcatatgcagcagcctaactttttacccgattagttactaaggtagactatgcaatttgcaatttatttaaaattttaaattttgcaattcattttttctgtttacttcattattattttttttgtgctatattgacgatgtatgtaattttagtaaataattaaattgttattgttttgtgacttttcataagctttgtcgataaaattgtacaatttttcatgacaataaagcatatttctaattctaaaaaacctctcttggcttacttcataataatgtaccatttttatgcaaaaaaataaaaatcttagcgcatatttttcatttcattaatacaataccaagaactatctaatacaacactaataagattttaactaggctcaaagctacaatatatgttcaaaatgaccttctcaccggtggcagaagaattttatacttcatcattggcgcgcgcacggatattggtgtgaatttccttttaagaaaaaaatagtatgccactgagatatgtcaaattaaaaatcatttttgaattgctcgtataatttgtgacaaaaatatatatcttgccttttttcatatgaggcctatttttatacaaaaaaataacacatcttaacgcttacaaagcattcgaggtagtttccatatgcatagaaacttatttcaaatgctttgtaaacgttaagatgtctatttttttgcataaaaacggcgcatcgtatgaaaaaaagacaggatagactttttatcgtaacttggacgaggaattcaaaaatgattttaatttggaatatctcattattttcattaaaaaaattcaggccaatacccgtacgggcgccaatgacgaatacaaaattctactgtcacccctgaaagagatcattttgaacatccgttgcagctctgggcccagtccaaatcttattagtgttattttctattattgttctagtttagtattttttattagatagttattgataatgtattaa

SEQ ID NO: 6560 - DNA, 2578 bp, Diabrotica virgifera
  SmartBlast Evalue=1E-158; Info=Slc26a5 n=1 Tax=Anopheles gambiae RepID=E3SB72_ANOGA
aagatatctcatcgtatagaacataatttttcttagtttgtttggttttcttcagtaattttttccatacagtgtgcggttttagttttcgtaagtctctagataaatttaaggactttgttttaaaagaaatgacaagaattaaaaagttatgtataaggaatatactaattgtgaaacattacgtatattttggaattttcatggtttgacatcgttatcatcaaatagtatcaccaaataggagaatgtcagttccggggacaccagaaatacggatccagcggcctttatatgaaaacgatcaactaagacaggatttgaattatgaaaaagaccaaactaactttgtgaacaaattatgcaaggaaaaagtttccccaaaaagtattataaaatcaaccattcctgtcctgggatggttacctaaatatgaatggagaacggatatattatcagaccttgcttctggatacacagtggctatcatgcacattcctcaaggtatggcatacgctcttttaggaaatgtacctccagttgttggaatatatatggccatttttccagtattagtatattttttcttgggaacgtcaagacatgtgtccatgggtacgttttcaatagcatgcttgatgacaggaaaagcagtactggaacatgccgacccatcatactttgatacgaccaatactaacagtacggatgttgttataaggggcatgggttattctcctgttcaagtggctacaactgtcacttttatagtctcgattattcagttattaatgtttgcattaagacttggagcagccaccaacttgttatcagatatgctagttagtgcttttacttgcggatccgcctttcaaattgttgtaacccaaataaaggatcttcttggaataactatgcccaaaattaaggggaatttcttaacaatcaagatactcaaggtgatatttgaagaaattggacaaacaaactatgctgctgtgattatttctgcaatcacaattgtggtgttgatatttaataatgaattccttaagcaactagtagcgaaaaaatcatctatacctatcccaatagaactgattgtagtaataattggaacagtgtcttcccaatacctagattttcataagaattatggaatcaaaattgtaggcgatattcctacaggatttcctcaaccagaaatgcctccacttgatttggtaccatcggtccttgtagacggggtctcaactgctattgtatcttatgccatatcgatgtcattggcaatgatattagcccaaaaagccaattatgaagtggacgcaaatcaggaactattagcaatgggtgttagtaatgcagtgggatcattcttctcgtgtatgccgctttgtgcttcattatccaggtcgatgatccagcaagtggttggtggtaaaacgcaaatagtatcaatcgtgtcttcgatgttattgattgttaccgttctttggattgcaccattttttgaatctcttcccaaagctgtattagctggtattatcgtagtctcgcttaaaggaatgttggtgcaagtaactcaacttgtatcttactataaactcagtaagtttgacgccttagtttggataacaacttttgtctcagttgtatttataagcatggaaattgcattaatggttggaataagtttatcacttttatccatctttattgccagtttcaaaccttatacctgccttttgggatctgtaccacatactgatctttatttggatatgaatagatacaaaggggcaaaagaaatagaaggattaaaaatattccattattgtggaggaattaactttgctaccaagggtatattcaagaccgaattgtacagacttattaaccttaatcctcaaaaggaactcatttctcgtgaaaaattggacaagatcatgaataaggatctacctcctaccgagttcaaagaaaaagttaaaaaattggaaagtaaaataaatagagatctcaaatgcataatcttggacttttcttcggtgagctgtttagacccgtgtagtgtcacaatgttgagaaatgaaatggccgagtttaaaaagcttgatattactttctatgtggcagcatgctctgatgatatctataacttgctaaacaaatgtggactactttcaaaagaaaaggagtctcttagagttttcccaagtatacacgatgccgtgcaagctgcaagtcacgctatgaacattccaattgagcttcaaattctgccaatagtactgccaaatattatgatcgaaaatgaagaaagttgagacattcatctgccaaccaataagggattaaagttacttttttgctattgttatggagaaagcaacattttacaggtgaaattactgggctgcataacagaacaaaacgaaaacaaaacaaaaaaatgtttaagtaaaatcgctttcaaactgcaagggataaaatcgcgttatagtgatgtaaacgatgttaaaatatgtgaaattgtaaaaatgtatataaattatttattactagtatgtaaaca

SEQ ID NO: 6561 - DNA, 2575 bp, Diabrotica virgifera
  SmartBlast Evalue=0; Info=Solute carrier family 12 member 8 n=2 Tax=Formicidae RepID=E2AH49_9HYME
gatatttaaagactgtactgttgtgacatttaggactttaaagtaaagcaaagcaccataaatagaaatttgttgagttgtccgacaatgtaagatccaaatccaatcggttttttaatgccatataatttatacaaacaaataatgcatgtctaattacaaatgattcttttcaagacttatagataagaatatttatagataagtgtaggagaaccaatgaggaattaaaatcattatatacatatcttaacatattttgatattttttatatgaatcatctacaatttaagaaggttaagaaatggaaaacgggaacacgagcagagacctaagaaataaggatattaattggtccagatatggacttggaacagaggcagccagggttaggggtaacacaagcggttttgttgatctgtcaaatgactatggtgctgggggtcatcaagcatcaggggctaatgaactatttgcagaggaacaaggagatgtgccttggtggaaatctaacttttttatatcccaaccggttttgtttggaacatgggatggtgttttcacatcttgcttaattaacatatttggtgtgatagtatttttaagatcaggatggattgtagcacaagctggagtatttagtggcatttctatagttttattctcagtgatcactgccttgatatcagtgctttcagcagtaggaatatgtgaaagatgtagaatagagtctggaggagtctattttgttgtagcacatactcttggatcaagattcgggggatcacttggtctattatattgttttggccaggccgttggttgtgcactcaatgttcttggtttcggagaatcaatggctgaactgatcggtcttggtgactcaaaatgggccgtacgaatagttgccatagcagctgtactccttttaagcattatcaacgtggcaggagttaaatgggttattaaattgcagtttatactgctgttgatattgctttcagccgggctagattttatggttggcagctttgtacatacagaagaagataaaggtgtggaaggttgggtcagcgacaatatggagaaaaatatgtggtcaaactataccgaaggctacagttggtttacagtttatggagtatttttccccacaataactggagttctatctggtatcaacatgagtggagacttaaaagcaccatcgacgaacatcccaaacggcacattagctgcaatcggaacagcaacctttctctacctcgtttttatattgttcttgggagctacgtgcacaagagctattcttttaacgaattttatgatagccgaagatgtatctgtcattggagttttatttttagctgggctttatgtgtcgtctatgtcaagttgcttgggagctatgtatggcacccctagagtactacagtcaattgctttagaaaatgttatacctggaataggatcactcggaaaagggagaggaccaaacaaagtgcccttatattcaatggctgtagtagctattgtgacttttacttttatatttattggggagataaatacattagctcccatagtaacaatgccttttctattaacgtacgcttgcatcgactatgcttacttcgccctagcacaaacgtttgatatacaacaccaaagggaacagagattccacaggcccagggtccagcagactttagttagcgaagacagtgatttggatagactttttcctgaacgcacaagacataaaaatctcaggggtgaatcgagttcaaattcaataagtagtcctgaagaaagtagtgaacagacacctatagcaccaaaaatcaatattcactccaagcagaaaaactggtattcaaatttgtgtaataggtggctatctttatttggcgcggccttcaagatagtaataatgctgctagttaactggtactatgctctcgcttgtatgagtgtagtctttttagtgtggttgtatataggaacagctaaccctgctgttaaaccaggactagccttcgagttccactttttcaggtggctaaagagtctaatactcagatgcatgggaaggcgtgtcacggattacgaacaaatcatcgtcactccagttcatcccggcttggacgtgacctcttctcagttaaatgaagacaatgaagacttttcaaatagaagacgatatcatcaatcagccacagtgcacggtcatttggtgaatatcgttgattaattcatttggctgttatacttggaagtttctggagtttttattttatagttttttaatgtactaaaagccaaatatcagttgctaagattttatattatatttttttataatacaatttctgctacgcacttgaaacgtgatgtatatggttagttatatgaaaatccgatatagtcagatcaatgaagagtttatttgtatatttcttatgattcggtgtgattttgacgattttttttatataaatttttaaatattgaatataatgtgagcgtgtaaatatgtacttatattttctaaacaattagattttccagttg

SEQ ID NO: 6562 - DNA, 2570 bp, Diabrotica virgifera
  SmartBlast Evalue=7E-82; Info=ETS1 n=1 Tax=Paracentrotus lividus RepID=Q330K7_PARLI
ctttggagacgtgagtttctcgagtcgttattttaaaactttttcttgtgtatttgtgcatttcagtgacttttttgtgtgaaaattgtgataaaagtgtgatacctgttgtttgcgagaaaacgtggacccaagtagatgcaatatggagctggaatcgttcgaaaactctttcgattacggccttgaggatgaagatttttacgaaagtcctcctttgaaaaaatctaatcaaaggaaagttacattcaacccgcaggttttctcaaaaaatgacgatcctgaatatttgactccgttttctgtaatgaaacaagaaatatttgatgaaagcgatgaagatcaagctccaagggctatgggttctattcagaaagtaccatcgatcagtgatttatctgatccggaagcatctttggatattcccacgcaagtgccgccgctgacgcctggcacgaacaaaactatggcagaggcgctcaaagcgtctttcgcctcttgggaaaaagaacaaataagattaaatattaccaaagatccacgccagtggagtgaaaatcacgtagcccattggttacaatgggctgctaaagaattttctttagactgtatacccttaaatcaatttaggatgaagggtaaagatatttgtgcgatgggaaaagatgcgttttccgcaagggctcctgcgtttgttggagatatcttatgggaacatctagagctacttcaaaaagatgttgaaaaagaacgagctctccatagcctctatgaaccaatttgtgttccagaactgacgtatattgattacactcaaactccgactgctctatctccgacagaagataggaaaccaattactgttaatcctcctccacctcagaataataacacacctccaaacaataataatttccttcatgaaggagtttatggccaactccggagccctgcctgccctcctccaccagaagatttaagagacgatggatctccgcctccgggtgcgcctcaaaccaattatcttcagcaattgcagaggagtcccgcgtaccaccatttaaaagaaggttttaaaatcgtgtcctcctggcactgactcgtcggggggtaattttggagcgatggaaaataacctgccaacactaaacaacgacgatgggtcccatcttttcccaactccacatttctcgcctgatgaacagtatcaagctctggatagccatcagcagaattacctagataattcacctgaattttattctaatcatatattagagcagaaatataatccacatagttatgttacgaaatatagaggtgctggacgattcaacgacgcatactcagatacctacggagcgccgtacgatacgttccagaccgtgcccagtggtgccaatagtgggccggaacagtggggacataaccccgaattaacgttaggtcatcatccccatacacatcctgcatttttaacggcaggaatgacaagagatcaactgaatgcaatccaagatacgaagcctatgattcagaatggtatgattaccggatatcctggaaatcctaccactggaggaccatgttttacaggttcaggaccgattcaactctggcaattcctcctagagcttcttaccgataagtcttgtcaagctttcatttcttggaccggtgatggctgggagttcaagctgacggatccggacgaagttgcaaggcgatggggtatcagaaaaataagccgaagatgaactatgagaaattgtcccgcggtcttcgctattattatgataagaatataatacacaagactgccggtaaacgttacgtttaccgattcgtatgtgatctgcaaacgttgctgggatacactcccgaagagcttcacgctatggttgacttgaagcccgaaaaaaaaagaagatgactgaatggatagataaccttcaaatctactaaaaaaatacaaaaaaaaaatcgaaacaggcattaataaagtttaatgccgtccgtattgtagttaaatacaataattactatatagacatgttccaaataaacatattttcttatttgaaatttaaataggaaggtatattgcaaaaagacaatgttacaagcgatttaattcaataattttttgaggggacgctacaaatgtcaaaataacaacaaattgatatcaatttttacgaacaaatatactaaaatgtcaattatatatcgttagccgtgccattttaaacagtcgttttactttcaagatactcctcattcttgcaaagcagtttcacatgtattagattttagaataataacatattaattgtgaagtcagaaataatacagttctttgcagagttctgttcagaacgtaatgtattaatttcaacgaactgtcaatactgtattgacagttcattcattaatttacagtgatactccttccatttagtgatagcaaatactatagactgtaatacatacaactcttgacatttcccgttaattttgaggaagcaaaaaatagcgccatctagcggtatgagtaggataaccagagc

SEQ ID NO: 6563 - DNA, 2559 bp, Diabrotica virgifera
  SmartBlast Evalue=0; Info=Transmembrane 9 superfamily member 3 n=2 Tax=Apocrita RepID=E2B9M3_9HYME
ccccgattagttcatcatttccagcagaataatcactggcgccattttctttctaaaaatgcctcgtcatactaacatgactatggctaaattacaaatgcctttgccaaaaaaaccttttaatactttttattgtgaatttttcacttcacctgctctgggcagttctcagtccataatcatttccacatttatattatggatcccctttagtagatgtgtaaaatatgagattaaaatacataaatctgacattaaactggtattattaatttacaatatcattcatactgttttattaatgacagttaaattaaattattcaatgacataagaaatgacagatccctactgtcacaaattatttttggatagcatactcgctgtaagtgaatgtctttcacaataaaaaaagatatgaaaattatggatacaaagttcccccaaatgctcagaaaatcactagcctctacttactcgttttcgtatggtatctgatggactatatacaggtcagagtttacatttaacacaatatttactgatactctacacagttttatattcgataagaaacttaacctatcatacactgaactacacgttaacatttataggaactttattatcaaataaaagtaaaaacatcgtttaatgtgaaagacattgtgaacagttaaataacgaaaaatgcacctatttacaaaaatggtcacaacaacatcagtcaattttaacaatagagtatattttccttacaaatatactcgttccaatgtatcctacagtaccacacataatgcccagagctccactgaagagcgccatgtaaccaaagtaaaaggttgtctggaatagtccatacatcttagttttgaagaagaagtagtatatggcgtatacgtatacataagcggacgtagaagcagcagccaggaaagaagtccattgccagcgatagtcttcagcattaagaaggaagtaagtgcaaacaatggtcacacaaactgttacaatcattaatataatgaaaactaacagcataaaaccatatacatagtatattttgtaggcccagaaagacgtgaagatgaagtacatttctatgaagatactggcaaacggcagtacacctcccagtagaatgataacgcctggttccataaaccacttcttttccggaatgggtctcggcacagcgttaatacgacaagggtagtctggttggccagccaaatttcttcccaaaactgtaccaacaagtgtaagtggtagaatgacgaacaagcagatgcatgtcacggccaccatcgtaccaaacggtatggctctagaagcgtgataataaatggcgatgaagttgatgaagaaggcagtaccgcatacgaaagctggtagcatgaaagctgagacgatcatttgtctaatccacacttttccgcccatcctagcatatagagatccaccaaaatatccatttattggcgatgtaacggcatatacaaagatcgacgttgataataaagatcctcgctctgtgtacagttctcccattatggcgaatacaataacgctaaatacaacagttgtcaattgatgacctgcaccaatcaaagcggaaaagaagagagaatgtgacgctggacggaaaacatccccgtgtacttgtttccaaccatattcgtctcccaaatcacgttccatgtcatctatgtcttcatccttgctgtatctagcataatctttcctaagtgttctcataaggatcattgataccaaaccgactaagaatattaccatcatgaagctgttaaatatactgaaccaatgaatcctatgttgaaagaaattatggtccaagtacttgtcaaatctatcctcaaacttaatatttgttttcttccaaataacttcatacgtaaactttaactgggtagtaggtttcaactcaactttttcttccgatgtgagattaacatcgatgatttgtttgccattgtaaccaatttcaaacttcttgtgagtccaaatgtagtagctgttgtccttcatttctccaactacaccccatatgggcaggtcgtcgatgtacatttggtaccaataatggttcttcactgcatatacaaacgctttgtatttttcttcatcaagttgtacagcacagtaatctcctctagacatattaattttaaattcaatttctattccactgaattcaagttctaccccttggagtgcctcgcttagtgtttcatggtaatggctgatagtatctttggatccgatacaaaatggtagagagaagtatgcgtatgtctcttgcctattatggtagggtccaacagtattcatccatagcactacctcttcattatcttcataaatgtgattgtgctcgtcggtgaacgccccaactacgaacgaaagcacaagtactttacaaagaagatacataattattactgtttttcatcaaattttccaaaactgatcgagccacgaattacttttattttccgaaatcaccggaacaaatacatcttctacactctacac

SEQ ID NO: 6564 - DNA, 2555 bp, Diabrotica virgifera
  misc_feature (19)..(19): n is a, c, g, or t
  SmartBlast Evalue=0; Info="Thrombospondin-3, putative n=1 Tax= Pediculus humanus corporis RepID=E0VQ35_PEDHC"
gacgttaagagagatgcanaaacacctgaccgtaaattagaagtgcaccacgaacgaaaatataccatcgaaatcgacggacatcacagagatttaagaatggttttaaatcgcaatgactgtccttctgtcgttatacacgaaccaaagcaaaagctacgacaattatctcaatgatgatctaaacaataatctcaatgatgatccaaatatacaagctcaacaacctgattatgatcagtaccgaaggggaggagaggatccatatagaaggacatcgcctggtggtgttccgtatagaggagatattcccttggtttccaagttggaagactctggtattctgcaagctcttaaccttctgatcgaacgggtaaatttcgaagtaaagaggtgcgaagcttcagctgcagcaatcgataacttgcgccgtcttatagaacaatgcgaactgtgcaaagctcagccaattcgtcgaccaacttgtgctacgcatccaccaagatgtttccccggtgtccaatgttatgataccgaacaagggcctagatgtggacagtgtccaagaggatatatcggtgatggatattcttgcaatcctggccgcaaatgcgaagacaatccttgtttctcaggagtggagtgtagggatacagcacaaggagccgtatgtggtcgatgtccaccaggatacgaaggagatggtttctcgtgtactagagtaaatccctgccaatataacccatgtgctccaggtgttcggtgtattcctcaggaagagagtccatattatagatgtcatggttgtcctgctggttttacaggaaacggaacaacttgtctagacattgatgaatgtgacttggtccagccatgtgatcccagagttagctgtcacaatcttcgtcctggatacagatgtgacccttgccctcctggattccgcgcagaagaagaatcccaaggtattggtatagaggaggcagcacaaagaacacagcgttgtatagatattgatgagtgtcaaactggaagagcttgtgtgccacattcagagtgcattaatacagagggttcctatcattgtggagcctgtgaatacggatttgtcggcaaccagtccattggatgtcacgaaggacgaggttactgtccatcaggtcatcgttgtgacgataacgctgaatgccttaatctcggttggggtcaatttggctgtcgatgtaaccgcggattcgcaggaaatggtgtctattgtgcccgtgacaccgatttggatagatggcctgacatcgatttgccttgcgatgaaaaatattgtaggaaagataactgcataattactccaaattctggacaagaggataccgatggagatggaataggtgatgcctgtgataatgatccagataatgacggtattacaaatggcgacaactgtcctcttatcgccaatcccgaccaagccgattctgattacgatggaggagacaaagtaggtgacctttgtgacaattgtccttacgtcaagaatccggaccaaagtgatgtcgatggagacggtaagggtgacgcttgtgacgaggacatagacaacgacactattctcaacgagagagataactgcaagacaataccgaatacagatcaggccgacagagatggtgacggcataggagatgtttgtgataactgccctagtgcgtataaccctggtcaagaagataaagacgaaaataatgttggtgatgtgtgcgattctccaatagatactgataaggatggtgttccagacaatcatgacaattgcagacttataccaaatccaaatcaacttgacactgatagagatggaaaaggagacgcttgcgatacggatattgatgatgatggtattccaaataaccgtgacaactgtgtctttgtctacaatcctgatcaattggactcaaatagaaacggatatggagataaatgtgataacgacacagacgacgatcacgtaactaacgataaggatgtatgtcccaccaactcattaatctaccaaaccgacttcagcaaataccaaaccatagtccttgatccatacggtgaaactcaaatcgatccaatttgggaaatttacaaccacggagcagaaattgtccagactgttaacagtgatcccggtttggctgttggacatgacaaatttactggagtagattttgaaggaacgttctttgtggactctgacgaagatgatgactatgttggttttattttcagctaccaaagcaacagaaagttctatgccgttatgtggaagaaacacgcccaggtctattgggaagcggaaccattcagagccttcgctgaaccaggaatccaaattaaggtaatcgactccgaaactggacccggagaagtgcttagaaactctctatggcacacaggagatactcctaatcaagtaagacttctttggaaagatcccaaaaacgtaggatggaaagagaagacttcgtacagatggttcttaatccacagacctgctattggtctcattaggt

SEQ ID NO: 6565 - DNA, 2559 bp, Diabrotica virgifera
  SmartBlast Evalue=5E-88; Info=Ubiquitin specific protease (Fragment) n=1 Tax=Aedes aegypti RepID=Q16MY5_AEDAE
cttgtgatatatatatttacacataataatgttaataaaaacaaagtgttgaattattattaacaaaaatacactgaatatcttaaagaacattaaaattacaattttatttgtatttatggtacaagtatgatgtagataacagaaaacaagtagcaaactcaagaaaactaaaattcattcaataaatatagatatatataataagctagatctgtttatcattaataatcgtattaacacaatacctattaataagcatccctttatttacaacgacttcatttaaatagctagcacaccaacatgttacccgaagtactgaatcccccaccaccgcaattcggagggggcggttcatcgtttctattatgtcgaaaattaaatgattttccagtttgttgattctttccgcttcgaactcggactgatctttagttaggactatttgtaggctagtaggaagtattgttggtgggagattttctggttctttgatgtcctcccgactatagaaaagaatgtatgctgtttccggtggtttaagcctttttaaatcatccgtcgtcgctctacttacgaaactatcgttaaatttgtaccactgagccttatctttggctagagtgtaatagtgtcctgaatctacgctggagccacaatgtaccactgctgcgtataattcataacggtatgtatcaatcgttaggtagtcatctaatacgacagtttgaagcagctttgtacgctggtgtgacgtaggatcgtatctgaagtgcttaagtgtaaatattaatctcgggggtgcttcaacaattcgtgtaattttttcaccatccgtcagtctactacatatatcacagtggtactgattatcgccgctcaatatttcaggttgcagataataatccaacaaagtctgtactgactgattatcagaatgattcggaaaagaaagctgcagttctctaaaatcgtcaactctttcactagttgtggtacattctccgcatcttgatactgtcattgttctaccaccgaaggattgctgaacaactgttggtagtacagcagtggcaccttcgtctgcagagttgttttcaagagaatttgtgaagttcttttcttgctcatgaagtgtatccaataaatatcctaaaaactctgaactatcatgctggtgtcctagtaaaaatcccggcggccgcgacaagtgtaaaatatcatttggagagagggaatttcttttagaaaattgcaagagcacaaacaaggtttgtaactttgaaaataactgtgaaatagctttattgttaagtagtacttcattcctaaatgttttcgttataaacagagcctgtagtacactgttcatgtagcatgtgtttcctagattatttaatcctactttttccactacaaatttatctaccgtaggtgacactatcccagcagtccaagatttatagtgtagaggtggtttgtagtctgtagatatacagaagggctgtatgacttcatttaaaggttggtacagttctggatatcctggaaatgcttccattaacgctatgaataactgaacaatttcttgaagaaaccttaaactggaatcacttctttctttgtctaacttgtcacaaacggttttagccaatggtatagtcttatgaaatatttgtggattgttgtgctggtttctggataacatgtaaagaacaaccggccccacactctttctgatcttgggaaacatgactaatttaaaaagaggttctatagtcaccagagtaacttcaattagaatttcatagtggtgctctgcttctagtcccttcatgaaagcaagaacaagagggcctaaattttctacccaaaaacattgcgtcaaccagatggacaaggtgaagaaagctttttcaagatgttgttctggatagccacagtttaatatgtactttacagcattaggtatagttgcctcatctattagttgaagtactatagacatagcgggagataattgcttttgtggatctggatttgaaatttcatcaagtagtgcttttaaagcaatgaatacgtgttctgaacactctttcgacaggatgttttgtacttttttgatatcttcaacaaatttcatataactaccaggatctgatgggatgggaacagtgcctaagctccttactacttgtgcacaaaacttatcttgaagtccatcatttgctgaaagtccttgtagtgcccgaagtattatttgtaatcttgcctcctttgtgggtgtggcacactctaccactttctgcttaaccgccatcttgtggcttggttaatatcaaatctgctctaaaaatgtaaactgagagatcctttctagaataaatacgtcactgtcaagtcaatacttatatatttccagcactttgcgagtttccttattgcatattattcaatataatctgtaaaatcattaggaacagcagcttttacatttacaacaattaataataatatttttgtgaatgaattttagtactattttacaaagaaaat

SEQ ID NO: 6566 - DNA, 2561 bp, Diabrotica virgifera
  SmartBlast Evalue=1E-152; Info=DnaJ-like protein subfamily C member 7 n=1 Tax=Harpegnathos saltator RepID=E2BYL8_9HYME
aaaaacaaacgaatgatagatattcaataaatcgccttcccccttttctcaaatttctatccatacgaatagcaaaaagtaaactagccctcaaagtcctcaaaggtagcatttttgctaaaaactgcatcaaccagaaaaggcgctcaagtaaagaataccatataccgtaatatattttgatacgttaaacgccgaaatgtatataatattaaagattttctgggccgactgagacgtggtcctgacggtataacagtcactgcgaagcaattgtgattcgcgcagccttgtaagtaaaataagcgtgaatcatatatgattcgcgcgacgttcaacgtgttgggacaatgtcaaaggacattgaatgcatatgtaacgatttattaaatattaacaggcaatacattttacaatacaaataaatatatttatcgaaagacgacttattgaaactaggctcttgtcgtggaagcttatactctcatttaattataaaaatttccaaaataaagaaatacataatataaaaataagataaaaataagataagaaaaaaataagataaaaatataatattacaacaaaagttctaattcatagaagacaaaaaaaactttacaaagtttacaaaaaaaatgttttcaataaaaaatgatcgttttaatgcagacttatttttccaaattgtcctttccaatttatacattctatgttttacgagtttgataacttgcctcttcactatttcgcaccttttgttaggatatactcgtattaactgggacactttttatcggataaagtaccacactttaaatggtaaaacgttgtatactttttcgcacgcttccttcgatgggttaactggcttaactctttgcacccttactgttgaaaatcttaaaatttccataaaaaactttaaaattaaaataaatactaacacgaatcagagaaaagaaaattcaataacacaaaaagagaattaaaatctctacaaccactggaatgtacgaggtacgtccgagttgcagatggtttaaccgaactggaaggtgaacgagccagggaaattgccgaaggagaactcctgagctccgccatggtgatggcctcctccacctcctccgaagaaggtttggaatacttgagtaggatctatatctgacatacctccgtcgaaatcatccatatcttgaccgctatcatatcttgctttctttttgggatctgaaagtataccgtacgcctcaccaacttccttgaatttcttttcttgttccttcttttcatcttcagtagcgttggcgtgtctgtcaggatgatggatgagcgctcttttcttatatgctcttttgatttcatcttcacctgcggttcgttccacaccgagtattttatagtagtctttcctctttgattttttcagtgctaatttggcgtcttgaagtaattttttattctctctgctcttatctattttgcaaattttttcataatctttcacagcatattcaaactccccaagatccatataacatttggctcgtctcatgagtgctttaaggtaagtgtcatctaattgcagggcagccgtacagtcttctatagcttcacgagtcttagttagtctggctagaactgtggcacgattgaagtacaattttgcgttggtttttttattgaaaggatccacttgcagtgcttctgtgtagagattgtaagcttcctgaaatttgccagtcttatatgcctcgttgccgtcttctttcatctttttcaataaccttgctctcttgtaaatattcatagctttagtgtggtccggagccaatcgtaacacttgttgaaaatgttggaatgcactgtccaaattgtcgtcatagaagagacacattcctcttacgtagatggcatcagcgtttcctttgtcgatgtttagaatactattggcaatttcctgagcttcttggtaacggccgagatatgtgaggcattctgctttggcaattttgtatcggtagcaagtaggggcattatcgagacatctgtccatacagaaaacaaccaaacgataatcttttttatcgtacgctttggttccatctgactcgtactgcttcaattgctgaaccgattttaattcatttgcaaatgtttgttggtcaactttcaagtcctgaagcttcttaatggcaaaatcagctgtagtggtgtcacccattgctatagcacactttaacattctgatgtatcctttaacgaattctggatccagctgcacacttttcctgacatcttccaaagcttctgtaaacctgtaaagcatcatgtagcaggcagctctatttccataataaggggctacatttggacaaagattgatggcttcgctatagagagggagtgcagatctgtactgtttggttttgtataactggttaccgttttcctttttgagttcagccatctcttctgggctttttgatagtatttcctcattttcatcagagtccataatcacctcgtctactacatccgccattgcaaaatcttgt

SEQ ID NO: 6567 - DNA, 2557 bp, Diabrotica virgifera
  SmartBlast Evalue=0; Info=Phosphoenolpyruvate carboxykinase [GTP] n=8 Tax=Sophophora RepID=PCKG_DROME
atgaaagtcccctccaaaactgaggggaccgtttttccatataaagaaagctatagtagggtattgttgcaatatcaattgatttttcaacttgaatattagttacagggtgtatatttgtttacgttttatttaattttttctttgttataactttgtcgttataattctggctaatttcagaaaaatagttgcaaaataccaccgactcgactgttttgtgtcgaagtgtgataaaatatatctgaaatacatctttgggcattattgtatgtaccataagtcttacacttgatttaaatttttgggtttttgaattttcgtgaaaaaatgcctgctttagttgccccacctgtgaacaatggatttcccaaggagtttggaaggctaacgaagacattcgggactccggaagttgtcttcgtgagcagacaagtcagaggaatcagtgtagtgcatggagacttgaaggatttgcctgaaaaagtgcaatcttacgttcaagaaaatgttaatctgtgccaaccagataaacttcacatctgtgatggaaccgatgctgaaaatgaaaagttgatccagctaatgttacaacaaggaaccatcaaacctttgccaaaatatgaaaactgttggttagccagcactaaccctgctgatacagccagggtggaatcaaaaacgttcatttgcaccgactcgaagtcagaaactattccaacgcccaaaaatggagttcaaggaactttgggtaattggctgtcccctaaggatatggacgtagctgttaaagaaaggtttacgtcgtgtatgtcgggaaggactatgtatatcgttccattttctatgggacctattggatctccattatcaaaaataggaattgaaataactgactcaccatacgtcgttgcttccatgaggataatgaccagaatgggcgcaccggtcttaagaaaactaagagaaagccaagaatttgtgaaatgccttcattcggtaggaacaccaagtaatggagttctagaaaatccgagttggccctgcgatcctgaaaggaccatcatccttcacagaccaaaaaacaacgagattgtttcctacggaagtggctatggaggcaactcgctgttgggaaagaaatgttttgctttgagaattggatccactattgccagaagggagggatggttagcagaacatatgttgattctgggcatcaccagtccttcaggcaaaaaacgttacatagcagctgccttcccttcagcctgcggaaaaaccaacttagcgatgatgactcctacgttacctggttataagattgagtgtgtaggtgacgatatcgcatggatgagatttgacaaacacggacaattaagagcaatcaacccagagaatgggttctttggtgttgctccaggaacttcaagaagtagtaacccaattgccatggacaccgtcttcaagaacaccatgttcacaaatgtaggatctacatgcgacggaggagtctactgggaaggtatggaaaaggaagtaagcgataatattgcaataactgactggaaaggtgtcccctggaccaaaggtcaaaagacgcctgctgctcatccaaattcaagattttgcacacctgctaaccaatgtcccataatagatccagcttgggaagacccggaaggagtacctatttcagctattttgttcggaggaagacgaccagctggagttcctttagtatatgaagcaagagattggaaacacggtgtatttattggatctaccatgagatcagaagcaactgctgcagctgaacacaagggaaaagtaattatgcacgatccattcgctatgagacccttctttggctacaactttggacactatttgagccactggttgtccatggagcaaaaatcaagcaaccttccaaaaatcttccatgtaaactggttcagaaaaggtacaaatggacaatttttgtggcctggttttggtgaaaattccagagtgctagattgggtgttaagaagacttgatggagaagatgttgctcaagacactgctattggtttagtacctaagaagaacagtttgaacttagaaggcattaaagaaaatatcaactttgacgaattattcagcttgcccaaagacttctggaaccaggaagtacaagatatcgagaaatacttcgacgaacaagttagtcaagatttgcctacagagattgcaaaccaactgaaagaactgaaaaaacgtgtatctcaaatgtaaagacctatcagtattattaggaaaataatgtataaggctttgtatgttttgataaacgtagactagctgtagggattttatgaaagtaacgagatcgtgtgaaagattttgatttgtttttaagtttaacgcattggtgtatactgcgaagcctaaatttggttttactttttaaatgaatagtttattgacacaatatttaatttataaattatttttttatgttttttgtgatgtgtaattatagtttgtgaaatgtaatatgttaagacaataa

SEQ ID NO: 6568 - DNA, 2543 bp, Diabrotica virgifera
aagagcatcatcagtgcttgtaacactgatgatgctcttgttgtaacgggtagttctttcaagacgacagactcggtaaaacacaagttaaaaataaagtaaatatattaaagataattatatacagtttaaaacaaataaaataaaatataattccgtcttctgcaaaggaaaaataatattaaactttagtacagttatccgatcataatagcaacattaaaataatacgataaacagtatatttatatacaataacaatctcgctacgttaaatcaacatagccctatattccgatccggagatcattcctcgctactaccgcctactgcgatgacgatcatggcaagacccacgtcactactgtggcatccgcctaggcatagtcccacctcacatacggtgcatcttttgccaagccagctaatgctagttcaatacgctagcagcagctgttgagccatggttagttcaatacgctagccacgactgattttattattctcttggctcgccttaaatatgctcttgctgccactactccttcgatttcccccagcggcgctatgcgccaacacggatgctcctccggtcgtctctggtaaaacagctcgtcgcttgtcgtggcatcacatcgttacatgcttttaaatacattccttcgattcaattcaaagagacatcatgtaacttcatcaaatgattctcagttcaacaggtctcccgggaagttagtgtcatttacagaaataaattaacatcttgaatttggtgtttcactaaagccgatagatcctgcagctgagctcgaagattatacaatatttctgtttaaattgacggaccactgaagaggtctggagataccgaaatggacgtatggatacttactaaaaataaagatattcaaatttcaaaatgcctcaaaaacaaaagaattgcagcttataaagtgcaaggatttataaagcaccaaaacccttgaggaaggcattttcgatttattttgtgtttaatttatttatagcacattttcctcacttactacagtcgttacagataaaaatgtcaatgaatctgtaaacatcatacggacaagctggatttttctgagaatctcaattttcggaccccaaaaaaagatgcaaaaaagttcgccactcctcccgaaattatctcggctacatttcttgtttgaaacatgttttctacggcgtacagattcttggcaaatcgatcttttccgtttaatcataggtttaggcattggacattttcaaaatacatgggtcagcaattttagggtcctgtaaaaaatgcggaagaaaacataacacattacttcataatgactttacaaatcaacaaaatagcaattcaaatgaacttttagtattcactaattcaagcattcaaccaagcacaagtggtagttacaataatacattataatctgaaacaagatttttggggtcccaaaactgatattctcagcaaaattcagtttgttcttgatttttagaggtgtaatggcacttttgtctctgacgattggagtattagttgtatttaaaaaaataatagtgttacaaagcccattttacacttataaaggatctattcattaaaaatttgtaaatgctataaattttcctgttatcaactaccaaatatcgttttttgttgttaaatatagtttcggctagatttttacaatgttaataatacattttttggaattgtatcacttctattaatatatcaatgacttgttttattaaattctatatttaagatttgtaaacggaaagtactattaccatttcaatttaaaaaagatctcatttctaagtaattccttgtccgaaaaattgctatttttatattaactgaattttgacattgtctttgtaccattgttgaattttctggaaatgtgataaaagaaaattgattttaattgtttcagaataattgcctcttaccgcggaataaaaattatctactgtttacccatttaacagaaatacattaattacaaaaagtatcgcattatttttaaaacagaaaaaagtttaaaaataatttttaatttttagcagaatgttataatactggcctcatctcgtctcctttgggtgtctacaaattcataacatttactaagttcaagcgtgtttttgccgaaaaaaaaaacagtaaaaacgttgttaaaggagaatatttattttggacatttgtgttcgagaatttgatatgtgcactatgtctgcttctgcttgagttttcaatgaggtggtacgttcttacaaaaaatgagtaatataacgtcagaacaagcagcccaaattgtaggtttaattggagatggacgatcacaataatatatttctgatgttataggaatccaccaatccagggtttcaagagctttaaaaaggtataaagaaagtgggtgatacacaagaagagcagttccagaacgtcccaggtgcacgaaccccgcagatgaacattattttcatctgcagactttgcgtac

SEQ ID NO: 6569 - DNA, 2547 bp, Diabrotica virgifera
  SmartBlast Evalue=3E-84; Info=Inter-alpha-trypsin inhibitor heavy chain H4 n=3 Tax=Bos taurus RepID=ITIH4_BOVIN
gtgggaaagtagaagacagaagaattaaatagcaataattatgaaggcaaagttccttatattaccatttttggtaatattaaacttaagatcagcattttctgcaccaggagatgttagttttattgtatcgacaactgaacaaccaaaagatggccaggagggagagaccacagaaattgaagatgctaacctagtgcctgtaatttatgaaatggatgtacattccaatgtgacgaatcgttacgctaagactgtgataacaaatagggtaaagaacccagctaagtcagccaagcaaacaaccttctctgtcgttctacccgaaaaagcattcatttcagaattcgtgatggaaattggctggaacaagtaccaagcttacgtcagggaaaaagaggaggctaagaaaatatatactaaggctgtagaaagtggccaaagcgcagctcatgtagcgataagtaccaaagattccaacacttttacagtttcagttaacgttggagctgaagaaaaggcaacattctatttgacctatgaagaacttttggaaagaaacaataaccaatacgatttagttctcaacattcgtcccggacaagtagttgaccatcttaatgttcaagtatacatcaacgaatccaggcctttggtctttgtgaaaactccatctctacggtctggcaacgaaatcgctaaaaacagcgataaacttgaccctgcctcttttatagaaatcattaactctaccagtgctctagttaagttccaaccagacgttgttaaacaacaggaatacgctaaagagttaggaggaatagagtccaatggtcttgcagcacaatttatagttcagtacgaagttgaaagagatccacaaggtggagaggttttgttgcaagatgggtacttcgtacacttcttcgtaccaaaggacgcagaagtcatccccaagcatgtatacttcatcttagacacaagttccagtatgtacggtaccaaactccagcaactcaaagatgccatgaccagtattttggaggagatcaaacccgaagactcactcagtattgtcgaattcaacagcgaaatttacgtttgggacatagaaaatgagaaatcaattcttgctcagtgggataactacagggaaccgtttgaacaattaggtaaacttaacttaccaggaccagtgtcagcaacaaaggaagcaattgagaaggctaagaaacttgtcgaaaacatgcaagctggaggtggcactcacatgattggtgcattggacgctggcctgtatcttgtaaaatccgaaatagaaagaactaaagatagcaatgaccatagacaacctcttgtaatattcctaaccgatggacagcccaacataggcttacattctacagttgaaattattgatgtggttaccaagttaaaccaagacaatatcaaagctccactttatactctggcttttggggatcttgccgatgaagatttcttaagaaaactttctttgaagaacaaagcattctcaagacagatttacgaaactgcagatgccgctatccaactacaacaattctacagacaaatatcttccccacttttatcagatgttcacttcaaatacaacgacgatgctagtgaagtaactaacacaggttttcctattttgtacgctggtggagaaattgtagttactggacgattcgtaggtaatcaatttgatccaacaataagagccgtaggtaaacaaggacctttaacatacagaccaagggttcacaagccagtaaactctttggaacgtctctgggcatacttgactgttagagaaactttacagaaaatgaaaattgccaaagataaaactaaaacagaacttaccaagaaagctttgaagcttgctcttcaatattcctttgtgactgaggtaacatcattggttgtagtcaagcccaactctacacatcccatatatccagatgacggatatccaattccaaggccagcttatccatatgcgcctgctgaagcttcaggatacggaggcggtggatttgccggcggtctaaggagtgaggtagcacaagatagtgacttgatagtcaacaggcccgcaccccggattgtacataaaaaagtacgaaagccaaaagtacaagcaacaacagttaagccactccctaaaaacacaacagtagaagattcgttaaagtggttgtcggctgccctaagtgaaaagaaaactctatccctaccatcaggtgaattaaaacttggtgaagattcattaaacattactcccagtgaagcttgccctaaaacacccgaaggcaaagaaggtgtttgctctctcattaaagattgtcctcaagtatacccacaactgactgatttcgaagtatacaagacgttctcatgtgccctgcaaaacgaatatgctggtgtctgttgcccaaagaaagctgaagttgctgcttaagatttttgttatttggtaattagagctagaggttgttaaagttatatttttgtaagtcc

SEQ ID NO: 6570 - DNA, 2551 bp, Diabrotica virgifera
  SmartBlast Evalue=0; Info=Protein transport protein sec23 n=5 Tax=Culicidae RepID=Q171Y9_AEDAE
acacgacatcgaatgacgtggaagttcaaattctgaaacaattaggtgtaatttttaggagctcaataatagtgttatttacatgatagaatcctaataatatatattgaggaatttccttagggaattccgacttgtaatcttcaaaaatgagcacatatgaagagtatatacaacaaaatgaagatcgagatgggattagatttacctggaatgtatggccttcaagcagaattgaagctacccgtctcgtagtacccttagcttgtctgtaccagcctataaaggaacgtctggatcttccaccaatacaatatgaccctgttttatgtactagaaatacttgtagagcaatattaaacccactgtgtcaggtagattatcgagcaaaactctgggtatgcaacttttgtttccagagaaatccatttccacctcaatatgctgctatttcagaacaacatcaaccagcggaattgatgcctatgttttccaccattgaatacacaataactagagctcaatgtttaccaccaatatttttgtatgttgttgacacctgcatggatgatgaagaactgggttccctgaaagactcattgcaaatgtcccttagtttgttgccacctaatgcgttaataggactaataacatttgggaaaatggttcaagttcatgaacttggcactgaaggttgtagtaagtcatatgtgttcagaggtacaaaagatcttagtgctaaacaggttcaagaaatgctgggaataggcaaagtggctttaggtcagcaagcccctcaacagccagggcagcctctaagacctgggcaaatgcaacctactgttgttgcaccaggaagcaggtttctacaacctgtatccaaatgcgatatgaatctaacagacctaataggagaacaacagaaagatccttggcctgttcatcagggtaaaaggtatttaagatctacaggtgtagctttatcgattgccattggtttgttagaatgtacatattccaatactggcgcccgagttatgctatttgttggaggaccttgctcacaaggacctggtcaggtagttaatgatgatttaaaacagcctattagatcacatcatgatattcagaaagataatgcaaaatatatgaagaaaggtattaaacattatgatgcgttagcaatgagagccgcaactaatggtcactctgttgatatttattcttgtgctttggatcagacaggtctgatggaaatgaagcaatgctgtaattctactgggggacacatggtaatgggggattcatttaattcttccttgtttaagcaaactttccaacgtgtgtttaccagagatcaaaaaagtgatctgaaaatggcatttaacggtactttggaagtgaagtgttcccgagaattaaaagttcaaggaggtatcggttcgtgtgtatcacttaacgtgaagagccccttggtttccgacacagaaataggaatgggtaatactgtgcaatggaaaatgtgtactttaacgccaagtactaccatgtctttattctttgaggtcgtaaatcaacattctgctcccatacctcaaggtggtagaggttgtatacaatttattacgcagtaccagcattcaagtggtcaaagaaaaatcagagtaacaacagtggctcgaaattgggctgacgcaactgctaatatacaccatatcagtgccggattcgatcaagaagctgctgctgtaataatggctaggatggccgtttatagggcagaatctgatgatagtccagatgttcttagatgggttgacagaatgctgattagattgtgtcaaaaattcggagaatacaataaggacgaccccaattcattcagacttggtcaaaacttcagtctttacccacagttcatgtatcacttaagaagatctcaatttcttcaagtattcaataattctccggacgagacttcattctacagacacatgttgatgagggaagatcttactcaatctttgataatgattcaacctattttgtatagttatagtttcaatggtccaccagagcctgtattactagatactagctccattcaacctgacagaatattacttatggatactttcttccaaatattaattttccatggagagactatcgcccaatggcgtagtttaaaatatcaagacatgccagaatatgaaaactttagacagctactacaggctccagtagatgatgcacaagaaattttgcaaactaggttcccaatgccgagatatattgataccgaacaaggcggatcccaagccagatttttgttgtcgaaagtaaatccaagtcaaactcataacaacatgtattcctacggaggtgattctggagctccagttttgacagatgatgtatcccttcaagtattcatggaccatctaaagaaattggcagtttcgtccacagcataatacctatatattacaattagatacatttgacataatacagtttttgaatttattcaatatattatattttaagc

SEQ ID NO: 6571 - DNA, 2546 bp, Diabrotica virgifera
  SmartBlast Evalue=4E-54; Info=Protein FAM125B n=1 Tax= Harpegnathos saltator RepID=E2BA76_9HYME
attatcatcaccaccacaatttcagtttaaaacgacacggtaatttgacgttacgccctttgtatatttgaggttaggtgtataagtttgaaattcgaattcggcgagtcaaaatcatagacataataagaatagacaaggaatcctgagcaaaatagtgaaacgcggagcagtcgatcggtggtctatctctctctaccttgctattgcttgcgtatgacaaacaaagataacaagcgatccacaattattgggatcaaagctatcggtgcaaaaaattacgtatgtcttgttttaatctgaaagaccgccggagtgtgacgtcacggccaactgcggctatattcagtgttgttatgatcacttttccaaacaaagaatgaagattgaaaacacgttgaaaagatatccaatctcaagaccttttaattcgtataaagttaaaattttgattcctctactactttttattttcaattatagtgttttttaagttgacgtacgtacactgacaagtatctgtcaaagttgacgtaaactggaaagtatctaaattaataatagacatgcactgtacagctacctctgtcgttcagagccacctatggtgacaataattttggatcacacgttagctagtgaatattagcgtttcacttctattcatataatggcacataccttatctagtctattcttattatgtctatggtcaaaatacacatgattaggccccgttttcatgacaggcgcttaacgcgcgttttaatgagccgcgactacaactacacacattcccctgagaccgttcacatgtcaacgcgcgttttaatgaccgaaaacgcgcgttagcatgtgaacggtctcaagtaaaacgtatgcagctgcaatcgcgggtcgcgcctctcatgtgaacggagtcttactctgaaactctgtcgactttgatcggccacaaaacagtcctggcggttttcctacgtcataaacatggccggcgtgacgtcattgatagtgtcttaaaaccaataatacaatatgatttgactaaattaaaaaggagattcaagaagactgggcatttttggcggttattagtttgttgcgtgatttcaaccatcaccaacttggcacataactatgacagtaaccgacacaaaccctaattgaatctattgttaatgtttttatctacaaacaataacgaatatacttaatctctagacacgtatccataaaaactattgactaaaccgagctatttaaatctcaaaataaagtataggtctttttgattctctatatccattctataataaactagaaaattctcaaaattcagttcctctcttttgcgatttagagactgggtcagtgcgtgttctaagtttgtctttccactgtgaaggggtagttgtaatctttgataagttgctgcattgttcgcgcctttattctaggaaactgcaccctatcttggttactcgtagtcaaaaatttaggattaactataaatggcaccccatcgaggccgatttgagaagtcccactcatcgtgtgtgtcgaattctgatgttgtaccggagctggtggtttaggggcaggtctcgtgggtcctccaggtcctcctggaagaactgatggatacgcccctggacgtaaaatttcataatcgtgatctgtatttgataagggtggataaactggcgctcctgtaggtattacatttggtttcggtggtcgttctgggggaaattggtcgtttgtgttcgcttgcgagtcttgaacgttacccatcttgtagcaaagtgtcactccgtttaattcgcctgcgaatgaaaatccagacggcgcctttttcaatctactacaaataataatgtctgtaacggcagtctttatgtcttttctatttactaatctataacaaatctgtttctttttccaagctttttgttcactgtcggcagttttgttcaataggctgaaacctttcgggggatttgccttgtcagcaagaactagtatttcctgcaccacaaaatttggcaaaccttcagttttcgataaacacagatatcgtgcagaactacttttaaaaattgagctttctcttaagtcagcatcagagtcttgatcgtaggttttgttgatagcaaaaaaccctctcggacacttatctaaattttctatgatttgtatggcagtaatgggtctatcatcgggtaaataatttagaatcttatgctggacagacgattttaacattgtattcagtctttttgtatgtctaaaaataaaagaaatgttgacaatccaaactccttcacagacaataaatctgtaagcatctgcttgagcatctcatacagcttgttgaaatcctctaattctctttattactattaataaaggattagtcattcttttacacaagaattcctctggtattaccactaaacaatcgagactcgagtcaaaactttgtaacgtaccttcaacaagaacgttgaccttccagaactatggatcaggtagaagctaac

SEQ ID NO: 6572 - DNA, 2537 bp, Diabrotica virgifera
  SmartBlast Evalue=1E-33; Info=RNA-binding protein 12 n=1 Tax= Camponotus floridanus RepID=E2AFE4_9HYME
ttttgtaaggtatcacaagccaaagattagaaaagaaacgaggttttcttatcaaagtgaagaattatttctgtaaattcgtatattttattgcctctaggccgaaaaatagttagttttaggtgagtgtttcacgacatatacccctttgtacgactacaacatggcttctacttgaaacattggtggatgaacgatttattgacaaaataggtcgaaatgagtgtgataataagacttcagaacttaccatggtctgccaacgctttagacattcgacaatactttcatggacttagtataccagaaggaggagtacatatcgtgggcggagaactgggggatgcctttattgcgttcagtactgacgaagatgctcgacaagcctatttacgaaacaatggaaaaatcaaagaagtccaaatcagccttatgctcagttcacgtaccgaaatgcaacggatcatcgaacatgcccgttcgcaatcctacgcagcatttatgcagcctgtcgccaccgtcgttccaatgcctgcagtggtgccagccgtgattcctccccaggtggcagatataagaaaagtagataccaaagagaaggatagaagagacactcgaagaaaatcccgctccaagtctagagataggaaagaacgttccagggatcgttcgagagacagatctagggatagatctagagaacgaagggaaagaaggcatcgaagaagtagatctaggtcgagagatcggaaatcgagtcgacgtagaagccgtagtagaggaaggtctcgttctagagagcgcagaagtaaagactacagaaaacgttccgaagacaggttatctctgacaagtcaggagtctaggtctgtcattcctgacgtataccaaaaaagattgtctgatttttcccccgcaggccaacctgctaaaattcctggtaatttcccgatatccagtcgaggttttagcgaccaaggacctgataacggtatgccagtatcttcattgcccagaagtaataactggccaccgaataaaagcaatgattcgtcctttccaagtagagatcgtcccttcaacccaagagatcgagatcgagattcccaagaaggtcgattcgagggcagatacagcaaaagctttccaaactacaggaacaaattggacatggccggtactaactccagcgttgcactggagccttactacggaggttacggggagataagaagattcttccaaggcatgttcatcagcggcagtgggatcaagttcatcaacgatccagacggccgtagtaccgggatcgtactcgtacgattcgccaatcaacggttcaaagaagacgccttgcttcttagcggggaaccccttaacggcgtggcagtcagcgtgtcgcatatcagtgacaaggagttcgatgaagctatagataggtacattccaaggaagttgggggacaatggtgacgtagtaccttttaaaggtagaaacattacgaaatacttcaacaattcctccaacgaagaaatcaaaaactacacttgtcttacaatcgacgatttacctaactattgtacagaacaggatattcttcatatgttttccaaccatactttgatcagtttgatccgcacttcgaagaaaaaaggaggctccattgcttacgctaaatttatgaactcagaaagcgcgcgaaacgcctacgaggagaagaacctccatgttattgccggtaaacctgtcactgttaaaccttgcaaagatgaacagtttgatgaagtcaacaagcaacacgaagtccgttcagtgtccgaaaaagtgagagatataggaacagactgcttaaagttatcgaaactaccagaaaaaataaatgataacgacatatcagacttcttttcggacattggaatcattcctacagaaatacacctagtaagcaacgaaaaaggtttcactggagaagcttattgcgaatttgctaccggcgaagaagcctctcgtgctgccaaaaaggcggaacgtctttaggaaacacttcagtgtctgtggttccagttaagcgagtagatatgaagagatttttggactctacaactccggctccaccttcaaagtcagttgaaataatagaagatactttggaaccagagaacggcggtcctgatgaagtgattccagtgacaactcctatgaacaatgctccaactgaagtgaatcctttcgtaggatccaacaacctgagacctccgtttcccttgcgtcaatttgatccaagaggtcctaggtttgaacctcgaggtatggcgcctagaccaccgcctagatatcccccacctaaggacatttttgacgacgttcctccaggatgtacggtgtatttaaagaacgttccatacaaagcagactcagacgacattatcaaattcttcgaggggtacgatcaccagcataacgttagtaggagatacacggctaataatctaccaagtgacgaggctaggattattttttctagtgcggaagaggct

SEQ ID NO: 6573 - DNA, 2541 bp, Diabrotica virgifera
  SmartBlast Evalue=2E-55; Info=Membrane protein CH1. n=1 Tax= Canis lupus familiaris RepID=UPI0000EB3527
aggatgttcgttgaggttatgtctcgttagtgataaacgaaaaaatatgtcttttattttagtaaagatcacaagacagagaaaaataaaagtcagtttagaaattttaacatgaagaacggaactgtgaccattgtactcaatgtagttttatttttaattggcataccctgcattaacctagaagatgtaaataccgtgttaaatcccacaaatagcctagtccaaaatgaatctattagagattatcaagaaagtgataaagtagacgagaaattagctaatatagaacccgttttagaacctattttagagcctagtgttaatgtagaagaaagtgtcaaagttgccatagattctgagagtctcgagggccaaaagggcccaaatactgaaaatgacaagtctgaagtaccaaatagagtaatcgatgatacacctatattgttgtcaacagaaagctcaacggtggagttggaccagctctccgatatatccgtagttttaactagtcaaaacgaagagatcgcttcgaagaaaatcctagaaacagaaaacgttaacattccaattaacatttccgcgaacacttccgccgacggaagataagaaactagaagagacggtcgtacaaagcgaggaaggcgagaagaacgccaccgaaggaaagactgaagacattccttcgttttccgaatgggcccagaagaggttggaagaggtcgagaaaaacgaacagattaattcttctatgaagggaaatcaagttcctaatggtaaaactcagaatgcgaagctccgctggaaaaactacgcctcgttggactgtggagcgaaagtggtgcggcaaatcctgaggcgaacagtcccggagcgattttgtcgccatctagcgacgaatacaagctgaatccttgcactagtcgtatatggttcgttgtagaactgtgcgaagctatacaagccaagaagatcgatcttgccaactacgaattgttttcttcgtcgcccaaagagtttactgtgtcagtcagtgaaaggttcccaacacgtgattgggctcaaataggaaaatttactgcaaaagacgagagagatatacagagctttgacttggataccgagctgtttgggaaatacattaaagtcgagatcaaatcccactatgggtcagaacattattgtcccatctcactcttcagggcttacggagcgtctgtattcgaagttctgcagaaggaagactccagcgtcaacagacccgatgacgacgacgaagatgaagacgatgaagaaaacgatctgaattcgtcgcaaacggacaaaaagaacttgttcagttccgccactgacgctgtcatgtctgtagtgaaacgagcagcccaaattttaggtacaaagtcgaacgatgacagtcagaagactaatagttccagcgccagtactttgattaatacttgtagctcccctaggcatattattagttgtcagaagtgtaacgaaacactatacggacagatctatgagttgttgagctgcaaagctgaagaaattagacgaattgttagcatcaactcgatatacaaaactctagtatcgtcgtgtatctgcaaaaagtttggctacgatttcaaaaatcaatcggataggaactatctgatcaaaaacatcgaagctttctttcctgagtcctacataggcgcgatgtgcaatgaggcagcaatattagagaattatggagtacttaacgtcagtcaacagttcaataacatcaccaagaagatctccaacgagaaactgatcgaaatgaacatagagattcaagaagtgagagtagtggagtcggttacgtctagcgacatcttgcagaacaacaccattactaatgtttcaacggacgagatagctcagatcaaacccaccaagacgcttaccgtgaatgaaactcttccgaaaaccgatactcaaggaacaccttcggaaagcgtcgcatctgtggagacagtcactgaattaccagaaactgctattttcccggaaagtaccaccgaaggtaccttcgttagcgagggagatgtatctaccgaagggacggatgtcttggacgatcagttgaataatattatatcggatttgactgcggaaggtccgactgttgtaccaagcagtgcctctgctaatagtccgcaagcggccaaggaatcaatatttttgagattgttcaataggattaaagcactagagcgcaacatgtctctgtcaagccagtatttagaagaattaagcaagcggtacaagaaacaagtagaagagatgcgcgaagaaacacaaaaaagagatgaactaaacaaacaactagaagaacgcctggacaaactgacctctaccatcgaaaacatggcagccgaacgtagaacctttctctccgtggcttactgtcttctttttctcggtttgtcttgcctcggtatttactttttttgtggaaaacgtacggaggtttcgcgagaccgtgaagaaatgccttcggctggtcgtcgt

SEQ ID NO: 6574 - DNA, 2533 bp, Diabrotica virgifera
  SmartBlast Evalue=1E-22; Info=Endonuclease-reverse transcriptase n=1 Tax=Bombyx mori RepID=D7F158_BOMMO
aaatattcattattaaaatgccacaaggatatagcttcagaacaacattgtaaagtttgtttagcagtgaatggttgacttcaattagtgcggtcgtaaatattattaaatttatctgacttggccaattgttaagacaagtccggagcgataagcaaacgaggtagacagagttggtcttttgacaattaacactgactagacggtactcctataataaagcaaaggatccacaaaatttacaataattatgacgacaaaaacaaaaaacggatgtaaaatatattgctttgccttatatacctactcgaaattaatgttttcaaatgaattttaaaataaattaaatcaatttgaattgctaagattatagaaaataaacattcaaacatatttaaattttacctgaaaccgggccttttatactattatcggttaacccaggatgtttatagtcggtaccatatttgaagtcaaccatttactgctaaacaaactttacacatcgtatatttggcttactatatcattaaatcaaagaatggcatcgtgtattatttaaagtctgttcttagatcctaaccgactttggtgcagatgagtagattcaagaaacagtaatcgtccacaatggtagacatgtagattatgtagtgactctttgtttatctgtagactaatatcgtctgaatattgtgaagaccaggagtgaattgttttcttcgacattggctttacataatgaggcattcactcattacacataacacacaaaactcgagttcgaaaaggcataacaaattgagaaggaagaattatcatcatcatggtgctacagcccttaaagggctggacattctcaagctttttgcgcaactttgctgtgtaccttgcttggattttccaattggcaacaccgatctcagcatcctgtgttacccccaccttagctttggtctatcccatcttctcattctcacccgttgcgctgtaagaatcttttaggtcagtcttcctcatgtatggctctatctcgttattgctctgattctttagcttctctataatttgttgaactacaaatatattatcttctatttcctcatattggttttcgattcgttatttatcaatcgaccatacgacctctccattaacatttatttttgtcgccttcttttgtgaatagagctcatacacgccaggctcgaatcttctggaatataagatctccaataattctataagtcacagagaaaattctctataagtcggtaggaccaaggatactgcactccaacttatagagaatttgctctgtgtctagatagatgtcgctaacgcctccgtacgcatttaatattttacttatatgcatacttcgacagcttggattcagttcgcttcgggatacaccacaaaagacgctgaaaagcagaaacattggtcagccgatggtgatggccctaaatcgaatttaatctatgtctttccttaattctattagtattgacggtccgagttttattaattcattgggaatgtttccaggtcctgtggctttccgtttttcatttcctttgaaggtgaaggttgataatggacttagacagcatgagctgccgaccctcacactgtaataaaactcggagaaatgcccactgtttcccgacgaatataggactcggctctgcaaaaaactccactcgagtctcctcggaacacatattcgcgtaaccaatgtggttgtatggcatacaatgggtgtgtgttatgcagcagagtctctatctatctatcagccttgcgacatccaatattggacataggtcttcccttcgctcctccatctttctctatcctgagccatgtgcatccattttcagccagcttggtgtttcaggttatctacccatctcatatgtggtctccctctctttcgtttgtatgtccatggtctccactctgtaataattttattccatctttcgtctttttgtctaatagtatggccggcgaatttccattttagattagctgtttgacgagtagcatccttaacttttgtgacatttcttacccaggaattcctttttctatctgccagtcttatgcagcagagtagataaggtaaaaggctggtttctggttcttaaatcagttcggctaggggaaacccccgaataaaaattctgatatttcaagtgtgagggttggataacgctttaaatatgctaaacattttgataatttgccgaggaatatttggacaactttagtaattttacatatataccaattccactagaatgttttacttcattacgagttttttgtcatgcaaatacactctgggccagaatttgccgaccaccttgaagaatggtcatttttgatgtcttgtatctcctagacctgttgtccgatttgagtgatttttttaatatgttgtacccttgttctttgacagtatcgctgtaataatattgttgctgaataggtgaatttgcattgtatgacggttgtacgaatc

SEQ ID NO: 6575 - DNA, 2533 bp, Diabrotica virgifera
  SmartBlast Evalue=5E-19; Info=RNA polymerase II elongation factor ELL n=6 Tax=Eutheria RepID=ELL_HUMAN
aaatggcggcgctctgtccaggtgttcagtatggtttatcttcacaacaaaattatggtgaaaatagggacttgatttttgtgaaattgactgattctgctttacgtgcgatagaggactacctaaaaaatcagaacaaattttaccatcataaaccgacaatcaagttcttaggcaatgaaaatggggaactatcatttccgtctttgcaccacaacatgggcagcacttccttcagcttctccatgtcgagcacggccgacatggaaggacctggaggaagcttcgagtgcatcaaacaggtagggtctccgcgaggccccctggaaggcctcggatctatcccacacaaaatacgtattcatgccaatgatgacgtctacgaagttacccgaaacagaatgactgaagccgaagataaatataaaaacaaatgcacaagagaaatcaaaccgaaccagacagatataggccgcaaagtgaaggtaaagcagagcagaatgtcgatacatccggtgcgcagagagatgccatcgatgcgcgacagccttctgaagcagccgtcgtcacagccgtatcagccgaagccctccattgcgccccctccgcctgcctctgcagtcgtccactcttcgaccaatggtcatctgtccaacggcctaggaagcaaccatgtcagtagctctaggccgcaaatgaacgtcgctaaaaagctctctgtcccggagattcctaggcgtcctcctaattctccaatctccaatcgaaagccgcagaccctgactcctcccggtggcggtagcgatggaggcagctcgggaagtggtcaatcgcctactagtaccctaccgggatcgccgcccctcatttccacgacgtcagcagccaacaaacgaccagggtatcacgagggctctgatggcttttcctacaaacggcagcgaatcgcccacaatgcacccaaacatcaccccgacccgttgtaccaccagccggtggaaaataacagtcaacggcgaccagtgacagactccagagatgccagcaacatgaaccctagaagtagggagtcgccgtccaacggtaatggtataggtggtgggggtagctatggactcaatggacataatgttaatagtttaatggatgtcaaagcgaagcgtgaatgtagcgatgaggaagacgatgttgggaagaggacgtgtgatagtcattttgatgtaattcaagaaaagacattcgtggatagtcgtagtatatctccggccgtgaagatgctgcaggccgacaagtgggatcgtgacaagccgcctagtgatcgaccaaacggcatcgtaaatcgaataccgaacggtgtcaaccgatcgcaacaccaaaatcggccacaagacgtggctaacgatagaatcattgatagagtcagtgatagagtcaacgataggatcaatgacagagccaacgatcgagtcattgatcgaatcaatgatagagtcaatgatcgactcaatgatcgaatcaatgatagagccaatgatcgagtcaatgatagagtcaatgagcgaatcaatgatagagttgatagagtcaatgatcgagtcgagagagtcaatgatcgaatcaatgatagggtcaatgatagagtcaatgagcgggtcaatgatcgcatcaatgatagagtccacgatcgcatcaatggtcgagtgaatgataggatcagtgatagagttgttaataacaaatacacgaatgtcacatcttcgacagaaaataggatagctagagtgagtcccgacagccaaactgaaggattgcccaatggcgatgtggatggaaacttcaataacgaaagcgaaaacgaagaatttcctgattataaaaagcaatacgttaccatacaagatgccgatcagaggagacggtataaggcggacttcaatgccgattataccgagtatcgtgatttgcacagtattgtagagaaagtttccagaaggttcgctctgttagaagaacgcctgaagaaagaaaacgaaaatagtcctaaatataaagacatcaaaaagcagatagttcgtgaataccaagaaaacaagaacctggaccaccagcggacgatgcggcggttccaatatctgcacgacaagttgtcgcacatcaaaagactagttatggagtacgatcaagagatgacggactcccggtactgacgctgggcgctggcggcccccggccccctcccgccctactgcctttctacggacattcgccaagaggacatcacgaaatgtatcaaacaaattttattcctattcatttaatttttctttttttttttcttgttcttagtgcaattttggagttgcgtgccacgttgcgatctgacaattttttgactggtggttgagcggtttaggaaacgaggttgaatcgcaaagacatacgagatgttcgaatacacacatacatcaatttaccatttttctgatatagcacaatctagtaattgtttctactatcagactgtaagtcccac

SEQ ID NO: 6576 - DNA, 2531 bp, Diabrotica virgifera
  SmartBlast Evalue=1E-109; Info=Transcriptional activator protein Pur-alpha n=2 Tax=Formicidae RepID=E1ZWA5_9HYME
aaagattgttttaagggtataacctacaaaaacagcctttaacataatagagttatttgacagggctggtctgataggtatatgttgctgcaactttagtgtcgattatggcgttctttataggttacgaactaatatacaatatttgttgtagtgttattaaaataatcacagattatcgacgatgtttgacatcgtcataatattttgaaatcacaagaaagtggtgcccatcaaacctttgaaaataaagtaagcctttgaataaacaatagtcaatagacccgtaaagttgggtaacctgacccaacttatcaggatgtactatggcaattggcaacctttatataataaaacaatctgtattaatgtagatcgttcgtcgtagataggaaaaggcctttttactgacaaacgaaatcaaagaaatgatttggctattttgaaaaccgttaaaaaatttgcatgcatgtattaaaaagtcaaataactagattttacaatatattactactgtgtaaatgggagtacagtattaatgtattgtctatttttcgtaacgggagattacaattttgtaatacaagaaacaattaatgcccataaatccagtcatactaaacgtaggatgggtttgccatatcgggcatatccccactactgtcgggaataatccagacatagagagcaaaaaaaaatatattgaagaagtattcgcaaaaatttagcagaggcttgcagtgatgatcgtttaaaatttacatgtttcaatacagaataggaagaaaaatgtgtcgccacagactacaaggaaatgttgcgaaattaaatggaataaacaaacgaaaacatggaaaacgccatgtatcaaaacggcattcagaataattcatattgttctagagaatactggagtgattacttaaaagatgcgggcacattttttggttctttcaatttggtttattgtttaatagtgccattaatttgcatttcttctctaatgatggcctcgtgtatgtcttgaattaaagcagaagtaaggtgaagaagtaaacttaatacgtttgtaatgtgaagaaccgcgagcaattgcggaattaaaaaacttcgattatttaatggaaagacgtaaaagattgtgtaaaaagtacttactttctgacagcgctagacggtacttttggtaccacagagaacttagttcgcgtaaaataaacctaattcgcaacatttaactcaaaagagtagtactgggtgctccgcgtataaactacccaaaaaccgtctatcgtgaccttctcctatctgtacagaaagtatcattcgtgtaacgactatggtttactcaaaagtaaaaacatcactaccgtaacaacttaaaacaaataaatacataaataatttagtattattttgtaacatataatagagaatctaacatttatagtgtttgtaacactgcacaaaagaaccaactccttgaactgatcaatattttagacagtggtcgatttctcagcctggcattcgaaaatcacacatttattaattgaaagaggggaaaattatttttctgtttttgtggttaaaaaatcgactgctgttcctatccaattttttaatttgttatattaataaatctaatagtctaaaatggcctgctagcctactttaaacttgtcccggaatcttgttgggtgttattgccaaccaatggatgtggctgatcttgggaagcaacacctccaccagaaccttgagatggctgcttgatcttgtcacagtagtcacttaatatatctctgaacctttgccaactcttttcaggtacggtaatagctgttctgaaattagttttcacttcggagatgcgcatgtatacaccgcggttattttgtcctatatcaaaatagaagtttttgttgtcgacgtgcatatgtctaccttccggcaagtcaggcttgtaagaatgttcatcagtactgaattcgtcaagtagatctgtcagagcatctctgaactcgatcataccctgtgcgggtatagccacctgactgcgtggccctcctctggtgatcatctgggaaactcgcaagaaacgtcctcttgaattttcctttaggtccaaataatatctgcgattatccttgatcatcatttcgcttttaagtttaccatcttctgggacgttgtcagggtttgggggtccaagtgaagagtagaagtcactgaatgcggaaaggtggtctctgaactcagcagcagttgaaagagcaaggaaaatttgagatcgtcgtccatcggctccgatctcagcaaccttaatgaagcggcctcggcgattctgttttacatctaagtaaaaacgtttgctttggatctgcaacatcttggtagcgagctcttgctcgacttgctgctgaccagaatcatattcacttccctgctccattccctggtgatatttttgcgagcttgaaccttcatcaccacttcctatatccgacatcgcaacccaacacacacac

SEQ ID NO: 6577 - DNA, 2529 bp, Diabrotica virgifera
tcagccttttagaaaaataacaaatgcttagagtattaatgacaaagcacattgaaaaatttacaaaattttaaattgtttacttaaataaacaaatttaatgcaaggataacttacaaaaaaaaaactaaaaaacacaaaaatagtcatgtatcaaaaacaaattacttttcagaggcagttgtctttgctaacacaaaatgtggaataaatagtggaatacaaaggccatagaaaatacaacaaggagtatgagtcttttgtgaaaaaatccatatgtgcttattgcttccttgttttgctttctatttactacttgctaacaataaactatattaaatgttaaacagtaccgtgaaacatttgcagaacagatgaatcagtgtaaaccaaaacgtctgaaatcgttcttttacatttttggtgaaatgagctgaaatatatcattttttggttatagtttgtggatttatagttcttttcagttttccgcaaaaagggttgccatgactaacaaaatttttgtttacactgatttaaatacagagcagctcttatttgagaacattttgataccattgtgaaaatgtaagtttaaaatcaaataaaaattctgtcttcatcactaatttataattcctgttatttttataattcacctgttttaccagttattctgaccctgaatagaattacccagttgtagaaatcaattgaaactatatttggcttgtcctcataaacttttatccatacaacccaatgacaaaggaaagcttacacattagacaaaccacattgaaaggtgacctcatgctgttaaaaacttccttcccttggcatttcgttagctcagttatattgttgtatgttttgaaaaaagcgaaaaacaaaaatttatttcattttaatgaatatcaacaaaatgccaagggaaaaaacaaaaaatgattaataaaactaaaatcttttttgtttttcccttttctcaaaactagaacatacaacagtataactctgggctaacaaaatgccaaggtacagaagtattcaacagcatgaggtcacttttgaatgtggtttatctaatgttgccgcaacacacttcactgtgtgttatttgttatgcaccttattcagccacataggactaagtgtggagggttcattcatcaaaattcgctttatgtgcacacatagcacataagcatacatggcaaatatgcctatccatccagttgtcagtttttacacacttcaaaagacaaatatttgggtgcatacagagtagccacgtaacaaatagcacatagcgaagtgttgtaccagcataatgtataagcttatacaaaactaggtttacctgtatctgttacagtaacgctgtaacttgcatacacatcagtatatcgagttgtctacaagtacattgtattttttttttataaagacctgtcataatattcatttaatctgtctggcagatgtttgtatgtttactgagtcaatgatttggtgatattttcaagtaaatttacgggaaaattaactatttaataaaaacagatcacatagataactgtgtggttaggggacacaagcagacaagtcaacttttcagttttatagttaaaattaatttgacgggtccactgaataatgtaagtgcctaatcacttgtttttaagaaatagaaaaaaagtgttaaaattataacaatggcaaacttatacatttaaaggttgtactcacccttaaaatgtataaactcaccattatcacaattttaaaactttttcttcaacttctcaaaaacgaacaatgggatacttacaatgttattcggcggacccattcaattaaagctaaaatcgtgagtgtgaaaaagatcactatttcatatatgaaactagacatttaacattttgaactgtcatctatttcagcagtagattattgttttaggtgtttttaaccctgcagcggacaggcgaaataaaattacattgtatttccatatggctgctgtccactggaggtttcataaataaaaatgtttctcaaaaattgagttgtctgccaccacacaattatgagttatataaccactgcattatgttttacctgtaattaacatgtctaatgttgataattttaacaaaacagcataatcaatttgtatttttaaatgtattattaaatattttgtattttgatactaaatattttgtattttgataataaattagatattaaagataaagatttatataccctattccacgaacatacgactgttgtggattatctcgacaacgaatattttactgtgtaaattataaagaatgaaagtaaattgcaaaatacattgttgtttattggaacaattagtagagccatttactttcgcacttcttatgttgcacactaaaatattcgttgtggcgataatccaagacagtcgtatattcgtggaatagcccatactaaaattataaaaaaatgcactagaaataaacaacccaagac

SEQ ID NO: 6578 - DNA, 2524 bp, Diabrotica virgifera
  SmartBlast Evalue=2E-41; Info=CG2943 n=5 Tax=melanogaster subgroup RepID=Q9VHY6_DROME
attacaaacattaatcttgagaacataatgttgccatcagtgatccagagatttcccaataacaacttcatcttccaacatgaaaattacctggtgcatatgtgtagtgtgggcacagttgaaaacaaattaaatgaatgaaaccttgggccttggaatataattgaactatggaaagcaattgagcaggtatgggaggaacttgatgaatataacaagaggagattgatgctacctagaaatagaagattgcaaagttttattgacaatgatggagcttctaccaaatattaattgtgttaatgtttatcattacttaatataaaataaatttaaaatacaatggatatttttaacccatacttccttatttttgttattaaaaacataatcgattttattcaaaaaaacttaagtacttttttaaagaaagttacatataattttgttacattgatttatttcattttgtttttttaacttcaatcaacctattctgggtccgccactggtcattcacataaatttgcttctaaaggagataaaaattcaaaaaatccactatgtatgtaagagtaagataagtaagagtaaactattcaatggccacatctgtataaacaaatgtaatcaaaatgattttatcaaaattaaattatgtgataaacacttacacaataatttcagtaaaataagtttgaagatagaaatggaatgtaaacactaatagtcatatagggagttgatttatttggttggttttaccaacgaatagtagttgtttatttgatgaatagagttattcgaccaataaaactgacacatctacgtttcaccaacgtcaaataagacttattttatttttatctcactttaaatatccataacacagaaaatttgtcagtttaactttaaaatatcaaaactgtattgaaacattcgactaataaattttaatgttgttctgaagctatttccttgtggcatttttataattaagtatttttataataaattttatttgaagaataactgtgtggtcagtggacaaaagcagacaagtcactttttgagttttaaagttaaaattaattaattaaaattaaaattttgattatgaaaaaattcactattggatattgaactacacatataacaatttaattttctgttgtatttcagtagatattttttttgataggtgttttaataattaaaaatgtttttcaaaaattgacttgtctacttttttccgctgaccacacaactattcactggtttatttgttgttggtgaaactggcccttaatgattatattctaaaaacagtatagtataatacatattatacagtaaaacctctgttaaccgaaacctttttaaccgaaacattgtttgaccaaaacagctgatagtttcaataatttcgtcaataaaaagtaaatttttatcacaaaaggaaacaatttgatgttcatttgtcaacatcaccaacattgttttcatacaactaaagaatgcaattaaatatacaacacattacgaaatcacctcatagtagtttttaataccaactttgacaagaatactatttaatttgatacaagaagaatacaaaaaccaatgctatttttaactgaaattttgttatccgaaacggcctgcccccaattatttaggttaatggatgttttactgtatatttgaatatcatttgtcattaaaaatggtagaaaccatttcattacttcattattgactataaacatgttagatcattgttttttttttgcaaaattctacatttatgatggcattacactgagcattgtatcaggatataaagtaaaagtagaaataaaggaattgaaatagtaaaacaatatacataccacttttttaaacgggcaaccgttttatctacttataaaatattttgaactattctcagaaactacaatttactattgaacagacttttgaaacaaatcgtaataaaaaatctaatttaaacaacatcaaattgactagttaacaatctatttccacatttgctttagagtctttttcgaagcaaggtatttggtaatataactagctacaacaagtcctgttaacactagtacaatcattatataatcgaaatcttccttcaatacatcaaatgtctttgaaggtgccacacgagtataaaacatatctaaaccatgtattaagacatggcaagtactttcgagtctagccgcagctacctctattccctttatgccacttaatgactggttgtagttaatgatggcctctgcgggtagaggaacctctggcatatagggaatacaactttcttcaggaccacaaggtatatcattgaatctaggctgcagaagcaaccaaggtatctctatgacaactccagtggacaatccaagaagcagaaacttatttgttatgcctttctctgttaaagtgactgttaaatcaacaggagtggctggtaatatataagactgtgtttggacatgag

SEQ ID NO: 6579 - DNA, 2526 bp, Diabrotica virgifera
  SmartBlast Evalue=5E-32; Info="Leucine-rich transmembrane protein, putative n=1 Tax=Aedes aegypti RepID=Q17K70_AEDAE"
caacatggtctctatttaagtacatattaaaccattctaaattttttacatcaaattttggattataaggcgtgtagtcaatgttgttatttttgagatatattattaggtttaataaatcattacaagtgaattgattatcattaataccaattttggataaataacgaaacgattttctaaagtttgtatgatcaaacctgtttgttgtcaaagacgtattatctatatataacgtttctaatttttcaagagtttcaaaaggtaacagattggtaatataggtactggaaggaaacaaactgacattatcagatatattaaggaatgataaattttctaatccagcccagacaccagtactcaaagaatatattttgttattatctaatctcagtgttttaagattttttgtgtaaaagaaagtttggtatccaattgatgagatttcgttgctatgaagatccaactcaactaaattttcgaataacgtaaatgtttgtgaatttagatatctaataaaattatttgataggtctaaatatttaactttattcggatttcccacttctgacgattggatgttttttatagttgacgagctaagattaagtttgattaaactggataagccgttagtgattgccgttaagtcaacaactgtcaatttgtttccttgcaactgtaattcttttagtttcgtaagtccagcaaatgcgttattttttattgtatttaaaacagaattggagatatttagaacttgtaaattacgcatatccttaaatgtgtattcttttagtgactgtttatttttaaatatttgtgatgcatctaaataagttaaactcgttaaaccgctaaaaacataatcttcagaaacgtcaattgttgtattaattaaatttagagatgttaatagtggcaaattgacaaagcaattattctttagtaattctatacgagaatttattatagttaaatttttaagaaaagcacttgaaataaatcgttcccctactgtaccagtcaactgaattgccaatttgtcaattttaacggtattgtccaagattattggacttgatattgacttaagaagtaacgtcactatattgaccatgtaaaacgataagtttccaattccttgtaaactgttattttctaagttaacttctttcaaattattcaatttgtgaaaagcattttgagaaacgtattctattttattttcattcaaataaatgttttgtacaggtaagtttctgaaagtatagttattcagcaaaactatgtaattattgcttaaatctatggtacgaattgctggcaaactagagaaaacatcgttttccaatatggctatagcactgttcgaaagatttaaagatgttaaataatttaagttagaaaaagctttttccttgatataatgaatagggttaccttgaagatcgatattttggacactaattaagtagaaggtatagctttctagtaattcaattgcattgttagacaaattaattgtaaagatatttttcaaattcgaaaaagcgtactgctcaatattttttattttattttctgataggtcaatagtttttaaagaattaaaaccataaaaacttttgttaccaactgtcgaaatattattttttcttagattaataatttttagaacgcttctaaggtttctaaaggttgactcattgataaacaataaattattttcactaatgtcaagggtttctataggtactttttcttgaaaagttcctggaggaatatcgtttataaaattgttggaaatattatacgaagataaatatgaacaatttgatactgatatttgagataaatttgttattttattgaaagaaagatctagatatttcagtagcggtactatcgtacaaattccatctaattcttcaatggcgtttccactcaagtttacaaatacagacaagtaagtgtaactggaagaacagcaatttataaaaaaatcattacaaatttttttttatattagaaaaagagagatcaatactagtgatgacggagtttgctccaaacactgtattagataatacatcaaagttattgaagctcaaattaaatacagaagatttagcagattgaaaataattttgcggaatactggttaagttattgtttgaaaaatcaataacatttgagcgtatgttgggtattttattactatccaaaactggcatatctatatcgatccagtttaacttaaatgtgtttcttatgcttaaagtattattaggtataaaactggaataaaaattagaaacactataagagttgctggtcccaatatacgaaatattactattcccgtgaccctcaatttttaaaagatctttattactttttaaggccagcatttgtagataattataacttaaatttaaagattgtatatttaccttgtactcaaattctgagaaggagagtaatttattatagctcaaatctatgaattcaatgtttttg

SEQ ID NO: 6580 - DNA, 2527 bp, Diabrotica virgifera
  SmartBlast Evalue=1E-103; Info=Fumarylacetoacetate hydrolase domain-containing protein 2A n=1 Tax=Camponotus floridanus RepID=E2AQK2_9HYME
ggcggtatatatatttattgtataacattgtaaaatcaataaaatcaataaaagcacaatttcgtaaatgcataatcatataaaaaggcgaataaaatcagacaactacatttcttaatctgccaatcccttcaatttcactttccaatatgtctccttttttcaagtattctgggggatttctgtgcattcctactcctgcaggcgttcctgtcaaaattacgtcgccgggatacaaggtaactatctgagataaatatgatactaagaaatcaattttaaagatcagttctgaggtatttccatcttgtttaagtacgccattcacccaagacttgatggatagattgtttacatcgaccttatttttggtaactactacagggcctagaggacagaacgtgtccatactttttcctaacaaaaattgtccgttgtttctcttcttttgccagtccctcgcgctaatgtcttgggctacggtatagccgaatatatgatcgttggcttggtcttgtctaattgcttttgctttctttcctatgactactgctagttctacttcccaatcaacactatccgtgattggtggaatttctatattgtcgtatggtcccacaatcacagatgaaaatttactgaatatcatgggttcttttggctcaggtatattctgttccgaacaatgtccactgtagttcaatccgacgcaagctactttgtcgggtctagttatgggcgacaacagatctacattttcgagagaagttacagattttccttctgctactattctgctagctttttcatagactccacacccttggcccaaaaactccaccaaagaattagggatggaatgatctacggcactgatatcaattatatcgccccccgaagacagctgtgctccaagatgctgttttcctcctttcttcagtctgtattgcacgattctcattttcgcagcagttgacaaactaaacttccgtgtatcttgaaaatgtttaagttgttttagtgtctgactattgaataatattcgcgttttatgtaaaatggtactcattatgtgtaaatgtaagtgtgaagtactaatttaagtgtgtatgtaatatagataaaactaaatgttgtaaacaaagtgcttcaaatttattttgacccaaacactcagacccagaccagaccgcacttcacctactactgtggtagttttataaaccgtccagtaaaaatgtttgtatttatgacatgaccataacaaaggagattattatgagatactatgttattttgcaccttaaacaataaaaaaaaaacaaaacaatatataagtaacaaactgtcgttaaatatgagacaggctaaaacattttctactggtcatgtctttatgcaaaaaagcaacataacaataaactatttttactggaaaacaatatttgtgatctcaaatagctcaaaaaatctgctaaatacatatttgaattatctatctaggaatatttaccacattttttacatccgcttttacatattattatgcttaaggctaagggggactaaaaaaattaatatataaggtcatttttcctttgcagccttaaataaactgaatactacttctgtaacattattttcaagatatacataaattactgccttacaattatgttaaatcataatatttctattattacatacaaaattgcagaatgtccagaaatgtttacacctacatttcaaaaatattagccaaactgccaattttctgaaacatagtacacataaacattatttattaatttacacattaagccttgttcttgattggaactgggttttgtttcatttgcagaacgatggaacgcattcgagaaacgtctttgctgccttgttttgctttaggattgaaatcacacaattttgctattctttcccattcggttcccggttctagttcgtcatcttcggctacgaactgcttttcagcgttcctattagcagcttttgtcttggctatagcttcttcgtgattcttgtaccaatcttctaattctttctttgctacttccctcaattcttgcttctttttctcttcttcctgatctttttcctccaacctcttgatttgctcttccctccataacctgatcttttctggttctactctatcttcttgtcttattgtaagtggggacactctttccctgtattctttatctggatcaaaatcggctgggatatcattaaactttggctcttccaaaaaaccatctggaccattgttttctaccatttcaaaactgctcgcagaattggttgggtcatcaccattaagaactggagcaataactgcggccggtttcacttcatcttcaaggcctgctagttcgtcttgctcgcgtgccaagaattctgccgctgggtcttcgtcggcaactccaaaattgtctccaaatccagacattcttgattttgttaatcttaaggataagaaaagctgctattttcccactgacac

SEQ ID NO: 6581 - DNA, 2523 bp, Diabrotica virgifera
  SmartBlast Evalue=1E-42; Info=Anon-15Ab n=5 Tax=melanogaster subgroup RepID=Q9TVE6_DROME
ccatttaagcaccaatttcagttctttccggttcgacgaacatcacacttttccttggtacaccagaagcaccggtactcattctttgtgccatggcgtgtgtatcactaggtttctttttagttttacaaccgatgatcgcttgttgaaagaagcactaggtccgacttgagcagctgcagaattataggaattataaagattggttagatttaagttcacattacttttcagttgttgtgataactggtagtcgaattgtatggagtttctgagtggagtagcaggaggcacgtcattcatcgacttcaccaatgaccgcttgtatgtattttctgctacttcaatttcaaatttaaattcacgggcttcttcagtaaaagcagacgacgtactttctagcattcgtgtcaagtagaaagcttgttttagataaaataaaggctgtaactgtagtccaaatttataactatctttggctatgtcgatatatattgttataaattgagttaatattgccttggttttaaatatatcgaatggtttgtcacatgtccactctatatcaatagagtctactgactttgtatcttcctcttgtttagctttctctttttgcttcttttcttctaaaatttggtttcttcttttcatttcaactaaatgtctccattgtttgtcagcatcctcatagacctttcttcttgcgttgggcggtctctccaacatattggggttgactagtgtgtatccttgttgttgtgttaacatattgtagaattttttgtattcgaaaggaggatagaatttcccagtagaatatcgtaaacatcttaaagctctaagaaaatatacaatgggtgattgcgtaagttcgttgaagatcttctgagcaaatattaaatactttctgggtatgtttctaaaatggtttttctgtttaatgaaaaagtctggtaattcgctagtagatagtcgcttatataaatttgatacaacttttaatattttggtacccaatttatgctcaggccagtctttagagttagcttcacattcccaatacatgtggcatcgtatgtgttcagctaggagcccgttccgttgtgtcaccggttctatgtagtgtttatggatgacaagcaaaaataagaaacacctcatctgagcataagacattcgagcttctaggtatctttccgctttaggaaacgcaatttcccattccagagtagcttcagaatactctccccttttctgccaataaccttttggaactgcaacacaattgaatgtacaaatttctttgaccatgtcatccgtaggccacttgtaccggtatcctgttgacgtatccgttattgtcgggcgatcttctcgcatgatgaattcgattgtctgtgcgtcaggccagggtatagatactgatggaataatctcacaggaaatgggattatcttcctcatccgtaaaattacaaaagactgttcctggaatggatcttgctaaatcgatttcatgttgatcgaatccaagagatcgtccaagggaatttggaaatagtacatccttgaagtagttcataaagcctttggcgtccacatatataacagtgtcaaataaatcatcttctgttatttctagtccttcatcttgctgatcttggagatcctgtagttcataatcgggctttctaacccgctttgatctaaagcaactgcttggcaaggtatctcttctttctgacgaaactgctttctctaaaggttttggtgttttcagatcagttatcgtattatattcatacaaagttgaatcggtatcagtcgaagtactagcttccactaataattcgggtagtgaagaatacatattaagaagcttgctgttatcgatctgttttaatcttataaaacctttccgactagattcttctattcttacttgataagctggtttatcaatagaagtgtattgaggaacatccatgctgctgataacttccaccgagtcactaacaatgaacaaccgtctgggtaaaagattcttagcggaatgtttcccaataccatgtaaaggtctgaatttcatattgctgttcacggtttcaaacaatgaatcagggcaaatacactccatggactcattttggagtaggtttttgttcaggtgtttctccagtatgttattgatgccagtagatttttgaatatctcttcgataattttcaaaaaattgcactgtcataagtaaattatttaataggaaaacatctggtatatccctatattcctttttcattgaatcgataatttgttcatcttgccgtatccttgaatcaaccctatccgaacccccgccgttatttctgagttgtacttctgacggtctgggaaagtccggatcgatttcttgtgagcaacaattgttgcccatttttttttatttaatcactaatacgaataatcatttagaaacgcccgacgttgatgtgtctcaaacttttgcattactaacatggag

SEQ ID NO: 6582 - DNA, 2522 bp, Diabrotica virgifera
  SmartBlast Evalue=2E-17; Info=Transmembrane protein 14C n=1 Tax= Bombyx mori RepID=Q1HPG8_BOMMO
tagtttacaatgtgtttgcctttttaatcttcaactgaagaggttgaggagtgatatcttattaaaaccagagtttaatacataatgtaacatttatataacaaacataagatatctcaaaaactataatttcaatgtacttatttatatattttctaaaaatgatcatttaaactttaacaggaagcctataagtaggtatttttaaccttataatttaaaatttaagtggatagcaagatttaaaatataattggcacaatactttagctttggaataaagtttacatacacatcccattttatgcttgacaatagtatattaaacagcaaaataaaagtcatatatttaagttacaaacatcagaatatgggaactgtttggaataagaagtttattgcgctttactatgagctatggaaaatgattttataattatgacacaaaaatactacatacagattatatgtaggtacatacagactgtttagtttttgattagatatgacactgaaggaagcgctaaaatcagcaacattgctgtatactataaagatagttttattattaaagatgttcaaaatgtatctattcgttccaatagtaacagtatgttattaaaattactttatcaattgttctctttctcgataattagtttttattgcatagtaaattattgaaatcatttaataaatagtgaaaaataatcctattaattaaattaatgaataatttaagcgattatgcaagtaacgattgtacgagaatattcaaaaactaaacaaaataaccatctctattatgctgtcagcaactaatacagttgctaatgtttatgtcagtgtttactgcgaatcatagggtgtatatattatttaaatctaaacagtctggacatacataaacatataatatataagaaacggtcattttaaaagcaacatacatatatccacattttgtcaaaaataactttataacattttgactgagttggtaccagcctctactattttgtaaacaaaagtcacactaatgcgacccccgaaggcgttgcatataagtaagtaccaagctacaataattgccacctcaaaaaatattaattctaaatattaaccattcaaaatggtttttctcaaaagtacttcagtggatatatgtcgtttttaaaaacattgtaaatacagtaaaacctctgttaactgaaacctttttaacccaaacatcgttcaaccaaaacggctgacagtttcaataaattcgtcaataaaaagtaaagttttaatggaaaatgaaaccaatccgatgttaatttgtcaacattctcaactttgctttcatacaactaaataacgctattatatacaacacattacgatatcacctcatagcatttattaataccaactttgaccaagaatactatgcaatttgatacaagaatagaaaaaataatattatttgtgttatcccccccccccccacttatttcggttaacggaggttgtactgttttaaaagaaatgcaatatgtcaatttattgaggtttagagagagaacctttactacttatgctaagtataaatttattatgtgtaagctgtatgctgattaatttaatatgtttcatgattagctaggacaaacatattccaaactaaccaggaaagtgtataccaaagtatactcaaaatagtaaaagtaatgtagaaagaagaaattgtgactgtaaaactttaacaagtaaattagctgcagctctaataacgtatcaaaatgttaatgtatgttctttttatttattcaatttttccaaacacttcacaaatctttccaaacatcttttaacaaataactatttaactaccgctagcacttttacaatcacctttaaataactaaatcataaaatattatggtacctactaataacataatatttatatattaccataattatgattatggttttgttaactgaatattgtctatttgtacaacttaaaacaaatatagccaatagtcaattaccttttcagcatatccactaaatttatgtatgtctaggtcctgtaattccactagctcttcccgcaatcctaacgatcattgctatagacattaaacatacgacacctgcaggcataatttttccagaattgtagaatctatatcccataacaccagccagaattgaactagtagctaattgaagtgtgtaattggaaggatcacggcttgtttctacagctccataggctaatgcaccaccaaaaagtacacctgctgctaaagaaggtacagaacctgctttataataaccaaacactccaccagctgcaactaaaccagcatacaaaaaaccggggatatccatttcagtttgtgtaatataaaattaaagaaaaacgtgccaaataagtctatagacttatttgctacagatacagatacacaagaagatgatgtgcttagtagttgtgcaaggtgcaaggtaaattttcgataggaagg

SEQ ID NO: 6583 - DNA, 2518 bp, Diabrotica virgifera
  SmartBlast Evalue=0; Info="Synaptotagmin, putative (Fragment) n= 1 Tax=Aedes aegypti RepID=Q16WM9_AEDAE"
gcgaggttaacatatagaacgtgacatcatactttgcaggattcatttttatactctggtaaacaatgaactaaaatcctgcaataaatacggcgctttattgatcgtcttacggactgtttttaggttatattattttttaaacaatcctgctgaaaacctgaaactgaaaagtgctgataatttttttagtgtattgaaaatcaatcggtagttgtaaagtggatggttttgggaggtcatggagaagaaaaatacagaaaatgaagtcatcgagaagaaatcagcggaaagcactagcattattagcattttgtttagtgccgtgaaaaaggcctcagttgtaggagtcgtatacttggcagggtatatgcaatggtctgttgcgtggtttataggacccgtagttctttttgttattagagatcaatggaaaaagactagcgacagaaaaagagctattgctaaagcaaccgcattgtccagtgaacaggaagtagttttggccagacttgatgatctacctgcatgggttttcttccctgacatagaacgagctgagtggataaatagaataattaaacaagtatggcccaatgttaaccaatatgttcgagagctcgttagagatgctattcaaccagctttgagggaaagtttggaaaaatacaaattaactggctttaaattcgaacgaattattttgggtactgtgccttttcggataggaggagtcaaggtctatgacaaaaacaccgatcgaaatgaaatagttatggatctagatatcttctacgcaggagattgtgatatcaccttccaccttaaaggtatgaaaggaggaatccgagattttcaattacatggtatgctaagagtagttatgaaaccactgattacctcgatacctttaataggcggattgcaggtgttctttttgaataatcctgacatcgattttgatttagtaggaattgctgatgtgctagacatgcctggcctaagtgatatcttgcgaaggattgttgttgaaacagtggcttctatgatggttttgcctaataaatttccaataaaacttagcgaagaagttgaggctgttgaattgaaggctccagaaccagagggagtccttagagtgcacgttttcgaagctagccatctgatgaagaaggacatcagtgtcctcggcaaaggaaaatccgatccttatgccgttgtcaccgttggagcgcaagagtttaaaacaaaagtcatcgacaatactgttgatcccaaatgggatttctggtgcgagtttcaaatactggagtcaaatggacaacaactttatgtacacttatgggacaaagatgatacgggtggtgatgaaaacttaggaagggctactattgaagtttctaatattgtaaagaaaggtcatgatgatatgtgggttactttagaacaagcaaaacacggaatggtacatcttaggtttacatggctcactctcagcaagcaatattcagatttagatgccactttgactgaaacacagatgctgagaaactctaatttacatacagctctagttactctatttttggattcctgtaagaatctaccacaagctcgaatgtcaacgaagccagatccatacgcaactgtaagagtaggaaacgattcccagcaaacaaaggttttaatgaggacagtcaaccctgtatgggagcaaggtttcacctttttggttaccaatccagaaaacgatacactatttctaagcataatggatcacaaaacatcctccgaaataggacagcttcactttaagatcaaaacattggctactaaacctaatatggtaatgagcaaagagccattttcgttgataaggtctggacctgagagtaaagttatctggtcaatgcatcttaggatcctgaaacaaggcgaaggtacagatgacgcacaacttgataatactgacaggtttaaaagaagtatatctaacatttcgaaatcttctatagaaagctcaaatgcggttttgccgcaatctaaagaaaatctggatgaagttgagccagttttagatcaggatcaagaagcaccagttgaagaaattttagaagattcttcgttatctgctcttggtggtgcgcaaccactagatggcaacgagcttctatatcatcgaacaccaagtgtaacatcttccgctggtgatgctggtcttggccgaattcaacttacacttcgctacagtgtccaaagacaacgacttattgttgtggtccataaaatcatgaatattcctcttaaagatccatcgagtatacccgatccatatgtcaaattgtatttgttgccagagagagctcgtgacacaaagagaaaaactcaggtaatcaaagacaacgtaaatcctatctttgatgaaagtttcgaatatgtgattaaccaaggagaagtagggtcaaaacagctagaagttacagcctgcacacaaaaacaattgatttactctagcagc

SEQ ID NO: 6584 - DNA, 2511 bp, Diabrotica virgifera
  SmartBlast Evalue=1E-180; Info=Serine/threonine protein kinase n=1 Tax=Aedes aegypti RepID=Q17E90_AEDAE
aaaacaaatattcgtgtgattagttttaaatgttcatgttgtgtatagttttcgccagtgttattagagcaaaagatgtgtaaaagtcttttcgtttcgcgttattatcaacataagaagtttgtttttaaatggtgtgtggaagtcggatagaataggaggtacccatgtcactcaatttttagtatttgtgattggtccctgaatatgaacaggaatcttcgccccagtagtaaagtaggtactcaagaattcaactcgaactaccgtgcaaagcagtacgatggtaaaatagctggcctatatgacttggaggagacgctcggcagagggcacttcgccgtagtgaaactcgcccgccatgtcttcaccggagaaaaagtcgctgtgaaggtaatagacaaaagtaaactggatgaagtttctaaggcgcaccttttccaagaggtccgctgtatgaaattagtccagcacccgaaacgtcgttcggttgtacgaggtcatagatacagcaaccaaactttatttagtactggagttgggcgatgggggcgacctctatgaatatatcatgcgtcatgagactggacttcctgaaaaagttgccaaagagtactttagtcaaattgtaagggcgatatcatattgtcatcagttgcacgttgtacatagggacctgaagcctgaaaatgtagtatttttcaagaaacagggcattgtcaagttgacagatttcggttttagcaataagttttatcccggtcaaaagttagaaacctcatgtggtagtttagcctattcagcacctgaaatacttttaggagattcatatgatgcaccagctgtcgatgtttggtcgttaggcgtaattctgtatatgttagtgtgtggtcatcctccattccaagaagccaatgactctgaaacccttacaatgatcatggactgcaaatatgatattcccctgcatgtatcacaaaattgccggaacttgatatctaggatgctgttgagaaatccagaaaaacgggcaacgttgagcgaaatttcgaagcatccttggctcagtagtagtaaaaccgtaaccgtagactcagtacctttagtttctagagaacaactttcggacgaggaccataatcttattgttcaaaaaatagttaatggaaacgtggccaccaaggaagaaattcaagaatctctcgataaaaacgaatacaaccatataacagctacttactttcttcttgccgagagaaaattgcgatgtaagagacaagagcaggcagctaagaacaagaggcctgaagaattagcagtatttcaaaacacccaggacgccaagaaagacgcgtcgattagtataaagccaaatttgttgaatgttcctcgcacccccggagacttgccacagcgatctcgaaaatgcagtatagtccaagaagacgaagaagaagaggacatctcttcgtgcgccggtcgcgaagacttggcccccaccctcaatcgccgaggctcccgttccgaaggccgtttgaatttgacgttgcaagaacggttagcggaatccgaaaagaggaagcctatcgagctgaagtacccagtcagtgccaaaaagtcgtcgacgacgtgtaacaaaagccaaagatcagataacaagttgccgttggggacactcaaaaccgtcgcccagccgcaacccccagtgatatctatattcgcatccggagaggagtgcaacaaggttgctgatgccggctctggagcggtgataccagaagttgacaaaaatggttcccgccatacaatcgtcacctgcaatcctcaatcgtacgagagaagaagagctaagtttcataaaacccgaacagcctcatgcagttcatcggacgccagtgacgacgacagtgaaaaacgcaagaaacgtgctcaaaaactcaacacaccttctaaatctatagagacaagaagggacagccacgacgacagtagtgattcacaggaacctggcactggagcaggatcgagcggatttacgaatttgactaataacagtgtcagttttgaatcaagttcaaataacaatgaaacgaaagacaaaaaagaaaaaaacggaacttgcaatgacaaaaaacgaaaggacacacacaaattctacttttgaacgtaatcacagaatttgccgaaagaaggggaataaaacacgactgcgagaaagccagtccctaaatagaattacagaagtacaggaggacccaagtaacactcaaacattggttgtatcgacaaccttgctgagcatgccgggatcattgacgcccaaggtaaaaagcgtaggcgcaaagatattcaacggtttaagccgatcgtcgaagaaacctcaagagaaaacaaaaaactacgatgagaaactgcgaatgtcacgaagagattctggcggcagaagcttagatagagacatcgagtgcaataagttagaaaatgcggaattagaaaaataaggatgctggg

SEQ ID NO: 6585 - DNA, 2516 bp, Diabrotica virgifera
  SmartBlast Evalue=1E-160; Info="Paramyosin, putative n=2 Tax= Aedes aegypti RepID=Q17P45_AEDAE"
aaattttaatgtcacaaaaatccaataaaaatatacttcttacagaaaaatacatatagaaacatcaacagcattaatggaaaatttttcaaacgtaacataacgtaagaaaaattccaaatacattcaaatctccgacaatgttagcaattttaagagctcctcacattaaaagtgcccgttccaggtttgcggaaagatgtcggagacaacagtatcaaacacgttgtatttgttacatggatgttttgtcatcaaatagtatagtagaaaggaaaagacaatattctataagctcccatgtgattattagtaattttaaccaaaatctattagtcagtcataatccaaaatggaatcacgatttttatagacaattctcaatatccagtgctagatttgacaaggaacctttaaaaccctcctccaaggtggaagaaactgttcaagaactaaaaaagaaacaagaggaagagcaaaaagtaaagaccaaggaagttacaccagttgtagttaagaaaccattgacaacaagagtttgggaggaattggtccattactatcatggttttagacttctgtttatcgatgtgaaaatttcctctgggttagtatggcgtgtattaaatggaaaatccctctcaagaagagagtacaggctgttaacgagaacagtaggagatctcttccgtttagtaccattttcagttttcatcatagtaccatttatggagatccttttaccatttttcataaaatttttccctggaatgctgccgtctacattccaaacagcgacagaaaaggaagataaaactaaacagcgattaaaggtgcaattagaaatggcgaagtttttacaagggactctagacaatatggctgtacagcataaagaaaggtactctactgaggctaaacaatttgttgactggtttcataaagttagaacttcaggcgaatatgtaaaatctgaagatataatgaagttttcaaaattgtttcaagatgaaatcacactagactcattaagtagaagtcaacttattgctctctgtagggtattggaagtccaaactttaggcaccaataactttcttcgttttcaattgaggatgaaattgaggtcattggctgctgatgataagatgatacagaaagaaggtgttaatagcttgacattgtcagaagtacaacaagcgtgcagagcaagaggcatgagggcctacggtttaagtgaagagaggttaagagcacagttggaacaatggttggatttaagtctaaataagaaagtccctccatcgcttctactcttgtcgagagcattaatgctgccagaaaccatacctaccagtgacaaacttaaagccactatctccgcattaccagactctattgtcaaacagactcaagctgccattggagaaaaagaaggcaaaattgacaatagagtcagggtagaaataatcaaggaagaagaaaagaaaattaaagaggaaagagaagaagtcagagaagaaaagaaaaagcagaaattggagaaagacaaagaacttcttgtggataaggcaccagtaatatcgactgaagcaacaccgtgtctagatgatacagctttgaggataactaagaaacccgaaaaagtagatgaaaaggagcaacgtcttcagtccaaagattttgctattattgaaactgccattgacactgtttccaaggaaaagaagtttattgtagaaaaggaggaaatacaagaactcaaatcagagatggaagattacaaacaagatgttgaagacctggctaaagctgtagcaagtcaaccaaaaccagaggttaaagaaacaaaagctgccaaacgtcttttcaagagcgttaataaaatgattaataaattggacaatgttcttgtcggtttagaaaaacgagagaaacagttgaagaaagacttagaactagaagcaactgacaagaagaaggaagaactacttaagatcgatgacattatagctgttattcataaaataagggatgtaccggatcaaagtaaaatcgaacaaattaaaaacgtgctaaaacgaatggacgacgatcaggatggatctttgaaaatagaggatgttttgaaggtaatcgaaataataggaaaagaaaatgtcaacctcagtcccaaacaaatagacgagttggtagatctcattgacaaggaggaaatcctcgaagtagaagataaaattgaaaaggcattacagaaagataaagaaacgaaggccaaaaataataaagaaccgccgacatgtaaaaaagaccaagaaaatccaccgaaatctgatcctcccgacgcaacgaaagggaaaatggactgcactccagtttttccacctccacccagtattgaaaagtcaaaaaaacaattccaaaatggtttaaaacaggtttaattttcatatagttaattttatacgtacctaactgatgtactgaaaccgcagagaatatcttaggcacaagtt

SEQ ID NO: 6586 - DNA, 2505 bp, Diabrotica virgifera
  SmartBlast Evalue=3E-30; Info=Mariner transposase n=1 Tax= Bombyx mori RepID=Q1HPJ3_BOMMO
tgtatcgtaatattatctttcaatattaaatgcagaatgttgcacaaactctcttcttatcgttagaaaattaaaatctaattattgttcaaagctatatgctattagacactttacgcttgttctcgtgctaacattatgattaagatttgttgtttttcaaattcttcacttctgtgccacgtgtacgaggtgtttttagttttgcatatagccggttagagggcgccaccctctaagacaaatgtaacctcaatcttttgttgatataaatccagagtatcactgtgatactagtcgtgtatatacagggatttttgatattagcatgtcggtcgaaaagtgaatgattgaaaatggtttctgtgtttggaaatgaagcatcacaccatttaactatttcccgctgatatgtggaatttcaacgtggtcgcaccagtctcagcgacgaatccagaccaggtccacccaaaaccgcagtcacaacagaacatttatatgattcgtcagctaattaaggatgaccgccgtgtaacataccgggaaatagagacatcttagggcatttcaaaaacctcgatccaaaaggtcctacatgaagaactgggtgttacgagttggtttctcgttggatccctcatttgctctcggaagagaaaaagcggttcgcatcagttggtgtcgaaaaatattggaacggttcaataaaggaagctcaaaaaacgtttcgagtttagagtattgttagtggccatgaatcttggatttactcctgcgaaccggaaaataaacgccaatccgcgtatgtcaaagaaaatggtcgcaacttttgtgtcaaaatctagtcatatggcaacaatttttttagaagatcgaagaacggttacttctgattggtatataacctcttgtttaccagaagttatcgccaaactccgacaaagcaacacacaacggcgaatcatcttccatcagaacagtgcaagttttcacactgccaaaaatacaatagagtttttggagctttaaaacatcgaattgttaaaccattcactgtatagccccgaccaagtcccaacgacctcttcccgttcataaagattaagaattcaatgcgtggacagcgattccagtcgccagaagaagccatcgatgcctttaaaacagtgatgttgcaggtctcaactgaagacttaaataactgttttaccaattggtatgaatgtatgcaaatgtgtatcgatcttggtgagacaaattttgaaaagcagtaaagtactttaagtctatatattttttgtatttatgctatgtgcaaaactaaaaagacttatattattaaatcatattaaggcagtgaagcaaaatgttctctcacatataaaatttaatataaaatgtcataaaccgtaagaaaaaaatattaatttaagtcataaattgaaaaaagaaaaaattaaacaaaaaattatgcacgttccacattacaatttataatagccaactttagcatatgcaattttttttaagagaatttgtggttattccgtatacaaaagtatatttacaccataaaaataattgaaagataagatagccagttcagtattaaaaaatacgaataatttacttatataatcatttgaaaatgttttatcttgtggaatccatcggtaaaggtaattataaaatactgtaaatagaacctcagctcaggtaaatgggaacatgtaccatatcgtttttacacaatagttaaaatctttcgatgttctaaagcgatatgttacaagcctaaaacaatacagggtgtcagtgcaaacggtgtagaaaactgtgattgttgcaaagctttcgtattaagggcgctaaccagggatttggtatattggtataatttattactatattttttatttacattttaatttttgggtttaggataacaattattgcatctttttttttcgtggtacactaaactattaggccaagaaatatacagtgataataaatatttaacaaaacaattaatctgaaaatattaaaagaatagggtattttataatatttcttatttgtgttacaactttgttataaaaatataaatgcaaatatatgaatgcacatcaagaaatctaatgtacctattcaataaagttaaaaatccgtagattattaatgtttcattattgtgacaaacatcatcattatatcattcaactgccatttcaattgctccaaagagcggttccagacctgtcggctggagaaagaggaggtgagtttagtcggtaggcggttcggcacgctgaagcgtgacggaccgaatccgccacacctgggcaccttcccagaaggtcttttgaagattctcaactcccccaaaaaaaaaaaaaatatccaataaaaagccatcacaatattaatgaatgattttaatcctaaagttgggggaaataagagacataattcggttagaaactttggattgaagaaaaataa

SEQ ID NO: 6587 - DNA, 2510 bp, Diabrotica virgifera
tatttataatagtactgttatttttgaaatgtataaatacataataacaaattgtatgctgtgtcattcattatctataattcgctgttgaataaagaaaataaaaaagtaagtaaaataatgtacatctatttatattaaatgccaagtaattttcgaacaaattttaactaacaaaaatgcacaatggtaaagcgttatacaaaagcagtttatgaacaaggggatgcgtttgaaaggcacttacgttgtaaaagcagttctttggacttttttcttcacataattgttttctaattaatagaaaaaaatttataatattacttatccactacaacactacaaaatacaagaaaaagtggacctgaaaaagatatatttatagcaaaaccttttcgtgcacaatggttgtccagtctaatgaagaaatcaatattatcagcaataatgtctcaactaattttataattaataaaagaaagcaatcatggaattatttagtaagtatttcaacattatatataccttgaaaagaacggtttatttggagacttggtaattttaatctataaatactgataccattcaaaaattaatcaaggtttacttgttcactctatgctactcgattcctattatactagttcaaattctcaagaaaacaccaaacaaatagataataaactgaaacgacagcatatattgtaagcaatataaacaccaaaaaacttaaggagataaaacacaggaatctagaattctagatcaagatcgataagtttggattaatgaagtagagatgatattcagaaatagatacccggagatatgaatgagatatatatgaatcttatgtcacaactaatgtggagtagacgaagaagtaggccaaaacttatagaaaaacgaatggattgtgcaaagtagacataatgtaaagcatcaggacaagataagtaacaaagtaaaatatatcaaacaaatccactacttatattgattggtgtgaaatttctgaacacgcatttttacaaaattgtgcattgtagatccaccaaacagcatttcaatatacgctcatgaagctagtacacactataacagacttagtattttcatgttttttaacaatacaagaagtccaaagaacctttttaatttgcgatttttatagagtggaaacctttccacgaagtaaaaacagttacactcgtattattattcactgtttcgtttaaaaaaaaatgataatagaatcgtataacacccacaatccttaaaatactccaattgaataaaaaacacaaagttgataacaaataaatagaatactattatcaggtaaaatgaagactgttataaataatatattatatatacagaatatgacacgatgctattcctagttaaataaaacaaaataaaatttactttaaaaatatttcttttcaatgcacagttgaaagtcttttgattccttcgaggttcattgtgatatactctgtatactaaaccgtacttccacaaaggaactcttcaaataaaattactgtatcgtaatgaaaacccgaggctacatcttccacacgtttaaattaatataagagagaattagtaaataccaaaaaacactctatatactaacgatatatttatttgattacgtggtagataaagtttcaacatgatacatattacaaacatttaataaaacaatatatagtttacatgaaaaatatgtagcatgtaacaagcttatatctaatatcagcaaaaaaatattgatctaatacattttttacattgaatctattatcatattcaacatatttgacaaaccttattggttttgtcaattatatgtatgtaagagctcttaagaattaaatggtatcaaacgttgcgattcatcagttgcttgtgttcgaataatcaagtaaaaaaaaacagaaaatttgtatttttggcataagggtttattgtcaaaactattgttgacaccaccttttcagttggaagtcataaacgttaatgaatatttctcttatttgaggctttttccatagcaaacacaatttgaactatgtcttgaaatattataaacctgggatagcaaaaaaacgagtttctggatagacagagaaacaagccaatggcaaaaattccgaatcaaagactttaaagacaataatgacgctagatatataatattcgtagaatcaattacgccttgcaattattgtttacaaaacaggaaaacgacttacagagaaaagagaaataattattgcttacagttaaaatctcaatactgaagacatatcatgattaaatcatacagaactggatagaattaaatagcaaaactggaatagatcaaaatatttagacttattgtggaagatatcactagcgtagataatatcaggatgaatatattatcagaagaaagtcacaggctgggcttggacattaacttttccaaaaccaaaattatggtattcccaaaa

SEQ ID NO: 6588 - DNA, 2496 bp, Diabrotica virgifera
  SmartBlast Evalue=0; Info=Transmembrane 9 superfamily member 4 n=1 Tax=Harpegnathos saltator RepID=E2C2S3_9HYME
gtcagattggctatttttttgttattaaaataaaatgatttttcataacttttatcaacaaaaataacgtagatcgacataaatttatattttctattacagtataatatttaagatgacttgccttaatattcaacattttgtaaaattacttttactattagcatgtataacgctaagccaccaattttatgttcctggaatggcacctaccgattttaaaaaaggtgatccaatagaagtaagagctgtaaaaatgactagtatacatacccaattaccttacgaatattattctctacccttctgtttaccaaaaggggttctgagaatatccagtacaaatctgagaatttgggagaagttttaagaggagacagaattgtaaatactccctacgttgtaaagatggcagaatataccccgtgtactttattgtgcaattctcctggcaatccaatcaactggagtgttagagaatctcaagttgtagtagatagaattcaacatgaatactttgttcatttgttagtagacaatctaccagcagcaattgatgttttcaatccagaaaccaatgaacttcaagtagaacatggataccgacttggcaacactgttggagatagaagtttcatcaataaccaccttaaacttaggtttttgtaccataatccacagcccgatgtgtacagaatagtaggttttcaaataagtgcaaaatccatacatatggatgagttgaagtttaatggaaatacttgcgacttgaccagtaaacataaatcccaagtggtcgatccagtatctggtacgaagttgtattttacatacgaggtggaatggaaagaatcgtcagtgagttgggcttcaagatgggatacttacttggccatgacagatgcacaaatacattggttttcgattatcaattctatcgtcgtcattttcttcttatccggcattctcaccatgataatggttcgaacacttcgacgagatattgcgaaatataatgcagacgaaagttacgacgaaacaatcgaagaaactggttggaagttggtacacggagatgttttcagacctccacgtaactccagattgtttgctgctcttgttggatctggaattcaaatatttttgatgtctcttataacgatattttttgctatgttaggaatgctatccccagcgtctcgaggagctctaaccacagcagccatcaccttctacatgatccatggagctgtggcaggttatctatctgctcgtctctataaaacaatgaagggaagagagtggaaaagagccgcctttctcacagctgtgctgtatcctgctattgtaggcgggacttgtttctttttaaatttcttcatttggggaaaagcaagcagcggtgcagtcccattttccgccatgatcaatcttttgttgatgtgggtattcgtatcactacctttggtatacctggggtactacttcggatacagaaaacagccgtaccaacatccggtcagaacaaatcagataccaagacaagttcctgagcaacactggtatatgaatccaatattgtgcacactgatggcaggaatattaccatttggagcagtatttatagaactcgtttttatattcacggccatatggaaaaatcagttctactatcttttcggattcctcttcttggttttcgtcatattaataatatcttgttctcaaatatctattgtgatggtatattttcaactgtgtggagaggattaccactggtggtggcgcagctttatcgtatccggtggcagcgccctctacattttaggatactcactattttactttatgacagttttagaaataacagaattcataccgacgctactttacatcagctacactggactgatggttttcactttttggttactcaccggttccatagggttctttgctgcatatgctttcgttagaaaaatttacgccgccgtcaagatcgattaagtacatttttggttttattgcgcattatttatttgtgtgcaccgataattttggtaattcactatttttaaggctctgtgattttttaggattacaaacaaaaacctaacgaaatattttattcttggtatcacaagttcgtgtatgagtggtgatatagtaacgttttaagacattttgcgtttatttaaatttattttagaagatattgttgcttttcttaacaattattttgtattgtaaaagatgatacgttaagaataggaggcatagaataattatacctttctggcttcacagcaatgctatgggacgttgtattctataaatggatgaacttcatctgagtataattttctttataaaacagaatgttgaaaaacagattgtaaccgtcttctttgtaaaaatgtacttaaatatctcgtttaaatatttaaaatataatgtatattatacattgtgtgagcaaaaaactgtaaaccctga

SEQ ID NO: 6589 - DNA, 2503 bp, Diabrotica virgifera
  SmartBlast Evalue=1E-102; Info=Putative hemomucin n=1 Tax= Schistocerca gregaria RepID=B7VF66_SCHGR
aacgtcagttgcaaataattatacaaattaatagtgcaaagtaaatacgtgtaactgccgtctgctgtcgatgtcggaatcgtaccttaacgacaaatagttgaactataaacgtaacactttttgagacaagagtttgtagttttattaaactgttggcgcaataaaacagtttttatttttttttagttgtgacactatttgaatttgagcggaggtgggataataatgatccaacttttggtacatacatttattacaagaaaacttactcttctgatacacaagcatctttttacaatattttcataaatttcatcgttgtttacctaattcggataaaatatttattataaataaaaagatgtttattttagtaaatattattgcacatagtcgataattagttattttttcagataattataaaggtacatatttttaatttattgaactattgtaaaatgttgcttgttagcctctcacatccacaaccttgacgaaaataatacataactcttttaatttttaattttgggttcttttaatggtaccgccttagtaccttcactttttttggtttcaacaggaggtgtttgttgttttggcggctgagcctgttgcttggttggtggagtagttttctgagaaggaggagtggtctgttgttgtgtaggtggtggcttactgtcctttattggagcttgcgtgggttgcgctttgggaacttgggttgtttgttgtgtaggtgcttttgttggttgtgctttaggtgcttgagtagcttgaggttttggtgttgtagtttgaggtttaggagcttgagtgggctttacttttggagcttgagtgggttgcggtgttggaggttttgtagtggtagtcggttttggtggaggagttgtggtttgttgtttcacaggtgggggaggagtggttttcactttaggggcttctgtctgtttagttggtggtttggcagtggtggtggtagtagtttgttgttttacgggtggaggtgacgtagttcttactttaggtgcttcttcctgctttggcacttgcttagtttctactttaggttcggcaacagttttcgcttttggccaacccatggactcgaaaggaactctagcaataaaatcatttccagggcttcctaaatacaagtgatccttaaagggataagcttcagacatcaggtacacatttttattacttgtgtggagagcttcaactatttctccattattagaaagacgaagaacagttgcacgcttagaaggtaattttccagctatagaattgtagtgaccaacataatgtacagccttttgagcaaattcattgggatagtatctatccaaagtttcaaaagcaagctgggcgatgccaaagactctgcaaatgaattttctggcaagaggaaaccgggacaccaggaacaatggagctgggttttcttcatcgttgttttcaattagggatgctaaaaatccacctcttccgtccttctctaaattatctggtatacctggtaaagcgtcaatgaatatatcgtgagttcctttctttggacctttcaaatagtaccgatgtattctggcacggacagattcagcaactaaaacgaagtcttcgttttccgaaaggacaacaccatttgcaaaatgtatattgtcgatgagtaccttgttggtttttgttttagcatcgtaatggactaatcttcctgaaggatgcgacaaaacatcaaaaactaaatcgtacaatggaaatttggtggaagaatcggaccaataaatatccccattacttgccactgaaacactgttaaataggtgtggctttttaccgttaatttttgtatcagaagacaccaatacttccttggtacctgttttaacgtttactttaaggatgccatagtacgcatcagcaacaatcaaatcaccatttttgttaaattccatacccaacggacggccgcaaatttcttcttcatagtaacttttgcaagttttgccagttttagcgacaggtacaactttatcgcccacaagtttgactatactgcccccgtgcacaccagtgtataattctccattgaaatcagcaaaagtttcagggcctacgaatttccctttgtgtaagatctctgcattttgtaacttttcgttgagtgctaatgtaccttcaagagctctaggtttaggtaatttaacagactgtgtaaattctgcatcaggtggtatattaggtagatataatactaacaagactagaataacattaaacaatatagttttgcctaaacaactaacgagtcccatgattactcttaatcagtcaaaattccatacacactatatgcactaactaccacctaataaaggatctccaaattattttatttgtgacctgtggacttgtatactgattagttttttcaatgttaattaattcaaaagcaaaacgtacggtacaacgtacaacatctcac

SEQ ID NO: 6590 - DNA, 2492 bp, Diabrotica virgifera
gcatttgacatgttagatataccctgtaaaaattgaaagaaaaacttaaaaactttccttgacaatggattcctcattattatgtcaatattttttaagaaattaaaaaaaaattgtttccactgagaatttcaagaatataatgactgatataccaatggagtattcccatctcggctcactataatcctttagtcctttatgataaaccccggaacattttaaaagcccccaggtcggctcgaagattaacaggtaggtattagtaccccattagtaggtataatagtaattttatcttgaaattatagatatggaaaaatttcttattaacatagaaaaacatcctaacctcaatacccctttctctggttggaaatgttggccgtggaatcgatttcgctactggtacatagtataaagcttggttaggtgtttgagacatattgactgtttgggtatctgctacgccactgcttacttttgactgtgtcaaaagcaattacgtttttatctcgaatttatacctaatttagcttctatgccactgtttttgcactatgttttacaaagcacgacaaaatacagaacgatgttactcgctcgacacctcgtagtggaatcaatttaccttccaattaactactagttcagtatccagacaaaatagagtatgacatctttaaagtccattgtaagtgaaatctttagtcaaagaggaaaattgttattagtatgtgaacgttgtaaatttaaagaacaaaaacgaaaattagcttcaggtgaaacaaagtcggaatgtgtaaaggataattattgtaaatctttatatttatctgcaatatttttatttttattgggctatgtataattatatatctatttaatataaatgtatttttttccattgagatgtacaattatttgatattatctcaaaagccgagctggttatattgttatattttatatcgggcagttttaatctttgtgccgacttgggacatttttaaaagacctacctgtttcttgggctaagaataattttttttaattaattttcttcactgcccataccaatgaatatatctagtatatcattttctaaaattgtacgattttggtcaattttcaatctacaatacagattttcttaagtctatcttatcatgttcgcgtttctttttgcttatattatcttttttaattaaatgaaaatgattttctatttttcatttcccccccccccttttttctctggtgaattgcatatgattcaattttgtaagttattgttgaaacggctataatatcgaattatattagatccttaagcatgtcagcaaatataagctgttgttttatacacaatgatagttacacagtcaacgttgtttgtgttaaatttttattgggtataccaaactataaagatgtagtaaaccataaacataaagtaatcaacaatattaactaaacaattaagtaccgaaataaatgaaaacaacattctagtttatggaaagtagaagtacagtgaaacaataatttaaaaagcatgctttccaagtattactcaggtattacgcaattaacttttatatgaagttatttcaggaattcgatatctgaataaccgagattatagagtgataaaatacagtgtgtcaatttgacaagctactttataatttggtcccgccagaaaatctgaaagtatgcaaaaacacgtcacattcatttgtgaggacgacattttgcagaccagttttcaactaaattacatcaaacttctagtgggagtgaacacaaccaccaaaatctttaatggaaaggaggttgagtgaaacctcattttaaaagtcttaaaaataccaaatttcttttcggtatttttgtaaaaatcaagtaaaatcgtgaataggtatattaagtatcgaattcagaactccaaaatttttttaagtgtcgagtccaagatttttctaaaagtgctgaaaagaaatataatgtttgtggcatttttgtaaaggtagttgaacgacctatacaatgaggtatcagtcaacccccttttcattaaagatttttgaggctgtgtccaccctcgttagagggttagttaaaaactggtctacaaaatgtccctgtcacaaataaattctacgtgtctttgcatactttcagattttctctagggaccaaaatatgggtggtaccttttcaaattaacacaccataaccacaacgtcggattctatgtccatataatggtgttactcgagatttttttcgaatgccttaatataattatctaagtacatacacggaagaactctttggtgaataccaaagtggtttaaatcagtctatgatatagcatataatatatagctctacaatgtagctcgaagataatattattatcttcgagctacattttataaataacaaaaaaaaaaataacgaattcagtattatcagtttgtgtg

SEQ ID NO: 6591 - DNA, 2475 bp, Diabrotica virgifera
ttattataacgttccggcgatccatcccctagcatcgtcgatgtcgcgaggggggtgcgctatcgttacaagattttagatacttacacctgttttgtaaagaattaaaaactagtttgtgatttaattagatattcaaaaatgaatcaaacatttataactggatacttagttgttccgaatcccgttattaacagacatctaaatccgctataattgggagttttattaaaaagtttttttatctattaggaagccagcaacccaccacgaggacatcaactcaaagcaacagaaccaccgaaaaaacccaccagctggctatccagatgcaccatactctgaccacttcccggagttgcttaaaaactcaaacaccgcttatcgtcataagcctacccaacaacttaccactatgcaacttcaggtgggggtgtgtttaaaactttttggacatgcctgataagagtatacttactattttttacgaccatttctcagaataaacgtcagtattgtaatcgttttatttattataattttagtacatcataatttttttcattacaacggaatccagcaacaaacgaacttatagtttgtatccactatcaaattgtgtattttgcattatttgtattttgtattatttgtattttgtcgtaatattgatcaaatgactaccattattcattaatcttgctttttttgttaatgtgtaatttatacccaagttttgttaaaattggataaaactgcaaagtatttatacccaagtggaaatcatacatctctttctagtaataaaaatccatgcttcttccacctgttaaaaatatattatttcccaaattattattcttcttgggtagtattagttgtactaatactacaacgaatataaaaatcgtcctttgatttcactaaaactggtgtttctaatattagcaatgtagtatatggtctaaagtctgtcaattaatgaagcatcaaatatcagactacacaaaataatttgtaaataatactatgtatttggtgaaactttggtaatttgtttttttttttgagacggtcacatacattttgatcttccctttaattgtttagctgcattaagtaatctaactatgtgataatatgtgtcaatgtgtcttgtagttagaaaaccatttagctttcgttgtgacgaagagtattcttaataagtatcataaccttgcgttttggtacattcaaaagaccttatatgaacttactatgaaaatatcaataaatccatgcattagttgttcattttcttatataagttcgttatcttattctacagtattagctgcccacgacgaagagacagtttgtagcaaaataaacactactgaaactgaaatgaatattgaaatatttattattataatatttagtctacatgctacaaccttgcaaacattattcacgacgacgttcccgatgaaacaaatgttcaagatgctatccgttcagtttcaaccattttccataccgttaacaaaggttctcgaatcatatctgtgaactaaggctgttgaatggcacgaaaaaatcttgaattttagtctgcaattccgaaatatcaggcggtggaccggtacgaaaatcagcatttcccacatgtacgcattaggtctggtgagtgcgattggtatggtatggaaagtgacaaagtggatacgcaaaataaggcgattcccaaaatgattgcgcagcattcgaagggactctatggccgtgtgaaaggttgtcccgtcctactgaaatcattgttgattaaatggtaggtaggttcttggcactacaaaatactgaaaatcatgtagaaatggcgtgaaaattggttctctgtagcgctgttgattaacagttaacggcgttcatcgcttgcttcaataaaatacaggcccaatatgccatatacgaatacaacacaccaaatgaaaacacagtcactatgaaggaggtgctcgacgcctactttggggcgttcgaatccaagaaatcttttttctgcttgttaagcataaatgcgtcagcaactgattttaagcttggatcgtttttgcggccttttccgtacgaccaaaaatagtactccatgataaaaaaaaattttacaacactgaggaccgtactgaagctcctaacattagcacgacattcacattatgtcataacgatgttctgaaatcgctcggtacgtttcggcgcatgactcatacaaattttactaatacgcatttcagtactgtttatattagcttttttcgcgctggacaacccgaacgtacccagagggagaacgcctgcgcattacaaaatcgagcgttcgcggaggtcgaatttttccctctgaacaccctccggatttttaattcggtgttcgcgcagtacagaaaaatatcctgaacgtgtccgggataccctctcgacgttcgagga

SEQ ID NO: 6592 - DNA, 2468 bp, Diabrotica virgifera
gtttgtttggtgttattttgtattttgacagcgacgcccgacttgggcgttgaagcgttaataaagtggtttttaggtgaattgtggcttgtttcccatttgaatatacttgattgtttataacaatcttatcgacatccggaactgttacccaaaaaattcaaactacatggggaaacttggctgggtccatctgagtaagggaggccgttgtacccccctggcgacaggactactccgattttcagtttttttaccagattgtagattatgaaatcaaatgacaggattaacatgacaaatgtcagattatgacaaaacagaaaaaaacatacaaattgtcttgtacacaacaagataatacacacatttaaggttatagtttctgtactacattgcagatttgtagggaagaagaggctttaactaaaataaatggaccgttttttgtccagatgaaaagttttgagaggccacatcttaaatgggtaacacgttttaaagtatatctctgcaatatttgaataacacaacaccacaagcaaacatcttttcgacaagcagctacatcaatggtatacttttctttctttgactggtccacctattctcctcaagaaaacaactacatttgcctattttttgaagattttgaaattacttttttcttgtcgttgccatttattatccgaagtgtcaaataaaaaagacaacttcattgtaaaagaaaaagagtacgaaagtaaaattaaaatctgtaaaataacttaaacgtttatgacgaatagtctttttacgaaaatataaatcttaaattagtttaagaaagaaattttgtataaacaatatatagttacaatgataataagatcgtttaaatataaaccagttctttggatagctgtgatacgtccgagatgccttaggcaaaaccctgtatatatatttggtaactaattatttataagataaattatttttagtcattggaattttacatttccaaaatgtacttttactattttacaacgtatttttatttcctgcctaaagtttgtcagggttgttgtcaatctacgaaaaatatttattacgactggtctagtaaacgaatttttaaacttaatttatcggaaaacgtaaactcggtcctgttgaaagccggccctgaaagtaaagctgggtatagttgctatcaagatatttcagtgaaccttaatcttaagcttaatacaaagtcatttgtatttgaatgatggggttaagtttccggtacaggtagaaagtaataaaatgttaatctattgtactttgaattattatacctgctattcagtgtgtttacctcttgaaacttaacgatactactcaaatacaaatggctttggaatatgattaagatacggttttctcaaatattttgttggcaagtatacattatggttccagtttcttattaagtcacaagcattcaagtgaagtctgcataaatccggccagatagaccaaatgaagctgcgttcaaaataaattcagcaaaagcattgaaattaacttgttaaattcaatttcaagcttgaagatcactgacaaaaactctggtttggttctccgtccattactatttgtttgttaatagtcactatttttgttagttgaatgtttttcaactatcacttctatatatagaagcacttatagaagtaattaaaaaaatgtcacttcatttcattcaatatcaacaatatctaaaggccaacttacacggttcaaccaattgaatcactttggttgaatggagcagaaatgaaagcaatgctatttacacggtatctggaaagtgaaatattcaacgcatattattcaaaagatgtcgaatgaagtcatgagtttaggagttgcattaaagaattatcgaaaaagaagctaaggaaatgtcatcgttggtgggtgcgatcatgagtactaagaagacaagcctaggagccacttttggttgatcgttgtatctttattaactcgaaagtataacgagtacgcatacttgtaattttcaattttatgtcttcgtcggttataccattcaaatatttaattagcgatttaatagcatttccatgacaatctcggtttttttaacccttgttttataattctatagatacgaatactttttcaattgttcccaaacagagaagtatgctcgtccttccataatataatacgctgtaaagtgaatctttcaattctggtgtttacacattcatttctcgttcaacgcgtagcagattgaacgctaaaagtgaaaatactcagcatgttcaactctttcaatgccattgaacgacaacattcaatgacatggaatgattcacttttatgtttacattgatcaatttggttgcttcatccaaatttaatgtcaaaagtgaaccgtgtaatttcgccttaagtatgtaagtgctggc

SEQ ID NO: 6593 - DNA, 2479 bp, Diabrotica virgifera
  SmartBlast Evalue=0; Info=Ubiquitin carboxyl-terminal hydrolase 5 n=1 Tax=Harpegnathos saltator RepID=E2C8J6_9HYME
ggcggattctctgacaaagcaactttattgtcgttaaatatgacccagctaccgctctttaacaaatgtacgacatagtggcccacctgcgtagaagggcccatatgggagatgaatccgacgagtttatattttccttctccatctctgaatgtaggaggaggtggtgattttatgttatccaactcttcttgatgtgaaaaaatccaatccatcgctctctccacattattttcagttgcctttagagctttcgtagcctgttctggagtgaatcccatagaggcaatagtagctagggcatctggatttgggacaaatttagtattttcggtaccgggaggcacgaaaggatctgtgaaatctgcatctgcgatatgttccataatccaagcggtagccggttctacgccagcatttccactttgaaatattgctcgcttgcatgcgtctattggaaaacccatttccattaattggctaataactccttcatccatagacggagctggtggtggtacttggagttctggtagtaactcttctgttggctgaggtccatctccacgaagagaacttacgtctaatacgtcaggcatttctatagaaacgtccaacttaattgggacccaatcttccctcaacataaactttttgaggtggactaccaaataatcaggaaatgatgacaacctagttgtttttcttgcggtaacattctcttgaacagccgaactataaaaattgttaataagctctggttcgctaaaagattctaaacatgagatgaaccgaattttaggacgaacaattgcgtctggttctagtcgtttgccttgtttttctatttcagcttttcgggcttcgtatgcagatacctcgtctttgttataggccgcatccatcggtatagataaagacaaaataagttcagatcgtgttaaatatttgactttcttactagaaccacactgaaacctttcttcaacttgaaatttaaaacagtctccagggtttaagtttgtcgagtcttttgaatttctttctaataatgataaaatatgaagtaaaaattcttgagcatcctgttgtttcttcgttgaaaattcgggatgtccttttccgacgagatttttaaacatttggggacaaattccaggtggatcggcatcgacgggagatccagcgggaggaggtacagaatattttcccgataaaaggccatgtccaagtttcgccatttgtagattgaaatcctcaggagcattcaaacctgctttttcatagaaaggacgtgctccatcatagtatttaaaaataaaatcaggaattgtaaaaagcatttgcataacactgtttagataacatgaattccccatatttgtcattcctgtataaccaggaccataaataggttttaaggcacccccattttcctgcattgccatccattcgttagttttctgatttaactccaattccaattccaccattgacttctccgatttttccatgttagcgatgttaataccccaatgagctaagtgctgaattaaattgggatcttccaccatatcgtcttcactatagctgaaaacatcagctttaccatctttggtaattgttcctaattttacagccaatggataattagtcaagctataatgctccacagcgtgattgtttcctcctgtaccgtcgtagaactttctaccgcatagaatacttccatcggagagatttaaccacaaattgtcagtcttatcacatttttcgcacttccatcccgtcggcggaattttctttccattatcgatttgtttcagatctaatgcatgtctggatacttctcgaacttcaccgtcccaggtcccactgagagcttgaagttcagcgagcttatttgctgaaggtaagtcgatgatagcttgtacggacaatttaactagttctggaagattatcatctggccactcaaaagtagtaaagcttggcagcactacaatgctgtaattatctttgtactcgaatttctgtttgctcgattctggatcaaatcctccttcaacgccaattgctaaacgggtgattttcttttctggaccatctccctgtggtggtgactgaatctcaaacttttctctttttaaatgcaaaaataaagcatcgtaagttttcgcatatttttcaacatgatcacgtcctaatccaatgaaggtagccaaacttacatataaaccagtaggtgattcaggattgtcaaaggaatatacacactcatccttatacactttatcgttgaccgttggaacttttactttacttaaatgagatgtaagtatatccataattgtataggtttttctagagtataaactataaaacaacctgctttcacaaatataaaatttatttgcagttgcagatgttgaaattgaatattaatattaaattttttgacaattgacaagacaaaaag

SEQ ID NO: 6594 - DNA, 2480 bp, Diabrotica virgifera
gcaatgagttgtagcaaaagtgcatataaaatgaatgaaacatctaaatttatatttattgtgaaaatgttttcttttcgatttttttcgttttctttttaacataaatatacaacatggaaaataacaaagagaaatccaagctggaaaggagaagtgaagcagaattgggaaaacagtatgaacgacatatgtttgcactaattacattgaaatgtctgttgcattcaggtatcgagaacttctggattgcctcaaatttagcgggtttggatgtatacgacgacattgtaataaatataacgtaccaagatggtagtaaagagatatttttaatacaaattaaaacaagaaaatccgattcttctatagttgccgagaaatttcttacaacacgcaaagaattttcacttaaacactatcaagatggctatttaaacattaccacaaatgaaaaaataaaatctctcatcgactataccgaaaatagtagattattttttattcatctgaataattttaaagtggaagtagcccacggaaaagaagagctggagtttgagaagctaaggattgaagagtttagagatttcataacaagtgtaaattttgaattatcttctggctttaaatttattgataaaactgggaaaaataatgagaaaaaaatgtttgatgaacaatttttaagcagcttttacttgtatccataccaaattcaattagattgtataaaagcaaatattcaagaaatattgactggaagtaaggagtctacgattggaaatgcttatattcagtacttttacgattattcttcttctagtaaattaatacaaaaaatttctatgctggatgtaaagttactattattaaaatcattggatgcatttggagcgtttactccatcttccaatatagtatttgaaagtgcaaaaattttggaaacttttagcaatttctctttttctgttatatatgaattagagtctgaacgcatcatttggggacaaattatgcaagaactaaaaatgtgttttaatttaaatatcaaaaataacaaactatttgactattgggaaaaccctttaccaaatgaagtacaagaatttatcagaggaaaagaacagaggctgcaaaattatgaaaacttaaatgtaaaactattgtatctctttatggtagcaactagactagcacctttttatacaaaaacggaaagttgtcaacttaagacccacatgcttcaattactaacacaactaaatatatacactataatttataatacagatagatgtacggaaatcaattttccgaaaaactgcactgttttcaaatctatgatggatatgcctaaagagttatttgaccaaaacattaacaaattttttatttcgcttagaaaaaagacggagttgcccataagtagtttgattgcgagtagtggaattggagaatgtatttctacggatcagtttgtacaattttacaataaaatcctatacatgaacaacgaacactttaacaaacaagaaatatatattaacagaaccctaacaagatctataataaatgaaaacatattacacaacttaaatattccatcctgtattatttttaattttcctgaaaatttgcaactagacaaaattaacaatcgttttgagtttcattatcaaaaggatggttttaaagtatatcttataacattccaacatcttcaaacgttttggataacacatacatcgtcttacagttttaacatttttaaggaaaatgaaccgttcattagttcaaagttttgtattttgcaatacgagtttacgagtttaccagaagcagaatattacttcaccttgttaaagtcaacaatcaatgtagaacattttgaaaaatatctagagactgaaaaaatttctgacaaatattttttggacttttgccgacagactcaagtcaatattatttgtaataatgctggtatggggaaatcaatgcttcttagatatcttttaaaaaaatttccaccagaagaatatgttatctacattgaacttagtaaatgggtaaaacaaataaacttattgaggacctttgaagatttcgttaggtttttaaagaaaaattttgtaaaaaatgaacccaaaggcatttacaaaatgtctgattattttttagattggtacattaagaataatcaattagttttacttattgacgatttagaggaaatacaagaaacagctattttagatatttttaaaacagcggcaaacctcggattacgattattgattgttgcaagaccgcattttaaaaaaaaggtacgaaaatatttttggagtattttcattggaaattactgactttacagttaaagaccaatatatttttttgagaatttttttaaaaggcataaaattaaagatgcttccaatatattaaatgattttaaaggcagtgttagtctatttgaa

SEQ ID NO: 6595 - DNA, 2478 bp, Diabrotica virgifera
  SmartBlast Evalue=7E-40; Info="Engulfment and cell motility protein, putative n=1 Tax=Pediculus humanus corporis RepID= E0VNX9_PEDHC"
taaatatgttggactagtctataattaattaccacgaagctagtgtttattgtttaagtgttgcaacaaagtgaaacgatgtcaatcaatagctatatcgccaaaatttccgtggaaaaacatgacagcaaagatcagtttctgtatgatctggataaaaataaatctttgtgtgaaattatacatgatatctgtaaaatatgcggaatgccaatatcatcggtgtacgggttgaagatgatccacacaaacatcaacgaccccacagtagacacgtacatctcagagattacttacaagaacattaaacataatgattgtctaaaaatcgtgttttccatagagtatatattaaaaagcataatatttccacacattaatggcaccagagatgaaccacagagagaaattgcttatgatcatttaaagaaattggctcacgattcagttttcatcgacgaattagtggctaaagacaagcatctagaaatagtgaaaacttttaccacagataaaactctcaaagacgaagagcttttagctctactgataacaatttgccatttattccttaaaggataccatgacaatatgccaatagatttactacagagaaccatagaaattgttaggaacgaatcaaatgatgtggacaatgtgcaatatgctctagcgatcttgcacaaaatactgattaatagaaatatagagtttatatcatggaaagaaaaaatcatcagggagatccctataatatgcctcatcccttacatccgaagggttgatggtaagaaattgcaatacggagtattattacttataaacaccatcataaggttgtgcaaaggggatcaaaagagacacctgatcaaagaaatgaacttgaccaaaaatagggaagatatttataagtacattattgaagctggagatattgataaaaagatggaacacgaactttatgttatacagacatatattttaagtttgtataatgaagccttaaacagtgaagtaggtttgaacgataacaatgtgtttaaaagagaagaattcgaattgccggaagacgacataaaaagattaacattgttactagattttgatgaagttcgtagttccagaagtaattctattgaaaacttgctcacctatcaacaagcagaaagattttccctagcttctgtagtcagcgatagaagtgtagattctagaaaatcatctacaatatgtacaccaagactgcgacacaccagttttaacattgattacgaaaaccttacgattaattaccttaccttagaagcactgaaacattataaagacaatcacaagaagaattactgccaatcacaaattgaagaacgagtatatgaacccggaatatttgttaccagtgaaaaagtcgtaaaaatgttggccaaaatattagacataggcttagacccacctgattctaaaaagatattctatcagcccatcgtcttcaattcctctgctaaaaattcatttttccttgagctcttctccagaactatgtggttgttgtcccgaacaagaagagagatgaaagtatcaacaattgaagattatccaaaattgatgagggcgttaaagaagcaagtcaaaatggttctgaataagaggcctttgaatttcaaagaactgacaacagatatgactaacttgaattttgacgcagttttgaagaagtggcaggaagaaaaagatgcagaattaaatgaacttctacagaaccatccttgcatcaaagaattacgagaaatgtatttaaaacagaacgaaaagtatatatttgaaaacagactgaacacattgaaacatggtgaaacctttcacagatatattgataaaaaatcaatggtaaagatgtttgtaagactcagtaaaaatgaaagagaactacagatatacgatgtacctaagaaccctagtgaaatgatggaactaaaagaatccattaatattgcaaatataacacacgtagctacaggaaaaaactgcaaacattccatcatctgcagatctccggcacaagctttttctatttttataaatcactctgagagtcaagtgaattttgcagcagcaactattaagatagcatctatctggaccgacggatttaacattataacagacaaaggtcgaagaagcgacctcttcaacgaagaactcgaaacattagtggaaatggacttgaaacttcagctcatcgaactacaaaatatttccataccgaaacatccccctccaattccacctctaccgaagccagtattgccacccaaaccggaagtagtagtgacgaggagagagagatattcaagaagacctccaccggaagtgccaaaacagaaaaactaataaaattattttatgttcacatactttagttttaggtttttttactagagtcgattgttttataattaaaatatattttaaaaaatgctg

SEQ ID NO: 6596 - DNA, 2471 bp, Diabrotica virgifera
  SmartBlast Evalue=0; Info=Hydroxyacyl-coenzyme A dehydrogenase n=1 Tax=Bombyx mori RepID=Q2F686_BOMMO
gttccaagtccatttttcaggtcaaagtccaggtttaattttatagaaaatcttatttgtaaatttgtaattggggtccaagggtttgtgtttgatacattaagtaaatacagttgaaatgtctaccatacgttttttgggggcactttctagaacgtccaaaaattatattcaagcatacaatctatgtcaaacgagatgtatgtcttctttggaacttaaacatttcaaattgaaagttgttgataatgtgggagttataactatagattctccaggagttaaggttaattctttaaatgaagaagtacttaaagaaattgaatcattgcttcccaaaattcaaaatgattcccaaattcaagcagccgttatcatttccggaaaaccgggagtcttcattgcaggagcagatgttaatatgctggaaacgtggaatgatgccgatgagggtatgcagaactgcctccgaggacataaacttttacaagatatcgaggacagcaaaaagccattcatttcagctattcaaggatcatgctttggtttaggcgccgaattggctttggccacgcattacagaatcggcgttaaagataagaagacctctatcgcactaccagaaattatgctgggtcttcttccaggttgtggtggcacacaacgacttcctcggttactgtctctaccaaatgccatggacctcattttaacaggaaaagcgttaagagcagataaagcgaaaaagatgggcgtattagatcttctagtcgaccctttgggccccggattggatactcccgaagcaaataccgctaaatatctcgaaacagtggctattggtgtagctaaggatttggcatccggaaaattggtacctaaaagagagaaaagcctaacagataaaatcttagcgtatgcattgcaattcaattttgtcaaagaccaagtatttagtaaagcaaagaagcaagtaatgaaacagactcagggattatatccagcacctttaaaggcactggaagttctacgaatcagtttagacaaaggtgaaaccgtcggattcaaagaagaagctcgggcttttggagaactagcaattacaccccaatgtaaaggactgataagtttgttcaagggacagacgcaatgcaaaaagaaccgtttcggtaagccaaataaagaggttaagactgtcggagttttaggggctggtttgatgggggccggtattgcgcaagtcacgatcgataaaggtattcaagttgttctaaaggattccaatagcgcaggtttagctcgaggagttaatcaaatttataccggtatagacggtgctgtaaaaaggaaaagaataataggattggaaagagacaaatttatgtcaaatttaaaccccactttgagttacgacgcatttagacaagttgatgtagttatcgaagcagtatttgaagatattaatattaaacacaaagttcttaaagaagtagaatctgtggttaagcctgattgcatattcgccaccaacacgagcgctttacctatttcgcagattgcagttgcatccaaaaggccagaaaatgtcataggtatgcattacttctccccagtagataaaatgcagttattggaaatcatcaccaccgataaaacgagtaaagaagctactgccatcgcagtcgacataggtcttaagcagggaaaagtagtcatcactgttggtgatggtcccggtttctacacaaccagaattttatccgccatgatggctgaaagtataagactgttacaagaaggcgtggatcctaaagatctagactcccttacgaagaagttcggcttccctgtaggtgccgctaccttagcagacgaggtcggtttagatgtagctgctcatattgggcctaatttagcgcaggcttttggagaaagattttctggaggcgacttgggcgtaatgagagatattgttcaagccggcttcttgggtagaaaatccggaaaaggcgtttacatttacgaaaagggaagtaaaaaccgcgatgtcaacgccgaagcactagaaatagtaaagaaatattccttagaacctcgaggatcgtttgaagatgaagacaaaactttgaggatggttacaagatttgtaaatgaagctgtcctatgtttagaagaaaaaatcctcgccaatccattagaaggagatatcggtgcagtattcggactgggattccccccattcaccggaggtcccttcagatgggtcgaccaatacggagcagccaaactagtatctaaaatggagaacttcgaacgttcctacggacttcctttcaaacctgctcaaacgcttatcgatatggccaaggaccccagcaagaagttccatcctaaagtagcatcataagtgttatgttattcaacgtgcctttttctataaaacgttttttcggtatttagaatatgtttat

SEQ ID NO: 6597 - DNA, 2471 bp, Diabrotica virgifera
  SmartBlast Evalue=0; Info=3-hydroxy-3-methylglutaryl coenzyme A reductase n=1 Tax=Anthonomus grandis RepID=Q9NDD2_ANTGR
cctaacgtcacccgttacatcattttatcatatataaaatgattttaatttgtttataatgtttattaagtaaaagcatttcgccatcgtaacatgtctaagatttttgcgttatacggggaactatgtgccactcacccatgggaagttatttttactgtcatcaccttcactgtatgttttttgactttggataaaccgcaagggacaaaggcctttccacgaactacctcaacatgtagcacctgcaccgaagaccattttatagccgccgatgtaatagtgatgacaataatcagatgtcttgccatactgtacagttatcatcaattcagaaatctcagaaaactaggatccaaatatatattaggttttgcaggactatttgtagtctgctccagtttcgtgtttatatctgcagtattaaacatcctccaaatcgaagtagcggacctaaaagatgctctgttctttttcttgttgctaatagatctctcaaaagctgttaaattggctcaatacgctctaactgcctcaaaccaagaagaaataagtaaaaacatagcaatgggagttgctgttttagggcctaccataacgctagatactatcgtagaaaccttagtaataggagtgggaactttgtcaggagttcagcgtctagaaatgctatcgtattttgcgtgtctgtcagtcattgtgaattatataattttgttaactttttacccagcttgtttagctttaatgttagatttaagcaaagtaagtgattattacaaacaagaacaagttaccagaatactagtggacgaaaaagataagtccaatccagctgcacaacgtgttaagatgattatgtctcttggactcaccatagtacatattcatagtaggtggtcagtacctcaaacggaaaacctagctattggtggtaacaaaactgtaactccttgtaatgaatctagctcattgtacggctttatacttaaacaatttgctctaagcgccgatcacatagtgatactggtcgtgttggtaactttgatgaccaaatttatttatttcgaaagtagagaagagttacaaccagttaatgaacttattgctgatgtttccgatcgaaggaaaagcataaagagacaagaaagaacatattctaccagcgtggaagtccagactgatgtaccaaataaagaaactgttctggaaagatgtgatagtactgattcaaatcctagaaacctacaagactgtttacaattgcttcgtggtgacaaagctgatgaactttccgataacgagataataatgttagtagatacaaaacatatccctgcttatactttagaaaaagctgttaagaatcccgaaagaggcgttaaaatccgtagacgtataattcagaatgttctggaaaacaaagactcctttaactatttaccatttaaaagttatgactataccaaagtcctaggtgcttgctgcgaaaatgttatgggctatgttcccgtacctgtaggagtagcgggccccctcgttttagacaataaatcgtattatgttccaatggcaacgactgaaggctgtcttgtagcaagtacaaataggggatgtagagctattgaaaaaactggtatcaaaagtagactaatagcagatggtatgacaagaggtcccgttattcgctttagctcaattgtaactgctactgaagcattccactggactaaaaaggaagcaaactacgaagctttacgaagctcgttcaattcaactagtcgttttgcaagacttcaaaaaatttctacacatatcgctggtcgttacttgtttattagatttgtagcagaaacgggtgatgcgatgggtatgaacatgatttccaaagggacagaacaagccttgaatacattaaaaacgcattttcctgacatggaaattctgagtttgagtggaaatgtttgtactgacaaaaaaccagccgcgatgaattggatagaaggtagaggaaaaagtgtagtttgtgaagcaattcttccctttcacattgtttcttcagtattaaaaacgagttcagctgcgatggttgacttgaatatttcgaagaatatgattggttcagcggtcgctggaagtattggcggatttaatgctcacgctgccaatattgtaactgccatttttatagcgacaggccaagacgctgctcagaacgtatccagtagtaactgcttaacaattatggaaccttggggtgaaaatggagaagacttatacgtttcttgtacaatgccttcgatagaactaggaacagtaggcggaggcacaattttaccggcacaatcagcatgccttaaaatgttgggcgtagctgggtctaacgaagaggtacctggagataacgccaaacaattagctcgaattgtctgtggtacagttctagcaggagaattatcattaatggccgc

SEQ ID NO: 6598 - DNA, 2469 bp, Diabrotica virgifera
  SmartBlast Evalue=1E-100; Info=Ceramide kinase n=1 Tax= Harpegnathos saltator RepID=E2BJP4_9HYME
ctaaacgtcatgtagaagtagttgtgctcgtttaatttttaattgttttttacgaaagttgtgacttgtgaccatgtgtaaatttaaattggcgatgaaacacgcattacggggttaagttgatatgaaaataatggatagtgatgtacaaaattgtgtccttttaaacacgtttcatacccgaaagaaaaaattgaggataatttttcatcaaggaaatctcgtctgggataacgaaaaaccgccgtcagataagactactgttcctatagaaaatgtaatatctgtccaacagaattacaggaaaacgcatcctagtgaaactagagagttgaatcctaatgcattcactatccattatgcagaaagagaaaaagggcccaaatgggtctataaaaacctagtactcaaaaattctgacccacttttagtcacaacatgggtaaaaaccttgcagacccggctaaaagaattccatcaacggccaaaacacgttttacttttcgtgaatcctttcggcgggaagcggaatgccatgaagatctacgagaaatatgccaaaaacttgttcaaaatagcaggcattgaggtgacactaaacgtttctcaaagaaaaaatcaaattaaagattttgtgattacccataatttggatagtttcgattctatagtgtgtgtgggtggggatggtacggtttctgagctattcaatgggttagtattacgagagtgcaatattcgcggtgtggatgctgacgacatcaatcagaacttgcctagaccaaggattcctataggcatcataccagggggtagtacggacactatagcgtactgcatccatggtaccgatgacactactactgctgtgcttcaaatcatattcggagacaccttaggactggatctagtatctgtttatgatgaacatagtctacttagtttgtacgctagtactttaagttatggttacctgggtgatgtggcgtaccacagcgatcagtatcgatggatggggcctcgacgatatgaatattccggtttcaagaaattagtgagtaacagaggttactacggagagctagcggtatattcggagaatgacggtgttgttcaagacatcccttgccatgaaaattgtgataaatgcgaaaacagcagagaactcaaaatgaataaactaggctgtaaatggcaaacgttgtctgggaaattctttatggttactggtgctaatataagctgtgcatgcagccgaagtccaaagggcatagctccgtttagtcatttaggggatgggatggtacacttggtgttggttaagcatacttccgtattaaataatgtcagattactattgaggttgtccagcaacgatccttctatcgaagatttgcccttcgtggagactttatgcgcgcgagaattttgttttagggctattgaagggaatagcaaatggaactgtgatggagaagtacagcaccaaattaatatacgtgcaaaggtacgatgtcaattgctcaccatattcagcaggggaaggccaagagattgttctgttgacccaacttgctgtggattctaagcgttttatattttttaccgtgaccatacatctcgtaacgcgacagttcgtaacagcacaaatggtaacggcggcagttcgtaccgcgacagttcgtaactatacaaattcgtaacgtcaacatttcattttttttagcaaatttagtattatggaatttttacaaaaattcattttgcatacattcctacactaaaagtaatggtacttatttaagaccacttcttttaaaacattatatttcacacatatttttgcatatattcttgttaatatgacaactaaacatttttttaaattttttatcttgaatgtaagtagtaaagtagtcaatttaaagtagtaaaattaagtgtgaaaaatattcaacaaatataaagagtttgatatataataatgtatttactataataattaatacactttacattactagattatatttattttaagacataataaatatttatttttccaataaatatgaaatatgtcaaaatgttaatcatgaaaatgttaaattgattaacgtaggtactttcaattgtaataaaagttagtttccacgttaacaaaaataagcagaatcattcaattttgacgttacgaattgtaccgttacgaatatgtatagttacgaactgtcgccgctacgaattgtccgttgccatttgtccggttgcgaactgtcgtgttccgaaatgtcatggtaccattttttacttaaaacaattattcgaaagtattgactcaaagtatttttctgctctattcctacaaatagtattattttttctatatggtaaattgttgtagaggctatagagctatttttattattcattccttaaaatatttgtgtagtcattcaaattaaatta

SEQ ID NO: 6599 - DNA, 2470 bp, Diabrotica virgifera
  SmartBlast Evalue=1E-31; Info=Probable RNA-directed DNA polymerase from transposon X-element n=1 Tax=Drosophila melanogaster RepID=RTXE_DROME
tattatatttaatgataaaaatacacaaagtttggatattgagtgcaactatttacataaaaaaggttatattttataaaatatataataataatattattcaattattcaggcagcatttttactggcaattttatctggaatatgtattcatgtaaatatttcactaacatggataacagttatttctaaaatttggcttttttaataatgtaaatttcatttatgttgattttcagacttaggtattatacaaatgtaggatttttgtccctttttgtcctaatttttatttttaaagaagtaaagattttgattttttttttctaattcgttgcatgtcacccgatttgacgttgttcttgttgcacatagtgtgtgaaaaaaaaacaacttaatatagaagagaataaagcgtctcagaaaataataatataaggaatattagctaactattactgttactaatgtatcagttcggggatacatgacgaaaaattcaacaagaattttcttttcttctctctaactttttctggatgttccttcttgccttctggttgccattttagtatttcctttggtattaattttcatactgaaagtgttttatctgcaacatttagtatcgctatttccatataataaaattattgcacaaatttttgaattgggcaccgtgtggcttcggtccattcgtccgttatgtgttcttattccatacttctttcagcaacttcaaatctaccagtccttcgtattagaaaatatcagctgttacttcatctcttgctgggctcttatttttctttagttcctctattatttttttctttttcagtaggcgtcctctcctcttcttgatcggtattgtccttcagttcttttttcttcatagtctgttgtaggtatttcatttaaaagctcttcaaattattcttactattcgttgcctattttctcgccacttaataaattcctttcatttttttattatacaggtttcctttggaacggctatttgaacattttcactccttgatataagtcattaatttctcttaaagcttccttctatgcattgcaatttaccttcatttttttttgattttatgattcttttggctcgtttcctttgttccttgtatttactctctgactttgttttttcttatattattttaaatcttaatttttgtggttcatgtatttctattttacattcctcattgaatcattctttgtatttatcttttacatttctattactgacttgatctgctttggtcatacatacatacatatttttatttgtatcaatgtttgttcaatattttcattttatgtaatattatctgattctctggtaactattcttttatatttagtcaaaatctggtcctctatgttgtcatgtttttttatacattcttccatgtcttttacgacgaggacattattgattttcgattacagttttcccatctttcatgttccttggtatattcttttgtgttggaagtacgtgttcataatgatcatatcatcaaaagtaaccattttcgttcgttacatcatgtagactatattttactatggtgagtatgtatattacttcttttctaatttttgcattagcatttgggaatattttcaaatatatatatttgattctagaagtcttcttttatttctttttttttattacatatttttatttacaatctgcttcatcgaagctataagcaaatagtttgaatgttaaatacatgagggagaagctgccctgtggcaaccctcctattataatttttacatttgatcacaatatgtatatttaatttactaaatctgttggccatagtttcttcagtcgtcttgcgaattcgggacgagtgttcagcagtcttgcttcatcatttggatgacttctcagtccatcaaggtagctctttgtgatccttggaatttcttcctctaccaagggtgtagctgagtcctcgtgtagggttttattgcttacataccagggtgcgttgaatatcatcctcaatatttttgattggactctttgtattatcttgatatttgatggctttgagcaaccccggagttgaacaccataggtccaaattggttttatcatagttttatagagaagcagtttattttcaatattgagttttgattttcgaccaataagccagctcatttgtcgtattttgatgttgatctgggttttcttggcttgaatgtgcggcttccatgttaatcttttgtcaagggttagtcccaaatatttgacttgtgtgctgactggtaattgtgtatcatttagtgttattgttggagatacatcccttcggtttgtaaatgtaacttgggttgaattcgtttcatttacttttaccttccatttcttgagctatgttcccaattggttaaggtggttttgcagttgtgcagtcgc

SEQ ID NO: 6600 - DNA, 2467 bp, Diabrotica virgifera
  SmartBlast Evalue=5E-88; Info=CG7120 n=3 Tax=melanogaster subgroup RepID=Q9VSJ3_DROME
atgagagaggatatattgttatcaatgaatcaaaataatccaatttttatctaaacttgataaccatattatattaacggtggatttctaaaaatatgagtttaattaaaatagtgtatgtattaggtgatgtagaagcagaacagaacatactgtggaaactaactttagtattttcaaaatgttaggtaaaaaagtggacttcaaatgtttcataatttttctaatgggtattaccatattggtatgtgtatatcaacaagataatatattttcccgaactgaaattatcgaaaacattagtggagaagaactaaaattgacagcagaggcaacttccaacggaggagtatttacgataaacacccctggttgtacaattccatacctgcatccttatgataaaagtattttagattacgtagagcagccaggaaaatatgtttgtaataatggtaccccagcattatttgaaacagacatggagtctataaaaattatagagaaatcattatccttctatcacataaccaatataaatgatctgaaatgttgctacaaagcattctggagagaggatcctcacactatggcagacaagaaaataagctacagtaatagttgtgaaacatttgttaataaaactgacataaaagaagagtttataaaagtaacttgcaactacaagaaccgtttgatttatactgatgtgtttgcttctgttcccgtaaagaacttcacggataaagtaaaagaaggtcaagacaaaaacgggtcccctttaaatattttattactcggcttagatgctatttcaagattaaattttcagaggcagatgccaaagacattaaattatttgagacaacttggggcggttgaaatgttgggatataataaagttgatgataacacgtttcccaatgtaattccagcattaacgggaaagcttgtaaaggaaattcagaagccaaagggttgctggccaaataaaaataatcactttgatgattgtccgttcatttggaagagctataaacaaaaaggatacgtaacagcttttgatgaagattcatcatggatgggtatatttaatcttttaaaatacggttttcaaaaacagccaacagattatagctttaactatttcgatagggaggctataaaattattaggaaataccaacgttggaactgttgcaatttgtcaaggagcaaggtggatatataaagttcatatagattacttgacccagttcgttcgaacaatggaagataactcactaaagtatttcggtttcttctgggagaacagcatctctcatgatgatctaaatttacctagactagctgatgatgattattattctatgttgaaatcttttgaggagcacgattatcttaataatacaattctcttcgttatgagcgatcatggaataagaactggtaaaattagaactacattccaaggaatgatggaagaaagattacctttactatttgtatatcttccagattggtacaaacaaagataccatcatgaatatagtaatttactacaaaattctttacgtttgacaacaccttttgatttacacgagacccttgttcatttattagatatagaaaatagcgatactgaagataatagtaccgataaggctagaggtataagtttacttaaacaaattagtgaatatagaagttgtgaagatataggtattgtaagtcactggtgtacatgtcaaaaaagtgtagaagttgatataaagaatcaaactattaaagaagtagctgacttttctgttaagtatattaacaagctattgtctgcttattctcaatgttcaaagttacagttaaatagtatagcaagtgcaagagttatggaacatagtaaagaaatattaggaaatttgcaggtgtcagattacatgttaagtttcgtaacaattcctggaaatgcttcatttgaagcaaccgtaagatattcgtcacaatctaaaaactacgctattgttggttcaattagcaggttaaatttatatggcaaacaaagtgcttgtatttcagattatgagttaaaattatactgttattgtacctgacgaaataaaatcgataaaaaaatatttgtaaaattattatgcaactaatgattttacctctcgccatgcgacggggatactgtggctttcctagacctccgaagattccggcctatttattataattgcaatgcgaacgttgtaaacaaaccttttgattacctgtaaacatcccatttaaacgcttccgagatgatttattatctgtctgtgaaatattcctttttttgtattctagaaaaggatcttcctactctaggtttttcgaaatattcgatttacctgttctgatgtaaataatacttaacccgttgatttgactagaaaatgctgtttgttttatgaacattcgagaag

SEQ ID NO: 6601 - DNA, 2466 bp, Diabrotica virgifera
  SmartBlast Evalue=0; Info=Sterol carrier protein x n=1 Tax= Tribolium castaneum RepID=D6W6S9_TRICA
cgatcctcgttcaaagtctgaaatttcgcttttagtacttcttaacaacgaagtccaactttcattttagtatcagtattgctgttatttagtgcatcctcttgtgaaagattatctacatcaaaatgggtcgtgtttttgtaattggtgttggaatgacaaaattcgataaaccaggcaaacgggacgatgactatcctgaatggggcaaggaagccattctccaagccttaggtgatgccaaaatcaacatgaaggaagtgcaacttgctactgctggatatgtgtatggagattcaacttcaggccaaagggtcatctatgaagtaggtatggagggcattccaatttttaacgttaacaataattgttctaccggatccagtgctttaatgttggcgaaagaattggtagaatctggtaaatgtgaatgtgctctcgctgtaggttttgaaaaaatggaaagaggtagcttatcatctaaatttaatgatagaacaaaccccatggacaaacatgttgaagctatgtctgaattggcagatatagttaatgcaccgatgacagcacaactatttggtaatgctgcaatagaacacatgaagaaatatggaactaaacctgaacatttcgccaaaattgcgtataaaaaccataaacattctgttaacaatccaaaaagccagtttcaagatgaatatacactagaccaaatcctgcaatcgcctaaaatttatggccccataaccaagttacagtgttgtccaaccagtgatggcgctgcagcagctatcgttgcttccgaaagatttgttaaagctcacggattagagtccagagctgttgaaattcttggaatggagatggccactgatctaccatccacatttgcagataaaagtttaatgaaaattgtaggatatgatatgacaaaattggcagcggaacgattgtttagaaaaacaaaccgaagacccactgatgttcaagttgttgaacttcatgactgtttctctgctaacgaacttattacttatgaagctttgggactgtgtcctccaggtaaggcaggagagctcatagatcgtggagataatacttatggaggaaaatatgtagttaatcccagtggaggattgatttctaagggacatcctttgggcgcaacaggaatagctcagtgtgcagaacttacgtggcaactaagaggcgaggctggtccaagacaagtccgaggggctagattagctctgcaacagaatattggcttaggaggagctgtagtagtagctctgtatcaattaggtttcgctcaaaatcaatcgcaggttactagtgctacatctggtccaaattcagatttggttggaggagataattttgaagcctctaaatatttaaggatacttcaacaggcaatgaatgaagatgaagaaggattagtagaaagacatagaggaatctatggattgaaagtagtgaaaaaatcaggtgaaactggatattgggtgatcaatactaaggtaggcaaaggacagatagtatttaatggaaaagacaagccagatgttactttcattgttaaggaagaggatgttttagaattattgtctggcaaaattccaccacagaaggcatttttccaaggcaaagtaaaaattcaagggaatatgggtgtagccatgcgattaatagaattacagaaaacagccgctgccaaaattgaggtacttagggctaagttataaattacgtttataggtaattttctttatctttctgtattgtgtacactaaggttttgttttatctttttgggagtatatattatataagtgacaaaacatactttcttgttttacacatcacttcctgtaaaaatattgtacacgctgtacaatgagtcctttatgtaaacaaatatgtaagtataaatacttgctctgttatctcctttttattacatatttttgttgataacttcagaatctattgaccttttgtgaaatactttcaatattttgttaacagttgaagaccagtgtaatttttcctgagatactaaattcaaatatttttgtttcaaacaagtttgttccgtaaataaactagacatgtatatcattgtatattattaataatatgcaaccttgatgtctgtaggtaaatgttcttaatgaattaatggtttttcataatcatagttccaagttcaccaaaatagcattattacaatataaatttttcgatgtacctacctatttttttataatttttttttatttttcactacttggtcgattgtactatttttatttgatggtaaataaaaaattcagatatgatataggtatggacctggttccttgaaacatatatttctgtatgttaaattagtaaaataaataggggtatttattcccactcagaagagatacaaattcatgttccactagcaaaaacagg

SEQ ID NO: 6602 - DNA, 2466 bp, Diabrotica virgifera
  SmartBlast Evalue=0; Info="Heat shock 70 kDa protein cognate, putative n=1 Tax=Pediculus humanus corporis RepID=E0VPP0_PEDHC"
accattttgtgcttttgcacgtgaagatcaaagtgttggttttagattttaaagaaaaaaaagaaaaatgttgtctgccgctcgcgcccttagcaggaaagccctcgattgctcgaaaatcactttcgaaaaagctggaaacagaaattttaaccatttgtcaaataatagatcttccctgtacgctctaaacccaaaatatgacattcaattacgacacaaatcagaaggaatcaagggggctgttattggtattgatttgggtactacaaactcatgtgttgctgttatggaaggtaaacaagccaaagttatcgaaaatgcagaaggttccagaacaacaccttcagtagttgcctttagtaaagataatgaacgtctagttggtatgcccgctaagagacaggctgtaacaaattctgcaaatacattttatgccactaaacgtttgattggtagaagatttgaagatgaggaagttaaaaaagatatgaaaactgtatcatataaaatagttaaagcatcaaatggtgatgcttgggttcagggaagcgatggaaaaatgtattcccctagtcagataggagcatttgttttggttaagatgaaggaaactgcagaagcctacttaaacaccaaagtaaagaatgctgtaatcacagtacctgcctatttcaatgactcacaacgtcaggctaccaaagatgctggacaaatttctgggcttaatgttttgagagtcataaatgaacccacagctgcagctttagcttatggcatggacaaaacagaggataaagttattgctgtttatgatttgggaggtggtaccttcgatatatctatcttggaaatccaaaagggagtttttgaagtaaaatcaaccaatggagacactttccttggaggtgaagattttgacaatgtcctggtcaaccatcttgtttctgagttcaagaaagaacaaggaatcgatataactaaagatccaatggcaatgcaacgtcttaaagaagctgcagaaaaagcaaaaattgaattatcttctgctcttcaaacagatattaatcttccctatttgaccatggatgcatctggtccaaaacatatgaatctcaaattgtctcgttctaaatttgaaagtctagttggagatctaattaagagaaccatccagccatgccaaaaggccctgaaggatgctgaggtttctaaaacagatattggtgaagttctattagttggtggtatgactaggatgccaaaagtacagagtacagttcaagatatctttggaaaacaacccagcagagctgtcaatccagatgaagctgtagctgtaggtgctgctgtccaaggtggtgttttggctggtgatgtaacagatgtccttctgttagatgtaactcctttatctttgggtattgaaactcttggaggtgtatttaccagactcattaatagaaatactacaatcccgaccaagaaaagtcaagtattctcaacagcagctgatggtcaaactcaagtagaaattaaagtccaccaaggcgaacgtgaaatggcatcagacaacaagattcttggtcaattctccctcatcggtattcccccagcacctcgtggtgtaccacaaattgaagtaactttcgacatcgacgctaacggtattgtacatgtatcagccagagacaagggaactggaaaagaacaacaaattgtaatccaatcttctggtggtttgagtaaagatgaaatcgaaaatatggttaaaaatgctgaacaatacgcacaacaggataaggtcaagagagatagagttgaagcagtaaatcaagctgaaggtattttacatgaaactgagacaaagatggaagaatacaaagatcagttaccaaaggaagaatgtgacaagttaaaagaagaaattaccaaagtcagagatttattaactaaaaaagatgagacagatcccgaagaaatccgcaaagctacaaccaccttacaacaatcgtcacttaaattgttcgaaatggcttacaaaaagatggctgccgaaagagaatcatcatcaagcagtagtagcaatcaacaacaggatcaacagcaacagtcagagcaacaaaagaaagaaaaagaaaattaaattagtgattttccataagttttatatacattctagtgtaaatatgtgatgttatttcgtctggaggtacagatttcctgttgagtagccttgatgacggaagtttatttcttttccaatttaaaacaatgcaatttggcatctatgtagcaattttatgttggaaaattatttcgagttcttgtatacaacttcctcattggactgatgctgtgaaaggcttggtgaatgatgtatgaatcgatcggttagtgtgtgttgttcatagttcgctatttttaccgaatgtgttatgaatttctgttaatataaaataaatt

SEQ ID NO: 6603 - DNA, 2456 bp, Diabrotica virgifera
  SmartBlast Evalue=0; Info=Prolyl oligopeptidase n=1 Tax= Tribolium castaneum RepID=D6W775_TRICA
accaaactcttcatgaataaatctggataaccaaaaattaatatctttatttttctctttatatttctttcagttcaattcatgaatacatttttcaaaaatagggaactcttctctatatattaagtcaatattgcatgtgttaaaattttaggaatatatttctgttgattttctccagaagaatgtcttttaaatacccagaacctgcaagagatgaatcaatcaaagacacctattttggaactgaggttaccgatccatatcgttggttagaagatccagattctgaggaaactcaagcttatgttaattcccaaaatgccatcactcagccttatctggaaagctgcccacacaaacttcaaattaagaaaaagattacacaattgtggaattatcctaagatgtcaaccccatttagacatggaacaaagtattaccaattccgaaacacagggcttcaagatcaaggtattatatatacaatggataaattagatgatgaagggaagatatttttaaatccaaatacattttctgaagatggtacagttgcattgtcaggaacatcattctctgaagatggcaaaacgtttgcttatggtttaagttctagtggatctgactgggttgaaattaaatttaggaacgtagaaacgggtacggatcatgatgaaatcctcaagaaagtgaaatattctccaatggcttggatgcatgataatataggtttcttttatgggggatacttacaccaaactggtaagactgatggttctgaaaccaaatctagtgaataccaaaaactttattatcataggttaggaactgatcagtctaaggatgttatggctgtggaatttgatgatcatcaacttagaatgggtgctcatgtgagtcactgtggagactacttaattgtaaccccaattaaagggtgcaaaaataatttattatatttctcaaagtttaatagtactagaacaattacaggcaaactagaccttactcctatagtcacatcattcgaagccgactatgagtatgtgaccaatgtggacaccaaattctatttccgtacaaacaaaaacgcaccaaactataggataatagttatagatcttgaaaatccagctgaagataactggacggacctgattcctgaacacacaaaggatgtgttagattgggctcatattgttaacaataatatgctggtagtttgctatctcagggatgtaaagaatgccatgagcatttatgatttaaagactggtaaaaagatccacgatttccaacttgatgttggaagtgtttctgcaattacagctaaacgttaccataaagaaatgttttacagtttttgctccttcttaacacctaacattatttataaagttacattcgaagatgagaagatcaaggaaaaaatgtggcatgagacgaaggtgggagattttaactcttcattatatgaaacgcagcaagtattttataaaagtaaagatggtacagagattcccatgtttatagtaaataaaaaaggtttagttaaagatggttcaaaaccatgtctgctgtatggctatggaggttttaatgttaaccttactcctgcatttggggtaacccgtttagtatttataaataactttgatggaatttttgctctggccaatattagaggagggggtgaatatggtgacacctggcacaatggtggccgttttggaaacaaacaaaactgctttgacgatttccagtatgctgcgaaatatctagtcgagcaaaattacaccacagtaaataaactgacgattcaaggaggttctaatggtgggcttttagtggcagcttgcattaaccaagctcccagttgttcggagcagccatttgccaagtgggtgtgctggatatgttgcgttatcacaaatttaccattggttatgcctggaagtctgattatgggagctctgaagaagaagatcagtttaaatatttgtataagtattccccattgcataacattcatataccacaggactcatctcagcaatatccagcaactcttttgatgactgctgatcatgatgacagagttgtgccgttacattcactgaaattcatcgcagaattgcagcatcaagctggtaaatcatcgttccaaacaaacccgttgatgatccgtatagagacaaaagctggacatggagcaggaaaacctacttccaaagttatcgatgaagtggctgattatcttgcatttatctcgaagagtttgtcgctgaaatttattgaataaaatcaaacaccatcatgtttttaaaattttaaatttgtaccttttttgttgccatgtgtatctaaagtctttgtattttatatattttttcattatatttataattatgtaacatgattgataatacacacaaatgaataaattttgtatg

SEQ ID NO: 6604 - DNA, 2455 bp, Diabrotica virgifera
  SmartBlast Evalue=1E-28; Info=CG9896 n=4 Tax=melanogaster subgroup RepID=Q9W1W4_DROME
cgaagcagttgagagtgtagtcgtttccgtatcaacacaactgccacgtgactctcgtaacttcaagttcctttctaatatttttaattatttatttacccgtgtgacgtttagtgaaagaatttagcaacatgtataattttgttaatgatattaaatgcagcttcgcagttttatccgcactgatcataacagtgtttactaccaaagtcaaggcagaagcatgcaatttccagaactttatcgaatgtgcaaaaccactatcagtattaacggactcagggttaacattctttaataatagacaggacttggagcaagtgtgccctaatcttagaacggccattaagtgcatccacagtttcacaaggcgctgcatgaagaaagaggatagccagcattttagggaagtgtttcgtggaaccggctcaattgtacatgaactatgcagaaacggtcgctatcaagaagaatatttaagacatgcgccttgcatgacccaaatatcagctgaaaatgaaaaatgcttcgagacctacaccacatcaatggctaaactcaaaccaaatacatatgaagtcgaggtggacgctgaaatggttgatgtcaccagtgaattaaagaagaagagagccatcgctgatgaagggatcaagaacgtttgctgtgctttccaacagtacatggaatgttcaacaactgctgtgagggacaagtgcggagacgatacagccgagttcagccgaagattcttaaacagaatgtcggcctcaatgttaaacgttcattgtacagaatacggaaagaggcaatgtggattagaagcaccaatagaagcgtggccagcaagctcatcatcatcctaccaatcagcagtagctctagtaacgtcactgctaacagcacaattattattgcggtaatattctaaaaggcatttagaatggatgcttaaaattgtgatttttcgaatagaactgatttgaaaattgtattttttaagtaggaaattcaaatatgaacgtgtcatagcaattttcaaatatacttcattctcattttgaagagtttttacgaaatatttattctttatttatttccgctaacgtgtataccaaagagcataatagcgagataatcaaaatgagataacatcaagattagcttgaagaacatggaggaatcgatagaaaatctagaccaaaattagttttaaaaaagttatcttgaaaaatttgggaatttagttcaatgtttccgatattgattactgtgtgaactaaataatttcggggaagttttacccactaccattaagttaatgggtttctaaaggtaattttagatagaaaattgtatatctggtgttttcgttaaaaacggggcgtttcaagaaatgtagacatttgtcagttaattataattgtcaagaaaatcccagataaactaaaacagtaaccaaactacttattaccaacatttttgtctgttggtcattttctaaattacagagtaaaattttctgaaaatcaatcgttattttgtgggagaaatagattttattacgattattccaaatttactaaaaataaacttaacctataatatcatgggtaaattgttatacaattcccgatctgttttttgtatttgtttgtggtcccatatgttctccaaattcaaataccgcagcattgcaatacgttctatgtagaaggaatattatataatatccacttaactaacattccaaactggttttggatatttaaaagactgaaatgataattgttcatcaaaaatgttaacttttgcaaatatattaatcatagtagtatttaactagtgtacaaagctgaaaagtattggtgtaattttaacatttttgtatgtcttttatcatatatgtataagaaatgatcttaagaatcaatattggtgatcttgaaactatattctcatagttttttcagtaactctgtgttatttattgtatcatttagtaaacaaatgttgtgaaagcttgtatagtatttattctaagtgtgtcgcatgaaagtatgaatcttttcaataattttgtatttgttagtgtttctaagactagttgacatttccattatttaatattttgtaacttcggttagtatagagaacaaaagtgaagctgtattaaagagtattttagcactgttagaaatgttactagatcttcactggatctgagagttcaggtcaagtttgtatacatctcaacatagtaccttactgttgtttcgttcaaagtatgagttcctcaggatcgtgactttgatgccaatgtaacgctacttgccaatatattaaaaaatatccgtagtcttgatttgaggaattcatatatttggaaatgcaccaaattcttggcagtattgtcaaattttgttattttttaaagattaaaaaataaacattt

SEQ ID NO: 6605 - DNA, 2454 bp, Diabrotica virgifera
  SmartBlast Evalue=5E-16; Info="Ornithine decarboxylase antizyme, putative (Fragment) n=1 Tax=Ixodes scapularis RepID=B7QIK1_ IXOSC"
caattatctgttatcttggggtgatgaaagaacccgtgaaccagaaaatatttcgacattgataagcaagtcttcgtgcgagatcattttttgattttttaattatgtttattagtgcctctgaggcttttagttttgattcaagtactgaaagtagtggtaatagtgacgaagcaatgcctgctataatgagtagtacatcgaattcgttgttaagtagtaaacgttccgccagtagcgcgtccgaggccgattgctacaacatgtctctgggagccgggcctctgtggtggtcctgatgcccctggggaaaccaggggcaattcgccgcccccgctgcggctgactttccgcaccgcccgccatccctgggaggcagtacttaagggacgcacgctctacgtcgcccttcccccgcaagtacttcccgagggatctcgcgaggcgttcgtcgcgctgctcgaggccgccgaggagcaacttaaatgcgagcatgtcgttgtggtattcgccgccgatcgaccggacagagccgtattagtccgaacttttatgttcttgggctttgcggtattgtctcccacgtctccgttggtgccgccatctatggccaacggcaacgtatgcatgctctacaacatcgaatgaaaagctccaaaacgaaagcctcggacgtcgcaagttttgttcacgtttttaacctatttcgagtagaaattcgcaagttagatggcgctgtacaataattccaatatttattttaaagtctagcaagctatctaaagacgggatcccatggagtatggcgtggcacacttcaccggtttgcgtcggcaaagagaaatagaaaatacataatagtgaaaagaaaagagaccacgttactgtgaaattaataaatatttactttttgaaaaaatcgattgcaccatcttgtcccctagagtctagagtatcaaggtacaccaccagtgttggcggtagatattttagtaggttggttaattcaaacaatgagaaaaattacaacacaccatcgttagaccacaaaattatcaactttgaactgtgctcatttaccgacaaacgaccggacaagtcacccccctccgctcaggccataaataaagaatttggtctttgttcaagttcaaggatagtaaatcacacgttctgagagaaataacgctatttcacgttgcgctgttaccgtatttagttttatctttttctattacatattttttgtttcgcaaggcgtgccacggcacgttctgttggatcccagcttaagcgactcgttaatatttcataaaacaagaccatttcataaaacaggtaaatcccttgtttatggaatttcacacctagaacaacagcatcccactcagctgaatatgaatgagtctcttagatagcgtgttagactatacaacgactaaagaatacgctgcattcgtttttaaacttaaacttcaaatttgtttttctctagctgtagattttaagtatttctgtaacagtaaaatttgagtaatttcaaatgatacattaaacgatctaaatatttacctatataatctgtaatgaaattgtacaccaccattgcttctccttttatgctacattttttgaaggagttatagtgcttcaactacatattttgaagagattcatttgggtttactttgttttaacccgtttcgtcataatttttatatttttttgcatttcccttatgcttccttcagaaattcgctcttttaacgttattgtagttgcagtagaacaaaataatttaaaaatgtttaacaacatcaaaaggacggtcggtactgaagaactattttaggttagagaagattacccttgaagaaaatgtagcagacaatggttttaacttgttttgtagcttttgtgatgtttctctttaaatttaaaacgtaaacacagtatctagattcgacataaatcaaaacttttatactttgtgttgtgaaaatttaaaattgttcaatttaatgtttgtgttccactgggttgttttattttattacttatttttgtaaatttttaaccgaatcggtactgtgtggtacattcaaagcttaggttaagtgttaagtatagtatatgcttatgtagatatccaacgaatgtgaacaaaacaagacgaaaaatactagatttagtgcggaaagtttattaagccccttcaacaaaaatgcgtaaaataaaaaaaaatgtctaaaatgtcgaaaataacaaaaaaaaatatgtattacggttaattattatttttaagtatatgatatcactttgtttataaatattcataccaatatctgtatcgttaagagtggagattagaattaggtagttcttgtgagttatactttattttcagtgtaatactatttcttacgtaataaattagttaatattaacttaaaa

SEQ ID NO: 6606 - DNA, 2450 bp, Diabrotica virgifera
aagaaataaataacataaatatgtataacttaattttaagtgtcttaaaattatttaaaatacatttgacctatctattaatactttcgatacgagtattatctacgatactacatttaaacaacagatgatctttaatatctcaaataggagtaataatctcttgtagcttatagataacccagcaagaacataaatatcacattttgacaaaaattgcaaagttatactcatatttttatgagaaaaggattatgtagaatttcctatatagtaaatgcacgatttcaatgctccaaagagtatagagcaagtataaagacaacgtaatatacttagcaagtgcacaagtacatatatgttgggtcagaagaattgtgtcctagatacttggactttacaaatgaaaattccgactatgcattgactattaaaaatgaagaacaaactggctttgatactggattgatgttttttcaggagagtaaatataaaacattgactttcatacagctaaaatcatttcaaagatatgtgatgttttaacagtaggctacaaacatgccattcaaataatatcgtatcaatctattcctacacaaataaatcacatttttgcattatttatcaaaaatttcggcaaagaaacttttaggctgtaccacaacattccgcatataactctctccagaattgtatcctttctgcttcaacattaccagtaatactgattctatcattaatatcaaaaatatttgaaatactttcgtcttttacaggactccacacaacatgatcgaggagttctgtaggttttggtgtagggttaccgcattcggcgaaagtggtccaaggcttcacgaatttttgtatgtttctgtcttccacgcttcccttagcaatggtaggagctaggaaagtgctgaataggtagaagatgtcgtcagcgtgggagacgccctctatttgcctaacaggaagtttttctcttagggattggaagacgttcttcatactggatccgccggatagttttgtaagcaacgaaagagcaagcattgttttcaaatatttaacttcacagaattttttgaagaaatttaagttgctgatgatgctcattctgtaaacgtatactggagctttgctgtggcgctgaagtaaggtaatggttttctggataccgtagaggaaatgtacatcgcttaccatcctgtatctattgtttatgttcttttcagaaaggtctttatcttggtagtaaaatttttgcattttttccgcaacttctttcgccctttccgttttttctggaatgttaaggtcaaaaggaatgtccctttcaagagtctcgggaagatctgcatctgttctagtttttctaattaattcgtacatcaaaccttccatggaattgtaaccgattattacagggacatgatgatgtcggccagctttcattatttcttctgggtcttctgttaagaaggctccttcgtgggggtattctacaactgggatgaaaggtcggacgatgctggcgaagaatgaatcttctattttaaacgaagctgttactaagcttcttgtgctggctctacaaagtttctggaacaaagttttttcgtctacatctttataacccatagctttagaaattacagcaaagtttcttcttcccttagcccagggattgaaagcacatccgctctgcataatcgctttatggaagaggcctttcgtaagtggagaaacaagcaagaaatgaactgaggcgctaccagcgctttccccaaatattgttacgttgttaggatcaccaccaaaattagcaatgtgtttttgtatccattttagtgccattgtctgatctttcaagcctgcatttccgggtacacccaaagattggtcttctagacttaagaaaccaaatactcccaatctatagttgatacacactaatacaatatcaccagtcattaaataattaggacccacgtgcatgcttttgttggagccatatatgaagccgccaccatggatgaaaaccataacaggtctctttttcatgttcgggttatgacttggaagctctttggtgtatatattcatattaaggcagttgtcttcgttgccaatgtggtgtttgaagtatatatctaacgagggacattcccatccttctttggtacaatcctttactccttcccatgattcaattggttcaggagccttaaatctaagttcccctatgggtggcttggcgtagggtactccactaaaactataaaatttatcaccatggtaatccttctgggctttgccccgaagcttgccaatttccgttgttaccactaattcttccgacatgattttaaagcaatgtttaccggctcactaacgtcaaagttaagtaaaaactgtgtttgagatctcgctcgctatgtatg

SEQ ID NO: 6607 - DNA, 2445 bp, Diabrotica virgifera
  SmartBlast Evalue=1E-140; Info=Ubiquitin-like modifier- activating enzyme 5 n=1 Tax=Bombyx mori RepID=UBA5_BOMMO
tatggtaaatgagcttcaaaaacagttttttgtggataatttttggaagacattcattaactttattaaggtgtcttcagatgcataccactcaaagttaaaataaaaattcaaaataacattaataaataccattttgtagctacacattgtatcaaaagctttttaaacgatatactgaggaatttactctaataatttattattaagatcacaaagatgtgtcagttagtgttgatgataactaaaagctttgtttgtaaaatttaccatcctccaaataaaaataattgatacctaacacaacagttggagaaatggtgaactggtcttgtatatcaagctcttagttgggcatttttacagtaccaattgaaatataaatattttttaataatataacaaaaactaaaaaattttaataaaacgaacaacagttaataatacaataaaaatacagagtgagtcacgagtaatgggacaaattataactaacagaagactgttgagctcttccattcaatgtaggacatctgcaagtgccctcaattttaactttataataccaggggggcgaattttcgccctggcttgcatatttctattatttttagtgtacttacgaggtcgtcctcgtagcacatctggaaggtgaagaacctgtggaagaaccgaattcacaacaactgaaaagaagaggaaggtgccatatttgcccaagaaagattgcaagtatcaaagcaaatgtaataatattgtatttccatctcacagcatgaaaataatatgtaattaatgtgaaagttgatttgttaactcaaaaatttttgaataaaattatatttttaatgtttaacttatttctagtaatagtcattggtaaaatgtcttcaacgttataacatcttaaaatattactgtttttatataattttaacagtaattatacaaaaaaaacactgggatgaaaattcgcaccacctggtacgtttttttaaattgacttgtcataatggatgtttatataaaatagctctagcataatgctcattctctctccatccggagtgactgatttataaataaatatttatttaatttttgcagctttcagcactgtacaattattattaagtaaattattctagccattctgactcattctgtataattagaccaaaaaatttttcgttaataaatagtggaatgatatttttttaacaactaactattaaatatctttcaattttgacataagctcatctaaactaatttcattggctgctgtagcttcttcacattcttcaacaacattctggttaggtaatgtataagccaattgaactccttgtgcaatatcgacctcttctttaacatctaaactctcatctactaagctaataccccactcattatcttcatgcacaggcttttcttctttagcctcaacagctatttctggtttgggttttaaggcaaaatctcgttgtcttgacctacagtgtgaatcttcacagtttggattaggttttagactcattgttgggaagaaatctgttaatgcactgtatcctaaataatttgtgacttggccgaactgaagaagatatttcaaggtattttggaccagaaaccctgctattatgcccatagtggttggaagactagcagcacataccccatctctttttaatgtgctctcatctatgtttgatgcaacaatcaagggtggagcacaagcaaaacaagctgtttctccaggcacaataaattgaatatgtccagatacagcattctctgacactccagattcaaaccaagtcaaattaaattcattacaagcagtattaatagcaaatctagcttcaaaattatccacacaacttaataccacatctatagggcccccagtcaaactgcttgtcctcaaaacttcagtaaaattatcaaagttttctacagtagtaatattgtagttgtaagtatgaatgtctacatctgggttgatgtttcttaaagtttccgcagcagcttccactttacttaatccagactgatgtggctggaaaaatagtctattcatgttggcaagttcaactttatcataatcaaataaaatcagtcttccaattccacatctggtaagcatttcagctgtaacactgcctacacctccaacacccacaacagctactgtataatctctgatcttttcgtagttgttgactatgcccatacgtttaagagccatgaggcgactgtagggatttgaatctatgacttcagatgacatttctttaatcttttgccgaacattcttctgtgtagcagcttctaatttttcttttaaatcttttatttgagctaacaaagcttcttgactcatcttgttatttaaataaattctttaacatatgtttgaattagatcctatataagtgtcac

SEQ ID NO: 6608 - DNA, 2446 bp, Diabrotica virgifera
  SmartBlast Evalue=1E-116; Info=Anaphase-promoting complex subunit 5 n=1 Tax=Harpegnathos saltator RepID=E2BNQ6_9HYME
tttataaaatgtgacaaaacgtttacacgtattttactaaagtataaatgttttttcggggacgctcttcttccaacgttttaaattccgctgcgtaattgtttcttcgatttttcaaattcagccagtggcacaattggctctgtaatattagaacatctgacaccctgtagtaggcctccaccctgagaaactcagctttacacctttccaaagtatctgtacatttttcgagtaattttctcctcttcttgtcgtccagtcgactagaatccgctattacacacttaatgtataagaagagagctctggccctgtcaaaacatcctccatgtgcgagaatctgtaccagacatttatccaaaacagctaaggcttgtgaaaccatcccgacgtgaagcatacagttggccaaatgaagatggattattgctgattggtagtccaattgagaagcctgtgactcaattaggcaattgttaagcaccgtcataatgcccgcagagatactgtctggatacgtggtagcaaactggatttccatcttgagaactttggctcggacgtagtaatatctgtcactaaatttgtacgtattatcattctcgtactggttaagtaaagtttcaacgtaagtatcagcttgtacgtagttcctttgatagaaatgtacctctcccagtctcagatacccctcccacttatcaaacaccatgatcttttgagcagcagcttcggcttcttcaaattgctcatgatacagagacatttggtagaggaacatgttctcgcagagtttccaaatgacggagtgcggttcattgggaaatcttgatttagcaaaattcaagacacaatgacccaacgtatactcgccttcaaccattagattattggcaatattacacactgcaaggcagaatccttctccatagtaacctttactaggcgtaagagagtccatgttttggtaaagtaggagctggctccaaagagagcacatctcgtttttgccatagagctgccacagggatgctttcattgcataattgtttgatgtgaggtccttgtagttgtgttggcagtttaacatatcacttcggcctaaagtctcaaatatggcgtaggttttccccgtatttaagcattcgtactgtccaaacgtttgcaatcctagtgaagcagtgtaactcaacttcaattcggaactcttcagtatacaatggatgatcagtttgtcttcgttcactgtagtaagtcggtacagccaggataaagcatgttgaaggcaaacattgtcgttcgcttcttgggatatcttgatagattccctaagtgctgctagagcttcttcaatgtgtccaaaatggtagtgcaaaattgctaaatttagtgcagcaaaccgatgtctcttgcttttttcatcattatagcatttaacatctggatcaacgtttctatcgaagcaatggaataaactatcaactgatccacagtattcatccacacgtagatagttcaaataggaaagaaaatgcgctcctgacaaatctggatttgacttcaaaatattcacaattctcttctgtaattctggtggaggcagagctttttcttcatcattagacaacaaagcagcctgggtagctatgaatagctctgcctgtcttctagaccaattttctttagtatttaaccaattatctgcaggttcctcatccgtttgtatatgtttagcacttttttctaattcattgtagtatctttggaagtcctcgtacactttcgcaacttctgagaaggttagtttctcaaaaaatactataaatctccttaaataataacctgcaatactagttttagctatagcactattactgtttaggggatcgtcagatttgtccataattttcaataaagtatccacaatatccagtaaattgccaattccttcttcatttaatgtggccaatgtttgatcaaaagattctatcaaactatcaggtatcacatattttttggatgttaataatttcctcagatcaaataatggtaggtcagggctttgtattaatcgtagagttaagtcgcagaaatctcttctgtatttgcacatgagcgcttgatcttccatctccttaaatttttcatcatctctgaagaggcaaaagcttttgatcaatattgaaactgttagtctatggggtgttattaaatcagtattcacttttttggtggttggtgtagtttcttttgaagccatctttttatttgtttattatatcactagcatttaaaactaaccgtggctgtaacagcccggtaagggtgtttataattttaaaatcgtttatttatatctttgttcactttggcgcataacagaacaagacataaccttttttacctttgtttaaaaaatggtgttgacaacatcctgtcaagc

SEQ ID NO: 6609 - DNA, 2427 bp, Diabrotica virgifera
ttgatcacctgcattctgcatacattatgtagttttcggctgtagttttgttgaataaaatatattacatattcaaactttacgttttacatgattatctgatattttgaataatgctgccatctggtagaagctagtaaaaaattatatttacagagataataactacaaatttaaatacagcaaacgacgttgaatgtgcactcataccccctcccacatactttcctgtcatattccaacgtaataagcaaagacctctttccctcttctctacgacgtagtttctagatgttccacttggctattatcagcatctactgagtttagtccgtgactctcgaaaaaatgctctgatgctttgcctgcaccattataggtgtatcaaccatgaaatttcttcaggcctttatcttcagctcagcagggtagaggaaaatcaccaattatggaataccattttgttttggggatataaaataatatgtttatagaaatgaaaacaatttaatgttatgacacatcagtcatatatttttatgtagtaattaaaatccttctattaaatatcttaattaacaaaaaaaaatcgaacaaaaaaacaaaattccaaatgagtaaccaaatatgcaataggtacccttatatggaatataggcataaatcaacatatcaaaaacaaaatagacataaagatctgagatcaaataaatttaaataagaaaattgtgaaaaatgaaagaagtagcttaattcacttgcagacatcacagatccatgtacgaaactctggaccagcgcaatcataatgagcccacttcacttaatccactattccataattagacaccaacgactgtccatatttggatttgtacattagctcaaactagtatcaacattttttcaagtcgtaatgttttatttacagaaggccataaaatatcaaaataaaggtactattgatatacgcaatagcataacaagtctgtattcattcataataaccaataatactcgtttaatatatttacctttgaaatgttctgcgagacgataaaacaaaacgtgcctgtcagacacttatcgttcgcgcatctgacacagaggtgtgaatactttaataacgagagcgactgaaattgtagtgcgcttccaactttattttcggagaaatccaggaattccatattaggacactattccatatttggttactttcttctactattgttagaggtgtgaaattacataaataagggatcatataataaaagaggtagattccttgtttatggaattctacaccttgaacaatcacacccctctgagctgaatattaactactctcttagacaacagctagtactactatacatatatgtattatttatatgatgcagattttgaaatcttctttttacattgtttgctttgtaaatgatcaatattgcgttaatatttttgttttaaatcaattaagctatttcaacaggccaccaagttacaaagtttcctaacaaaaaccatacaacgtcactttaaaaacagggagcaacggcactattcatgtcagatttctttcccatttttggactttcagagaccggactattatcgaaaactatgcagagccgtcttcagagaatttgtcgagatgtattaactttgtacgaagtacaaattgctcatctggaagaaaagtgtcacaactcaaaataatttttttcagagagacaaaaatggtgaaaatggagaaaaaaagtgtaagaagcaaaccaaaaaaactatgatgtctgatttaacaaagaaaaaatataaaaattttgagttatgtcgcttttcttttaaaaaatttgttctattttttaaatattaaccaaaatacctaaggcacttctcgaaatacaacagtttccgtgataaataacgatacgttcacgtcaaacaacagagtgtcataaccccaaaagtgtcattgttccggaataaaaatattccttttactgtcaaatgaataatgacacttccgtcatcttacaaagttggaagttaacgtctatgtgacacgtttcctggtaaaagtataggattttttgagtcaatttaacaagataactggaattctgcattgtttgagttgtgtcacttttcttccggacgagcgaaatatatgcgaggtaggtcgcctttattgtgtttttttttacaaaattaaacaagatgaaatgttctaaagttttcggtataaataagcattgtacaggtaacagaaattaactggattttttactgtatgtctagtggatcttttaaaattatgatccgtttaagtttcttgataatctgttgctctttaataatgagattaagtccttaaacattttaaatactatttttaaatatacttatagacaaaatatagtc

SEQ ID NO: 6610 - DNA, 2434 bp, Diabrotica virgifera
  SmartBlast Evalue=0; Info="SEC63 protein, putative n=1 Tax= Aedes aegypti RepID=Q0IET8_AEDAE"
aaaagtgatggcggttcttcttgatgtcatttaaatatttttgacacgttgtaatccagataattaaaaaaaaagtaaaatgggccaaaaatttcaatacgatgaaagtggtggaacatttttctatttcttactatcatttttagcactaattttgattcccgcaacattttactattggccgaaaaagaaaaagagagatgttcaagaagaaatcaaggaatgtacatgcacaggatgcattttgaagagggaacatttaaaaaaatcagaaccatggaggggccctaaaaattttttaatcaaattaataatagttgttggatgggtgatactattcttattagcttataaagtatcccaatttgactatgagatgtcaaattttgatccctatgaaatattagggataccacttggtgctagtcaaggagaaattaaaaaggcttatagaaaactgtcactaattctccaccctgataaagacactggtaatgaaaaagagtttatgaaactaacaaaagcgtaccaggctttaactgatgatgaagccaggagaaattgggagaagtatggtaatccagatggacctggagctatgagttttggaatagctttaccatcatggattgttgaaaaagaaaatagtgtttgggtattaggtctttatgccctcgtttttatggtagctttaccaataatagttggtacttggtggtatagaagtatcaaatatactggagatcaagtactattagacacaacacagctatattactatttttttaataaaacaccaaatatggctctaaaacgggtgattatgattttagctgctagtttagaattcgataaaaaacataactctgaaattgtggaaagacagtctgataacgaagaagtcccacagttgattaaaaaacttccgaatttgagtgagaaaaataaagagcgtccattgtgttacttatatagcataaaagctagagcgatcatacatgctcatttaagtaggataccattaaataattttacgttagaacaagataggaggtacatagttggcaaatgcccatttttggttaatgagcaagtcaactgcgtgaatcaactcataattatggcttatactagacgaatccccaaattgcctcctatagaaacaatagaaaattgtatgaaattatcacctatgatagtccaaggattatgggaattcaaatctccccttttacagctaccttacataaacgatgataacttaaagtacttcatgtcaaaaaaacgccagattaagacattacagcaatatgcacagctgaaaggtgaagaaaggagaaacttgcttcgaaatctaaccgatgatgagtatgaaaacgttatgaaagtattaggagcaatgccttatgttgatttccaaattcaagttgaagttatggatgatgaaaatccaaatgaagtaactgctggtgctatagttacagttactgtgactctaatcagacaagatatgagcattttgtttggagatgagtctgccaaagatgcaacagagattaccgaaaacggtacggaagaagtaaaagaaggcacaggagacgagaacgtcgtaaaaaggccagcgtggcttaaacagaagaagagtggtaaaaaaacgaagaaatcaaaaccagtcaataagacgagcattacatcaaaaccaaagactgaagattctcccaaaccagcagccccagttaagaagaaagatacttccaaagttaagaaagaactggacgatgaagagactgatgaaacagatgaaagcgatactgagaacatcgaaaatgataaatcttccggagaagatgaagtagaaaataccaaatcaaatgatgatgatgaggaatgggagaaattccagaaaatccacgacagagaaaaatctctagaaggtaaatcaaagacttcgcatagtgtacattgcccctattatccttatgacaaacaggaatattggtggacctacatatgcgatagaaaatctagaacccttcttacagcgccttatcatataactagtcttgtagatagagaagttattcatctaaagttcactgctcccaactggccagcagtttatactttcaccgtctgtcttcgatctgactcatacataggctttgatcaacagaaagacatcaagttagatgttaaagaagctccagcagaaatcaaagagcatccgcagtgggagttcgaggactccgaagaagaggatccagcagaaacgaatgacagagaatcggagtatgccactgacgaggacttacccgatgattaagcgataatattttttatattttatattgtttttgctttacttaaggatcaactttctgaaaaaaaaaacagtttatgtattatttgaaatataagaagctattacaagtgt

SEQ ID NO: 6611 - DNA, 2420 bp, Diabrotica virgifera
cagttttattaaaaatttaaaaagtactaatatcaaaaacgctgacaaaagtggtatctacaaaacaaaatttaatcactgaccaattttaaagaatgatagtggtccgatgtgacttagatttacaatccaatttacgcaatttcaggtttctagaatgtaatcaatcagaaaattgtccaataatataaactaatagataaaataaaacgttattaaagcataggcgcaaaatgtcgcctgtcaaaatgttcaatgtgttttaaatgtattcatttccttcgaatcccgagaaaactaataaatatttttggaaaattcaaaagcggaatgaaagaatacatcactactgagagccgaaagtccctgaaaacttctataatgtttattttaataagttacaggggtgaaaatgaaagcgaaaatttagtgtggtttttaattgccaatatttcattcaaaagaaaaaatttatttattttaagggactttcagccctcggtattaacgtagtccttcattccgcgtccaaactttccaaaaatacttattacttcttctcaggattaaaataaatgattacattatttaaaacacgttgaaaacattgacaggcgacattttgcgcctttccccttgacaggttaatattagcttaatcgaccattgctccagttttgcgacgctatatacataagaaaacggtaaagagaaagcatcaaaattagatgcaatcagaagaactgccaaacaggaaaaactagaaaaagaagatcgaatcgacaatatattgggtttacttaaagatacttaaattaaacgctacacaaaatcaacacctaaaacaaatgggtaacttaggagaaaaggatggatgccaataaaacaaatgccaaaattcaaatacttgggcttcaggataacagacaaactagacgcagacgtggaagttagaactgggattaaagttttataaatgacacgagcaacttttctaaagataaacaccttgtttaaccatcgacatctcagaataaccaccagattcaaatttgtaaaatgctacgtgtacgtgaaaatcgatacaattgtgattcttatagtttagagtaggtgcgcctatgtattcaacaaaacatgttcttataccgtctctgacagtataaaagtccgagcagaaaaatccattagggcattctctgtgtgttgaacagaggataactaaccatcggaataggtgcgctgaacgtattccgaagccttccaaaccccgtcgatttggtgagttaagcgaaatcaacaaatccttaccctatccaatggctatgtgtgttaaacgcattatctttccatctgacgtgttgatccagatatctccttcctaatacattgatttcacgttgagatataaatgcgactcctaattaattctcaaaatcgttggtttattattcattgaatatcgtcacactaacctgaggtttacgaaagtcctatgcacgaaaagttaattattaagtaattaacgataattatcttttcttttatatttttatgaatttactatccgaggttataacaaaatgaagcgccttgatgccttagaaatatggatataacgacgtatgcttaaaatatagtatgtacatcacgtcacaaatgacaaagttttgagaagaatgagaagagaacgacacaagatatatgagctcccaaaactaatcatagaagcaaaaatagatgatcacagaagacctggctaaaggttgtgttcctggttgaagaaaatcagtgatttgatatgattaaattaacatattatatactcctgagaacgacacaaaatggtacactgttcgccaaaattttgataacctcaattgatggagacggaatgtgggtgtgagttttgttttatggagctggagctaagccaattagccaatggagatggtagttaaagaagatatacataatatggctatttcaaaacttgttgtgataattttgcaggcaatgatttattgtgaaagaatatacataaaattgatatggtataatgtagaatgccaaaattaggaaacaagtaataacgcctccttacgtatttatctctatatcactatgaacagttctaggtacaccgttgtaaatatattgtaaacattattttcttgtaaatatatctgatgtgttacagatatgttattgtcaataaatattgtcaaaaagtttaaaacttttacgtttatgtatctcaaactgtactcatatggtttcaaattgactttattatatgtataatttttattgatattaaaataggatctaaaatacttaaacgtacaatttcagatactggttttgcaattttaggtacattttgtgaatttattcttaacaactttaacacgtgataa

SEQ ID NO: 6612 - DNA, 2426 bp, Diabrotica virgifera
gccaaagtgttcaatgactcttttatagatatcgatacatcggggaacatcggaatttttgaaaaattcatattggacttcagaaaaaagttccacctgttttttctgatcactatcttcactcgtaccagtttcttctgcagcaggttcagtgacttcgacgacttcatcttctttaatttctataacgtctgatgcgactttactcttcttttttggaacactgtcttcatcatcgtcggaatcatcaatttcgatgacgggaacactaacagaaactatttctaccgtgtccgacgagctgggggcagcttttttcggtggtcgacctggttttcgtttagttgtggtagtctttttagcagttactttaggacttttctcatttattttctttttttctatacgatttaaaactgaagatttttttttgctctcatctgaattcttatctgctggttgtagtgtttgtgatccatttgattccgtttcattcgatttcgattcagatccattttcgggatcagaaaatgatatatttaaattttccaataatttttgaaggtacgctttgctgaaatagtaacatttctcttttaattttgtataaaagtgatctagagtgggaacttcacgacgagattgaaaatcggttacaatgtttttaaaaaaaccttcacgtaataacacctttacttcacgcggaaatatcatcatggttttcactgttttcttgttttgaatcgactttttcaacagaacattttcgttggacggtttatctagcatttctttatctgttggtggagtcaccgctggacttagacttcgtatatctacaactgatatttgtggactagaacggggactgtccactttcgtcgttggtattagttgtggactggaacgcgcactatctactttcttcgctggcattagttgtaaactgtctaatattggactattagtcccgttagtatttaatgtttgattgcctaacttttcatgctgaataactgatacagattcagtttggttaaccttgtcttcaatttgtaccacaggtaaatcggctacttttattattttaatatctttagactgatcaatgtttactttaggacaatccgttaattttatcagtttagttgttggtgaaataatgtttgatgtatttacttgatttggctcagtctttataattacagtactagtggattctttattgggtatagtttggactatagtcgaaggattgattacggtcgaaggaattttgactataggcgaagtatttactatagttgaaggagttttgactatagccgcattattaactgtagtcgaaggagttgccagacttgaaagagtcttggttctatcgtctagatccgtgtaaacaatacgtagtatttttaaccaatttttaattatatctttgcaatctgaaaactgtgattttttcgtacaaaatattttagaagattgcacatgtttataaatgtaatccagagttggaactttcttatattctgcaaagttgatctgaactgatcttaaaatatcgccgatagatacgtctgagaatgattcatgttcgctttctagttctagtagtattctaactatgtcagcatttaaagcaatatcttgcacgtttggatcatcatttaagtcgcttggataatataatatagttaaatgatccaaccattttgcaagagtcttttttgggaatgcagtacccaatctctcgactagtttttcataaaagtagtctagaggggggatgagacacggataatgaagcgttttatttaatgttgtcagatttggatgatctggtacatatttcaccatcaaacgctttaaccaaacctctacagtgtctacgctcaaatcgcttcttgctttacacaatgcttcataaagtttactgaaaggaggtgttaacttaaccctaccatctcctctttcgatatttctgataatctgtataatttcaccatctattttgtagtaatccgcgttcagcttttttaaataatccgtcaaacctgcgaaattggcttgatcattatcttgattttctaatggatcaaggtcttcgtattcaaaaacgattgctgattctattaaccattttcggacgatgtgtttgctatatctaacggaattcttcttgaataatttttcgcaaaaatagtccagatttggaatgtctttaaagcatcgttggtttctttgtcctatgccgagttgattcaaccactgagtcataacatttatagtacaaagagagtcaccaaatttgctgacgagtcgtttataataatcactgtcactagcgacttgttttacgctgtagaagtaatattcactagcggcgatcgctttagtaacatccttctttggatttacgtgtc

SEQ ID NO: 6613 - DNA, 2420 bp, Diabrotica virgifera
atgtcgctgttgcgtcttttgccaattatttttaataatttgttaacatgactgggagatttgtattcgattcagagcgcaccacgggctgttctgaggagttcaaaagaacgaaatgtacataaacagatgttggtgatctctgaaacgaaattaaatcttacttaaactgtctgaaattattatttctagtttacttctcaaaaaaaacttaacagctgcattttttattgttatttaaatatttatttatttgaatttttttgtggtttcctttagtttaagtgaataataatgatttaagataatcaaaattttaccggacatttgggacacatttgtattaggtaaataaaatatgaagcgactggggtcttgtaaaaagggttaaaatctttgtatagtgaaaagaatattcggtgtgagtgtgttgtgagtatttctgtgatcttgaaacttgatagataaagttggaatactttattgtaaacttagagatgtacagataaattagagcatttaatctgatagcacaaaatacaaaatcacggttttcaaaattatgaaaaaataattcaaaatttattaatttgcttcagtttattcagtttaaagcacaggttcataattttttaatcgggcacattgtttacatctaacactagctgttcatggacgccaaacttcatagctggcatgtcaaacgtcatagctgagacatgtcaaacgtcacagctgagacatgccaaacgtcataactgagacgtgtcaaacgtcatagctgagatgaacatgcgcattgattcagttgaagttaatgccagtgagttaaatatacagaagcttcattagaatagtgaagggcgttcaaacccaagatatgttgtttaaaatataatactgaaaaatgcaacccataggattcaagaaaaagaaaactttaggttggcacatagcactaaaagttaaaaaacaacagaacaatagttttcattttggtcaaatttccgcaatgaaatattttctttatttagcattttcctaatgattggctaaaatatagttctgctgtagaatgtaaagttctttccctgtacttcccaatataaagttttctgtcatcttttttttttattttttggagcgtgctgttactgtacattctacaaaaaggttcaggttttacagtctttacatttaacttatgtactatatcctattatttatttcctataccttaactcatctgtcaattcataacactgttactaaaatgctcttgttagtattcctaagcatagctataccaattaggctatttgctcagtcttttgtatatataatttaagatccacaaatcccttctctattttgctgtggaagattttgccttctccatttttgaggtgcaagcctgtttttcgctcatagaaaaggttacacgatttcctcgcagggtagcaaggcaagcagacaaaatcaaaagttgaaaaatctcccgctaggggcatgctctctatgtcaactgaatacggacggaaaaccagacgcatgcgcgctagaagtatggacatttttgaatatgtgacagtattgtcacgatactaccgttttgtatcctgcatatattgtattttggtacattatgatgctaaatattataatatgatgtaatccaatgtaatctatggttatactaatcaaatatttctttttcatcttgccaaaaatgtaaattttacaaattttctattttgtgctgccagaacaatttttttgattattttgttgctttgttattaatttgttactgaaatttctttgagaattgcattttttttttatttagtaagtcaacttccaataaagttccatatttgaacagatttatctacagaaatctctcattttattctgcgattgctacatctaactatattatcttggtaacatttatcagttttagcggtatatagtgagatacttttgtatatacatatatttgaaaaaacagtgcaattattagtaaatcaccgattttatttataattttttgttaacaaatgattcagggtccaataaagttgatcactacttgtttattttgaactataacaaacatttcctacatttttccataccgcacagtattaatataatttttaacatttacagtgtaaatattccactattatatacatattgtgtaaattcacgactgttattacctgtatatagtaagaatttcatttatacatggtagttttgcatcaaacgtaaaagaaatatgcaatgcgcgtatgaagttcgtcccccccccaatattttctaaacagtaaaaattaatacattttttaggactaccctaaactacgactttatgtttcagcttatattctttgcatttttcatacacatta

SEQ ID NO: 6614 - DNA, 2418 bp, Diabrotica virgifera
  SmartBlast Evalue=1E-114; Info=Titin n=1 Tax=Harpegnathos saltator RepID=E2BM23_9HYME
aaacattggaactggtcacaactccaatcgtaacaagccatacatcacacaagctttacgaacaacgagatagacatgtacaactggagccttttccgttcaaaccagaaccagaaaagcctagggcaaaagtagctcctccaccaagcccatctaaattcataaaaggtgagttcagagaaagcgattatgagagcgactatgagagaagagtcaacaccacatggagctctaaccaagaacctcaatacaaaccagtacatccagttttaacaccaactaaacagcatggtcaacagtatggaagaacccctacaccaccaactgagtttgaacgtccacaagcctttggttcttcccgccccaagtttgaacccattaaacccgagactaaacctattccgaaacatgtagtttataaacctaaaccaatgtcagctgctccttccgattacgttgctcaaaaggggttggtccttcaacctggtccacctccagagtttggttatacacaaggaccgacgaaaacccagtactacaaatccactgtaagtgccccttacactaatgctattcaacatgaaacgtccaatttagtccattttaacgaatctactgaaaactgtcaccgtaccatgagcgttcaacagacccataaggtgattaaatttggtgacaaatacaagaaagaaggaaaactggaaccttttcctttccaagcaggaccggagaagcctcgaagagccacaagtgttcctcctccaccaactcctactaaattcataccaggcgactttagagaaagtgattatgaaagtgaggtagagagcagtagaatcaaacaaaaatggacaccacatggtgcagacgacagaaatcaatacagaagagtcagagctcctgctagcgctagatcttcgagtgttcctgctccaagagatagagtattgacccctatggaattcgatagtggacctgtatcatcatcaactattagaacagactatgttgatggtgagactagaaagcacgaatcaatttacaggaagtttaccgacaacaagtcaacaaataatcaaatagttaagagaagctattctcatgagcctgctctacggccagggtcacctccaaaatatggatatgcgtctgatcaaaggatcatcaagtccactgcgaccaaggtcgcctcgcatcatatggacagcatgactaacgcttttaaatctaaaacacaacagttcgtttctgacattatggatgacgtaaacaaacaaaaatcttctttcaaaaatggtaccgatagtgatgctcaggtatatagagaggagtctagggctgcacaatatggaacgaagcacgtagaccccgacacaggccttatctacttcaaatacgattttggctacgagttcggcatcgttcttcccggcgaaggtaagcaaggaggagtagtccccactcccaagaagaccatcatagaaccgcccagaagaaccagagacatagagatgcccgtctatcacgaaaaaaccaactccagtactaacaaccactacccctccccccagtttaaacccaaacagtttctgtcggctaacaagtctggaaagtgggagcctacatcggagagcgagatgtcggattacgagagggacgccaaagggccgaatcatttgctaccaggtggaagacaaacaccacctagctgtccaagcaccccaggaggtctacaatcaaaattgaaccctgctcaagctcgtgctccaatgttcataacgccactacgagacattgcagttgtcgcaggccaagctgccaagtttgaatgcatcgtgcagtcggaaccgcagccaaacgttttgtggtctaagaatggacgcattatacagaattctagagactaccaattgcattttaggaatggagtttgccgcttgaccatttctcaagcttatcccgaggacgcaggaaccttcacctgtaccgctaccaatcccatcggtactgctaacacaagtgcaactctagaagtaccaggtgagcgcagatcgcaatacattaagtagattggtggtgggtcttaacttactgatttttcttcgctgctaaacttgcagtcaaatctaaaactagtcaaacagtgccttgaaatattgccaaaatgtatctatagtgttttaaaataaaatatatgcttgtgttgtgcacaaaatcattattattattaataagttgtatatgtcgataatactcgaaaaaattactccgacattttttgtttttttttatgatttctttttgtttcgttgtgctggtgtactgttagaataatcaaatgtacatttatattgttacaaataatataaattatttatttattgtgtctgttactttgactattaaagcttttctgca

SEQ ID NO: 6615 - DNA, 2412 bp, Diabrotica virgifera
  SmartBlast Evalue=6E-67; Info=Endothelin-converting enzyme 1 n= 1 Tax=Camponotus floridanus RepID=E2ALK7_9HYME
cttattgaaatctcacattgatttttctatagtatacataaatatatgtattaagaccataaaaagtatgtggtgactgtctaatttccaatatgatgaaattacccatagttttattgatattaacaatagtgtcgtctttaaaaggacttaacatagatgataatgatgattttccaggatacaattatatgaatctaagttcagacccatgtgaagacttttttgaatacacctgtggaaattttaaaaaattatatccactaagtgaaggagtattaaccatcgaccaatttacacttttagatgaaaaacttacagaaactgtaagattaatcctctcagagaatgaacgtgacgaggatccagtagctttgagaaaagcaaaagctgcttacagcgcatgtatagatgaagactatctagcgaaaaggaaaaatcctgaaacaataattgtagccaacgaacaagggtttccgttaacgcagctaccatgtcaacaacaagccacaaactacagttttctagatattgctgatgctgtaagcaagtatggtatcccgatgctgtttaacgtgataactacatcaaatccaggaaacgcttccagtaatatactctttatatctaaggtagatagtttgaccgctgcacaaattcgacacaaccatggtacgtcatacgaaaatataattgaagaaggttttgtaacaacagatggatctgatagaaaaagttcacagagtttaaaaccatttgacattttcctgaggcaaatgtctttaaaattgaggaatgccactgaaagtttctaactgataccgaggtttttactaacttggacgatgtcgtccagtttacaagagctgtgtttagcgtcgctaacgtggattatagtaacgctgcaatattgcctatattgggagatgacgtatatacagtaactcttgaggatataaatacttggactgaaaaacaatttaatgatactgttaaactaaattggattgaattcttccaacattactttgcaaacgctggtatagacataacagcagacaccaggctgctgaattattcagggttggacaaaattttatacggaatattgaacctggtgaaatcaactcaagatcatgtggttaaaagttatgtaatgatgcgaatctttacacatttggcacttgacggtgatgcacattcaagaaaactcatggaggattatttcgctggaataaatgttcaaatttaccctagaaaagaatactgtgcaagaaaaataatggactctacgggaacagcaggtttggcttttgcagtagcatatggatatcaactaaatcattttaatgttaataattatcaagaggtgatccagttgatagaagacctaacagattcatttagagaattaatacaaaatactacctggatggatacacaatcaaaggaagatgctgttgctaaattacaacgcatgataatgatattgggacatccagacatttcttacgacaaggagaacttggataaattttacgagaatctgaaaatctgcaaatgggatcattacgggaattcaataagaataaaagcttttaaaaacgcttatcaaatatcacaaatatctaaaagggaaagagatttttgggataaatcaccatttgaagtaaatgcttattataataaagccaataacaaaatgatttttcccatagctatgctgaatccactgttttttggtagcggtagcagtatattagattatggaagaattggaagtataataggccatgaaatgactcatgggtttgataatgatggtagaacatatgctgcagatggtactatgcatccgtggtggactaacgaaaccaaaacagaattcgctaataaagcaaactgttttatagatgaatacaacaaattttatgtacctgagatccaacaatatgttaatggaacggctactttaaatgaaaatatagcagacaatggtggagcaagggaagcatatcgagcactgaaaaaaatgatgctgagaaaaaatattactaaaggaataaaagattttactccggaacaagaatttttcattggatttgggacactatggtgtaacaatccctccattagctatctccaacaaatgtccactaacgaacacgctcattcgaaatatagagtaaatggagtagtttcaaatatggaggaatttgctgaagccttcaactgccctgttggcagcaagatgaatccttccaataaatgcagaatctggtaaaggttcaacaaatttaagtcttaattactaaaataataagtaaatccatgtgttgcacgtgatgtaaataaaaaatgtacagatcgtcttaaagttttggtctaaaaaattgtgaaaatatgattgat

SEQ ID NO: 6616 - DNA, 2412 bp, Diabrotica virgifera
  SmartBlast Evalue=0; Info=Splicing factor 3B subunit 3 n=4 Tax= Apocrita RepID=E2BJM4_9HYME
ttaaaaactgcacccaatttttccaatgctaaaatcctcaaagtgtttgtagaaatggcgacgataccttctgggcactgttctgaactgaatcccgaggcatattctaaactttcatatgataatggtgtgagataaaagcgattttggtagtagtaacttaaccaagatctactgctcatagctaatactgcttcagactgctgcattcttattctaaatagtttcacaggtctagaacccaaatatctagtcctagtgtcagtaagatctccagtaactggatccaacacagttctcaacaaagtaccattttgtaagccaatattcaaataaagggtgctagtggtacttgctgcagctgcattatccggatctctctcagtacaacccatttctactatacaaagtgattcagcacatactggtagcggttgcattgctctaggagccaagcgatcactggggtccaaggaaattattctgacagttccgtcagcaaggcctacagctaaaaaccaagatctttgttcacctggtggtacatttgctagagccatgcacaggacatcagaattcatacgcttccgttctttgaactcatccaattgaccagtatggtccatctcaaagtagactaattctcctcctgacaaggcaataactacttgtctttgattaacggcacattttacgatgctctttttaccagctttccattcatttacacgtttgtctgcacaaatatgcctaattccatcgggatatacttgtactagagcatcgtcacttaatgcagaacagcatagggttggtgcagtacccagaaaaccactgtctgtaacttcttccaccgtttcaccaatagataataccaatgtggcattaacgaaagaaacaatgatataggcatcaaagtcatcatcacttcttctcttcaccgtccatacagcatttggattaccaggtaactcagatacagccatttctgaaacctccaaaccgtgtctcaatactctcatagatgatctagggccccgtccacacaacatgtacaactgtggggtatcttcaccagccaaatcagcgactctggatgagagaattggagaaagtgattccagttcatcaactaagaccaaatttcttaaaggtctgggagcaaagaaaaatgtgtcaccttcttccaaaggcatagctgaactgaattccaattcatcatcatcatcaccaagatgagcaatttggtagaggtaatggttgccaaactctgatgctacaaataagaaaccagtcttcaatacacacatagcagtggctacaggaactgtatcaaagtattttaactttatttcagttaccatatcatcatcagtctctaatgttatcttaaaaatatctccttgttcagtttgagccaagaaaaagaacatcgattttgttttgtgagtagctgaacaaacaaatatcattcctctttcaggatcatctaaatcattccttctacgaggtatgggacaacgaatatcatgctgttctcccaagtttttgtaggtcaaatagttttctgaacaaattagaactccagaaggtccatcatctccaccaggtaccgttaccaagaagttagcatgttcttctaatggttcagagtattttcttaccacatggtttacaaccaaatcaatttcataaaaggttagtgtttgctgtgtttttttgtgcagcctcacctgtgggatcactatcagcttcttcatagtctatttctaaacaagcaaaaattggattgtcataaccaacatctacacctaccatatggtaaactaatgtgttacttttatgtgcttcgagtggtgatgatatagtcaaccttgcttgagcatctctattcaaaatataagctaatttttgtttttctatagctccaatcattacagctctccctcttaaatctgtagccagatattgacctgggacaatacgcctacctcctgattttccaaaagtttcttgatggaccttttcaaaaacatttttctgttgattatactctagaatcaccaatcttccagagtctgaacctactattacatagtccttagttccaccagttaacctaaagggcatcaaagatctaatgataccaaagatctctatggttaagagtgtatgcacttttccagtgttgggatccggtctaagcagttctaagatttttcctcttgaaattacaatctcttgtattttggaacccgagaaattaccatgaattgcatgggaaatagtagtacccctttgcagggttaagttgtacaagaacatcttgtcttaatagaagatgatcaaaactggtttagatcttcataaaaacatttttttccataaacaccgccatttcctgcacaagcc

SEQ ID NO: 6617 - DNA, 2410 bp, Diabrotica virgifera
  SmartBlast Evalue=3E-87; Info=GPI mannosyltransferase 1 n=1 Tax= Culex quinquefasciatus RepID=B0WUV3_CULQU
caaatctactacaaaggtaccattagtgacccagaagtgaaatcacgcaactaccagaagcaattttacaagaaatgtgagttgggtgattttacttcattgatagctccaaataaatagatagaaataattaacaataagaaaaacatttgccaattatctgatttcactcctaggtcattaatatatttatctattataattattattcacctttatcatgaataggcataaaatacatgatcagtctccctaatattgcaatattggcacagaagaaagatacactttgtatccaaatatacaaaaatgtattctggccctggaactctaataaataggcaggcaacaaccaaacaccttgtgcaatgtaccatattaaaagaagtactgctcccatgagcttagagagctttatctgccaaagacacaaaggtaaaactgccatgacccatacaaagtactgagatgtaagcacaccattgtatataaccataacgattgtttgcgtaaggatagaaaagtttaatgaaaacctattcaagccatatctaaccgagaacactaatatgagtactaattgaggtagtatcatcaaggccttttgccagtacccaatgttttttacccaagctgtgagatactgtaggtaaaaataaagagaaaagttgtgtcttggatcttttcgtaatacatggtacaaatatgtctcatataggaaagtatagccgaataaactataaaaataccaggtcagaaatgataatgacaagagacaaccagaaatcagttttaactgatctaaatttggaactaagtacaccaagtattcttttttaaagatagttcttttttcagtcttaacgttttgtggtactagcttatgaccacccatagaggatgtttggacaatagtattctctatgtttttaagtttcttcaagtttggggtttcatctatggctaatggtttttgtaagtttttcctacgatcttcagtagtataaaaagaatacttactcaaaaacataaagtatgttaagctgtatatgattggatacagcctaaaatggatggaaattccatgtatgatgcctgtgagaaaaatatatcgtttacactgtagaaagtatagtgttaaaaggactaggaatcctgctaaagtatcacagtttcctcttgttccaatagcgatagtcatcggattatacaaccaaaccatcatagctgtatctgacattagatcaatataatttttagattctaactcagctttggtgacattcaaatgctgtttatttgattgccgcagtttttttctgttttttccgtttgcattttttagcttgctaatatcttgtaactttgacttctttgaatccttttgtttgtaacattcatactcttttatagtatttttaacaattaatcttattaaaagtgctacgataatatcaatactacaaaagagaattttaccgaagctatgatggagtgtgacatttggaattaagagtatagctactaacgggctgtaacgataagtgtgcctattatagggtgagttaccttctaaataatgcctcgaggcatcagtgaaaaccttatagtcaatatctgtatattttaatttcgagatctgatcatgatggatgccgtaaactactagtactattctaagaattatagatattaacaaatgttttttataatgaatatttacaaacgtactccacaacgacaccattctgctaattaaattctagtttttaaactggtcgcagctttttgcaaacaagttttaaaatctacaaactcctttttacaatcattcatagcaacactgtctcttttcaaaacacatgtggcataactcgtagcttcttttctacactttgctaataggagtggatactgtcgataacgttctttggctcgttttacagattccatacttaatttttactaaatctagatttgtggtttcttttgatttcttcccaatcgtactccactgggctgaagaaactatcgtatatgggtttcgagaataatactaagagtgaaagggttgttgtggttataacaaacgttctgggatatctataaatcaatccacggtctttggctctgagtcggttattcatacgactattgttcattattagctgtttctcgtttttttgatatgtcaataccaccacatacaaagctcttatctttccacttcctgcaacaatctcgcatatcctcaatgactgtctggcaaggtttttcttgaaagcgattttctttcaaacaggcttgaattctacaagcgtaaggtttgcaaggatcttttgtagacattaatcaaacataattttaattgatatctatctttactatatcatttagcggcttataattt

SEQ ID NO: 6618 - DNA, 2397 bp, Diabrotica virgifera
  SmartBlast Evalue=0; Info=General control of amino acid synthesis protein 5-like 2 n=1 Tax=Harpegnathos saltator RepID= E2C3U8_9HYME
cacatcgacccacatgaaatgaaaaagttgttaaatgtaatataaagttttatttattttaatattatttataaagttgttacatttagaatacgttgtacgagattaatatttttttattctaatcgggaagaataatatattgttttaggttatgttttcgtttagcagctgataatcatattctgaaggacatttaccatcctgactatatagtattttaaaaagaagcaacatgtcagagcagtctgttgaaaatatagatggatctgcaagcaattcaagtgagcatgcaactcatggacaaaaaagtactacaaatcaaacaaagtcagagacgaatgcttccccattaaacaaccttcagagaatccaacagaagaagcaagcagtagtttctttgccttacaataagaaattattaaagttggctgtgtattctaaatgtcaggcagaaaaatgtgattgtataggatggaagagagttgaaagtaatcaacaaaatcccacttttacagatccctgtagatgtgagcacctactagaaatgcacatttcccatttagttgataaaccagagcaagaattaaatagacttctgagtatggctgtggacatggacaatatgtacacagccatgagcacagaaaaaatccagaaactaacaaagtatatttatatttatttaggcttttacgaaaatgtgtattaaccttagacaagcccgttgtagagggacctttgggccaaccgcctttccaaaaacctagcattcacaaagcagtaacaatttattgatatataagttttcacatattggtcagcaggaattaaagacgatgtacgaattggtaaaaattctgtttcactgcttaaatacttgggattttcctagtccaagcagccagaagcatattgttaatcaggaagaagctatgaagtacaaaatagaatatacaaggtggttagttttttgttatgttcccaccttctgtgattcgttacaacattttgatactacaatggtatttggaagaacattattgcgagcagtgttcaaatacatacgcaaacaaataatggaccagttttacaaggaaagagacacaatgcctcctgaaaggaggcaacttttactcactaactttcctccttttttaaaccaattagatgaagagatctatgcagcacattcgcctatctgggatccagaatttaaatctacttctgtgcattttcagtcacttcttgactctagattaaaagctggccctagtagttctaaaaaaggagaatttgaaaaggtctccttgggaaaatcggatagagaaggttttacgacaataccactcgcacctggaaaatcgattagagctacagagatgccaagtagagaagttaagagaagaaaaatcgctcaagatgaaaaattcgaagatatgcctaaagaaaccgttgcacaaatagttgccaccatagatgatcctaattatatgaccggcccagatatggttttctctgaaaatgctcccgcaaccgacgaagctcctaaactagaagaacaaagaaatattattcagttgcatgtggtgggcaatagccttactacgccagtttcaaagcaaacaatgttatggttaataggtttacaaaatgtattttctcaccaactacctcggatgcctattgagtatattacgcaactcttatttgacccaaaacatcgaactatagctttagtcaaagaaaatcggcctatcggaggaatttgttttcggccgtttcaaacgcaaggatttacagaaatagttttttgtgctgttacttcaagagaacaaattaaaggctacggtactcatttgatgaaccatttaaaagattatcacatctctaaaggaattctacatttcttgacgtttgctgaccagaatgccattggatattttgaaagacaaggtttttcaaaggatataaagatgaacagagccgcttaccaaggatacattaaagattacgaaggtgctacactcatgcattgcgaactcaatcctaaaatagtttacactgagtttacgagtatggtgaggaaacaaaagaaatttgtaaaacaattgatctatcaacagcaaaaaactgtatcgaaggtgcatccaggagtaacatttttcaaagaaggtgttaggagtattccaatagagtctattccaggaatagaagaaactggttggaaaccagcatctagaaccaccagaggccagttgcttgaagaaactcaggatgcagacactttagcaggtcatcttaaaagcgtattaagtgctgttaagatacacgaagattcctggccttttagacaaccagttgatagacacgttgtaccggattattatgatcata

SEQ ID NO: 6619 - DNA, 2402 bp, Diabrotica virgifera
  SmartBlast Evalue=2E-31; Info="CG2950, isoform A n=6 Tax= melanogaster group RepID=Q9VR35_DROME"
cgaagacgaacgcgaagagcgagtgcgagttgcgatttaactggatttaacattttctataaatctgctgaaaaaactatcctaattttaaaggatagctatcaaaacgacaatgtccaccctgtctgcacgtttaaaacaccctaaaaagcatgagctagcgaaatcacagaatcaggcccaaatgttaatcaacaaattaaggcaggatggggtactatctacagtggaggatgttctacgtgctgttgatcaagtggcggctttattatcttcaaacttggcagatagtcacctctcttacaaggacagtgtcattaacttgtgtcaacacttaaaggtttacggtgtttacctagaaatattgtacaaagagcaactcgaccacgcttttaggattttccgcgacaaagcccaggacgacatccaagtcgacatgttgtccaggcttcacttactcgaactgatcgaactacgagccaaaggctggaagggcaccgacggaatgaacatgtattacagaaagaagatcaatcagtttggaagttcacaggtagatatgtccgaatcgatatctagtttaaatgaatctctacattctgttatgacttcttcaccaccgcctctattgggacccggtgaagtgatcaaaccgtccggtaaattccctaaaccgactagaatccccggtaagaaatactgtaaagatgaggtcgttatcagaaacgccgattcaggaaaagttaatcccggagctaaagaaagactggttcaaattacaggagccaacgaggaaagcattaaccacgccaaacagttaatcgaagacactatcagaagaaacgcttcacctgtaagagatccttcaatttccgtaagtggaggtcctctgactggttccagttcaagcatcaactcttcagcttccgacgacagcgctttaccgagttccgctcgagctcctcgtcatttgatacacagtttgagtgtaaacgacgccaaccttggcgaatatatttataccgtcaacgctaacgggtgcagcattaaaattaccggaaataatttggatgcagtgaggaccagcaaattggttctagacgaatatttttccggcgaaccgattcacgacgttgctcaattctacagtttcgatagtttgccacaaccaattatatccgaagagtttccttccactcctctctcaccaccggagtctctaccgtcacccgaagtagttccaaatggagaggcggacgaaccagataagataaaactgcgcaaacctcgcctctctgtcgaagagatgctcaagggtaaatctaacagcatcgacaaagaagataaagagagaactccttccaagcccactcacgtaacatattccattgagttcttggcgcacctggctatgtctccgatgtgtctcacgcaaccgagcgaatgggagagaatatgtaaggagtatcctttacttatgagaaacgtcgttgagtactttgacgccaagacttacctgtccacaagaacaacggaaccgaccggtgtgcttagtgcagaatgcatcgatttcagcgaagtttgacatccctccggattttttataggttcaaacgaaaacaaattataaactcgtaaaaaatacagcggatattgtaacgtccggttctattttgtatatttttcagtgagtaacatttaagagaaatagcaataacctcgaatgtttaataaggtagaaatctttgtagagaccaaaaaaatgaaaaaggaaaattaagaaaaataatgaaaatgaatgtaatcgaaggcgtttgaagataataatgattttacaaactatttaggtagcacataattttctagcatttaatgatactagacgaatacggaacagaattgtccagaatagaaattttaatttttaattaaactaggctaaagcaatactaattgaagccgtagtatataattgtataacaatatgatttttattcaatactacataatatattaaatctatgtacacttttttgattgttgactgtatttttaaacaattgttaatttctgttaaaagaattttagtttagttaattattgtatcagtacgatttgtttattttagagtggcacaatcggttatcttttacttaacaaacgccttcgttcacattaggtttatatatttttatatctccagtgaaaatatgctttagtgttgattttttttttaggtttttcaacttataacttgactgacttttatttattattcttatgattttcttagtgcaattgagtcagcagagcgataatgcatatcactctgcacactcatggagatttactctccggataatagtataggtttttcttttgtgataattgtcaatagtatt

SEQ ID NO: 6620 - DNA, 2402 bp, Diabrotica virgifera
  SmartBlast Evalue=0; Info=Threonyl-tRNA synthetase n=1 Tax= Aedes aegypti RepID=Q17LW8_AEDAE
gtttaataacatttattaaataaatcataaataggtaaaaaagtaatacagcaaacattcttgcaccaaatttctttgcatcaatgttttaaaaaaagtatgttcagagtttaataaatagtgtatgcctactatctaacaaatgatatcatacatccgattgaaacattcggataatttaagaattctaaaattcattttcagttttaatgaaattctctttaaacttgttaaacttctcaaccaaagtatccaacgaatactctccatggaccacattatctctggtacggacatttactgtattgctagatctctccttttcgccaacaaccaggatgaagttgaattgagccagctgggcgtttcggattttcttattcatagtatcacctgcatcagtatcgacttccaccataaatcctgcactgaatagtttatccctaacttgtcctgcatattcatcataagtaggaccaactggaataaccatagcttgccttggagatagccagaaaggccatttgccagcaaatgactcagtcaaaacagctatacatctttctactgaaccaagaatagctctgtgaatcatcactggcctcttcttttctccactatcactgacataagacaagttaaatcttatgggtagctggaaatccagttgaatagttgcacattggtgagctcgttttaaagcatccttaacagtgatatcaattttaggcccatagaaagcaccatctcctggattcatcttccatggtacaccaaatttatccaaactatcagctaaagctttttctgcagaatcccataattctgcttcaccaataaacttttctggtctagttgacaggcaaagctcaaacgtaaatccaaaagcagaatacacaaaacttacaaaatctaagcatttgtgtatttcatccctaatatgttccgaagtacagaaaatgtgggcatcatcctgttggaatcttcgtactctagtaagaccagttagggctcctgaaagctcatttctatgaagtactccaaaatctgccaaacgaagaggaagttctcgccaggatcttacacgattatcaaacattagacaatgacctggacagttcataggctttaacgcaaacttctctttttctatatcaaaagaaaacatattttcttcataatggctccaatgcccagaagtctgccatagtttcacattgtacatattcggagaaattacttcttcaaaacctctttttctgtattgttctttaatgaagctcattaaagtgttgtaaatatgagctcctttgggttggaagaaacacgaacctggtgataactcatggaagaaaaacaattcttgttctcttccaatttttctatggtctctctttgctgcttcttcttgtagatgttcccattctttaagtttctttggatctggaaaacttataccatacaccctctgaagagtctcagcatcagcttttccctcccaataggtagaagagtttttggtaactttgagtgctttgatttttccagtatgtctgatgtgaggtcctctacataagtctatcagagggccacatctgtaaacagtagtggttggagtggtcactttttctttgagaattctttgcttgaactcgttatatttgaacatttctatcagatcttcttttttcatttcaagtctttcaaatggctgcttttctttgacaatgttcttcattaagctttcaactacaggaaaatcagtctgagatatacctttactgtctaagaacatatcataataataaccagaatcaatgggaggtccataacaaagacaaccaccatatattctctccagagcttctccaagtacatgggccgatgaatgccagaaaaccgcttgtgcctcttcatcgtcgaattttaacaactgcaaagtacaatctacttctaagggcctgtccaaatcccataagacgtcattaacttttgcaataactgtattatcagccaaaccttggctgattcctttagcaatgtcatatggtgtagttttccagctgacaccctcaattattttgccatctggtaaagtaactttgatagattcttctggtttttgtgccaattcagcttcatactgggcttttaatttatcccatattgctaacctgttatcgataaattctggacgaggcttaagttctttggctgcagttgaatcacctccattttgagccggttgcttgtttttctttgatttggatttttcatttttgctttctggtttttctttattgtcactcatttttttaattcactatttcactggtattcaaatgcactatcactttttaaatgcggttttctgaaagacacatgtacttacatcagcatag

SEQ ID NO: 6621 - DNA, 2399 bp, Diabrotica virgifera
  SmartBlast Evalue=0; Info=CG3499 n=5 Tax=melanogaster group RepID=Q9W1Y0_DROME
caaataggttaatttcatcattacaaaattgtagttttttctcatcaaaaacacttcatcttcatcatatatgtaaaaaataatgttttcactacaaaatcctaatcaggcatttgctacattatcacagttctcctctaaaataaacaccaggcactctgttcacctaaagaagacttctgccaagaaatctaaacatgctcaaagttttatatgtttggatagttttctagaagctgttaaaaattgtgacttttcatttgcaaagcatttgaatacaaaagatttatttggaaagcaatttattaataattttaaagtttcctacacttcaagtaacactttctttgagaataaacatggtttttcggaaagcgatttaaacaaaactgttcccacaataatatttaagaaagattgtatatatgttccgaccacactttatcagaagttggttgatggtttgttatttcaacatcagagtttatttaaaacccaattaagaacttttaagactgacagaagcataaaagctgaacttaacagaaatcctcctttaacagatagagtcaaacaagccttaggcattacagggtcagatgcaactagtactatttcttcaaaattaccaaattctccagagaaattaaaacacatgttaacttctgaagatggtgtaaatgaaacagagaagcagaggttgaaagttgctttcgctgaaggatatttgatgggaaacaatgctactcctaaagctggaaaatctacaagatacttaaaagtaactacacaaattttaactgttttatatttttggccatcatatttagccttatagctagtgccagtggatctgtattcagaattcaattagggaatcaagtagaggtggatcctgaagaaatccatgtaacttttgaagatgtaaaaggagtagatgaggctaaacaagaattaaaagatgtagtcgaatttttgagaagtccagaaaagttttcaactttgggaggcaaattaccaaaaggagttttacttgttggtcctccaggtactggtaaaacattacttgctagagccgtggcaggagaagctggtgtaccattttttcatgcagctggacctgaatttgatgaagtattagttggacaaggtgccagaagggttagagatttatttaaggcagcgaaaaaacgtgccccatgtgtgatatttatcgatgaaatcgactcagtaggttcaaaacgtactaatagtgttttacatccgtatgctaatcaaactatcaatcaattactcagtgaaatggatggtttccatcaaaatgaaggagtcattgtattgggagccactaatagaagggatgatctggatcaagctctcttacgaccgggtagattcgatgtagaagttaccgttcctacacctgactatacaggtcgtaaagaaatattgggcttatacttaaataagatattagctaaggatatagatctagaattattagcaagaggtacgacaggatttacaggagcagatctagaaaatatggtcaatcaagcagctctgagagcggcgatagatggagcagattttgttgccatgaaacatttggaatcggccagagacaaagttttaatgggacctgaaagaaaatcccgtatacccgacgaagaagcgaatatgattacagcgtaccacgaaggaggacatgcgattgttgcttattatacgagagatagtcatccattacacaaagtaaccattatacccagagggcctagccttggacataccgcgtacattcctgaaaaggaaaggtatcacataacaaaatcccagttgctggctatgatggatactatgatgggcggaagggctgccgaagaactcatttttggaccagaaaaaattacttcaggcgcaagttcagatttgaaacaagcgacatctattgctacgcatatggtgaaagactggggaatgtcagagaaaattggtcttcgcactatggtggataattcaaagagcttccaaccggaaacattaggtcccacaaccaatgaaatggttgacagtgagatccgtaggattttgtcagaaagttacgaaagagctaaacaaattctgaaggttcattcgaaagaacataaagcattagctgaagctttattgaagtacgaaacgttagacgcagaagatataaaagcgattatgtcagagaagggaggtggtggggacaagaaaaaagtctagttttaataggatacttttgttgttgcagtaccgcattttattttattttaaagagacacaacaactaaggtattttagaaaatttgtaattctgtatatatgtcttcgctaatttagcaaacacggaataccaaatccaccggttt

SEQ ID NO: 6622 - DNA, 2389 bp, Diabrotica virgifera
  SmartBlast Evalue=1E-168; Info=Vasa n=1 Tax=Tribolium castaneum RepID=D6WSI7_TRICA
tttaatacgtctagacaataattaaattaaatgtacgagagtcgaagataaaccaaacgctacatcgttaaaaattgcctaaacgcacttcctgtttttaggtttgtcaagatttttcctgtttttgtataaacgcttatcagtcacatttcacattcccgggtaaattgatctaagaatagcacaaaaaagttaccattgtgatattcaaatatatgtgaccgatcccgaatataaaaaagtttcctgctacacgtgtgttaaccagtaaattgtaaatcatggatgacgattgggatgatgactctggatcggcccctgcacccacaatggcacctagtgtggcaacagaaggaggtaagaagttttcagcaggaagaggttttaaatctgtagagatcagtgatggagattggaacgacaatggcggtggtgacagttggaacaatagtggtgaaaatggatattcaggtggtagaggaggtggaagacggggcggtagaggaggaggtgatcgtgacggcggctatcgtggccgcggtggagatcgcagaggaggaggtggagatagaagaggaagaggaggttttagtagaaatggcgacagtaatggctacggagatgaaaatggcggagacagttatggcgattccaacaaagaaaattatggaggatatgaaaacagaggccgtggtagaggtggcggcagaggaggacgaggtggaggtagaggtgatagaggagatgataacgatgactatggtggtggtggtggtggtgataaaacggatgaaccacaaaagccacgtgaaatttatatacccccagaacgagatgaagatctgtttacttctacaataacatccggtattaattttgtcaaattggatgatattgaagtcaatgttagtggtgaaaacgttcctaaaccgattacatcttttgaatcatcaggtatgagaccccatttattagagaacattaaaaaatctggttacaccaaaccaacacccattcagaaatatgctgtgccgataataatgaatggaagagatctgatgggttgtgcacaaactggatctggaaaaacggctgcctttcttttacctatgataaaccagttattaactagtcaagagggacctgttatggacggtaactgctgtcaacctagagtggtaatagtttcaccaactagagaattgacaattcagatatttgaacaagcaaagaaatttgcccacaattcaattgtcaaagcagtagttgcgtacggcggtgctagcgttagttaccaaagaaatcacgttttggctgggtgtcatattttggtcgcaacaccgggaaggttaaacgactttgtcactagaggacatctctcatttgccagtgttcaatattttgtgttagatgaagctgataggatgttagatatgggtttcttaccaaccgtagaacaaatgttgggacacgccaccatgcctgccactggtgagcgccaaacgcttatgttttccgctactttccccgaagaaatccagcatcttgctggcaaatttttgcttaactacgttttcgtagcagttggcatcgttggtagtgcttccactgatgttgaacaagttttctatcaagttccaggcaaggagaaaataaggaaactaaaaggaatgttgagtgaaaatggtggtgagaggactgttgttttcgttgaacaaaagaggactgctgactttttaggaagtttcttatctgaaaatggaatgaaatccaccagtatccacggtgatcgtctacagcgtgaaagggaacaagctttgtgggatttcaagaaagggatctgtaatgtacttgttgcaacaggtgttgctgcgagaggattggatatagaaggtatagagcatgtcatcaactttgatttgccgaagtcaaaagatgaatatgttcatcgtatcggaagaacagggcgtgtcggaaataagggtaaagctaccagtttttcgactcttccagcgattctgctctggcacctgctctagctgttattctgaagcaagctggacaagaagttccagactggtttggtgacatgagttctcagtcatcgtatcatgacagtaattcgtttggaggaactgatatccgtgggggagaatttggaaaagctcaggtagcagaagaagcagatgaggagtggtaatctatctatatttgtttgcatgttagttatgaagcaacaacacaatgcaaaccagtgatttttatattttttctatagtttgtatgtcttttataattgatattttccgtttaagagttaagatctaaagttttgtttttaaagagttatgacttagttgtattgatatgttacttgtatctgtgatac

SEQ ID NO: 6623 - DNA, 2387 bp, Diabrotica virgifera
  SmartBlast Evalue=1E-147; Info=Slc26a5 n=1 Tax=Anopheles gambiae RepID=E3SB72_ANOGA
agcaaataattaacattctattaactttaatattaaaataaataacttttatgtacaaaacaactacatacatctaattatttgtctttagataaaacgttgacttgtgtgtataatactgcgtcatggacagttggaaatattaaaaaatttcttttctttcttttcaacttcatcacatttatgcatcacttcgaacactgggcctgaacatccggatattaacatgtaaatatttaatcgtttataatcatcctgcatcgttctaaggaaatcaacaccagcaggatcgacaaaagtaaggcttgagaaatccaaaattatacatttagttaaaaattcttcatcatcttgtaaacctttatccgctaacttggctctcttcctaagtacggccgctgcatcaaattcagttttcttgacgagaagttctttaaagctgtttcttgatgcaaaacttaaaccaccagaataatggaatatctttactccatctatttctttagcccccttatatctcttaatatccaaatacaaatcggtatttggaacaatgcccaaaaggcacgtataaggtttgtatccttgaacaaatatgcttaataaggatacgcctacacctgcggctagaccataacttatttgaacaaaacatgttactgaaaatgtaactatccacactatagcatcccatctacttaatcgccaatacctcggaagtaaagtacattgcaatagcattcctttgagagctactactattatgctcgccagcacgcacttcggtaacgtctcaaaaaatggtccgatccaaaggacaatcaccaacagaatagaagcggatactacagaaactaattgagtaacacctccaactgcttgctgaatcatcgatcttgataatgatgccgtaataggtaagcatgaaaaaaacgatccaacggagttgcttacacccaacgcaaataattcttgatttgaatctacctcatacattagttttctagcaaatataagggccattgacattgtgatggtgtacgataccatcgtgataataaatgattctacgaaaatgtcaggaataagttcaaagcaggaagggccggttgtggtaatcctgtaggaataaagccaactgttgttatgttgtagttagtatcgaacttcataaatcggcttgatgttgttccaagtaccacagccactagttcgataggaaatggtatcgttgtcttttttgctaaccacggtttaagtaactcattattaataattaaaataacacaggctattccggaaacaattacagcactagaattagcagatgaaactgctaggactgcatcgtatatagtcagcggaaaagcaaagtttcctcttcgtttggcaacattgagaccaaggagatccttaagttgagatccaactacatgaaatgctgaagcgcaagtaaatccatttactaacgtttcagacaacaactgggaaaccataccaagtcttaagagatacatcactagctgtataacagccactgtgaaggtaaccgtaatggctacttgtacatttgtatactgaggtaaactggaatcataattttcaggtgccactgaatgccgcgttccattttgcattatttctattgtcgtatactgactaactacttttcctgtcatgagacatactactgcaaatgtacccatagacacatgccttgatgttccaaatataaaatagactagaactggaaatattgccatgtatatacctattataggtggtacgttacctaacattgcatatgccataccctgaggaatgtgcataacagcaacagtaataccactaactatgtctccggagaaactttttttccagctatattcaggtaaccatgataataaaggtattgtctctttaaggaatgcacagggatctaatgactggcaggctcgtttgcatctggtttttaatgtgtgatatggtttttcatattcgtagtctctgtttaattcttctatttggtaaacgggtctttctactagtagtgctgagtgcttatcaccctcatttttcataatattgttacttccaaagtttaaaaaattcttgtctttcaaacccatgtcgaataacaaaaatcaccaaaatatcctaatcactgtgcaactatatggtatcacattcacgtcaacttattgtattgcaaaaccgaatcgcaactacttgttttaaattaatttacttaacatatacgattaaaatgaccctaatttaaatttcactcaatattttatttataatctttttcgttatctagttattagtaataaaagctacgtacgcggacaaacaactaccaagactgtattagtcgaaacaaa

SEQ ID NO: 6624 - DNA, 2389 bp, Diabrotica virgifera
  SmartBlast Evalue=1E-129; Info=Eukaryotic translation initiation factor 2 alpha kinase PEK n=1 Tax=Culex quinquefasciatus RepID=B0XG84_CULQU
aaaattaatcctagggagtagatgtccactttgtagtcataaatgttagttctaaactgctctggactcatgtacagttgggttcctacatccaaggtatggcctctgtagggagatgaaccctttttaattaattctaaatcaaatgcgtcctccgaatctttaaccaatccaaaatctcccacttttacttttccgtctagagagaaaaaaatattgcttggcttcaaatctcgatggatcagtcccttcaggtggacataatcaacagcatctaatatttgggaaaatatattaataattagcttataatctctggattggttcatcattaaccagtccttcaaattatcttttttacacagctgcatctgaatgtacaaaaatactggttgctctgtaggtggtgccttaatctgttgactttgtgagtaatcccaggagtaatgctttctatctggccgcttccagtcaatttttttcctcaaatgttcagaatatgactgttccttcttttcacctacagaagattctgttactccggagtcgttttgagcattcccgttagaatctttaaatacaatgaaggagtcatcatcatcttcatcgttgtcttgtctttgaattgcatttgaaatctctgaaacttgatttgaatcataaaatcttggtaaaagatcatctatgcttatggaatgagatttcacccgttctggtggagattttgtggtatgggtaacagtaaccgttggttcagcgtcctcatctttaatccactgcttatcatattcttgttgccaactaataggtgggctttcaatccatgaacaaaaatatctaacaatattttgatgttccaatttagctaaagctttaacctctcgcattactctttctctgctcacagtcttcttaggtaaagtaatccttttgatagcatatgaacagtcgtcatatttgtgtttgacttcaaaaacaactccaaatccaccctttcctagacactgtacagtgtcatattgattgacatatctggaactaaattggtccttctgttcaaagcaatctccctcgacagatttcgtaggtacttctacaggaactggcttctctacgtatattactttttgtttatatttaaagtggttccgaagtacgaatattgcagtgacaagtggcactgtcattaagattaactgcttccagtaccaaggagtaattagataatacaaatatgtcatttctccaggctctatatctagccatttgtttttgttactatcattgcataataactgctcttccataattgcatggaggtaaaatccttgtccattaacatattctgaagcatttaaaactgacaacgctgttgaatcttcttctgtattagtagtagaagcaccaattggtttccatggtatttttgcaatacttctactttctgctaccactacgtttgtccctgatcttctatttacaattgcattttgtaataatgaagattcatgtatgtagagttgtttttcatgcatccctaggtaaatagacggtgtctgttctgggacaaaaagatcaatttcagacatattctttccagaccatatccacgcacgaacaataggagatggaaacacatgactccatttgtttttaacgtcattgtggttaaacgacaccttcaaaactccatctggtaaaatagctgacacgttccaatcaattttatcagtattactgtaaatacaacttatcttggacaatttgatatcatggagaccaacactgaagttccatctttcttggccatttctaggttcaacagcccttattgtatgagtcatacgttccaatataagcaaatcatcttcatctctttggtcatcactgttagaacactttagggaggtgcattcataatagactgtaccagaatgaaatccaataccatatgttcgaacatcaatactacctgcaactacaagatcatctgaatacttaaatgatgatttaagtagttcttctgtagtgatgggtattgggtcaacagtagaaccatcaaatttatataaacctcctgttaaagaaggtataatccttatccattctccattattagttaattctaggttatgtatgtttgataagagcaggggaccaggcccagtatcaaatgtccacattaacgatccaatcgaatttaacgcagacaattttccatccaaagtactcactatcaccaagcccggttctgatccatggcagtaaggcaaagaaggaatgtcgcttcttgaataaattataaaacttaagaagtttattactataaataaaaatttcatttcgaaaaacataaaacttttcacatctttacaaaaacatgtcaata

SEQ ID NO: 6625 - DNA, 2380 bp, Diabrotica virgifera
  SmartBlast Evalue=1E-112; Info=Sentrin-specific protease 6 n=1 Tax=Harpegnathos saltator RepID=E2BGZ0_9HYME
ggtccgtcatccgtattcctatgcctaactatccgtttagctttaagaattgacaacgtgtctcgattagtttgtcgcggaagcgaaaactcgctcacgtccggtttggggttcactacgcgctgagtcacgaaatcactaggaacggcctcgttcgagggcttgatgggcgatccggtttcttcgcccttcagttcgccctcatcgaaggcctctgataaagattctttggaggaattcatcggtagatcatctttcgacgtgtcaaatgattcttcttcttcttcctcctcctcttccatcatttcttcctcgtcctcttcctcgtcgtccatttcatgttcgacgattttaccatgcagcgtggggaacattatattgtctggcactagccttaaatctttgccgtattctcgcattaaagtttttattaaaattgctatatcttcccttttcttggtaacggtgatttcttcgaaccaattttgtatttcttttataggtatccggaaatctttaataggatccttaaaaaattgctcaacatattgtaacaaatagagtccgcagtccgtgaagttattttgctgtggaactttcggactggctcccttgataacgtctttattaaatactctctcgcttcccattcgcgatttgtattcgcacgttaaataatcccttaaagtagccacgacacggcatctgctggctccggataaagaatcaaatattagaatgcagggctgcttaatgggtagtctcggttccttagaccccctactcgtatgagtcggtgtgcttgtgcttttaacaggactgtcggtcgaagtcgtacttgtaggtgtagaaatgggcgtttgaccgttctgagaaagaggcaactcttcagaatcatcggattccatctcactatcgtctccttctgcttcgtctttatcactcagttcgggatcatcgcaagatatcgctttaccaagtttctcttgtttgatggctacggttacgttggcaatgctaacagttgttgtagcgggtttttttttcctagatataacttcgagtttgtaaggttttccgtcccaggtatgacagcccgacattcccggaaagcatattatagccaaaaaccaatgggcgttctcgttaatgggaactattacgaaatccttctcgaatatattgacgtttttgctccatttcttgactctagcgtggcgtttttgtgccggtgataaggtcggatctagttcacttggctgagatttcctagaggcttttgtgggtttggtggtcagtcgtttatagaagaaggtagagaagacgtggatcttcgacttttgttctggcggtaggttgtccacgagataggttaggtagaaatctattatcacatcgttgagaaactggtcttgagccaagcacatgtagtcttccgtgttgatggttaggcggtaacggccctctggtggatatgtcaacaactgttttatctcggcgaaagcaccaaaaccgggagttggtcgggccacatccttgggacaagtcttaatcaaaatgtcattggcctccttgatgtttaactcctcaaaaatactagcaggctggctgtagatcgtttgaaacgcgttcttattctcttccgaaagatcgtccggtaataaggtcaatcgacgatgaacctcgtcttctagggacaacggatcatagtaatagtcactgtctgtcatcatatccagcactgtccgtacttgggaggctgctgacggattcaggtagtagaagatcacaggcaaggaactgttgaagctgaccaatactttgacggtgtcacatttcgcgaacgttattgtctttacgcctttttccttgtgcggatgcggaacctttatggttaccgcttccgaatctatcacgatatcttctaaaggaatacatctgtatgagccaatacgaacggttctgcaatgtacttttgtccggatgatttctttttcagctatcgatttagtcggactatcatttttggataaatgtctttgaatgtctgccagtgacggttccttagatttcggactgatagttacagaattgcccagtttctgcaaaaggttttcactaagtttaggagattcttcttcttcttcatcggagctgatgacgtggacgctgtcttcaagtgttttagatctggtcgcttttctcttttggggagatggcacttttggtgcaggagcggctgctctgtctctgtctagtaagtttatcttgattaacatgccacatttgcggaagaagtttattatttttgcgttaaatgaacgtgagtttaaataaatattaaaaacaagttccactttgatgttttgttggaacctcc

SEQ ID NO: 6626 - DNA, 2372 bp, Diabrotica virgifera
  SmartBlast Evalue=0; Info="Activating signal cointegrator 1 complex subunit 3, helc1, putative n=1 Tax=Pediculus humanus corporis RepID=E0VWZ2_PEDHC"
gccgaattgtgcattttgaggttgtttcgaagaaatccaaacttaaaggtagtctatattgcacctttaaaggctctagtacgagaaagagtaaaagattggtctgtaaagttcgaaaagatcaacaagaaagtggtggaagtaaccggtgatataactcctcggtctgaattcataaggtccgccaatatcatcatcactactcccgaaaagtgggacgccatgagcagaaattggacagagaaagatttcgttaaagacgtaggtctaatggtgatcgacgaaatccatttgttgggcgaagatagaggacccgtactggaggtgatcgtttctaggatgaattatattaatatgaagacgaagaagtctataaggattgtcggattgtcgactgctatggcgaatcctggagatttggcttactggctaaatgcagacaggagaggaatcttcaacttcagctcagcagtacgaccagtacccttggaaatccacctgcaaggtttcacagctaaacatttttgccccagaatggcgtctatgaataagccttgctatcaagctatttgtcaatatgcaactgatagttctgctttgatattcgtagcttcgagaaaacaaaccagaataaccggttacgaaatgatgaagtttctgctgacagaaagtaatccacagaagtggctacattgtgagccagctgaaattgaagaagctagatataggttagtggatcaagacttggcacaacttcttcagttcggaatcggtattcatcacgcagcattgaccgacactgacagaaacattgttgagcatttgtacgttaacagaaaaatacaagttctggttgcaacagccactctagcctggggtgttaattttcctgcaagattagtggtcgtgaaaggaacggaatacttcgatggtgctaccaaacgatatgtggacatgcctattactgatgtgatacaaatggtgggcagagcaggtcgtccacaatttgacaccactggaatagcctgcgtaatggtccaagagaataagaagaacttctacagaaaattcctcttcgaacctttcccagtagaatcgaatcttctcgagttcttaccagaccacgtcaacgcagaaatttacaacggaaacatcaccaacaaagcgcagcttatcgagttcattcagtctacatttttctatagaaggcttttggccaatccctcttattatcagatggacgctagttctacgccagatctatacgttgatgagctggccgagtcggtcattgaaacgttacagaaacatgattgtattgttcaagaagaaggggaaatgagattattctacgaatcaacaattttgggacatctcgcagctcagtactatctctcctacaaaaccgtccattttttgagtgaaaccatgcaacaagacagttcaatcgaagaaatgttggagttgatatgccaagtagaagaatataagttgatacccgtgagacacaatgaggataatattaataaggacctggtacgacaaattgacttgaaatcttcatttgcatatgactctccagctttgaaagttttgttaatgatcaaatactacctattgggccttaatttaccaaaccaagagtatgtgttggatttaaaaaatgttttggatcagattatacgaattattcacgctatgatgaatttatctgcaagtagaaattggcgcgattgcacaataaggctaatattcttctgccagatgctcatacaaggctacaccataaacacttccaacgtcatgatgcttccttacattaatcacgaaaactttagggatttgagaaaccagttatccacgcgaggagtcaaaattgataacttcaatgtacctacaatacgcagcctattggcaaacgacaaaaatcttaagtatgctcttgaagatattttaaccggaatgttcggaaacgcttcaagagaggtgatgaagacgttgaacgacttgcctttgttgaccattagaacaaccattattaacaccacgaataaagaaacggttccatgtttgatggaggacaacttttacaacgttaaagtaaatgcaaacgctcagtgtatgttcgaactaaccgtctcacgacaaggctccagtaaaatgaacgtgtacagcaagaagttcaataaacagaaagaagagttttggtttttgatcttcatcgaggaaaacgaactgaccttcaggaaattttctttttcgaaacatctgaagaaaattgttatgccagtgcagattccagaaagaagagggatatacaattatagggtgatgataatgagtgactgttatatcggtctggatcaagtggt

SEQ ID NO: 6627 - DNA, 2366 bp, Diabrotica virgifera
aagttggcaatcaaaaccaaaaacccgaaaaaaagggaaagaacatgagaccacgtgcattgaataaatcttttgatacattataatcatattatcatatgagtgaagaaaaaactatatttatatgaaatcagtgctgatttcagctctacaatacagaaataagagcgagaacaccatcagaactagagttcttaaaatcaatcaattttcaagtcaaattgttaataaaacttttatttcctctacgtaagttgtaaacatcattaaaaacttatatatcacagacaattgaacaatattcctattgtttatctaaccatggtaggttttattcatttgtagctgttttaacacattcgctgccgatcacgcgccagctcgtgatatggttactttagtcaggtgccgttcacgcgccagcgcgtggtatggttacttcagtcaggtgctgttcaacagaatggttccttagccaagttccatccttgtcaatagacagcgaatgggctaatagttaggaaaagaagtaattaattgccatctttgatttgattgagaaataaatatcttaacacatcaaaccctgctcaagtttgagttttatataacttatcattctcataacctccgtcagtgatcccagtcaacaaaataaaatactagaccttttcctgtccaatttaaatcattctgtccaatttgttatatataatatagtgtattatattaatctgacaacattcattttaataagaaatgatttgtacaaaaattaaatcagcgcatgtcaactacaatcaatatattcaccaatgctcgaaggatacaaatcagttccgccagttttcaattgtacaaccaactttcaacaaccgtaaccacaaagtaacgtttggttttgttgtattaccaacacctgcttttcgttgaaatctaaaaataaattgtgagcaataaccatttgtaaatccaaatctgtgagttttagttgcagacaacggttgaaattttgttgtataagtgcaaaacatccatgtttaaggcttcaaaaaagtttggaacaagatattttgtaacagacgaatgcaaaatggaggtgaatcagcaatcggcagatcaaacttagttgacctcgcctcttgaatatgttattagtgtttttactcatatgtgcctagtacagacttgtgacgttcttcctatgtgactggcgcatcgtagcctagctgccttcattttatttactagtttaggctctctaaacaccatgattacctttcttaaactctcattttctcggagatcttgactcccctttattcaacttcagagtttttgctcagggagcaacacccaacttagttagcttcaaagatcttaagaggagttaagaattcgaaatggttactgttcagtgtgatattcgtgtaaagagatcttttatgacattttttaagatacttggttatcgcgacgttcaattgtagatctttcagatctagatccagatttagagccagatctttcatttaacccttatcagaaccctattatgttaagaaatagtcttcatacatctgtgattgtatagtacgtgcccatagtttttttaaaaaatcgtgacagtgtttgcagtccatttatttttttttaatagaaaattctttagtttaggataaccaacgcactttttacctggactgttctctctgcacttcccagtagtttagaagcaggagcaaaatattcaatgcaagcaaaccgaacgacgtattcttctaaaaatactgaactaaacaagacagcacaaaattggtttgggtagtaaagacgataatgttatttaaaaaaattgaaatcatacacactaaacgctcaagtcacttaatttgacacaatctctaaagatcctaatggcattataagtctagtagttaaaaaaatcttgtgacaacacttttgaaaagtctttattaactaggatacattttgactgtaaaatatttcactttttgtaatgtatgtcccaataaatacaccactaagaatttatatcattatatttaagttttatctcttaacgacttaaatatcatctgagctctgcaaacaaaggctttaactatctttacattctgtataattacatagtggattcaaatatatacagaataggccaaaaaagtagccgctaatatatgtaattataatgttgtgaaatataaaatacaaatatactcttttaaaaatagaacaggatgagcaacttatactctgagattggcatctccgatttaatgacggagaaaaatagttttataggaaaattatagacacaattgatcaatatatctatccacaac

SEQ ID NO: 6628 - DNA, 2364 bp, Diabrotica virgifera
  SmartBlast Evalue=1E-143; Info="Phospholipase A-2-activating protein, putative n=1 Tax=Pediculus humanus corporis RepID= E0VB04_PEDHC"
aatcatcggtttgtgtacacttgaagacgtaatcaaagttcccaaagccacgtaagctctgaaatgggcttctgcttctgttagtttcgtaattaaatctggtattacttgagctaaaactgttattcctatttcatcgttgtgttttagcgtaagtatagtaagatttaataaggacgttgctaaggccacttgacagtttttgttcaaattgctaaatgaggtaaaattttccaaaatatcaaaacggttattgtagacgagactctcacccgcttcatgcaaacataaattggtaatagttctaagagcaatcaccatattattcacaattgtgcaatcacagctaatgtaggttttgattttttcaaatataataccattattcaccgacgatattacttcattgctctttttatgtcttacagctaatctgacgacgtccaaaacaggaaatacgattgaatctggccattccaataatttaaataaaatatcaacagcgtatccgtcagtaggtggactagaacacaatttcaccacttgttccagatccctttcttcaattttatcattacaatcgccagttttttcattgaattctttaagtttctttaaaattacattagcgtctcccacatcgaaactatggtaagttttgacaggaaagaagcctgatcctgattccgcatttaccgtcgtatagctcgagctgccggtaaatgggtcgctattttgaccagcggaggcagcgggtggttgagatctagttccggatgttgaataactgctaccaccagtaaagggatccagattcattcctgtttgtccttgattagcagatccgtaacttggagtataacgtgagcctcctgtaaacggatcctgatattccatactaacttgaggtacatattgttctttgctatttttaagtatgaaatctactacctgttctaaatattctgctggcaacatatgcttggctaaaaatttatgagctgcttggtatggatcatctcctttattgaatggtaattttaatggaggcttaccatcttcaacatccacagaaaacacataatcataatactgaccttcatacatcgttttgccactgtcattttttgtcagtgcctccaagtacctccccaactttatcccaatgactgttttcaccatcttctacccacgtataggctactacgctgctaccgtctctgaccattttcatttgcccgtttctttttcctggatcgtaaagagcttctttgccaggtaagtctgatactttaactcctcctatttcttgaacagcttgtcgtttcagggcatttacctcttctgtaaatttagttaaattaacttcatctgctactcttgaatcatctttggtaaatattctaacaattccgtcactcgaacctgttacaatatctccattaggtaaacaatctacagcccacacagattgagctggaagttcaatacagcctttattctcattattctgccaaaacctaacacatctatcctcatctgaagttacaaagctatccatgccatgaggtctacatcttgctatactgtatataaaactagaatgtccataaagtgtattcatattttctccttcgtagctccagatttttactgatgcatcattcgatacacttataaaatacttcatttctggaaaatcttctaaacatctaactgcatcgttatgacctgatatagattgcagtctttgaccatctaatgaccaaactcctatagttttatcagctgatgcagtgaccacatttccattactaatttgtatgacataccacacagctgctgcgtgcccagaaaatgtctgtactggctttgaagtagatgtagataaagaccagtatttagctgtattatcccaagaagcactgaagaatgtattgggctcaacaccttttgtaagagcacatactgtgtttgtatgttctccttttatggcataggtatgaaagggttctccaggtttatgaataaaaatagccttatcatagccacctgtaacaaccagtccatcgggatattcactgctgggctccaaatatagcacacttccaacaaaattttcatggctcttataagtcattacatcttgataaacattctgaatagggttgtatctccaatattttgcagttctatctcttgagccgctaataatgtcattactagcggttacagctaaagctcgaatgtccattgaatggccaaaaagtgaggcgctcagcttaaagtctttagacatttcgaaaaaccaatataactcttataacacaatttttaaatgatacataaaaatatttataagat

SEQ ID NO: 6629 - DNA, 2369 bp, Diabrotica virgifera
  SmartBlast Evalue=2E-11; Info=YLP motif-containing protein 1 n= 1 Tax=Camponotus floridanus RepID=E2ARX3_9HYME
aaaaacgaaccatatactcaagaaattgaaactgatcctgctaagaaagcattgctggataaacctgtaactaatcagtggaatcaacaaatgccaggagcaggtcagaactatagtcaaccaccacctgctacagctgctgtcgctgccgctgctcctatcgctcaatcaacagaccccaaaggaagtcacgaagaactctcagaagctgagaaaaagtttgataaagaattcgctgcttgggaagctcagtttaataaatggagagaacaaaatgctaatcatccagataaagttcagtataaagaatatgaaaaaaaagtgggaatcttggagaaattcactcctagaaaggcgcgaacaaatgaggcgtaagagagttgcattgcaagcaacttccgcaccaaagagtcaatcttctttatcaaatcaagatacattgattaataaaactgacattactgcagctcaaccttcatctttaggtgctgcttataatgagagtgctttaccagcgacaaatgatctattcaataaacccccaccaaatgagaataatgatccattaacctttaaacctaaagatggaggatttttaactacaggttcgtcctctgaaggaattcctgggcttgatctggttaaagacgacactaaagaagaattgccggatagatcagaagaaattcaagatgaagctgaagaaggggataccaaagccaaatcgaaactaccagactttgaggcgatctccaaaggaatcaacacaattctcggagatcagaaactgcttagcatgctatcgatggtttcgcagaatgcacctcctgctgtagcttctactaatgtcactacagataccgtttcgaatattgcaccaaactatggacagaacttttcgttgccgccacctaatttccaacagtatcctaatagctacaccgctcctcctccaccttatcaagatccctattatcaacaggctagatccagtactaacgattactttcaaaaaggtcaatttgacggtccacctccaaatgtcccagccatgcacagcaaagtagatgactacagtaatcctccacctatatctaataatacaaaaggtatgggaaatgtcccaagtaactatggtagtggagcaagaggtttagataatcagttctcaagagatccccctcaatatggtaaagacagcgataattattatcgcaatgataacagaaacgataatttctcaaacgacagattttcgtcaaagaataaccttaatagagaagatgattactcaaatgataattattataaagataattacggaaagaatcgttatgatagcgggaataaattcgacgacgatgacgtggattatgataactataacgatgacgaggattacgacaaatacaatgatatgtttcaagaagacgaagaagattcttatcaagaagatcgtggacgtcagccccaccatcaaagacaattcaaatcttcaatggatcaaccacaaaagccgtttatgaaccagtcgcaaaatcaaataaagtcgttgatggatcaaccaaaaatccaacctttgatgagtcaggtacaccaaccgccacccaaaattccatctttgatggatacgccaattttgtcacgagatttaaaggataatgattttgatactaaagatccctatgacgattttccgctgtttgagcctgccaaagttattgattatgagcatgtgtcgcagacacaagaagacgactcggtttctatcgagccagtaaacatgttcgattacaaacacaaaccggttaattgcgtcccgcatatacatagaccgaaatggcttgcagaagctataaaattcatcagggaattcgatcccttagcacagcgttatgattatgaacgaattattccaccatcagaggcaagatattctgctcaaagaggtgaaaaccggtttagatacgatgaacgagacagggatgtgggaagaaatcgacaagagagatcatttgacagagatgactatcgtcgaaatagcaggagaagtgaagatgacactagaggcagaaacggaagtcgagacagggacagaagtagagaaggatacagagctaaggaccatgataataataggaaacagaaaaataatcgtgataaccgcaaaagaactagcaaaatatcttccaaagattttgacgaattgtctgatgcggatatggatttcgaagaagttgagcaatctcgacaccattccgaacagagtagtcgacgaagcagaagtccagaattaagtaatcctccgaatcctgcatcaaagcaattcgaaataacgatgatagaagacattatcaatcctccaggtc

SEQ ID NO: 6630 - DNA, 2367 bp, Diabrotica virgifera
  SmartBlast Evalue=3E-50; Info=Myeloid leukemia factor n=1 Tax= Culex quinquefasciatus RepID=B0WHY8_CULQU
agaaatagaaacgctgttcttgcaatttttagaaatttgttaagtattattgttgctgtttggagaaataacgggaaaattctgtgaatagttcgtattaaagaaatgtccatatttggacctttgatgggagatatggaagacgatcctttctttgggtgtcatatgcgacacatgcgtcaaatgagcaacatgatgaattcactattttctgatcccttctcaatgttgagaccaccaatgttgggatatgatgattatgaaaaccgggctctgactagtcgccacaacatgcacaattcactaatgtccccattttctatgccaattatgccaaattttaacagactgctcagtggatccttagactctatggccaatactggaaactaccacagctccaatactggaaactaccacagctccagtacagtgataagcatgacatctggacctgatggtcgtcaacaagtgtacaaagcaacttctagtacaagagtagcacctggaggtgtcaaagaaacccagaagacagttacagactcaatgacaggcactaagaaaatgtccataggccaccatattggtgaaagagctcatattatagaaaaggaacagaatattcatacaggtgaaagagtcgaaagtgaggacttgataaatattgaagatgatgagaaagaagaattcaacaatgagtgggaaagtaaaacacggagatctgaaattcccagaataacagcaggttcatctagaaatcgtcatggttcatacatccattcatccataccagccataacagcaggatcaagtagtcgtcgacatagggacagaaccgtaccagctacgtcgccatctgtgatatcttctcggagaggtatacgttcgccaaagttagcgctgccttcgacgagcgctcctaggtattccagacattaatctaattaatataaccaagtccacaacccagtacaagatatttccactgctgctggtaggcacccttatagttcccccaatcaaccacaacaaccgaagaaatcaaaatcattgaaaacttatgaagaagatccttcaccaccccaggctgacaattagatttattcttatcatcgttagattatagtattactaaaatatagatattttactagatacatttcaaactgtaataacgtaaatagttcgtttgaattcaggtctcatttatttttaaaatcatcctaaagttactcactgtaattaggggttttcttttaattatattcactgtaccatgtggctgttttcttcggatttactcaagtttggcaagtaaaaatgatttaatgggcttctaaaaatgtatatttttaccatatatcatatactcaaaattattacacagaaagtaaaatgtattgaacaagaatttgtaagaaaaagtaatgaacacaatatctggagcaacttcactgaaagctttaggtctcggaatattacaaataattgacttctttccttctctctattgttcaagtaaaggcggtattgtcagatcttgtaagtctaatatctttattttagaatgctaaaatatttacgttattatatttgaagtatatcttcaggcacattcaatttatttttgtagaatggtcgcccttttgtttttttttttccaaaaatatttgatttttaatagttattgtatgtggtcgattttgtagtaaggtaaatgagaagtgaacgcaacagtgtaaaattatattcttactttaagatgtttacagagcaattatcgtgtttccaatgactagatgtgtacggtcatcagtttaccccaaaatttattgttcaatgaagaacctattgaaatataatctgagattgctctgtgcgatatcttttattattccattttgtgattaagtttatatttgcttaagtatgtgaacgagaagaattattgaaaataaaattttgttcataatttttcgattgtcttaactatttacaaaaattagggtaaaaattctgtcaaaatgttggaaatagaaccaaaatcaacacgtacttttcacaacaaaaaacatctaaatattgatcatttttcttgctctgctgggactagttttattataggttctatctctaccacaacctttattatgtcaactgcaccgtaacatcaaatatatgtagaatacataaaataagccatgatatactgtattttgatctctaactttgttggtagaatttgtacatagtgtccaaaaacggtgaatcaggtgagaaatatgatatgactttgttctaaaagatgtggaaaactgtaaagtgcgcatgtcacaatctgtatatttgttctgctcgaagaagtga

SEQ ID NO: 6631 - DNA, 2358 bp, Diabrotica virgifera
cataatatgtgtatattattacacaataagtgtgaaactatcggaagcaggaaagaagtaaactaatattccagcattatttaattacataaaatacaaataaactgttcaaaatatatatatttcgttgaaatcatatataatagatagacaataattattatttgctactattcgcaatacttttctcattaaatgtccaaccgaagttgaactagtaatccgctacttggcgataccagcgaagctcacagcgaatagttagctccgggactgagagacataacagaagcccacagttagctagtgcgcctacaccttaacgatagtgacatctttcgtattaacttgaaataaaatttcgtaacatccgatggttagggttgattccaataatagaatttacctatttaacggtttaatacatgggaaagagaaaaacgccacggaaaagtggtttgatgtggattttactaaatatatacattatacaggatgtttcattgataaagaatgcttctttgtctcaaatatgtttgttgtcttcgagagtcataatattacattagcattacgattttgagcatatatgtatccaattaattttttaatgtttcatggcatttagtcaaatcttaacacttttttgaactaagacacgggagaacaaacatgtgcttattgtgtcgatttcatgtcatctaatgaccctaagctatatttaacacattcgctgcacatgactccaattggagtcaaagtggtactttactagatgcgcatgactcccatcggggacagttacttttttaagtcggtaacagttgatttttaagacggtatatttttgtcgctcatgtacaactcttgtgttaaaaccgtgcaagataaacaaaaacagtgtaatattattcaaaataatacataatattcttctctataagtaatgcaaacattgttttggtgtaaaatatttgttttgcatcaaataccaattgttaactgtcattcgctgttgtgaaatgtgtcacatttgcttgtgataattgtcacaagaacacaatagtttaatctataaggtttttaatatatttgcgcgttatcaatgaaatatcatggggtagggaatgtttcggtgtagctggagctgcaggggtgtattttcgtagagattttgttggaatgaatgtagatgattctatatctagatccagatgagtaatacgtgttccaattgcacacacgaatatattaatatacatttatgccaggtgtattatttgaagtaactagctgtagacattatcttaaatacaaaatgatacaaattaatgttaaattatttatattaccgctatgattaattgattgttagtgtaattataaatttaaatagaaagttaaaaattagaacaattcgactgatgtacagatacagaataagttaaaattaaaatgaaaaaatgtacaataacatcataattacctagggcctttaaatatagtgcaatgtctcatgtcgtttttatctaggaaaatagttgattacgtaagatattttagatattttcatattttgtagaataattttaatacatttaggcgtatgtgtttcttcaaaacacgcagacctttaggcaataagctgaagaacgagtttactcaacgagtggtcgcccagatccagacgaaacgtctatctttgtttccttaaactgttgccttaacagtatcatacatattataacagtctcgagtctcattggcagtaggatgtatttaaactctttatatctttcccaaatcaaaactttaaataattaggcaattttatgtaatgttatttatttcctagaatatcaacagtgagagcttttaacgttttttggtatcatatcgttttatttgaagttatatactattttgtaccattctgtggcaaatatgcttctgtatgatgtcatggaacacacatccacaatatcgtatagtacaaacgtcaatgtgatgtgaattttcgtagtgccaaattttaaaatatgcattctagcagcaacgaaacagttacagtgttagtatgtctaactagctggtagagttggttcaaaacctcatgaatattgaaaatacgcatgcccgaaaagagatacctaagaacatcgattattttaattgctgaatcagaccaataatgacatacgcggcagaaacacgacctggcacagagaggataaaaagcatgctagaaacagcagagatgaaaacgcttcgaaaattcgatggtaaggcactatgggacagctagaagtacagatctctagatgccgtcaatcgcttcgaaggcaatcaacagagcga

SEQ ID NO: 6632 - DNA, 2363 bp, Diabrotica virgifera
gtgttttattcatacatctatacaaaaataattatcacaatttacacataagcctaaaaataacgtaaagaaaatagtcaagatatctatttgtcgttataattatgaaaatatatacaaataaattttaatgtaaaagtatgtcttatgaaataaaaatagaaatttataaatgagaataaaatgttttgaataatcatgaaaatcagaaccgtattcattgtagaaatatgtgtattagaacagacatgtaactgaaatattgaagttttaaataaacttttattgaaatattatatgtaaaatattaagacaatgaaatatttctgattttagactgtttttcataaaagtataaagtataagtaaggtgactggaaagtcattgtacagggaacgtcggtaagtcagtgattaaaataatagatggcggtatgaattcaaatcagtattaaatatataggtatattcctagttatttggatgtccatggaataggcagactcagaattttaagaatactatagatttattcgaaaccatatccgaaatactcttattctgatatggcatatctctattttcacatttcttgtatatgtttcacagttttatttccaattgtaccacatttggacatgtaaacaatgcctaattaaaatcagtaaattcatttaatcaaattccaaaccaacagacttattggttggggattttagatcaaattacaagaatattagttaaaagtcacgttaactgtttacacatttttacccatccttgggcgtttaaggattaatatcggaactaatcaaacactcaatgctttctaacaacaaactattgagctactcttcacggcgtattgtactggcgaaatctgaggaaactagaccaagaggtagaccaaaatgcagggatagtgtatatttatatgaagttgccacggagataagtacctaccggaaataaaagcacgcaaaggtcagtattcataaatcccaagagagttttctgtatcaaaaataatcatgtatttataacaaaaatactaaaattacggtttgtaatcctgaatgctaaaaaagttcaaacttgatagactcaaagcagatgaaagtgatttcattggcacatactagggatattataaactgaaagaaacactaatatagaactgcaggaggagattctaaatatgcagtaggtactacaaagcataatgacaggtaaaataaaagctacacggtgttaaggaaaacgaacttcttgaatgagaaacttggagaattcagtagaagacgggaccttctgaagaagaattagtgtagttaatataaagaaattactatgtgtacttgcttgtaagaaaggttataaaataaacctaattttaacgtaaacacatctgaaaggatcagagagataaatatacgatcaataagatacataagtagagtcagcgatcagaaaaaacagaactccttaatgacttaagtcagatcttaatatcattcacttataatagtctagcttgaagtcataacttaaaaaaaatagtcattattacttccaatcccgaagcgggaaagagtctttgtctttggtaaaaaatactttgtgaagaatgtttatttgtttcacaggtgtcatacgatcaaaaaagcattcctaactttttagtcgcaattaatgattattagtccaaaatacctttatgtaaaatgaagcagagtcttgaataaaatttttgcaagtaatttataccagttctataaaaatattgacaaaagtgtaggagaccaaaaaaatataatatggtacactatcttggttgttattaaaattcaagtaatgtgaacaaatcattgaactacttgcaaaaaatttctctatagacacagaataagaagtacttacttattctatgtcagttttaaaaacatcggtcatacataaaacgattttgaaatggactgattgtctgattgcatacaaagtgattctctgatattagtaaaattcaataaatgtaaattcgaaaaacccaaagattctgcttttatacagccatattgtcgcctcatttagtaacaaatcactgacttatcaagttttataacaataaaagcttttataataaatgcatgtgtcccccttcaccaattgttcaaaattatttaaatggtaaccatagcaatattattacaacgatgtaagttgtatcatacatagcattttaaaggaattgtgagtacagttgagtccgcgaaacctcacccgtgcgtcaccatctaaagcatacgaaataagtcgatgataagtcggaaattgaaatttactatcatcgacttatttcgcat

SEQ ID NO: 6633 - DNA, 2364 bp, Diabrotica virgifera
  SmartBlast Evalue=0; Info="Protein GCN20, putative n=1 Tax= Pediculus humanus corporis RepID=E0V979_PEDHC"
gttagggtaacttgtcacataaatttttataagaaaatctggattttactattctaaacaatggggacgtgtagtgagtacattaaaaatgtttttcctgcgatagatgaagaatctaaacaatatgtagaaggtgtattattaaatggtgcggatgattttgaggatagtgaagaagtatatgatgcagtaggagaagttctaaaagaaatttcgaacgacaagtccgaagatgatattagaaatatctgcaatgatcttctatgcatgttaaaaccggataaaggagaaaaggctactaacggggctatgaaagttttaaatgcgccagtacatttggggtcaatggtagacaatacggatacaaatattgatgatgttaaaagtatatggcttatacaacgggatgattctctgaaagtcgatgcaagaaaactagaaaaagctgaagctaagctacaagaaaaattagacaagagaacgaaagaaataaaggttatagcaccgcccaaactacagaccgctacagcatcgcaagttaccagcaaaaaggacagcaaactagaagccaaaggtaccaataggacacaggacataagaatagaaaacttcgatgttgcgtatggagatagggttttgcttcaaggagctgatctaactcttgctagtggtagaagatatggtcttgtaggtagaaacggtttaggaaaaagtactctcctaaggatgatttctggaagccaattaagaataccctcccacatatcaattcttcatgtggaacaagaagttgtaggtgatgatactgtagccttagatagtgtactagaatgtgatactgtgcgcgaagaattgttaaaaaaggaaaaagaaattagtgctgcaattaatagtggatcggttgatccacaactaaacagtcaattgacagaagtgtataatcaattacaaaacatagaagccgataaagcacctgccagggcttctattatcttaaatggtttaggtttcacgtccgaaatgcaacagaacgccactaagacattttctggagggtggaggatgagattggcattagctcgtgctcttttctctagacctgatctcttacttcttgatgaacctactaacatgttggacattaaagcgatcatctggttagaaaactatttacaaaactggcctacgacgttactggtagtttctcacgatcgcaatttcttagacacggtgcctactgatattctacaccttcactctcaaaggatagaggcctacaggggaaattatgagcaatttgagaaaacaaagacggaaaaattgaagaaccaacaacgagaatatgaggcgcaaatgcagcaaagacagcacgtccaagagttcatcgataggtttaggtataacgcaaacagagccgcattggtgcagtctaaaataaaaatgttggaaaaacttcctgaattgaagcctattgtgaaagaaacagaagttgtattaagattaccagagacagaaccattgtcgcctcccattttacaactagacgaaatattgttccggtataactccgaacgagttatatttagcaacgtcaacctcggagctaccatggactccagaatatgtatcgtcggtgacaatggcgctggtaagactacccttctcaaaatcatcatgggaatattatctccgacatctggtatgagaaacgtgcaccggaatcttaaatttggatattttagtcagcatcacgtggatcagttagatatgaacgtcaattccgtagaacttttacaacaaacatatcccggtaaaccaatcgaagaatatagaaggcaactgggcagttttggtgtttccggtgatttagctctccaaacagtatcgagtctctctggaggtcaaaaatcgagagtagccttcgctacgatgtgcatgggccgacctaacttcctagttctcgacgaacctacgaatcacctggacatagaaacgatagaagccctcggcaaagccttaaagaagtacacgggaggtgtaattttagtatctcacgacgaacgtctgataagaatggtctgcagcgaattgtgggtctgcggaaacggatcggtcaaaagcgtggagggaggtttcgacgaataccgcaagatcgtcgagcaggagttggaggctgcggcgcagtcgaaatagcatttctaaacaaattatttatacggtaataaaaaaaataaaagcactgtgattgaggcatgttgaagctgagattgactgttccggataatattgtttttgtgtatgatgatgatgtaatttatttatttaacaaatatataatgcctttttccaatattagttttgcat

SEQ ID NO: 6634 - DNA, 2359 bp, Diabrotica virgifera
ttttgaaaacgtatataagttttctttcaatagtatgaactatcattcataaatatacatatttttgctatcagagcataccaaatgaagtagttctgtatttatttcaaacaagtacatttagtttatttgttcagttatatgtttccatttctagtagtcttctggtatctgtggctggattttagtgtgtcaactccagttttataacctaaccaaacctcacctaatgcaacctaacctcacataacctcaaataatataacaaaatctctcgtagactaacctaataatgcattggtgtggtatgaacgattcggaatttgttttaattaaagaaatttttcaaaaattatgtatatttatgcaaaaatcttcattttttcttgtttacactgctattgatattgtattcgttgactagtctgcgtccagttgcacaaacgacacccctaaagctacttaacagtaagacgatgcttttaaatgctttttgtgtgactggtacatatattataaattaagcttagcgagtaattaagaatcttatctttaaatatccagttgtacatcttacatagtgtacctcttagaataggaaaatgtatttttcaactgtacctaaccaaacgcgtatagcaaaaggtgtagaacgtgacaaagaatagcataaagaaggacctgagcttgttttagttattcttccttcaaaattagataatccttaaattaaactagatatgtgtgctaaaaaatcatctctggcggtacagccaatagaaaagaagctgaggaaggtctcagatcaccgtgatcaattatttaagcagaataatggaaaactggtcgtgagccatctaaatcttctctatgctatagtttaaacgtactacacctattttcaaatcacagctttgtattcatgctagctaactttgtatcatatcctcagtagtttatcgtgacctattttttatatatctactaaaagacaccgatagtttttccaaaaaaaaaacttctatttgatagaaaataaaatttatcgtttacaaattatggtaaaattatttagttgttattattcagcatttacaacggtacaacgctttctttcagtgcagaacgagtatcaaaatcataatacgagcaaaacttaacggagccccaacatataccaaccttgaataacacaaaatacaacaatttcttagatctggggaaaatcgtcgaagatttgacaatttcggccaatcagagcgccatattgtagtcacgtgacctaaaattttcctagattccagtaaactggactattacaggagcgataaagcattaatagcgttatttgtgttggctatcccgaagtttgattttttatagtagtcacgatgtttttggtcgatgaaagactttagacaatgattttatattccctactactcgttttgccactgaatgaagcattttccacattcctgttcgttttctaggaatataagtgtaaaattgactgacaaattacatgttttcgttactatcatcgatacatcattttcgtagagggctggatcatgcgtgggtgattaaaatacagttgttgtacgtttcttttcgtcaccctagtcaataaagtccttatttatgtgctattgtttctattatcgttggtttacagcggtgtgtacatgacaagggcgatttaaacggatctgcgggtaaataccatagacatattatcgatagaccaagctaggaatatgccactcaatgcatcggggtgtaacgccaatatcaagtacggtggtctagctatctttgtctgttgtgcgagtgtgagggtatctaccaagaggtgggagtaatggaacgacacagacacagaggcagcggccatcatatgctagagagagaaagctaagcgccggtagagagagatagatataccaccgacccgaactgctccacgttatgctatttttcggaccttgccaaatctatgtgttattatatctatggtaaataccgataagaacgactatacaaacatgaatttttgttcatttgtaacatataattatacacttaagtaataccacaaaatatggctttgctacttaaaggaacaatacatgggacataatatattttgtttaaagtaataaaaaaaaccctttttcaattgtctgtgcacgccactgtcgattgtatataatctttaacgccgttgcactgtaatatctgaaagtaaggttatggctgttataaaatagaaatatattatctaaatgtatgttatttcttctagttatctttcttttaagtatatcatgtcaattgagaatgttaaataaatatt

SEQ ID NO: 6635 - DNA, 2351 bp, Diabrotica virgifera
  SmartBlast Evalue=0; Info=Metalloprotease m41 ftsh n=1 Tax= Aedes aegypti RepID=Q16YE9_AEDAE
cttcttctaaggaaccagtaccttcgacgaattcttcataggttgatttttcggggaagggtcttttgccaagtaattcgatcatatcgtctctgctgatgatctctttttgcaatagacgttcggctactttttctacttgtttcttgcgttctgataacagggcggtggtctttttatgggcagtatcgattaatttcctaacctctatatcgataagttgtgctgtactttctgaataaggcttctccattatcatttctccttctctaggcatatcgaaactaacattaccgactttgtcgttcataccgtagtgtactacctgcgcataggcactctgcgtgacttttttcaaatcgtcttgagctcccgtagtgattctcttgaaaaatagttcttcggatacacggcctcctaaagtcatacacattctatcgaaaagttgttccttactgtataaatactggtcttttggcaaatattgggcgtaacctagtccctttcctctgggaatgatcgaaacctttaataagggatcagcatgctgtaagaaccatccagctacagcatgtccggcctcgtggtaagcaacggtcttcttttcttctggcgatagaacgttcgtcttcttctccattccagccacaacacgctcaattgcttgttcgaagtgcttcatatttatcgaatcatttaaatccctggcagctattaaagctgcctcattacatacatttgctatatcagctccagtaaaaccaggtgttaaggcggccatttttcttgctaactcgctcttatctaaagtagtcttcaatggacctaaatgtactttaaaaatactagctctgcctttgatatctggagctggtacaaatatttgcctatcgaatctaccaggtctaagtaaggctttatctaaaatgtctactctgttggtggctgcaagtactacaacattcgtagtagtgttgaatccatccatttctactagaagctggttcaaggtgttttcctgttccgaatggcctccgaaacttcttccgccacgttttctgccaacggcatcgatttcatctataaataggatgcacggggcatgttttctggccattgagaagagatctcttactctagagggaccaacaccgacaaacatttctaaaaattcagatccggagacagtgataaacggcacattggcttcaccagctgttgcttttgctagaagtgttttaccggttccaggaggacctgttaacattgccccttttggaattttagcaccaagatcaatatattgttgtggattttttaagaaattaacaaattccataatttctatttttgcttcttcacatcctgctacatccttaaatttaacaccaatatcactggaattaatcaacttggcagtgctttccatcacacccccaaacaagcctcctcctctcttgcctcgtttgccgcccatcatttcagcggatcttcgcatcatgtaaattaggaaagcaattacaagtatagtaggaagcataccagaaaggcttgctgcttctatttctgttttatatataactggtatgaagtttgcaggttccatgttcaaatctacttgtgcattttctagatttctttcgaatgaatctacactgcctatgttaaaccatattatattcgctccctcaacagtatttccaggtaaaagtttaactcgtacccattttttattcactacttccagtctctcgactactcctcgttgcaaatagctatgtacaaactctttccaactgatttctttataacccatctcccacatggtcacggttgctaggaaagctacagctgctactgcacccaggacataccatttgtccctttcagaatccccaaagggtttaccaccacttccccctcttccggagcctccaaacaatccaaatgaccactgttcatagggcttagaactactgccaggacctggagccttgcttggtggtggctttggaagctctttctgtggttcagtctttccatctttccccttcacttccttactttctttgggaggttctttgatttcttttgccccgcccggcttgaagtacttttcaaatcctttagggggcttctcgcaaaataatcgccattcgtctaatacagctcgttttaaagaaaatttttgctgtgaaaagtttacattactttgcttgaatgttttccacactagattttccaatcttctacaactagttaacagccgatgtgccataattattgtattttatattatttgaagtctccaaaaagacaacatcatataactttataaaatttcaaataca

SEQ ID NO: 6636 - DNA, 2353 bp, Diabrotica virgifera
  SmartBlast Evalue=1E-169; Info=Bitesize isoform 2 n=3 Tax= melanogaster subgroup RepID=Q6XK19_DROME
taaagttacacctcacagttcaccaccgctaatagctaaagttatgcaccacatcggaagtcgtctggttgcttaatgcatgaggtttccagcggagagagccacgctagtaattccccaaaaacaaaacactaccatcgaagactgcagcataaaatatcttcagcttctagtacgacgacggaggacgactgtccagaaggaagtggagatgttatgggatacgaagaccaccacgttccatataatttactccctagaagtagatctcacgatttgttaatgggtgaaacgagggcacatcagtcgactggaggtgtctcggatatagcggaagagaaagaagctagtgattgtgaacggttcagttggcgcggtagtttcgagtctgctttgcttgctaccgactctcgtaataagctgtcgctcttgggaggcgaagcgtctgcttcagcttcagctttagccatcgctgcgaagagaaggtctgctggagacttgctcttcagccacaagagccttagtcgggaacagttagatagagtgcggagttgtggtagtatcggtggggccaacagtgaggacaaactttgggtgacttcggcgatccgtccgaaccgaagacgatcgagtgtaccggatgctacttgcggttcgggtggttccgcggacggtgaagacgaggatgaagagatggaaagcagatcaacgcttcctaggagtttacagggcggcactcctaccactaactctttacctcgtcttcccaccacagccgccgctagtagcatacaaaagagtcagagtcaccatttcttgtctcaaaatgttaaaagtgctcgatacagacctccggggtttaatagactgaccgcgataccgaaaagagctgtctccgcgcctggtcttcaaccgagccatcagaggagaggaagaagatctcaacaaagtaatgttattaatgatgaagttggagtttctgaggctcattcgtcgccgatgctcgcgtctcccagaaacggtacgaagagtgccacccccagtccagtgacgtccgtcgccaaacgaaacggagccagactgaacccggactggcatgacgaagatctcgataggataggaagtttgcagaatagaggaagtctatctactcttggggctcgctcggactcgatggcgagcgtgtactcaggagcaggagagggcaggtacggaactgttgcagtaagaggacaagtagagtttggactgcaatataactacaaagcaggagcgttggagatccaaatcaaacagtgtaaagatctagcacctgtcgatacgaaaagaaataggtcggatccttacgttaaagtgtatctgttacctgataaatccaaaagcggcaaacgaaagacgaaagtgaaaaagcacacgctcaatccagtattcgacgaatgtctcaagttccacatttctttaaacggtttagaatcaagaactttgtggttaacggtatggcattcggatatgttcggaaggaacgatttcctaggggaggtcatgatgactttagagaataaagttttcgatgatcctacgcccaagtggtataaccttcaagaaaggacggagcctttcgaagatgtttcttcatacaaaggtgatattatagtttgtttgaagttcatacctccagatatgacagttcaaaagaaaggaaaacgatctagaggagctcttcacgtgttggtcaaagaagccaaatcactgactgccgtcaaagcgaatggaacctctgatccattttgtaaaagttaccttctccctgacaaaggtcggagttccaaacagaaaactcccgttgcgaagcgaaccaccaatcctgtatggaattataccttcatatacgacgatgtaacgttacaagaattagctgaaaggtgtctagagttgaccgtttgggatcacgatcgactggccagcaatgagttcctgggtggcgttaggttctcgttaggaacaggcaaacactatggtaaacccgtcgactggatggacgcttccggcagagagctctccctgtggaaaaacatgttggaaaagcccaatttctgggtggaaggttcactatcattaagatcatcgctggaatcccgcggttcataacgttttcttcccattttatcattaaacaaaactatgtgcgaagtcgtatacagaatgttactataataaccgatattttttgaatgtttgttgatacggtagtgatttgtacatgagttcataaaatgtataatcattttacgctgtaagtaaatttttattactagttatttaatgtatacctttttaggtaaatgtaactcta

SEQ ID NO: 6637 - DNA, 2352 bp, Diabrotica virgifera
  SmartBlast Evalue=2E-86; Info="Solute carrier family 2, facilitated glucose transporter member 8 n=1 Tax=Harpegnathos saltator RepID=E2BLV7_9HYME"
aattttgagtttttattataatattctaacaaacaaattaattacagaattccaactctacgcataaatctctaggaggagtgtcttccacctggttgtacatttggtcgattgctggaattaacttgtcctcgcacaattttttcaaatctcctggtaaaacttggcacaattctttcacaatttgtttgtgtcctttcaccaggcaattagagctgagtttgatttaaagttttcagttcaacatgtctggcaagacaaactacttccttcactgggcagcttttacagtgaacattttgacgttagccacaggaatagccatggcatgggcttctccatctttaataaaactagaaagcttggatccagatgtcaatcctcttggacggcccataacaacagctgaaaagtcactgatagcttctttaccaacttttaccagcgtcccaggaacaattatagctggttatgtgtctcagaaactcggtcgaaagaaaacactaatactatttagcttaccgttcctattctgttatataggtatagcactagctaaatcagttactgttttctacataactagattttttctcggtctaagttgtggctgtaccttagctgtattaccaagttacgttgcagaaatttctgaagattcgaatagaggatttctaggttgcattatgggtattatgggagcaataggatattttatcgtttatgctattggacctgtagtttctattcaaatgtttgcctatcttcaattatttccaataatactgttctatgtaatgtttgtaccttttatacctgagagtccttattacttcttggccaaaaagttagataaagaagctgaagcgtgcttgaaaaaaataagaactaccagtaaggtgcatgaagaattagcatatctcgaagaagttataaatgaaaataaggaaaagaaatcagattggagagagatatattccactaaagcagctagaaaaggtttgactattacctgtgggcttctgatgtttcaacaattattaggatttatggcagtgctgaactatatgcaatctattttcgaagctgccaagactagcattaattccaatacagcctcgttaatattaggaggtgttcagattatttccaacatattttccactcttttagtagatagattaggaagaaaagtacttttactagcttccaatgttggttgtactatatcactagcagctttaggagcatttttcttttgtctagagaacaattataatacagactccatattctggctacctattcttagtcttattgtatttttcgtatcattcaactttggatttggtacattacctttgacagtgtgtggagaactgttttccagtaacatcaaagcaatggctgccagtttgtcaacatgtgtttgcctgttactggcttttctagttactttaggttttccatatttatctgatgcagttggtaggccgtacaccttttggattttcgggataacttcagttctttctattttgtttgtagtatttatagtgcctgaaacaaaaggcaaaagttttaaagaaatacagcatgtactagaaggaaggcgttgaaggtgatgtgaaatgacataagactagagatatgatcttattatttatttatttctatttaaaaccattttcgaaaacattgtgtgggttttctactcttatctgcaatattttatcgccattatttgaatggaaaatttagctaagattgtagataatacgtttttgacagtattgtattaatgtaatcatttggaattcttctacaaagtggctaaatcagatcatagcattttataaacattataataatcgaaattcccagtattatttagtaatttaacaactatttatacatttcagcaaaaacttgatacattattgtagacaacagtgatccgcgtttacttaagaccaaaaatgttttttttgcccataatacaatcaaatttttttcgagaaccacttaataaaatgaaatttatttttggaactcttagaccactcatgatcttcagagatgtattcgaaacaccgcagttagtaatccatatgtttttttatttaaatttaaccgagttattaaacgagaatattatggcgaaaatgtttttatctgtcaaacttatcctttcgttatcaatgactgccaaaaatttttctttattaaatgattgttgaaaaaataaattacatgtgtagtaattgtatgtttttttaacctatgtagcaatgtgttactgctattattttattttgtaaattttattataaaatatacactgaaataatt

SEQ ID NO: 6638 - DNA, 2348 bp, Diabrotica virgifera
  SmartBlast Evalue=3E-76; Info=Vacuolar protein sorting- associated protein 13B n=1 Tax=Camponotus floridanus RepID= E2AKD0_9HYME
gttggtgtgaaccttttataatgttgaatggacaccgacccaattttgctcttgagctttaaataaacactttgaaaatccaacgaactaacaatatcttcggcatcgacgacaagtttcaaacgaggctgtggtggtgccagattgtcactcaaagtgtctttgcactcgcttgacaataattctatagtaaacctggtaattgtccactgaacccaagccgtcagtctagcagtctcgtcggtagtttcttgctgggataacgtcgcaataggtggggttctgtcactagtcgaatcaagcgtattttcttttaatatggttggagacattgtcgaactcttactaaggacaggtggtagagcgtctggagttttcggaacaacattcggcgccgtttcaggcataagattgctagctacttccatgagaccatagagaatacttgcaaaaaggtacacctgaacttcagaggtagaaataacaatcggagtcatgtctatatgaacacaaacaccaatgcaaccaatatccggtttactggtgtccaagtttacttcaccctcaggtttatttggcttcgtagagagcccaacggtagcattcaaagaaaccggtttcaagaatgtcaactttttaccgaattgaatggtgtaacagctcatgtctgatatagacattgtccagggaaaacttgatttctcagaagtccatattgtatcgggtagagtcactggaagtgtgtttaaatacttttttatactttgtcgatgagcgctacggatgtttgctaaaggcaatgttattatcaagatatccggaggttgttctttgttgacagctgactcaacggcctcttggatcccttgagatccgatcgcagatagtgaccccaatggaaaataaatagtacactgagaaatatctccacacagaaacactcctttccaaacatcgaaccacttcttcaaaaaattatatatcttctcttggatatccacagtttcttctcgggttacttgtactttctgtggaatgtacaaatgttctcggtcagaactgctatgcacggattctatttgactagatactttacgaggagtttctgcaacgctgctactgacatcggaaacgtttttggttttgggaccacattcatacatattaagggtatgtccaaactgcttgggagtgtataataaccatttacaaagtaaagggtctatgcaaacacgaatttcttgtagattaaacaagatgattggcggatgctgttgattctcgggacctatcggatactgaatggtcgcagtgaataagggtgcatatgaaggttctcctgaggtcccttctgtactacttcttctccttctggtgtcgattttaggttctgggccggaaataaataaaacttgttgaatatcatttgaaaatgaagaatcatccacttttttatgtattggttccaaaatgaagcctttgatcgaacctaggctcacatccatggaaaccgtcgagtttgtgtttacctttttgaaacggattgcttcaatgcacaattccataaatggtagtccttgatctttagaagcatctattaaaattgaagaattattcataagcttaatcgcaccttctgcatccattttcagcatcttccccacaatatacgtcaccaccatcattttagcattcgtaccattcaaagtaatactctctgactcgaacgtcgcctcggaatgcgtaatatccggattcgtccaatactgcggcttgttaatacttttagttgtgtaagataggctagatggcgttaaaatcgtggtgtgtttatttgggttgattattaatcggctgcaaagtccgaccactttgatattcttgcgggaataacatgcttcgaaaaattgccgagggggatctggtaattgacatgttgtatggacgagacgattaacgtacattgggtaggtaagactaatatcgaaaaattgacactctatggttagtttaggtaaaggaagaacctttgaagtacttggtgtggattgtgttcctttctttcgttttctataaagcatgcctttgattggttgaaagtaaggatgatccataagttctagttcgataataggagcgaaaaacgtgattcgcatgcttctactaggaataaattcgttcagcgcatcgaaatcttcttcggaaggaggttgaagctcttggaaactcttatcgggcttcggtacagcatatggtggatagtcgtaatatgaagctgcaacttgtagtgaactaagtcgatggaaaaatccggagcatagtctcaatttaaaaggtcccaaacataa

SEQ ID NO: 6639 - DNA, 2348 bp, Diabrotica virgifera
ttccggctttcgtcagactagcacctcaaacgatattgacgtttatgttttagaacaactacgtcaaaatttcgggtattatccgcaaaatagaccagttgataagtagataaaatcaagttatggtcatcaattcagaattcaatcgtaagtaggcaacacgtaatacacctacagtgtattatgcgttgccccaaatatcaattctactaacttgataggtaacccctatatagcgtaccgtgttacgggttgcctattttgttcattggattaaatttcacatttttaaattgaaatttacttaaaattttattttcgtattgaaattcatatgaaatgatgtctaatatattttgaagtagtatttacagtacttgaaataatttcaatgtacctgaacatcaggtaaatactttttacttagtacctgttaaaacttatattccggtgaagttgctttaatttcgtttaaaccaaactaaatccaaatttgttgacagcaaaacgttaggttttcaaattttaccagtgattttccaaatatatcctaacttctgttcaaaatcgtataccaaaaatattttataattattttgcttaaaatatatacaacataatgtaaatccgtgtgtcttaaagctaagatatacataacttttgatgggggttaggaagacagcatttagagtctattattattaaatttgttttgtttatagcttttatctgcaactgttcattccataaaaggtattatttgtgttggttcggtatattttatgtttgtttgttatattggtggtctacactcactagatctggttcaacaaaagcagcagtaccaaaaatcgttagtcaaacgctcctataacctcacataacctctttgtttccttaaactcaaattttgttacattgttgtagtgtaataaatgtgtaaggtttatttatgatgatctttttagaccaaatatgatctaattatgatcagttcttgtgagtagagacctctatacttctgtacagtgtcgtccaaagagatgaatatatttatcgaagtaaaatttattacacactagtttacgtcctgttgaaaagttccttcatgaatattattgtattgttggcagtctgtacttcaatgtaatattacacatagtgtataatgtgttttatattgtatttaaattcggaaatttggctaaatttggtttttggacatattaatgttaatacatgaacaaaaatcaaattatatacatttgttataaacatattacgatgtgatcgctgcaataagttccttttgtcattatatattgcaaaaattacccttatcttcaaaaaactgcttgtttcactgatgttagagtcttactattctctaactgtttctccatagatcactgtggctgttaaaaatgttctatatttacaaccagttaattaaattagagcgagaacaaataagtggaagtttaaatttacgttctactttttctcatctagaccattgttaattgcttttaacatgcaccaaaaaaggaaattaaaactgcgctgcatttaaaactgaaattgtcatcagtgtaatttcttgaggttatgaataattaataatgtacttcaatgtcaaaaaatgacgccatcgtaatgttatagttagcaagctatacatacttaccgccctcgacaccgtaaggtacaagaggacggcttaagtaagtaagtacatacttaccgcttaacacatatttgtgtttattcaagtataattttacgaatactttacctgtgggaatattttttagctgttttgtttgaaaatttttattattaactataaaacccagttttatttacataaaatgtcccagtcaaaaaaaaaactaaaacagcgttgcatttaaaactgcaattgtcaaaactgtcattttttgaggttatgaattattaataatgtagtttaacgtcaaaaaatgacgtcatagtaatattatagttaacaagttattccttaccatttttaacacaaatttgtgtttgatcaagtatatttttccgaatactttacctgtgggaacattttttagacgttttgtctgaaaaattttattattacctatctataaaacccagttttatgtacatgaaatgtcccagtcaaaagtgccaaatctgaaaacccccaaaaatcataaccccatatttaagtaaatgttgttattgtacttatacgcaaataatatatagcaatattgttgttgcgtttaaaatttaatgtttgaatttgtttttgcaaatttcttgcaatatgttttgtttaatgtaaagtttgtccgtcg

SEQ ID NO: 6640 - DNA, 2347 bp, Diabrotica virgifera
  SmartBlast Evalue=0; Info=Septin n=1 Tax=Aedes aegypti RepID= Q17KS9_AEDAE
caacgaaaagcgaaatggtttgaagagtttgtaaatgacttgaactgtttgttatctgtttgcgttccatcgaacaatgaaacaaagtaaacaatgataaaggacgcatttgtgcactgctgggaatgactaaaacttcgggcgtggctaaccagataaacattactcatcaccggtaaaattgacagttggagaaagaagaaaccagccatcgagtcgacgagactgcttcgatagtgcgcgaccaagtgtttactaataatgctagcttgaaggacgtagtttagtgttttctcgcaacatgagtgccaataatgtgaatgctcaagtccctaccactcaagcgactgccacaatcaaatctagaccaaacataatgcctagcagttacatgtacacatccagtagtgctcttttgaaccgcagttccgaaaacaaaccgactcctccacctacgcttccgaaatacacctcgagttttaatgcaggcagtagtttaaatagagacagagacaaggacagtgttggtggttcctacaggctttctagtctcgatcgtgtcgccatgagacaaaagtttatggaccagcagaacaacacaacagtcaccaccactacaaccaatggctcaccccaaaccaacggaaatggtgacgctgtatcagctgctacccttcaaactaaacgtgaaatgttcttcacttcaactgaaaacaactctcattccattacaagctctctaacaaaagattcaaatagactgaacaagactccttcattggaaaagcctatagacacatctttaaaaacattatcacctgattccaatagagatgataccagcaaagaatccaccccagaaattatcaaagaacgtccaaagcctaaggaattagatgggtacgtaggatttgctaatcttcctaatcaagtatatcgaaaagccgtcaaaaaaggatttgagtttactttgatggtcgttggtgaatcaggtctcggaaaatcaacattaatcaactcaatgtttttaaccgacatctataattcatcagattatccaggacctactcaaagacttaaaaaaacagtggctgtcgaaacaacaaaagtgctattaaaagaaaatggtgtaaatctgttgcttacggtagtggacactccaggatttggtgacgctgtggacaacagtaattgttggacacctataattgaatttatagaaagtaaatacgaagattatttaaactccgaagctagggttaccagaaaatccatgccagatcaacgtgttcattgctgcttgtactttattcaaccctcgggccatggattaaaatctctagacatagaattcatgaaaagactgtgtgataaagttaacataattccagttatagccaaagcagatacgttaacagccgatgagtgtgctctcttcaaaaaacaaattttaaacgagattgctcagaataaaattaaaatatacgaattcccagacacttgtgaggaagacgaagaacataaactaaacaaatcgctcaaagatagagtgccatttgcagtagtaggagcaaatgctgtattagaagtagacggcaagaaacttagaggacgtaagtacccctggggtatcgcagaagtagaaaatttagaacactgtgatttcatagctttgagaaacatggttatacgcacacatcttcaagacctcaaagatgtcaccaataatgtccactacgagaattatagatgttgtaaattagcaggcctaggtgtagatggtaaaccatcgagaatatcaaataaaaatccattggctcaaatggatgaagaaaaacgagagcatgatctaaaaatgaaaaagatggaggctgagatggaacaagtgtttgagatgaaagttcgtgaaaagaaacaaaagttaaaagatagcgagacagagttaacgagaaggcatgaagccaccaaaaagactctagaaatgcaagcaaaagaattagaagagaaacgtcgccagttcgaagccgaaaaagaagcctgggagaaagaaaatcaagttaccatagaagacttgagaaggcgttctctagaaggaagtagagagactgttgatggtaagaaggagaagaaaaagaaaggacttttttaacagtggacaacttccagtgaagtgtaaatagacagtttaaacattcatataattcattgcttgattctgtctggcttgaaatctctagtggttagtttttgactggctgagaagacaagactttacaaataatatatttctagatatatatcttgctgttaaatatagattgtgattcaatatagccttccaaaacct

SEQ ID NO: 6641 - DNA, 2341 bp, Diabrotica virgifera
  SmartBlast Evalue=1E-118; Info="UBX domain-containing protein, putative n=1 Tax=Pediculus humanus corporis RepID=E0VQE6_PEDHC"
cgcctggtctaactgtatattagaacgtttaagttaagcttaatttgagataagtagcaaaaaaataactggaagaaaagaaaaataaacgtgagaaaaagaaaaacacaaaaaggctacaaaacagttaacctgcaaacaaaatatttcaatacacttaactagcagtttatcaaaaagttgatagcaatggaatatatttagcatttttctttaatttgaccatttaacataggtgtttgttaagaaaatgccatatcctttcttgaccctttaacatttccaaaaacccttaatcccgatttttttccgaaagtatgtttgtgattatggtttgttcactacaaaaataagctaacgtcattcaagatttctgacgtcagagcattgccaaaacatcagaacatgactttcatcactgccatgtttcttgacagcgagaagctatgcatcattacttgtcacagtagataagaacaaagaaaaagatctctgacaaataatgctacctagcttctcactgtacaagaaacatggccatgatgaaaagtcacgttccaatgctttgccaatgctccgacgtcagaaatattgaatgacgtcagagtgtttttgtagtaaaaatagtatagaaatctctcttgttggtaatacctgacaattatacatctattgaaaacatttattataattttttgcttaatacattacgggagaggtgaaagaaagcacttgaaaggtaggccacaaaagaaatattatatcactaaaatatggctgggtactcgcacatatcttctgtaaaaatagtataaacgaatgtgcataaatctgttcaaggtaaccaacagtttcgattgttgaaagttcttaggcttcttgattttgaaaaagttaagcatctaggtcgtttatgaagagaacttctctattttttaaacctgcctgttccagcgttagtataatatcttggctttcttgacgacaatccaacacccgttttggaaaattggtggttatttcgaacgaatctggtgcatttggatggcaaaatacgaagtaaaacaccgactctaaggaatgtgatttgagaaatcgtctctcaagtctgctaccacaaggcaatttgaaaactacatgcacagcatcagggtggctcgcttctggctctggcgggactctttgtaaggaattaattttttcttgtgccaagctttctctgcgcgcttgctcggcgagtttttcctcttctactttacgaagctcttcctctttggcccttctttcttgctcacgcctcctttctttttcttggtcagctcttaaactctcctcaaacgcttcatcttgttgaaacctcagtgatctgttaatactggcttctagtctatcagctctcgcacttagtaaattaatctcgtactcactaacaatattcgtcagtctctgttttaatagtattgcatcagtaaatccttctagcctaccaacaatagtcatcttattatccttaagaactaaaacggccaaaaatggataagaacttgctctgacagctgcagcagtttttgtaccttcatcggaatacgcagaacagccccaaaataaaaagttttgattcacatatcgaattatttcttgatcggctaatgtcctgttacagaatttatctgtgtcaggtgctttggaatcatgtaaatacactaacaaaaaccttaattccctctttgtatcatttaatacttgggagaaggtgccttggtagaatacaggatggattctgggatatttttcttcgtaaactctaataaaatccatcacatcttgcaggtagtttggtctgcgagtatcttgtatgcggagtaacctacggccaagttgaagcaatgtgatcagtgtgttgtagcacatattaaacatgaaattaaatacagttttaaaaagtcctctaactccgctcccagaaccatctgtaggtggtgtatagaatatatgctgtcctaaatgatcactaacaactgcaggaggtctagtttcagtggcatacatgctaggtcttccttctctaatatttaattgttcttgaactgctacttctaggttccattggtgtctttgtaacacatctctgcatatagttatgtcctcaattccagttaagtcttgtagttgaagaactttctcagtttgttctgaggttaaccccatactcccattatcccttaaataattcattttataatttattattgtcagtgcgtagaaaaatacattaattattgacaacaaaaagtaaactatttagtatgttattggccaaacaataaaatgtcacatcata

SEQ ID NO: 6642 - DNA, 2340 bp, Diabrotica virgifera
  SmartBlast Evalue=0; Info=T-cell immunomodulatory protein n=1 Tax=Camponotus floridanus RepID=E1ZVK4_9HYME
caaaaaatccaacaaactgacagccacaagtaaacaaaccaggaacgtcacaaattgtacttaaaatcagaaaacgtcctcaagcgtctttttttatacctatctcctttcgatgtaccgagtctagagcgttaataaaaataacatgggtctttacttaataacaggcggtatctggtttatctttagcttcatgtatggaagacaatgacgctaaataaaaagtatatgttttatctagccaggtattaatgaagcactagtaaagaaccatggactcaactatatatacagactacaagataaaactgaaaataaagttatttggaaaacacatgtattgtttaatctcttagcaaagctcgtctatacaatggaattatgaaatgtttgttaaaataacaaatgttagcattttggcttaataattctgaaaatctaaaatattaacgtataatactaataaaatcacattgcatcgaaatggaatctatgggactccgacaacctttccttcttgtcctcctgccgctccttccagtgcaggacaccaattatcacagtaatcaaaccacagacagtggtcaaggccgcgactgacattagaatcagcttgctgggcgtcacgaacagctgagccttccatttatagggctcggtggtaggccatggtatcactaccatttgagagttcgggatgatttgggtccagtctttggagtagtttgacagccccactgtgactttatctacgaaatttggcgttcgacctagaccaaagattgtgtatggaaggctgagactgaaatgagccgattgaggaagctgacatgagagcccgtggcggatgttgccttcttgtgtggttgttttgtaagatatggaaggacctggtaaatttgttccatatgttctacgtttcttccccactcgacccatcatcatcgggttattcttattagtcaacccggtgagtaccataaccttgataaaattggcatcataatccaaactattcttgaaagctgcggtcttatactccccattaactgattggacaacaatgcaatcaagaataccgtcttggtagaaatcaaagaacgctgccattattgtaccatttttaaaggggttcaaagaagaccatcgtacttcaaacgtccgttttagagaaccacaatagttttgacaggggacgttctctaagaggaaggattgtggtgcattataatttgacactggagttagagtagctaaaatgtctggatagccgtccatattgaaatcgccgcttcttagggtgattacgtcattgtatttatagttttcgtttttgaagaatgtccatacgctttggtaatcatctttaaaattgacctgtaaatcaatccatttttcttctgtatttgaataaagtaacaaagcaccattctgacatttccagtcataacaaacaggtgttaataaatcaacttttccttttaattcaacatcgacaaaaagagattggcctatcactttggcagtttcactagttttgggattgataggatgaggaattgtagatttgtatgaaaatttgggcttttttggatttgactcttccctacctagccatatctcaaaattgtcttttgtagttatgaacagatctgccatatagtcatcattaagatctaaaaatgcatgagcatgaggcttcatgagtacgccatttggttctttattgtggtgatgcatctccactttcttaggctcagttctgtttttaccaaaaacccaaaaggctcttttttcttcaatgtcttctccaaacaaatcaatgatcatatcttgattataatcaattgccaatggttgacctaacatttcaatcaatggggacccttcaatctctgtacaattaaaggtagtattacctccccatagaatataaatacttgtccttgcattgttaatcgaggtatctgctttaatagtagttattaacacatccatcaaggcatctccatcaaaatcacctggtacaacactggtaatcttgtggtttttaaatgtgcaattaagtgtaggtgctggtcgaagcaatggctcttctgcataagctaaaagaatttggagtgtttgttccctattagttaacacaaacacatccgtaagttcatcagagttaaagtctccaaatgctgctggaagtccatgagtaaattgtccaaaagcaagttttgtaatgtcgctacatcttacaatgaatatttgtacagttaaaaatacaactatcacatttttgatagtacccatggtaaatttttttaaatgactcataaaattacattcttt

SEQ ID NO: 6643 - DNA, 2334 bp, Diabrotica virgifera
  SmartBlast Evalue=4E-16; Info=E3 ubiquitin-protein ligase sina n=2 Tax=Schistosoma mansoni RepID=SINA_SCHMA
tgaaataatcaaaatacaatattaaagaagtatattatccttataaaacacaaatgaatgtgcaaactatacagaaatattcttctaattaattttttaaaagtaaaattcatacacgattaatttaagtcaaacctgcacaaattctatccctaattaaattcagctaaagcttgattttctgcttcatttacatcaacgacagttcgactacatcttcagaagtagttgtctcttcttgtgaattattggtcacctcagttgcattcgcagtgctttcttcattaggtttatctttttcttcagatggcttaggctcttctacacatcgtcttttgctattcaaaggacattccaattcatgcgttgccatcctctttactccgcttctgaatttacaactcttagattcaaagctgcaaggtatttcaacgccttctgcaatgtcttcgaggatgaaatttcgagtgtcttcaatactgccctcgcacgatggacatttttcaacctttgccttgcaaacattgcatagagtatgtcctgctttgcattggtggattggaggtatcatgtagtctttgcagatgggacattcaaataattgtttaatcaacttatctgttttatcttctttgtactcctttagtacgatctggtagttcaaagtattagtcctgtattttacggcatctctgttcaacttagtagttagccgacggaagatttcttttctctttactttatagatgtggtccgaaattttacaagttcctcttgaacatttgaagcaatgttctttatcattgaatttgataattttctggtcttcagccaatatgaaaaatttcttgttatctgagagtaacattaagtcaaatgtttcgtcagtgtcttcaattgaacatacactaactccaaattgttggtcatcgaaatcaaagaataaaagataggttttctcatttttaaccagtacttccacgttatagtatccatatacattctttaagtaaaatttattgaaatggaaattttcaatatgactctctttgaaatgagtgctgatagctgatagtttgactttttgatgacactttgatgttgggcacactacttctgcatcttggaaagtacttggagaatctttatttagttttagattggcaattgtttcttcaactatgtaatttcttgtattgtctatatgagcatcacaaaagaaacacttggaaccatctccatcagccttgtctttgcaatctttgcaaagagcatggccttttaaacactggaaaatgggttctgtgaagggaatctcacaaccaggacatttcaggaaatttttcaatgcatcagcttttgttggctctgaaggtttttcttcttctatctcatcttcttctgtaacttcgtcaataacaacatctttccccaaaagcagatcttctatgtcattctcattttcagcttttacttcaacaacatttacagtacaagaataatcactaccgaatgtacgttttaaaataggcttttcaatttttgcataaacatactttaacatacctcgtctgtagctagaatataagtgatactcgtatttacaatctcctttaagacatctataacagtaaacacgatcattatgcaacacaatgttgttttcagttaaatgaactgaatttttactatttttagctctcaaaactacttcaaattgtttgtcattgttttttataccacataaagcgaatcgatatgtgtctacactcagttcatagaacaaaatatagcacacattatctttctctagtacagcaaagccagtaccacggaaactttctataaatattttttcggaatgatatagtttcttgtgcttctccttgaaatgagaggcaaagtttgcttctaatacggtttctttacagtcagacgccagacatggtattgttcgatgttcacaatccttttcatggtccctaactgactctaagtccacagtttcagagcagcccttgtaaatacagggaaatttcatgtacgtcgctaagtcttcatacaacgagtttctaaagttgaatcgagttttgattgaacatcttccacatttgtactttactttattttctctttcgtcttgagttgtcatatttattggagggtaagagagatacaaaccgcagaaagagcatcttaatttctttgcaacttcactagtaagcaggaactccggtttggttttggttgtgttgttctcttcactattttccatgtttacttaagattatagtttataactgaatccacagataataaggaggagatacaaaa

SEQ ID NO: 6644 - DNA, 2335 bp, Diabrotica virgifera
  SmartBlast Evalue=0; Info=Glycyl-tRNA synthetase n=1 Tax= Harpegnathos saltator RepID=E2B5E8_9HYME
aaagtttcataaccttacatgtgcttttgtcggtttcggtttcctttcacttcactttgcagataattgacggcttcgtggcagaattatcgctacttgttaacataaactctgcaccatatgaaactaatctcaatattgcgaagagtaacactactaaaccgtgacattttgcaaaataccataaaaaaggagtgtaaagaggttgcaacagtcaggacattttacatcagcccttctgcagatcagtggggaaagaataaaaaacataggaatattaaattgaatctgtacttcgacacaatggcagatcctcaaattgaagaagttttagctcctctaagagccagtgtgaaagaacaaggagacctggtacgtaaactaaaagccgatggtgctccagtttttgatgtcaaaaaagccgtagttgagttacaagctaggaaaaagcttctagaagataaagagctcagcttagcacctaaccagacgtttgatagagcaaaaatggaagatctgcttaaaagaagattcttttttgatcagagtttcgccatatatggaggtattactggacagtttgatttcggaccaatgggttgtgcatttaaggcaaacttattacagacctggcgacaattttttgtcttggaggaacagatgttggaagtagattgttctattttgacaccagaacctgttctcaaagcctctggacatgtagatagatttgctgacctcatggttaaggatacaaaaaccggagaatgctttaggctagatcatttaatcaaagcccatttagaaaagatttcagcggataagaaaacttctgctgcaacaagggaggaatgtcaagatattgtcatcaagttggatggaatgaataaagatgaaatgggagctgtaatgaaaaaattcgatatgaaaagccctcttactggaaatgccctaaccgaacctatggagttcaatctaatgttcgcaactcagataggcccatctggtttaattaaaggatttttgcggcctgaaacagcccagggcatctttgtcaattttaaacgtcttctagagttcaaccaagggaaattgccatttgctgcagctcaaataggtaatgcatttagaaatgaaatatctccacgatctggcctcataagagttagggaatttacaatggctgaaattgaacatttttgcgaccctagtgataaatctcatcccaagttcgataatgtgcgagacacacaactgttattgtactcagcttgtaatcagatggatggaaaagcagctgaaaggaaaactattggtgttgctgttgattcgggtctggtggcaaatcaaactttgggatactttatggcccgaatccaacagtttttagtaaaatctggagttgatccagcaagattaagattcaggcaacatatggcaaatgaaatggcacactacgcatgtgattgttgggatgctgaatgtttaaccagttatggatggatagaatgtgtcggatgtgcagaccgatctgcttatgatcttacccagcacacgaacgccactggagtccgattggcggcagagaaaaagttaccagaaccaaaaatagtcgatgtaatcgaagcacaagcaaataagggattattagggaaaacctttaagaaggatgcaaagacaatcacggatgctttggcagctttaaagattggcgatgttgaagcactagagggcaaattggaaagtacaggatcttatgagttggcagtgggagataaaaactacactctctcgaaggatatggtatctgtgaaaagatatcaaaatacaatgcatgttgaagaaattattcccagtgttattgaaccatcttttggtgttggtagagtaatgtacgccatcttcgagcataatttcaaacagcgcgagaacgacgaacagagaacatacctgtcattaccagcgattgtggctccgttaaaatgtagcgttctgccgctaagttccaaccaagagtttattccctttattaagagaatatctacagaacttacaaaagtagatgtatctcacaaagtagacgacagttctggatcgatagggcgcaggtatgctagaactgatgaaatcgccataccctatgggattaccattgatttcgatactttgaaggaacctcacagtgttactttacgagaaagggattcaatgggacaagttaggataccgctcgatgacatcgcacaagtcgttcacaatttgtcttacagcaagcagagctgggacgatatcgaaagcaaatatcccaaattcgaacagcaggagagtaaagcgg

SEQ ID NO: 6645 - DNA, 2334 bp, Diabrotica virgifera
  SmartBlast Evalue=0; Info=N-acetylgalactosaminyltransferase n=1 Tax=Aedes aegypti RepID=Q17M64_AEDAE
aacaaatcatttaataacgtaaaacaaaatgaatcatcacaatttcgatttatcatagttctctaatgaccattgctgtcgttgaacgtcggggttgcacctttccataactagtttagttttaatgtcgtttatggccaaacatttgtcgctactgccgtgtcgcagaagcttcagttcttggtcgtagtcccagaattggtttcctttgctaccatggcacggataaagaattacgtcctgcccaccactgaagtccaagcagtattcatctcggcgaatttctccagttttgctgtacatccagtactgattacctccttgcttatgacaaggatataaaccggctggtttatgcaaatctgcacgtctagcagctgaatccaaacatgttttaccaccgacacctaagtttcttatctctcctttagctacagctgcacccggaacaaatagctctgggtaaatgttgtccaaataccatttaaaactcttacatcctaaattttttctaagttctttccttttactgagatctccatagtctcccttttctcctcctatcctatcgtaataatattgggcgtattcatctaaccaaacttctgctagtctcacggaatttctacgtagcacatttactccgcttctccatttgtaaggagatctttttctaaaaatgtgtccaacgtgtgaacatggaatgatttcgagtgtgccaccgcacatccaagtcttaaaagatatttctaagttttctcctccccaaatatcaaatccatcgtcataagtaccaagtttctcgaagaattccttatctatactaaacagtcctcctgccatcgtaggactccaaacaggctcggcagtgttcttgtgcctcttcttttcgtgttcaggaactgcatgccagttgaactgtaggttccaatcgaatccaccgacgttaacgccagaactatcgtggtagtgatactctaatgtggaatcgtcgattacgtcgataacaggacacactacggttgtggaatctctcgctattctatccaaaagcggttctaaccatcccacggtacattcacaatgcgaatcgaggtaggttaagactttgccattagcatgtttggcacctaataatcgagccctaattaatccctctctcttttgcgcccttacaattttcaccttcggttcatctttccaataatcctctaattgctttttggtgtgcggcatgtccgaataatcgtctacgaggataacttcttcaatgagatctctaggagacctatccaacaccgtatgaacggtcctaagtagcaccgaccatgcttcgttgtggaaacagatgataacggatgtggagggaagcttgctgacgtcgaggaaacgtccatcttctttacaccattcatccctagggtcaggcaaacttctatgtacactaatcaggtcactggcatactggttgaaggcgtttttcatccagccctcgtccactaatttttttatatccgctgataaattcgtaggcaaaacaactggtttccccatctctcctgccacgttatcaggcggcactagcacaccaccatagtcattattattattattgtttttatttacacttttggacgaagtccttcgcgattcttggaacggaatcactctttcgggcgctacttcgttttttctgatatgttcgccatctagagggagcgccaccacgtcggattgaggcgagctattgtctgtgtagagtaaaaaggctatcgtgaaccatgcggtcgttactataactgctaatttcagaagcagagatctcttcctgtacaacattcccattttatcgataaattactaaaactacgcgacactaacgttgactagatgacactgtattccgagtgagctttatctgtagttgagtgtaaacatcttttgataaaataacacaggtctaatcagataagattctgtggattatcacagtatggatattcctgatatgtgtgcattagtattgctgataatgattgtgttgtcgtctttttcttggatatgttcatgccttgctgacaatccctaatccagaaaaatatccactaactgctccggtacagtttgtttggtgacactaacacaggtttaccgttttttctaattatcacaaaacacaatcataacaaacaaaaaataccgaacggatcgactcgcatccaatccaagccttgtttaccggacaacgtgtattggtcgtatgaaaacatacgcgcactgacgttgccgatacacgatgcttcttcctgcgacaatatcaccaaataactgtac

SEQ ID NO: 6646 - DNA, 2332 bp, Diabrotica virgifera
  SmartBlast Evalue=1E-169; Info=Protein ERGIC-53 n=1 Tax= Harpegnathos saltator RepID=E2B8X5_9HYME
ttttaaattgctcagtgcggtagtaaacatgaacttggaggtgattttatttgtattttttggtgttgttttaaattacagtaccgccaatgtcgtccacaaaagatttgagtacaaatattcattcaaacctccatacctagcccaaaaagatgggtcagtgccgttttgggaatatgctggaaatgctattgccagttcggaaaatgtgagattggcgccttctctaagaagtcaaaaaggagcaatatggacaaaaaaccccatcaatttcgactggtgggatgtagatatctcatttagggtaactggaagaggcagaattggagccgatggattagcattttggtacacccaaaataaaggctcagtcactggcgaagtgtttggttcatcagatcaatgggttggattaggtctattttttgattcatttgacaatgacaacaaacacaataacccatacattatggcagtgttgaacgacggaaccaagcagtttgatcatcaaaatgacggaatcacccaacaactggctggatgtttgcgcgatttccgtaacaaacctttccctactcgagcgagaatagaatattaccagaacaccttaacagtcttattccacaacggcagaacaaacagtgatgaagactacgaaatgtgtctgagagctgaaaacgtcgttctacccaaaggagggtatttcggtgtttcagccgccactggcggacttgccgacgatcatgatgtgatacacttccttactagtagtttacacccaccagatcaagtgcaacagaatcaattccaaggagaagaacaacagaagctgcaacaggagtatcaagactaccaacagaagttggaggcacaaaaggctgaatataagaaggaacatccagatgtgaaagaaccagaagtcgaggactggtacgaatcggactcacaaagagagctccgtcagatattccaaggccaaaaccaaatctacgaggtactcagagaactgaacaaaaagattgacgaagtcgtcggacgacaagaaaggacaatgagtttgatatctcagcaagctagcatggtccaagcgggcggagcacctccaccaccccctggcgcagctcctgtgcaacccggtgaaaccatcagaaggcacgaagtggatgctttgttcaacaaccacaatcagattagtggttacctacaggaactcaagcaattcgtccttgaagtcaaaactcgagccgatacgattttgaacaaccaagcgaaacaaccgacagctcaagtacagtcggttggatacgatactcaatcattgatctcagaaatgcgagatggactcaaccatgtcaagcagaacatcgcgcaactttcacagaaaacgcccacaacccaaggatgtccgacagtgagctgtatatctcttacggctgtactagccattgcggctgtacagttaggcataattttagcctataatatttatagggataacaaggacagcagtaacaagaaattctattagagtgtatgcggatagttcttgagattaaatttttgagttaacagtggcggggtaattaacttttttaggggcattttgacattttaccgaacgtatttattatgtgaacaagagaatcgtcttcctgtattttatagtttaacgttttttgacatgtaacaaatttttctttgtaatttccgttttctagcaatttacattgacaaaagaaattacttaggacaagtggcctaaatggaatgggttactttttagtaaaggtaggaaatacctttaaaatggttagatgtgactaaaaaaattagtaaatcgaagataaaagacacgttttttgacatgtttctgtttgcaggggcgtcgaatcagttttttgttaccatatatattggcatgtaatttaattatatttttgtggactgaaatacagtcatattgatatgtggaaatgacaaaaatgctccaatagatgactagaactgatttttacatgcctactattgaaaattgcatttaattgaacattttttcacaatatcttcgtttattgaatttatttagtcactaagtcagatattaacaaaaaaatacgtgaaaacgaataaattttccataactttttttcattgagctgtttcttttgctctctcttatattttttctctctttcatgtttttctctcattttgttcttgtagtccaattttaaatatcttgtgatttttgttaacacattttttgtgttttcagacagttttagtgttttatatgtaaaaaattaataacttaataaagaattgaggtttt

SEQ ID NO: 6647 - DNA, 2332 bp, Diabrotica virgifera
  SmartBlast Evalue=2E-15; Info=Conserved protein (Fragment) n=1 Tax=Aedes aegypti RepID=Q1HRQ5_AEDAE
caatgctaaggtatttattatataattttaaaaatttatttatacataaaatctttttgaaaattgtacaagatatttacattgtttcgaatcagattttgtacaaaaattggtaactagaagataggaatgtcgaataacaagttcagatattgcacataggataaaaagagaagttaatatatgaggactgatcacgaagccccaggattttttaaattgcgacacacaatcggcatcaaatgtttaacgagaccggtaatctctactgttcttttatgctttgaagttttaggcaatttttggatatttttcagtgtttgagtcactttggttaaattaggtacagactttggcgaaatttttcaaaaagaagatcatcggtatcaaaggagagaaaatgagggctcaaagtgacagaaaacggcataaaacgacaaagaataataaaaagtataaacattagcaaaatgattctgagacagaaacaccactgaattcaggctttttaggagcttattggagggataaatggtaacgagaatttttgaaacgcattatcataggtggaagaaacaaagatacaatccttttaatgaaagtcaaaaaaatacatcgccaaaagcataacaggtgtaggaaaaaacgcaccacttcattcttcgttgctcgttcccaatttctgcggaaaatagcttgtttgtgataaggcaacctccttattcaccaagcctatccctgtagactatttattgattctcaagctcaagagagcatttcagaatcaactgaaaaaaaaaacaatggattctaaaataaccaaactagtcttttcgactatagaaacgatgtcggaaatgtatattcatcaaaaggggagtctcttaaagggtataatgtagtaaattaagcaaatagagagtgtttatttaatttttagatgattttttaagtatttgtccaggaactttttgatcaccctcttaaatatattgagttattaaattcaacgaaacgaatggtaaaattgacgctattgattaaaaaaggcttgtaattgagctgcaaaattaaagtcagataaatatgtaaaattgacgctactgattaaaaagcgcttataatttaggtaaaaaatatatttttcttttatcggcgttgttacacgttttgaaagagcaataagcagaatggcaacacaaattttagtctgtgtcactgctttcatgagtaatttaatattcaccttgtatgtgcatgtgtggactgaatgctctatgtgtatagattttatgaattgacttagtgccttgtcttaaacattttgatcattgtactacattcttgtctgaatacagtattctttgttttttgcatgaacttttattactaagggaagaataaaaatcacaacaaatactaaaatttcaagcgcaacagtgtacgccgaaagtcagcactttttggagattagctctaaaccatttttaaacaaaaagaaaacaatattaccggtcgccatgttaaaaattgttttatttttcaacaaaaatataatttcctataattttaatatcagcttgtgtttaatactgtgaaatatgaattaattttaaaccgaaagacccagtttatgcaatcagtgcacaggcaattgccattataaactaaaaagtaatacaacaatctcccgaccaataaattcagatctactaaaattatgtaaagaaaacaaagcaaaagaatatttttatgtgtatatttaaaccaaaataccgtaccccaaagataaggatagttttttgcctaattagtttaccttctaagaagtttaattggaggtggaacttggtggggcaccatcagaattgttgccattgttgcgtggttttgagtctccgtggacagtttgggagcctggacggaaatagtacaaaaatactgcagtgaacatagcgagtactaccagcaacatgtaatctgggttggcggtcgaggaactagttccaacatctagacattcattatcagtacagtaggactgggagttcctcaacacatccaggagccttctcatagacatttcatgttcccataatcctcgaactatctggcaagggtcaaatccttcattactcattttcttgtgttcttgggtacctgttgatagtggcttctaatttaaaatgaaatatctgctgatttaaaataaatgtttggagtaatgtcgactgcacctaaattcaactaaagtaaatccatgtagaataaaatggtatttccttgtttatttatttgcgtaggcaaaactgtcaaacatattgctttgaca

SEQ ID NO: 6648 - DNA, 2332 bp, Diabrotica virgifera
  SmartBlast Evalue=3E-39; Info=Zinc finger protein on ecdysone puffs n=1 Tax=Camponotus floridanus RepID=E2AZI1_9HYME
gtgttaaggcgaagcgggtgtgctaacgtggtgtacaattttcaattgtatttcctacactttctcaagttagttcttttgcagttgcttactgcataatttcaagtaatttattgtgtttgtgcttataaagttcaaataaacatggcaaatagaagaatgggtggcggacctggcggtggccttcggggcaatcgttcttttaatcaaccaccatttcaaggaggtagtggtgttagcccctggcaggggtctaatagttccggtcagggattgatctcccaaattacttccaatccccaacaacttgctcttgctctcacgagcttactacaacctcaacaacagaatccaccatcgttgctttctttgaatacatctcctggttataatcgggacagagattttggcagaggccgtgatttcagacgacacgagccttacagtaagaaccgtcaaggaggaggtttcaatagagatagaaagaggagtcaaaatcaaaaggatcagaagaaggacaaggaggatggaactgatggcgaagatggagaaaccaagagagactggaaagatgagaagagcaacagtgaaactcctgaaactgaggaagaagccaaggcaagaaaggaaaaggaagagaaggaaggaccttattatgatatacccattaaattgttgagctgctttgtctgcaacaaagaaatgtgggatggagaatctatgaggaaacatgtgaaaggtcgtgcccacagacaaatgttagatagcttggaagaaagcatccacatcactgttaacattctaagggagaatatgcgtcttcttgaagagaaaaaacttattgagttgaaccgtgtacaacgtgttactaaaagatttaataagccagagcctgaaagtcattgcaacatgtgtgatctcaaattcttgggaaaaatcattgctcatcgcaagactgaaggacatcaacgtttgaaacactacttgcatcctaactgccgcttgtgtagtaaagaatttccctctagaatggaatggattgaacatcgtttgactcctgagcatctcagaaaattgagtaaaacacttgctgataaggttggaggtgccgatggcaatgatattgttgaagttgaggaagaaacaaatgatttggcattggagccaattctagatgagccattggaaatggaagctgagaatccaattcttgaaattactgaaaatatcaatttctcatttatgaatcttatgcctgcatacaaaccaaacaggccaatttctgtcaacagcttaaaaccattctctggttttgtatgtgagctttgccacagaagctttgttgatgaggaagtttcacagaaccacttgaaaaccagaagacatcatcttaaattcattgaagctcttaaacttaaattcaaggaacaacagcgaaaggagaaggaggccaaggaagcagaggctaaggctgaagcagagaagaatggagccaatgaagatgatgaaccaacacaagaaggagatgctgaaggagatccatccatggatgtctctcaggaagatgctgtcaaggaagagactatggaagcggaagaacttgaggaagaaaagccacctgcaaaaggtgctgccgccaagggggccaaggcagctccagctgctgcaacaccagcagctgtaaagaatggagctggcccaaaaagcaagaaggctcgcaaataagtttctgtgttttaatggaattccatatatttatggaagaacccttatttgttctacattttagtctcttacccaatattttaaaattttggggtagaaggaaaaatatgaatcagttcgtagtaagtgtaaaaatgacctatctctgactgatttctattttttatctagagtgttgaacaaaaattgattttcttcttaacaaagtgtgttggggaatttagttttaggtttcataatcattcataaattccgttttcaacttcattttaatcttaattattctacttataagatatgtagcatagaaattttatttgcgtattttatagttgacacaaaattatgtattatctagtatgtatttactaatccatcatgtatcatgaaataatatatttagattgattcattacatttataacatttgacgtagtttaccgaatttcaatgagaggaaaaccatgtagattactcacatttctaaacagctcacatagagattgttaatgtagaatttatattttggtttccttgatttttttaccacgcattttgacatagaaaaacttggtctcgtctcaataaaaaatatatataaataaaa

SEQ ID NO: 6649 - DNA, 2327 bp, Diabrotica virgifera
  SmartBlast Evalue=0; Info=Spondin-1 n=1 Tax=Camponotus floridanus RepID=E2AZK3_9HYME
aaaattcgttacttaagtagaaaatcattttttttttgtataattgataataattttttttttaattagaacaacctagtaacaagctttaaggaaacatcctcttctttggaagagaccatttggacaagcaccaccattggtagctggttgtttcaccaccctaaacctctctctgtaccctctgccacaactggcgctacacggactccaatctgaccattgggataaaatgcagtcagttggctccaaacgagtattttgtctcaataaagtagtggagtctagagttccggttatagcatctttaacaattttgcaagtatccatacattgatcctgtgtcaaaaagttatttctgtttcctctgcatcctccataaacaaacgggaagcatttaagtttggtagcatcaaaccaccatcggttgaaatatccttggcatggtccaggatctccatcctgcatgcatacaactttggcagtgttcatatcaatgatgcaattgggaatatcctcacatggtaattgctggatcaattcgacgcgactactacattcttgctgcctcgaaggatctaccaacaaaagtcttgtgcgcattttaatcccttttccacaagatgcactgcatggactccaatcactccatgctgttgttggacacgaaggatcatctgagtcaatttcatcgggtttgcactggcggtttatacactgttctttttccatggttaaaatgtgggagcatttttttagtccacttctattcaagaattttcgggtcctcatcttttgcccagggccacaaatttcagaacatgacgaccaggagctccattcggttgtcgcacaaacaccgttgttgtcaagagaatctatttcttgtgaatctttttctgcgtctccatcgcattcaggtacagccgcaacacacatttcttttgatatcaactgccggttacaattatttacactagccttttgtggaaacagatattgcctagttctcattctgagtccttttccacaagttacggaacaatcactccattgagagtattcactaacagcacattcaggtcttgtagattcttcagtattttcactaatatcaagttgcgaagagaggaaattgtcgtcacaattttttggtattagtttttcccttgttaaaaacaatctagccaatgctggcatttcctttctactggggtcataaaatggcgctctgggatcttcaggataagttgtagtaattctgtacattctttctctagggttcgtttcagcattaggagacatataacttatgcctccatcagttcctgcatcgtagggatataaatctatagccaatttttcagtccacgtacagttctttaaacacaagtttaacccattaatccctaccacccagtccggagatggtccaaacatagaagctacagaaatcaaatgatgacgtctatcgactctaaaagttgttgacgtattagaattaacgtttggataccacagtccagaagccttgataattgttctcaggtatttacttttagctcttagttctgtttccatgagtctaactgagccccattcagctaaacttctaaatccttctgacgctatttgtccctctccccaaaaactgaagtttttctcgtgggatgctccgattacatctgagaagtgagttagccatagtaaagttggataatctttagggtgagttttactggaccaaattccttcgaacacaagcttatatttagcctcgtcacatgcacaacattcatcatctgatggtaaatcttcatctttttgttcacaaatggttttagttaagtttccatcttctgaaaaccaaacatcagaattttccaataccatggctctgaatgtgacacatcctgaacctggaggaggagcagaccacataaagaatacttcacttttcggggaagtatttacttctgatattgtattaatacattcttcattgaaacttgcaactttatctccatatagctgaaagctacctacattttggggggcgtccgttcggttactcgtagattcgatatttattgtaaatctcgtaaacttccttaggcgatttgtattcgggtaagttggagccattagatacattgtgtaaatatttcctggaacatatttttgagggttttcattaatcttaatttcatatccattatcaccaggtgtttttatcttcctagattgatatatacttggtgttctaccacagcaattcgcataatttacaataaaaacaataaaaatagtgctttcattgtaatttc

SEQ ID NO: 6650 - DNA, 2333 bp, Diabrotica virgifera
  SmartBlast Evalue=2E-67; Info=Reverse transcriptase n=1 Tax= Bombyx mori RepID=Q5KTM2_BOMMO
aaaagcgctagttgcattatttggagaacacaggagcatccctaaaatgtccgcaaacaggatacaaaggtgggctttattttgtcatcgtttgactacagtattgaacatatcaagggaataaacaatcctgtagctgattatttatcaaggtcaccagtgcaggttacgggaacagtagaggaaccagcggaaggaatgacatatattcatttcacggagtctatagaatactggccaattaacaacaaagtacttagagaagaaacagacaaagatggcattttaagggcaataaagatgtatattaaaacggaaagatggcccaaacatttaagtgatgaaataatgccattttaccataaacgacaagagttgtatttagatgagcacataataatgtggggacatcgtattgtggtaccatcaagtctaagaccacaaatcctcgatgagctccatgcaggacattttggaatagtcaggtgcaagtcattagcgagatcatatgtttactggcctaaaatagattccgacatagagcatagggtaaaaagttgtggtccatgtttaaagaatagagacaaccctccatcagagttttcaccgtggcctgaagtggacaaagtatttgacagagtgcatatagattttttgcaattaaaaagcaagttgtgcttaatattggtggatgcttacagcaaatgggtagaggtatttcctatgagtagggcgacagcagcagaaacgcaagaaaactaagggaagtttttgccagaatgggactaccaaggttatgtgtgagtgacaatggacctcaactagttgacaaaaccatggaaatattctttaagaaaaatgggattaagcatttaacaggggcaccttaccatccatccagcaacggagctgcagaacggtatgtcaggacatttaaaatgaagctgaaaacagccctagatgatccaagaaactctggtattccactgtctacattaatatcaagatatttactaacatatcgcaacacaaaacacccagtaacagaaaagtcaccagctgaacttgtatataatagatcattgcgaacaagaatatcaatgatggccgaaaagcccagtaaagaacagcaaaatatttctataaaggagaaaagatgttttgaaataggagaaagggttatggtaagagactatagggaaacaaaccgaaagttgtgggtggcagctaaaataataaataaagtaggtaagaaaacttattattgcagattagatagtggtcaggtatggaagcgtcatacgaatcaggtaggcaggtgtagcactgagtttgcaaacaacagggaaaatgaacttgacagtaacaatgactttcaatatataaaactaccaaacgtagtacatccggtaggtgagagtataacacaatctgaatcaaatttggagaagttaacgatggaaacccaaggtgagccagttttgctggacatggctacttcttcagacactggcaacagatcatcaactgatacagtttacaggtcagataatgaacaaaacattattgttaattatccatctgataatatgtctcaaacaggtagaagcagacgcgttacaaatatgccaaagaaatacaatgatttcattctagagtaagtaaaaaaaaaaaaaaaaaaaaaaaaaaaattgttcagttaggttttacataatcatattaatcatatttgggtagatataaattaagggtgagggtgataagttgggatgttttaagtgtaaacacagcttaaagtgagttggtagctctgagagagatggccatctggcacttactgttctgcggtgatgttccatgcggactgacaggtagggcagagaacaacggggcaaagacagtagttatagaaaaactgaatgtaaaatgtattgaataacatattagtaataaatatgaattattccatcgacagtggtcttattaattaaacaatggttaaggtacttaaggacatatcaatggcgacgaggataaaagtggtaacgaagtaaatactaattgttttatgtaaaccgatgtccggtacctttgttagtgaatcaagatggcgaacaaaaagttcgaagaatttattccagatttacaaccgtggaatatttacgaagaaagattggaacaacattttgtggcaaatggggttgaagaggaagctattaaagtggcgatcctaatcagttcggtaagtgcacccacatacaccttgttgagagatctatgttttccagaagctcccaaaaccaaaacatttgcagaattatcacagttattag

SEQ ID NO: 6651 - DNA, 2328 bp, Diabrotica virgifera
  SmartBlast Evalue=3E-56; Info=T1/st2 receptor binding protein n= 1 Tax=Aedes aegypti RepID=Q16HH1_AEDAE
aggtcacctggcatgtcatacatgaaaatcgtaaaatagagattggtcattggcatctctagcatgccgtaaatctaaagtcttataactcgttaagcattaaatagatgacaattttaacgggatatttgaattgctcggtaaatttcggttgagaatcgcccatattggtttttcagcaaatcctggtaaatgttttgaatgtatttatgtttgactgtgtttatatggagttttgttgattttataaagattgtgttagtatttttaacatgagtacaagaaaatatttaactcaggcagagttagaggccatatagtctaatatccgaatataggtcgacctgtacccatctgcttgccggatgaaacatttttttatcattatcaaatttcatacatagactaatatttctaaattcaacctgtagcttgtttaacatgttttgtccaattctaccaaatataaatactttaggacaaatagaaaaaaaagatggagctattttaaataatgctgttagaaatattagattgatgaaacagctacgacaacctcagtgcactttcatgtgtcaaacagtgacagtaggcatgtaatatatgccaacgacctgtacgacactttacttgtcatcgcgctcgaccgcaaagggttaatatagataatattaagtaataattaacatcttttattaacaataaaggtagattaaatattgtatttatgtgggattcaaccacaattggttgtaatgaaaattaaattttacatttattttaatgtatctatttccgaatccagaaatatttttcaaaaaatcttgtgcatacctacagtgatgagggcgctaataaccagaaataacacaaaagatggaaaacatattaggttgtgagataaaaagagataaaactagtagaggtgggaaatttagcgatagaaacctttccattagagatgtattggacgagtttgacaactaccactgtgacagtgacagttttagttaacatactcctctgatacgtctaaagtctaaaggtgggaaagaatcgatataatgtaaattttaaaggtttctatcgttaaatttcccacctctaatatcatgtatctatattgtacggactgtactttattgtttagtctgaagtaaaatactgtcaaaattacaataatatcatctaggtatatacttcagattttatattcatagaaaaatttgggctagcctgctaaataaacaatttatcaaaattgagcattacaaaggacaactacattggatctgtttcattaagtacctattatcagtcaatattttgaacatggtaaagaagacacttaaaattaactcgagtttggtatatttgatgcagcaccagtaacaatagtacaattatctattaatgtaacctcttatctaaatttttccaaatcttatgtactcttgaatgatcatcaaaaagacttcttaccataaccacttgaataaacccaacaatgatcatcagggacaactgtaccatggagtatgaattgactttaaagaaattttcctcagcaacgtttctgtctctggcttcactggatttaattaattcttgtaagtacctaattttagtcagatgtatcctcacagtacttactattttttgtacgtcgcttatttgagcttcaaaatcttcatcttctgtgttgaacttcatgttttcactactccattctccgttatcatctccttctactattaattcaaaaaatacagtctttgtgttgtatgaactgaaagagttatcgaagcaaaacctgtagtccccttcaacttcagcatcaagacggtgggtattttcagactttttgaaatcagttaaaagaattctaccattcggatgaactaaattgaaattgatgtctaaatctccatggcctccatcaatgacttgataatccaggtctacaatttccccctttttaatgggttggtagaaacacgattctgtaccggcctccacataaacagtcatttctttttccagtgagttaacttggtgtaaaataaatagaaatatgtatagcaaaaagtaattcatcttgtagaaatgatatgcacagtcattaccacttcaaactttgatacttattgtttgtattgtaattatcaacttaaacttggacaatgaggttaaacgtcattgttcttttttacttcttttgaacattttctccatttaacgttattaaatatttagtggacattaaaaaagggttaggtcttctttgtttggaataattaataataattttttagttaggagttagga

SEQ ID NO: 6652 - DNA, 2328 bp, Diabrotica virgifera
  SmartBlast Evalue=5E-16; Info=HIG1 domain family member 1A n=1 Tax=Culex quinquefasciatus RepID=B0XDC9_CULQU
atatcaaagtaaatcatatattttaaaaataaattaatatttaaagtaacattaacaactactgtaaacgtacacaataaatctatgtaattttaatacagtgtttctgttaataattataaaacgtcatttttaactttacatgtaactatcagttagtttttcatatgcatatcacagattacaataaccaagttacattcataaacatgagtgatatattaaagcgttttctttattaaagttatacatttgagtaaaatggcaagttgtacattcctaaaatcatcaacaattatcatacaaccattaaagttcacagttttgctcacaatagccaagttcatagcacatcaacaaaaatttttcttttccaaatggtatttttacctttacctttgacatttctattttcactttgaaaattgttctcagaatacaaaaattgtagaaaaaactataacattttgaaaataaccatttaaacctttgttttagtgttttaatcgattcagttaatgttaaaaaactgcttatggataattttttacttctaagttacaattagtattggctatgaatacccgcccctggttgtaccaaacttccaacatatctagtcgatatcacaattttaccaacattacaaaaaaataattactaaatttactatgtacctagttagttggagatagttgtcctaaaccaacctactctcataattatgataaagatctcgtcatttgggaacgcactaatttgcatattattgcacttatatagaagtcaaaatttgaagtttcttctttagccactccttagcattaaacaatttcaatacttcaatgttataaccaatcaccaatttttaagacggttcttggaccatttttagatgcgccataatatgcaaattagtgcctacccaaatgacgggatctctatcatgatattacaacaatcattaaaacactggatgttaaacataagctgtcaaagtttctagtaactctagtaatgcgacaacctcaaagagctgtgggatggttgtagctgtcaattaagtgagctgaacacaaacaagtggaagctaaggatggcataactcaaggtgtcattgaatgacacctagagttcattagttttcttctggcatgaacatccgtttcctagcttctcttgggacaagaacaggctaggaacaaacagatgaagaggaacaacacagccttaaccatctggaaaccatggaacccgataccgctgcaagacatacttgtaaagataaaaatgaactgtaaattgtgaggaaagtggagatgaaggtcagtaagatcagattgccaccgttactgtggccttccttttggtgttgtgccctgcattttacaatttaggggttttccggcaatatatggtcttcattctcactacatgaccagcccatctaaagtttctgttttctttacaccctatggcatggtatttgagcaaaaataatcacaaaaaaataaatgtttccagatgtatagtatctttctttgatattatcttttacatttatgtctacttaataaaaaagtaacaaaaacataaatagtagccctagcaataataattttgaaattataattttataatacttaattacgtttctattcgttagagatcaacatttttttctttaaatacatatttaatagactttatagaattgttcataaacaatatagatatatcctgaaaacgtttttataatcaatccctagtttactacattgttaaaaatgataattttataatacttttcagatacatcgtacaacattaagagcgcattaattctttgttaaaggtaactattctggtttcttcaggaaatgtcgattgatcattgtgtatatcaaacctagtgttaaagatcctactgccgctccttgtgctccaactcgaaggtgcattaggtatacacttgtgctcatttttcctttgtttttataggcgtatattccatatcctactgctgcagcacaaataccaatagcaattggaaagacaggtgtttctttagatttcctgagaagtttgtctgactgactttcttcttcatagtaaattctaggaggttcgttcattgtggtaactgacatggtggcgaattattggatagtgtagaaaacgtgcaaaacaaaggaattaacaaaaaatggtataaaattatgacagctacttaaactacttctaacttcctaacaaacctgaattttaataaaacgcgttatctagaattaactttttaaaccttaactttgtcgactggaactttcc

SEQ ID NO: 6653 - DNA, 2308 bp, Diabrotica virgifera
aggttgtattcatttgggtgagcactgatgatgactggtaaaccagtcgagggctggttatgtggttttgatgtgggccttttagggattttgaatgtataccttttataagggattttactgtttttttttgtattacatggtatacagccaactacaggaaaactttttccttgtggatttttaaatattaatagctgtacagcactggcataagtcaacactagtcaagcagggtttttatcttttcatgacatgtaatgtacacccactgaccgtcgccggcgatatagaatgtccaagtagcatgttaaatattgatgatccaatatttatctgatgggctttaccttttattctctgtttatttcatctctctactacgaagtacggggattgttcaaatgcgtttgacattcaacttgattatggtttgttcaacagtaaatggttgagttcaattagtgcggtcgtaaatattattaaatttatctgacctggcccattgttaaaacccacccggagcgataagcaaaccgaggtagacagagttggtcttttgacaattaacactgactagacggtactcccataataaagcaaagaaaatttaccagaaaacatatttaaattttacctgaaaccgggccttttatactattatcggttaatccaggatgtttatagtggtaactaattgaactcaaccatttactgttaaacatactcatacctaccggtaaatgtgatattgaactgctcttataaatcgcgtcggaatgaaatgtttcaactaaaattataaatactataccaaatcctaaattccctcgaaaagaattgtactttagcaccggttactgcgttgaacagacagttgaataattggtttcgatgtaaaatgctattattttggttgtaagatgtgaatgaagatattatactaaatatttttaaggaacactgtcacaaacaataacagatacttgaaggtgcttttcccatctagaattactagtttggtattctttgctcattgtaacaaatcatctatactttatccactatttttgatgattgtatgattgggcccgaaaaaataagtatataatggaaaaaatcgattttctagattattatttttttaattgaagagtttaatttttttgaaacgcttggtcaattagtagtaaattgcgcatatctgatttgacggaattttcgtacagcgttgccatgttagtgggaatagtagataatattataggaaattgccacataatgaaaatgtaggttaggcaaaaattttctataaatttcatcttactgggaatattaagtctaaaaatttaaattcttatacacacacggacaaagtacggatgaattattgcaatcacgtgtagattcttacttctgcctatcctgtttagcataaaaagatccttcttaatttctttgtggatcaaaagagtgaaatcaaaagcaatatcattgttgctagttttaagttcagttagataggatttttaaacttattttgtatattattaaaccctgtgtgctttaaaactgactgtggactcatgtgttctatttgccaatagatgaagtactactaccacagataaattgtgacaaactgtcaagaattttgcagtttcgggtgtatatgaggtacgaggttagtttctggtaaaccagaatagtttttttgaagattccttgaattccagatatgtctgttatatctgaatcataacacaaatgttggttactatttactgattgatggaaaaacttgtagtactttgcaggatacaatttctacaactttcatcgcacgtcattgagcaattcttaaattgtattcattcacgactaaacagcgttgccagatatcctaaatagtaaaaaatctgaggaaatttaaacatgatggaaattttttcaagaagtttttttatagattataacacctctatagtctcacatgtgaaagctacacaatagaatcgtatacttgagagctctattactgtataaatttatcattgacgacgtagagaggaagttgtgggaaaaaccaacaaataagaaacccatgaaaactatatttttatatattaaaatatgtaatatcaataaatagtgatatgaaatatccaaaatattggcaaatataacttgaaatacagaatatgagaacactcggttgatgtatttaccattgtcaatttttgcttggcataaaagtgttttatagtatatatgtttaccttttgttttgcgatccttttaataaatg

SEQ ID NO: 6654 - DNA, 2322 bp, Diabrotica virgifera
  SmartBlast Evalue=0; Info=DNA-directed RNA polymerase II subunit RPB1 n=3 Tax=Endopterygota RepID=E2AC10_9HYME
acggatttcggagagttcgattcgttgtcgagccttcaaaatggctaccaacgatagtaaagctccgttgaggacagttaaaagagtgcaatttggaatacttagtccagatgaaattagacgaatgtcagtcacagaagggggcatccgcttcccagaaaccatggaagcaggccgccccaaactatgcggtcttatggaccccagacaaggtgtcatagacagaagctcaagatgccagacatgtgccggaaatatgacagaatgtcctggacatttcggacatatcgagctggcaaaaccagttttccacgtaggattcgtaacaaaaacaataaagatcttgagatgcgtttgcttcttttgcagtaaattattagtcagtccaaataatccgaaaattaaagaagttgtaatgaaatcaaagggacagccacgtaaaagattagctttcgtttatgatctgtgtaaaggtaaaaatatttgtgaaggtggagatgaaatggatgtgggtaaagaaagcgaagatcccaataaaaaagcaggccatggtggttgtggtcgatatcaaccaaatatcagacgtgccggtttagatttaacagcagaatggaaacacgtcaatgaagacacacaagaaaagaaaatcgcactatctgccgaacgtgtctgggaaatcctaaaacatatcacagatgaagaatgtttcattcttggtatggatcccaaatttgctagaccagattggatgatagtaacggtacttcctgttcctcccctagcagtacgacctgctgtagttatgcacggatctgcaaggaatcaggatgatatcactcacaaattggccgacattatcaaggcgaataacgaattacagaagaacgagtctgcaggtgcagccgctcatataatcacagaaaatattaagatgttgcaatttcacgtcgccactttagttgacaacgatatgccgggaatgccgagagcaatgcaaaaatctggaaaacccctaaaagctatcaaagctcggctgaaaggtaaagaaggaaggattcgaggtaaccttatgggaaagcgtgtggacttttctgcacgtactgtcatcacaccagatcccaatttacgtatcgaccaagtaggagtgcctagaagtattgctcaaaacatgacgtttccagaaatcgtcacacctttcaattttgacaaaatgttggaattggtacagagaggtaattctcagtatccaggagctaagtatatcatcagagacaatggagagaggattgatttacgtttccacccaaaaccgtcagatttacatttgcagtgtggttataaggtagaaagacacatcagagacggcgatctagtaatcttcaaccgtcaaccaaccctccacaagatgagtatgatgggccacagagtcaaagtcttaccctggtcgacgttccgtatgaatctctcgtgcacctctccctacaacgccgattttgacggcgacgaaatgaacctccatgtgccccaaagtatggaaactcgagctgaagtcgaaaacctccacatcactcccaggcaaatcattactccgcaagctaaccaacccgtaatgggtattgtacaagatacgttgacagctgttaggaagatgacaaaaagggatgtattcatcgagaaggaacaaatgatgaatatattgatgttcttgccaatttgggatggtaaaatgccccgtccagccatcctcaaacccaaaccgttgtggacaggaaaacagatattttccctgatcattcctggtaatgtaaatatgatacgtacccattctacgcatccagacgacgaggacgacggtccctataaatggatatcgccaggagatacgaaagttatggtagaacatggagaattggtcatgggtatattgtgtaagaagagtcttggaacatcagcaggttccctgctgcatatttgtatgttggaattaggacacgaagtgtgtggtagattttatggtaacattcaaactgtaatcaacaactggttgttgttagaaggtcacagcatcggtattggagacaccattgccgatcctcagacttacacagaaattcagagagccatcaggaaagccaaagaagatgtaatagaagtcatccagaaagctcacaacatggaactggaaccgactcccggtaatacgttgcgtcagactttcgaaaatcaagtaaacagaattctaaacgacgctcgtgacaaaactggtggttccgctaagaaatctttgactgaatacaataacctaaaggctatggtcgtatc

SEQ ID NO: 6655 - DNA, 2323 bp, Diabrotica virgifera
  SmartBlast Evalue=4E-52; Info="Glutamic acid-rich protein, putative n=1 Tax=Pediculus humanus corporis RepID=E0VYR2_PEDHC"
tatacacatcatctgaaattaatttacttcctggttgacctcttagtttttcttggtggtggtggcttagaacttgctggtgctggttttgtggcttttgaagtagaaggagtaggttttggagactttgcactacttttaggagtactttgaggcttcgggctactggaagaaacagcagatttccttccaattttggctaataccttggcctttttctgatccaccacagggctggtttttggttcactttttctcttccccctagcagacctgctcgtcgatgccggcgtctttttgggttcagggagctttttagcgggtgtttgtttctttgctggcgtaggggttttcgacggtttcggctcgacctttcgaactttcggtgtttctggagctttcttggttggagtttcttttttaggtgactctgatctcggtggagctttgcgttttacgggagacttctttttcactaattgttcttcatctttatataaagataagtccagaccatcgggatgttcctcagatacagaaggttgagaaatttctcccttttcaacagccaaacatcttttcaaaatgctgtccgtcctctccttttccttgggttttaatttatatcttcctttaccgactttcgtcaaatctaaactagttaaaatgcagtcgaaatctgtcaaatcataaaagtcgggagtgtatatctccccacttttatcagttttgtcttgagatagccaacgaatttttatcttcgacgaagatttgtatacgttttgtatcgcctggcataaatagaaacccccctctgagtttctaacagcaagaaattcatttttatagaaataaataagtttatcgtcgttatttttacttcgaggcgtggacgagctaatttttgttataatttcaatttcaggtaaggggctttggtagtgctgcgtcatcattctttgtctttttgttttcccagtggcaggtgatttttgtggagttttcgtttctgttttggcttctggcttaacagccttggtttttcttgccggtgtttttggtggagttttagcaagtggatcttcatctttttggacgttttcagcttctgttgcctcttcattcgactgttcttcaccttcatcattatcttcactttcttctttgttttcagcttcaacttcatctttttcttgtgcagatttttcagcagccgctgtttcaagtggatcagctaatggatctatttctgaagcatcttttgctttttctggttcttctgcaactgtctcattttgaactgtttcaggttcagctttctctttctgaggcgtggcaggtgtggcagattttgcaggttcagttactaaagtaggaggggtaattggtctagttacagattctgcagcttctgctattgatggcgttgggtctggtgtaggatctggaattgactctgcatcttgaacagaatctgatactgaaggtgaaactgatgcagcttcttctactttgtcttgagggggttgttgagctgtttcagcttcttgctgtgattgctcgggagatttaggtttttcagttgttaattcttcaggagtttcttgtggaggttcccttaggggttcttgtacttcagaggtttcagttgtgtttgaagattcaggtatcacatgattttcctgaggttctggtttttcttccactggtgttgatggttcctcttcggtggtaccattagactggggcttttccttttctactgaaggttctttaccttgtacagtggaatttgaatttgataaattttgtgatgaggggacaccttgtggagtagctgtaggattggtagctggtaatgtttggacaacgggaggtaatgtgttttggttttgtgcattttgaaacccacttgaatatgaaacattttttggtgcattgtaaacctgaccgctggatgactgattattagccaaagggtgattgctagctgggatggcacccatattaaaaggagaactaccaccaagagagtaatggttctgttgagatggcggatgattatgtgccatgttggtatttggataaggattttgagctataggccctgaaggctgtccgtatgatactggagccccctggggatgcattggtttgttaggacttgctgaacttgtttgagacgtgacaggatttaaagttgtgttcattatctgctcaaatgcttatttccatagcagtctatatataaattttattctattacacaaaattacttttcacttatggcgtctgtggaacgaacagttacgaacagaaacag

SEQ ID NO: 6656 - DNA, 2320 bp, Diabrotica virgifera
  SmartBlast Evalue=2E-71; Info=Protein daughter of sevenless n=2 Tax=Formicidae RepID=E2AQY7_9HYME
ggcagctggccaaacgaaaacgaataaaaaacagaactaataacattaatttaatcttttatttttgttagtaacgtttacgcgaatacgaccaagaacgaccttagatattagtgaacgtcttcgattaaagggaaagtgtaatattttgacaagtgataatgcttattattagtcatcaattgatgattaaaaggtaacgaggacaataccaatacgtgaagttatttttgtaaaagatggccaagaatccacaagaagtggtatttgaaggctggctgacaaaatcaccaccgacaaaacgaatctggagggctaggtggagaagaaggtggtttttactgacccattctggagagctacctggtcaatatatcctcacatattatactgatagaaactgtaggaagcttaaaggagtcatcaatttagatcagtgtgaacaagtcgacttagggctaaagttagatgaaagaaaattaaaatttgatcacgtctttgatataaaaacaccaactcgtacttactacttagctgccgatacagataatgaaatgagatcctgggtgacatgtatctgtaaagtatgtggcttaaaatctacaagtgaagaagaagagggacaaatgacaggtccatgtcctgatgtagaagttactgaagaacctagtgacaggagaattacattattgaataattttaatgagacaccaccagtatctcctgttagtactagtccatacattcctatttcggagtgtattactggaaaatcacctatatttgatcctaaggattttaagacattactacagtataacatgaaaaatacgatctttaaatctgatccaataacgcacaccaacgaaagctatgaacttccacaaagaaactacttaaattgcctaaacgttcaagaggatcctagattttatgactgtccaaggaagctgggacctccagtgccaattcaaaaagttgaattagagaatgaaaaaaatcattcgccccttcaaagtcctacagattctgatagtgtatttaatgatgaagactggccacacaactcgtcatctgatttaaatacatccaagaatacaagaaagtcagaaagttccgatgatggagagaatctcgtagcaactaaaaaatttactaaatcaaatactaataatggaattactactgcagctgctcctccgcctaggccaccaaaaccagcacatatcgcaccacttccatgttaccttaacctaacgcctactaaaacaatcaaggacgcagaaaatgagaatgtaaaaagcgaaagtcaacagccaaagttgacagatgatatgtatgacttccctagatcgcatcacatagaaacggatgctaccttaaaacgaagacactgttataataatgctgcgcctgtgccttgccctgagggtactatttttagatacgatatttctccaaaacctactacaagcacaacagtgtttcgatacgatctcgaagaaggtcaagatgaacctccctcaccagcccattctcattcttcgtccgcacctgcctactctaatttacctagtccttctttaagtgtaacacaactaatgcctccgccgatggtcaatagggagctgaaaccaaaaagaaaattatccgactcacattcgatttcttctaacccggaaccaccttcaccgagaagcgcaccttctgtcgatcgaaaattaaaaccgccaacacccttgcaggaggctcacatgagaaaacattttaacacagaagaagaccagcgtaaaattcgagcagcaccaagtccaacaccaccaaatctaggtcgttctcatgacagtttactttcccaaacagaaggtgaacaagtctatcattacctttcgggcaaaatgcagtacctggacctagatcttgagggatccagtggttcgaattttaccggcggcaatagtacaaaaacgactcctgctaaacaacaggaagataccgtatataaaaaagtcgattttatgaaaacacaagcatttaatatcaccagaaatatattagaaaaggaacgacaagaacctgtaacgttcgtaaaaaatgaaaagaaactatattgatttgtattgtttaaacctctgtatgtgcaattgttgattagtgcctgatgcacaaacacaaatatatgcctaatgtctttctcacgttggggctacagattcaacttcttacatatcaaccaacatattttgttggaaattataatcaatttttagtttttcaggtatacagatcatccctaaaccctttttttttctagtgcggc

SEQ ID NO: 6657 - DNA, 2317 bp, Diabrotica virgifera
  SmartBlast Evalue=0; Info=Beta-galactosidase-like protein n=1 Tax=Tribolium castaneum RepID=D6WCM8_TRICA
gcagttcttttcatttaatttctttagtaacattttaaacattcatcagataaaaaataaataaataatgaagctaaaaacatattattctaattccgcactaggtataaccttggtagatttctttaatttccctttttcacttctaatatgaaacataattttatgcagataccataacatacaaatttctgaagaaagaaaccagtgttttcaattccgtacctctgtttacagtgttcacatgaccaaccttgtcaaatattggatgatctgcaaaatctagataaataggagaatgatagtgctcaaacacaataatatcattttttcctttatgtaaaaatggagcaggcagatacagggtttgttgtggaccaataaaaaagtgtctacctaacacaaaaccattaactattgtgatccccttgacccaagtccttaaagacacaaaggtatcttgtggttcttctggtatgtttagtgaaaatttataaagtgctggagtatttgtagtgtttcctacagctttccagttgcctagatttttgttccagctagttttaaattctaagggaataatcgtccagtctgttagtttatttccattaacgaaaacgtcatcagtaagacctttatattgttggaattgatctaaggctccatatccgcatcttccaaagttctcaacaaccaaatctaacgtagcgttttgaagttctttattgcctagacttagggtagagttgtagagcttccagaagccgaatccttcgatgctcttttcgttgacaggtgcaggtgataccagctctccatttaataaaacaagtactgtatctctcacgtatccagatattgttagtacagaattggctgccagatacagattatactgtctatagacaatatagccgtaactttgaccagaattgttatttataggtaacctttccatcgacataacattttctgatttaattatttcgtttgattcgtcaattatatctgacagcaatagttgtccctcggccataatcgaagggtacttcacaggggcagtgatgtttggtagtgggggtagctttgttttaactggatttctggcaattatctcatttgatattaaggaaaatttgttagcaacatttccgtattcagagattggtgaatcgtagtcgtaactggtggtgtctatttgaagtccagaattgtccattcctcttgtgttatcgtttgcaccattcatgaagccaaaactggtaccacctacaaacatgtacatatttattgatgacgggaaatctaaaattgcttttagataaggtaaataaccctccgctgatgtagtatgatgagtttcaccccaatggtcgaaccaccctgtatatgtctccataaccatatttggtttgttgggctgtcgcttgtgcatagttttaatcccatttataatttgtgacatacttcccacgttagcagtctgcaacactcccggtataattccatgggtataatctggagcatcagctgtgtatagcagttcggttataccgttgtcaataaataactttttgagtgtattgaggtatactggatcgtctatggagagactggcgaactcgttttcgacttggaaaccgactatcgatcctcctctttggaactgaaacagcgccaatattggtagtaacacgttaaaccacctttgtatgtaagtcatataatttttgtcctttgaactcctaactgtagtaacatttcttaaaagccagctgggaaaacctccaaattcccattctgcgcaaatgtacggaccaggtctaaccaacactaaaagatcctcctctttggcggttctcaaaaattcgtcaatgtgtaaaaagtcttccatatcagttcctccttgaccaaaatcgtacacacctggttggggctcgtgtagattccagggaacgtaagtttccacggtattcaagcctgctgccctcattttcctcagcctgtcccgccagtacttcctcggcactcggaaatagtggaaagccccactgtacagggtaatatttttctcgttgagggtaaaatagggctggttatccgataaaccctgcgtaattccatttccagtgtaatattcgtacaaagttggcaaactattcgctgctaaagccattattccgctgctacttttctcacaaaactactggcgagattatatggtgctatttgttatttatccagctgacacggatatgttacatcgatactgattaaaaatataaacataattaaattatcttgaatttttatcgta

SEQ ID NO: 6658 - DNA, 2318 bp, Diabrotica virgifera
  SmartBlast Evalue=1E-162; Info=PAB-dependent poly(A)-specific ribonuclease subunit 3 n=1 Tax=Camponotus floridanus RepID= E2A0A4_9HYME
cagtacttgatattgaagtcgaagaggaaaaaattttattttgagaaatggataatcttaatacaatatgctagtttataattcgacgtaaaaagtatccaaaagttgtgcacagacgaattttctcaaagtaattcactactcgtattcaaagtgataggtgaacatcagtgaactaaagaaataaatacaaaaaatctaatggattgggtgtcccataaccattcccgatccctttctagtcgtctggatctagcaagagcaacacaagctactgaatttgttccaagagttatcagttccagtacatctgcttcccctaatttctttggttattcaagttcaaactcttcacttcattcaatatcgaagaaattagatgatggcagtttatcaacgtcccatatttcttcggaatcttcttcgccccccttagcaaacttgccgaacaattcatctattgtaactagttcgcctgtgcagtcagagaaagtgggatctagtccgggaccttctttaccagcctaccaagaaaatgtgggtggtactacctacttctatcagatacagaccactccagagaactgccaaccaagtgaaactgcagtaactgtaggtggctccttaccaactgaatacaacgtctacacgggtaaaaaagatccgtcttttttcttgtccgaagatctccgcagcgatattctaaatagaaatgttttaactttgttacaacccgacccacagcaatatccagatcttccgcaagaggtagatagctaccacgagctgtttcctcttgaacccatatcaaatactttgcataaggcccatttgggctatcaggcgaccatgtacaaagcgacccacatcaaaactggcatgcactactgtttaagaagaatccatggatttaggttatctaacactaaatgtatggcatatgtcgagctgtggagaaaactcacccattccaatatagttcaattgaaggaagtgtttactacgaaagctttcggtgataactccatgatattcgtgtatgactatcatcccggttcagaaacactactgaacaaacatttttcaccggaccaaccaggttattgtgatccgttcttaaatgatagctccacaccgagaccatatagctaccagaaaaataacctgctacggcacactcaaaataataaacttcctgaaccgttgatttggaactacatcatccagcttacatcagctttaagaattattcactcttcagcacttgcgtgcagaagtttagatccaacgaagattattattaattcccgaaataggttaagattaagttgtttaggagtaatggatgtagtgcttcaagaaacaaattcaaccatcaaccacatagcgctagtacaacattatcagcaagaagacttaactgctttaggaaaattggttctagctctggcttgcaaatcgaccatggctgtgcaaagagaaaacatatctacagctttagatattgtcagtcgttcctacaccactgatctccggaatctgattatgtatttattaggtacacaacaaagaagaagcgttactgatcttatgcccatgattggtgctaggttttacaatcaattggatacattacacaaccacatcgagacgctcgatcacgaactgtcgaaagaagtacaaaacggccgcctttttagaattatgaccaaattggctaccattaacgaacgaccagatttcaatttggagagtacatgggcagaaactggagataggtatatgttgaaactattccgagattatgtattccatcaagtgaccgaagacggcaacccttggctcgacatggcgcacatcgtccaatgtctcaataagttggacgtgggcgtacccgaaaagataagtctggtgtcacgtgacgaacaaagcgtcctcgtcgtctcgtacgccgaactaaaacattgtttagaacagtctttcagcgagctaaccagttcatcctcaggcctccaagaattaaatagaatatcataatattgatatgtgggataaacttcatctttttaggaaaagtctcgtttagcaagattcggcagggatcctttttactcattgtatatatatgacactaaaatctttgcaatcgacaagatttcttagttatatttgtaacgttagaagggaaaatattgttcggttttacattttaacttgatacatcaacaccagtgatttttttgtttttaaaacattttaccaaagtgttattttttactgttaaagaaactgcagcacaaactatattttcagaaaac

SEQ ID NO: 6659 - DNA, 2315 bp, Diabrotica virgifera
  SmartBlast Evalue=1E-136; Info=Cgmp-dependent protein kinase n= 1 Tax=Aedes aegypti RepID=Q16JU3_AEDAE
cagtttttgcccagaattaggatccccagccacttccgtagttatctcaaccaaaaacccacaccccgagaaggagtgggaaccacccccaagacaaaagcgcacatccacatagggcagactttttttcttgagctgttctctacttattgtgaaaatatcaagtaaatcgatgtagtaggatggaattcggtcaaataacctcattgactgccctataatacaattttattatttgtcttttataattttgtattttaatatttgtctaattttatacaattttattataagtctttgtcccaatcagaaaaatcatctggaggtacatctttgtcatccgggaacttctcaaagtaccttgtgtcaacattgtcgtttaacgttggcctatatggaggctccacctcgagacgacaaagtttgttccagtccaagctaccgaaccacagatgctttttgatggcctgaattccagacttctggcaacccaacctgtctgaaaccgattgcgtacaaagcttttttataagattcttagcagttcctgatacgtactctggaaaaagtacaaactctatccctttcagaatcagcttgtaagtattcatatgaccgggatcattggttctgaaaggtgttttacctacaagaagttcgtaaacgaatacgccataggcccagtagtccacagctctgttgtagcctttgctgaggattatctctggggctacgtattccgcggtacctacaaaagtaaatgtcttctctttagcatcagtttttttggcaaaacccaagtcagctaacttgagatatccattatgatgcacaatgatattttctggttttaaatccctgtaaactattccaagggcgtggagatagcttaggccttccaaaacacaacctgcataaaacttggctttgtcttcatcgaacctctttaatttctgggaatgtaacaaactccaaagatcgcctcctaatccgacctccaaaataaaataaatatatttgctagttttgaagcttctgtacattctagttataaaaggagaattgcaagaagtgtgcaaatttttctcattatacacttgatcttggtgtgttttctttcgaatttcggattttttgatatactttagggcaaagaccagatttttctgtcgattatgttgaatcaactgtactcttccatacgctcctagccctaacgtttgtataacgttgaattcgtccaaatttatatttggaatgtctgataatttctctgttgctgtgtaagcttcactcttcagtcttacgaactcatgaatattgccgaaatgctctataaagtgttccctggttaaggttaaacattcaacaccgggaggatcagctcttactgtggcttgtctaaattcatccttcaggagagctacttctccgaagtatcttcccctagacaactctgttactttttcattatccttttctacagtaactgtcccagctcgtataatataaaacttatttcctaactcacactgtttaacaatttcagtaccacttttaaaaaattctaactctaagagattcgccacttggtacaacttttcaatgggagcagtgcctaattcaggtacgttttgcagaaaagacgcaatttcttcttgttcctctaaagcagttttaatgctgagtatcttaaaggtcttgcaatctaatgcccacacggagcagttattatcgactgctctgatagaggcatggcgtttggctgaataaaggattgccagctctccaaatactctgacgtctttgaatgtagttatgctttggttttggatcaatatgtcatatgtacctgtacgtgaaatatacacgtgagttccaaaatcaccttctttaatgagctcttcccctaaaggcaccttttcgttatacatgcagtcgataaacctttggtaccggtcatttttgagtacatttgataggaattcgttttgttccaatgcagctctaatctgattttcttcctctttagttttcggataagtttttacatcagctgtttccacttcatacgtggccgtgccgatggatttcgaaataatccccgatcgcctcttttcatcgatttcgtcatcgtatgtgtcttcgtttaacacactcgtacctcgttctcgtttcaccctacagaacaacatattttccctgcatgcactgtttgttgtattatcactgttttcactaaactatcaacactcaaaatactgccatatattttctagaaattatttggtgtcgagcctttgatagagctcact

SEQ ID NO: 6660 - DNA, 2312 bp, Diabrotica virgifera
  SmartBlast Evalue=7E-79; Info="Alternative splicing factor ASF/SF2, putative n=1 Tax=Ixodes scapularis RepID=B7QKF8_IXOSC"
cgcttttcctgttgtgtcggctttctggtgcaaaacctacaaaacttatcttaccttttaaaagttcttaagaaaatgtctggtcccggtcgtaacgattgtagaatatacgttggcaatcttcccccagatatacgcaccaaggacatccaggatctcttttacaaattcggaaaggtaacttttgtcgatctgaaaaaccgacgcggtccgccatttgcatttgtcgaattcgaggatccaagagatgcagatgatgctgtccacgctagagacggctacgattatgacgggtatagattacgagtagagtttcctcgcggaggcggcggccatggtggtggtggtggaggcggctttagaggaggtcgaggcggcgaaagaggcagaggctctaggggaccaccggctagaagatcacagtttagggttcttgttacaggcttaccaccatctggatcatggcaagacttaaaagaccacatgagagaagcaggagatgtatgttttgcggattccttcaaagatggctcaggtgtagtggagtttttgagatatgaggacatgaaatatgccatcaagaagttagacgattcaagatttaggtcacatgagggagaagttgcctacatccgcgtgaaagaagacaaaggtggcagtgaaaggagatccggaggtagatcgagaagccgatctttctcaccccgcaacaggggctcgccgacatacagccctgtgcatagaagtttctcgaggagccgttctcgttcataatttccaaccgtggatattatgtacgtattgtgttattctattaggcatttccttgaagtatttttttatgtgcaaatatttccgttgattatcgtgatcttagattgtagaagttgatattggctaattgacactatgaatgataaaaatttatttgtattcattcattgaatgttagtttccaatgaaaatcacctccagagtatgatccgagcagaaattttttaatttctaatttaactgaaccaagatttaccaattggctgcagtaggactgaaaaaacatcttcattgaaatatatttagttcacaatgcttttaattgtgacatttggaatcatggcgtaatattcgccatcttaagaaaacagatctttccatgtcagacattacatctagtaattcgatcttattctttgaaagtacagaatttcttctattctatctgactattaatatattttgatcgaaatttaacagtatttccggttttataagatgacagtagtatttttccaatttttttggaaatgcgtaaaattttgcacgaataattacttgaaattgttaggttaggtacgatactcttggaatttgcctaaaaaatagaatatagcttaagatattggtattgctattaatgttttttttatataatttcatttgtccatttgccgttctgtgtgttgtacattccgaattctttttttaattaatcacatgcaaagaaccaaggaagtaagtaatagtgattatttcttagaagtgttttgaaacgtttccttgtttcttggcactaatggattcttcaaacttaaattaattgattttttaaatactataagactctaggcactaatgtataatttttttttctgtctatggtacctttgctgaacctgtgtatcagcgatggacgattttggaaataaaaaagataaaactgacgtagaattctattaaacacctactcgtcaataggagggaagaggaatctttaatttgtcaaaaggatctcctcaagagatttgcaaaaaaaggattttaggagggatttattggattttggatatcaggagggaggaattgtttagctgtttcgcgggataggataggagagcataatacaggagggaggattttttaaggattaagaataatcaggatttggagcttttagagcatttgagtttatttcatggtaacagaaacagtgattacatatttttacagctttcttacaatttgtttcgccatttagattcagaagttgtaataaaacaacttatcttttcatccttcccaaaaactgcttattttccacacattttcgcatatcataagaacaacctcaatatctgcagctgcacatcagatggcgatagagcattaccaaactacatgccaacaagtatcatcagtgtatgttattcgcaaaataaatcatccctcacttttcattttaagcttcaccctatcgcttgtaccgtttctacacaaaagaggctgtttctgtaacttgaaatacactcactgct

SEQ ID NO: 6661 - DNA, 2314 bp, Diabrotica virgifera
  SmartBlast Evalue=0; Info=Mitogen-activated protein kinase kinase kinase kinase 3 n=2 Tax=Formicidae RepID=E2ATS5_9HYME
aaaacatcacgatttctgtattcttttccgacttaactagaatctattctaataataagttaagtgttttgattagtctaacttcttaagcaaagcagaaaccttggatttacgatgagcttgttcttcttattaataactggcttcatgtcctgctaagatatataagtcgtgaccttcttcgtttgttagtgtaccagtcctaagtaaattactttctaacatgacgaccttatctgaacctaaaagtttatacgttcgtgctgtgtcggtgatttcttgtgtaacttcgccattttttaacgatcttccttgcattccgtgtttgtgaaacgccagcacactatccggaagacatattatactatcgattctaaatccaaacctgagttcggaaacctgttttttgttcactttcatcttcccttgcatatttactatcctaataacgttttcgtaacaaactaaaatcgaatctttatctaactgggacacgttcactatatccaaattttcccgtcggggaatgacagtcgccgtaccatccatgtcttggagttcgtcagaatggaaccaactagcaccagaattcatattgatcaagtccagcttgaatcggttaggttggtacgcttgcctaatcgccacacaaacgattggatattctagctcaggtgtgatgatcatttcaaagacgtgaagcggattcggaagaagaacacattccacgtgctttaataacataaatttatttagaggatcgtaccactgcatcagatatatatcgttagctgtcgctccgcagaggtacttatatccgttgtaggggttccgcgcgacgcagcatttgagcgtacctcgggtgtcaggtactctcgtagtcagagcgaatttcctcggcacaagtcgctctggtatccgattcatgtgcaaactaaacctgtgggattgtttattttgaagagctagaaggtcgtgcctatagagttggggagtttttcctgataacgtcataaggacatcctttatcacatacatccaaactgttctcctattatataactggtcaatacacgtttcgtgtaattcgtttaaattgagattataaataccctcttcggcgccaatgaggatatgttgatccctagtgtcgggattgatccaagataccgtacaatgtatcctcaacggacaaccattaaataccttggaaaagcacgcacccatatggaccttgggcgttggtggtaggccattgctaggcggtcttggaggtgtatgcctcctacgatgttttctaggtggtacaggcggacaagttaccatatcgctggattcaccttcatggttaggatcctcctccgttccatttacttctctgctactatctcggttagtccttccggttctgctgctatcgctcaaagatctctgcctctgaccggtcaagttcatggacgttactaaaccaaagatctcgtccactgaggaatgtcttctaggcgaaccgttgaaaggttgttctttagaatgattcgtaggcgatacggcgtggatgtcacatttcaccgtgttgtctgtgtcttgcactggtagagtggcttgttgctcatagtccgactgatgatatttgtaggatcccttctccctgttgagcgaatcaaaagcgtttccaattccacatttttgattttgatgttctacgcaattgtgcacgctcgtgacgttgttcataatatccatcaggtcccattgcggttgtttttcttccactattactgtaggtatatctgatctctgtagagtgttattggcttcatcgatgcgatctacatctgagttagaaagaacggcgttctggggttttggtcttgaagtcagtcgtgatgcaattctttgtggaacattcggcacagccccatcttcgtcaggttcgaggtcagcaaacatatgtgaaggattgttaactttttgcaataattctaaagccagtcttctatgcatgtctccttggaaaaacgcatgctgcaacaatttttctgcagtaggtctcttctttggattcttagttagtgctatctttacaaagttgtggaaagtggggctccatttctctttgtccttaagtgtaggtggtttgaatccgctctttgacatcaaaacagcgctctcatcggatgaaggtcaaacatcggaggctgtaattcggctaattctatagctgtaattccaattgcccaaatatcacagagctgattataacccccttttctttccacagcagctacctctggggccatccaatagggtgtgc

SEQ ID NO: 6662 - DNA, 2313 bp, Diabrotica virgifera
ataacaaattggttcatgtgatatatggggtgataaaagtatactgttcggatatgaataatgaatgtttgatatttgacatactacccgggcgaaataaataataacgaatgcgtcagtactacaacgtttacaatgataatgataaagtatttataacataaaaggttaatgtaatgtgtgatgaaaagacactagtctttgaacaaattatcaatactccaactgcaacaccttaggtaataatatcaaagttaaatctgaatcagaatttaaatcaaaaacatttaagtcaaaattcaggttaggtaaaggtaaatgaaaaggtattgagtgggatagatgtttcaatgtgttaagaattatattattacacttctctacaaaacttatacaactcttgtatacaactacaggcttgtaaagaagtaataccaatcaataaaatgtttttaaacagttttattcatgaactaatcttaccgaattcgacttcttaaaattactgatttgtattgccgtcgtgacaatttgacagaatttccctctccgagaaataaaaactgtcaaagtgtcactcgagatacaaatcggtaattttagagctcttgtgtaattataagtaaaaattattcaagacttactgtgcattgactggtatcctaaactttaggactttttttattttttttttggccatctgaacgctataatatcaagattttgtagatggttttctatacactattaacagggaatttattattcttacgaaatcattgttctaaaacagtcatattctcaattattttttcctccgtattctccccacttttaattctgcattcggtgatgattatgtagtgactaagatgcgtggcttgttacaaatgtctactttcaaataaatatttttttgctaataacaaataccagaaaaactctttggtaaactaaaaagctaacagagataaaatataaaaatagtaatataaaatttacaaaatactgtgtgcacaaagatttccaaagcttcattaaaatatacaaacagaaccaataaattgtacaaacagaactaataatttatttatttataacaaatacatctgtacaaaacgaagataatgggcatttacgtaatcaggtttttacaaacaaaatcgtgatcttcatctaaacagatttacaaatgtaaaagtatttataatgtgtatttttaaaagtaaaatcttatgaaagaccaatacatcaaagaggttggatctaaaattaagatattgtggttagacaatcatataagtggtttaaatatgtcaaattgattagcgacctgtttcaggatttttcggcttacgaaacaacgaatttattcctttcatttgcacgatactgtatacctagaatcagtggcgtaccgataggtcagcgggccctggttccagctgggatgagggcccgcccataaagacacattgtatagcaaaaatttttaaataaacattaaatatgtataagtcatcatatcataaaatatatcatatatttataaaaactcaagctaagtccatttactcgcggggtgtacctttttgggtacctttattcttggggtcatatgcttcgacccattttatcacaaagtaaatatttactaattttacagtattgtagggtggtaactgcgctcttgttctttttcactatttatattatatctctctttgctgacgtttaaattggtaagcttcaacctcgtcgttagaatttagctttacaaaagcgtccctgtgtttcttaataaattttgttttcaaattttttgacgaataggtattctttgtttttatttataactacctacacaaaaattaaaatttattaagcagttacatttcctagtgtgtacttgtctagttaaaaatgtccccatcaaattagaaacaaaagaagcaaaaagcgcgttagagcaggcacctgcggggcccgggtcctggttccgcggaaccatgctcagtacaccgctgcctagaatatacgaaactctgccaatttctctattcgaaatttgttcaaaaactagcatgttattgtacaatttcgagttccacgtctcttatcagacacgcctatttcgtcatttttgctcgttagtcagggacaggtaggtacagtcatatatattttcataaatttttgtttatataatatacaggttgactttgtctgcaccttggataatttagaatattatcaaatataggacggatagcaaaaatgatcaccttactcctaattcgacacattcagata

SEQ ID NO: 6663 - DNA, 2304 bp, Diabrotica virgifera
  SmartBlast Evalue=2E-95; Info=ADP-ribosylation factor 1 n=15 Tax=Fungi/Metazoa group RepID=ARF1_HUMAN
cgatgtttttgttttggtgacactatcgtcaagaaataaattcgttattaatttattgttgaacgttgtcttaaacggggaattagggtaaaccatcttaacctttaagataatttaaaatcaacgtaaaataattctgtaaacaaaattaaagtcacaaaacgtgcatacttgataggttagaagttgatgactaaaaactaaaaggtcacgtgtcatgcgccaaccaatgcgacacgctggttcccaagacgtggcatgagctacgattctctttcaagtccgccatattgacattcgacaacttttttgggaggacaggtgaatgttatagcgtttttcaaagtgtaaggtgtttattttcaaaaagtttataaaataagcaatcactatgggtaatgtgtttgcaaatttattcaaaggcctctttggcaaaaaggaaatgaggatattgatggtaggactcgatgcagctggtaaaaccacaattttatataaacttaaattaggagaaattgtaacaactattccaacaattggatttaatgtggagactgtagaatataagaacattagttttacagtatgggatgtaggtggtcaagataaaattaggccattgtggagacactatttccaaaacacacaaggcctaattttcgtagtagacagtaacgacagggaacgtatcactgaggctaaagatgaattaatgcgtatgttggccgaagatgaacttagagatgccgtacttctcattttcgccaacaaacaagatttgcccaatgcaatgaacgctgcagaaatcaccgacaaactcggtctccattcactacgcaaccgcaactggtacattcaagctacctgtgcaactagcggagatggtctctatgaaggtctggactggttgtccaatcaattaaagaacgccaatcgctagaacataggaaaagagaggagtgcgcaaaaaagtgtgcgagtgcagatggtttttttcttgtactcttgtcgtgtctactacctcgcgcgcgcgcgaaacgtttcgtataccatatgttgcaatttttgtgtccgatggggaaattcgtcatgtttcactttgggggttataaaattggctgttggcgacaagtggtgtatgaggtgaatccgaaaatagttttaggcaatatatcatatgaatctcagctttctttaggttgagagttgtttttgtagtaaaagaaccttaaacatccttcattggcgatttattattttttaactgcatgaaaatcttagttttaatgtttttatataacacttttagattgtactaacttttaacattccacaaatttctcataaaattgtgatatcttttctaatacctcttatatcaatgaacttatttttgcaggccaaaatattttcttagaaagtaattttgtatcatctataaaaatttaattttgggaattcaattaaagactttaactggcaaattttaaaatgttaaaggttctagtcacgtatttagtctggacttgcactttatagcacttgtcgcagaaagcatctaacccccaaacacgtatggtgacgtcctatttgcagaaaatgcactataatatacgatagtaattatttattgtcctctttctggtgaaaacaggctttttgtaacatatattttttattgtttgtaataggttaaaatgtacagtagacacttatatttaaaataaatattattttttatctatcaatccttgttgtaacatatggtaaggctgttcgtatttaaaaaataaaacaagaacatgtttttgaaaagttttgggcacggctcaagtattttattgtttaaatttaagatgaagtacgaatgggcgcgcccgaatccgacaagatattgtatagccccgtattcgttgtcaaaccaacgggtcttgctctggtagttaatttcggcgttagagttcaagaaggaagtagatttttttatacttatagtaaatatattatgggatatttaaagactggccgattggcttaccagacttacgtcccgcagatcttaaccggcgatgagtattcgaggtttgtttctggtcagattcgggcacgtcgtactgtacataaaatacttttgtttacttctcaaatttgtaactcagttgtggatactttgaggcgtaattttattttgacaaactgtggatttaaggttacattataagtgatttatttaaagaaatatgtttttgatttatcgtggacattccctgtttgtcagctgtattatcaaataaatttatacta

SEQ ID NO: 6664 - DNA, 2292 bp, Diabrotica virgifera
taaaattacattaaaaaaattacttaactacattaaataaaaaaaagataaaaaatggttgagatgaagatttttgtttatcaatatttagaaatgagttattttggttggtaatgaataatttatcacagaacaacgtagcttgttttgttatctaataactcacaattatcccattcatggacatataaaagtcagttcatattttacaacaaatatatttccatatcatatccaagaatggttctaattcacaaagtcaattcaaagttcatcgtgaaatactgaggttcttaagatttattcaaactacgccaaattgtttaaaatccgcgcgttttgatttaatcagttaatattattaaacgaatttgaatattgtactagtttaaatcacatgttaccaacagcgcaaacaaaacataaaagacgtttaacaaaacacaaacatttcgaatgtatcacatcgcatgagctgcatattcaaaaataacatatccaaacaaaaaaacccaatatagtcataagataaacataccaacgtaatacttaataataatttaatatttgaacaataactttgtaactatttagtcgataatattcaaatttgtttaaaatattactacagaccggagtgtcgaactgttttaaacaatataaataatgatacaaatatgcgattgatatattataatattaaatctatgagtgattttctttagaagaatattgaaaatttataaatatccctaaaattatccgatgatcttcactatacaagatataacgccagaaagagatgggctacatatgatcaactacaaaaattaatctagagataccataaaagtgtaatctcatgcaagatacttttttcgcgtcgatactttttacctaattctctgacaaacttccgacacgaaatgaaagggggagatcgaaaagtactctcaatattataaaaacgagatttgcgtcattgacgcggtgtcatagtaagggtacaaacaagtggaagcaggtttcctcttacgtacaattcgcgaggttatctcgcgcgtgaatggtaatacagtgaataccggtaaaagcgagaaaaatccttcaaatgtgtcagttgggtcgacaacttctagcaaaatgtcgtcttctgatgacgatatgattgcttttgattctgttttgactaaactgaaaagaaagaaagttgcagcgagttgctggctccaacctgctttaactgtgcacgtgtacatttaaaaacgtgccttcattttaaaaacgtataaaagcgagtctacgcgaactggccgtaagcagaaacttgcttccactgtgttcgtgcactaaggcttaaagctgtatcataatttggaggtgacagttttttagcgtttttttctatttatcagttttctcagttcaactgagctttcattttctttactgaagtacgttgaaaatcacacgggaatagtgcatgatgtaacattatttgttcggtttcattgaagctcatttcatccaatcacgaagctattgcgaccgtggattatattttgcagcccctcagtgaaacaccacaggcaagcataatgcaatgtatttatagagattttgttcaaaataaatcttttttgataaataaattgacgatttccgtatcccactcagaaattttccgaccactctcgtatgtaacgagagagctcagatacactctttctatttctgtaaaatattgcattctttgtagtatatcgcaatttttagatgttttattgtggttgcaatataaatgttaagtaaacaaacacaggacaatactgtactgcaatacagtatccattccaaataaacttgatttaattgaaataataaacggatatttttaaaaagatggtgcaaccgtgtatacagctcgagtttcgacagcttgcagatgtttttggcgatcgcataatttcacagacatatcgttacttgacttttcttctgggtgcagcgaaagtgattctgtaaaaatagtcaaatatccattgacgaattgaatactgcaatatcctcttttactacttctgttttcataaattatttcataataatatagtagttcaaatataatataaagcactaaattattttgtatttacgatcttttaatacttcttcttagtaccaaaaaatgtccttccagtcacaggcttctaacttgagttattcatttgattattaatgttgtgacgacaaagatacactatatgtgacgaacagtgtgaactagataac

SEQ ID NO: 6665 - DNA, 2300 bp, Diabrotica virgifera
  SmartBlast Evalue=1E-85; Info=Dolichyl-diphosphooligosaccharide- -protein glycosyltransferase subunit 2 n=1 Tax=Harpegnathos saltator RepID=E2BN86_9HYME
gtcaagtgtgtccaggacgtacgtgtcaagaagttatgagccggtgaaatttgttgtaaaataataactaaacatgaggatttccacttattatatcttagtattgtcaataattttggcattattctgtgccacaacatatgcaagtataggaggctacattagccaagcagataagaacaaatttattcagattttggaaaaaacactcaaagtcgatggggatgatattgtttctccatactatgcagccagaggatatcaaattcttacagttcctctggataagaagcaaacaggggacaactgtgctcacttgaagaagaactttaagcatcaaagtactgaaagtactttttacgtgtacagtacctggaatatattgggatgccagggagctcttcattcaccagaagttgtaaagacaattcaagcagctctggaagataataagtctactttagcagatattcgttacgctttggaaatcctaactctactaaaacaacaaatacctggacctgctaaagtatcccaggcaattcaagcaaaactgaaagaagatgatagcctccaaaacttgggacaagctgtccacgcagcttctcttttaggagacaatggaaaatttgcattggacagagtagaagatattgttgtgcaagctgatgaagttgatggaaagttgttgcaatgggaaggtggacttactaccacatccttgctccttacaggtctatttaggttgccaggtaattcacctttaacagcagtacaagctgacaaatttgcaaattatttgttgacaagaaaaactgtacaaactgcaaaaggagtactttctttcttagatgcttctttagcattatctagcagtagtgtgtctcctgttagtatctcaatcataggaacacctcaagtctcagcagataaaccagatctgaaggtacaagttagcaatttgtttggagtacctcacaaaacacctccttctcctgtcgtagctgaaaaaatcacaaaattggcagatgacagtgttgtattatctaaacaaactttaaaagcaggagtcccctctgctgaattcgtattacctttgaaactagaccctggtctatataaagtagtcattaatgcaggtagccattcagcagactttgtagtaagagctttgggctctcttacagttaaatccttggaaattggtcttagtgactcagatggaggggctgctgtaaaactgactaagttgacatacaaaaataaacttcctaagcctttacaagctgattccagtcaaagcttgttgattaaattttcattatccagaaccgttcaccaagctttccttaggttgtattctggaaagaaagaaatcatatttgtagcagaacaagacagcagtaagttatatttggttgaagttaacttagaaaaggaactttctcagtcaggtaacttcgaaatggaacttatcttaggagatgctttgatcaccaatcctattcgctggggcttgggcactattgaggttaatttggggccaaatgctaaagaagatgttaaagtagtcagaggacccaaacccgagatccagcatttattccgccctgcagaaaaaagaccaccagaagcagtgtctctattcttcactgctttaactgcagctccatttttgatccttctaatttgctggggaagaattggaatcaatttaggaaactttacagtactagcgttacctttccacttaggttttggatctatattggcactattcactctattctggttgaagttagatatgttcatgacatgcgcctggttagttcccataggaggttttactttcctctccgggcacaagctattgagtcatttagctgccaatagaaagcaagataaggctgataagtaagtttagtactgtttattatttgctgataaagcgggtattttgttcacatacagataactttttgtacaagaaattttgttaacatttcagttctattcatttctttactatattgagatttctaaggtattattgtaagataatctttatttaaatatttcactggtgttttttgttatgagttaatattatttattttgtaaaagttatggtataaaaatttgagtgggtatttttgtgacggcttgttttcttatacacccactattttatcacgaatgaagctgtacataaaggattttgtatgattacatcgtcattgtcgtaatttgtttttgaatttttgtcacacaaattttgtaaaaaaacccaaagtatgaat

SEQ ID NO: 6666 - DNA, 2294 bp, Diabrotica virgifera
  SmartBlast Evalue=1E-58; Info=Novel protein similar to DNA polymerases n=1 Tax=Danio rerio RepID=Q7ZYY7_DANRE
gggaaattgattaagccacttgatcgatgcctcactgtacatttctttaagatcttgtttcaccactccaagcgtgcctgtttgtaaatatttggctcgataaatagccatacatacaccggctatagtcagatattggaaggggtctatgttagctatacccataaactccctgcgaaattctaaacagccacgtcttaaaatatctacatctgagtcacagtaagcgtgtaactctttgctaaaatcaaattcgtcgtttttatgctcttcgtgccattttagaaactcatttctttgttttggtttcatggtatttggtccgtaatattcagtcgctggtaaagaccctttataaccttggttttcaggtgtattaaaaaagtgtgggaaatacccttttttcaattcgcgaagaccaaatgttttcgggaaatcagctaaaggtccggcaataaaatttgaactgtcaataatttttagtttaatatcggatacctctaaaagcatcagttttgatccgttataaattgtgtctggttttattgtgttttctacacagtatttcaagataaaatatgaatcgtatgatttactattatgggcgatcgctgtataacccctgtgtttttcggatattaaccatctgcaaaactcttcgttatctttaaaatcaaatttattaccctcaaaatcatgtgctatgatcaaatttggtatatgtatttccgtatcttgcattgtctcgtaatcaaaaaatatgtatttttcgttgtaagtacatcgcggtatagagtcgtcagagagtccgttgcagagacatggttcattgcatattgtttgtgatttagtgttgtattgacaacctttattaacagttatggttttcttattacataaacaggatacggtacaaatcctcctttggcgggtttttttgaccatgtagcactgatgggtagctatttctacaaacgttttacagtttttgcacacagagtagccacactcatgacgatgttctcttttacaagttttattacaacttggacatttaaaaacttctttacaaacttctgtgtggttatcaaagcattctgtattaaaacagaaacgattacaagcttcgcaaagaactttgtttttagttgacaagtcatgctcagcttgtttacaaatcgtgcatagtggtgttttcttgcacttatgtttatttttaccgtcgtaggatgtatcgcacttttcgcaataaaaatgctttccatataagccagttaaactattaatcacgtcaaaatgatttttgtttttatacaaataaattttggttgttttttcagtgccctggtagatgatattattgaaattttctgcacaaattatcttgatctgtacatttaatagttcttcggcttgcttaaaatcctctaggttaaagccttcctcgtagctacctcctaaaaggtgacacagttttttcgccaaaattgattgtaatcgtcggccctttcgtatattggtcacatcattatctgttagttcatgctctaaaatttcatgagtgtggtatgtaagagcagttacaattgctcttgcaccacataaagagtcgttgtttttaatttgcgtaatacttcttttcgtctggcgatcctcagccaaattgatcattttatgtctaccacatcctcggggtatcttaaaaatctgtacgtcgaataccgtctcctccagtttaacagactcgttggaagttaaaatatttgctacatgttgtaataaatattcaacgtttgtatccgttttagtttccgttgagataggatgcttgaagttatcattacgagctattatacgtattttgtcccctgtttgaaaattggcttcatttttggattcccttatgcccttttctaatatagtaggtaaatatttaggatcacttaataaatcaataggtagcgttttacaacacagttgaaaactatgtaaataaacatcaaatttaggaatataccgcttgcccttagagattactgacaaatcttgatccaccataatagaaatccaaatttcacaggaaaattttcgaacagtttccaaaattgtgcagaattactccaaattgtttcaatagacaaactgataaataatgattatatcactaggtcaatgtccgatttgtttgccttgtgttggtcttgtatggattggattcgatcggtattgttttaggtgtctattacctcttcagaacttggtatgttttgttggatggtggcactggggtggct

SEQ ID NO: 6667 - DNA, 2298 bp, Diabrotica virgifera
  SmartBlast Evalue=0.000000004; Info=Endonuclease-reverse transcriptase n=1 Tax=Bombyx mori RepID=D5LB38_BOMMO
taatacctaattatggaaaactgttgtatatgagtagtttggtacttaaaattaatcaggaccagttgttcacatatattataagaatataaataacatgtacttaataaatttcgttacactacagcctgtacctggcattctaaaatttcatcatcatgattattacgttaatacataatgaaattttaacgttttaatctaccttgtaaatatatattcttatttaagatcctgcaataggtacgatgtacaattataataaataacttttcatagataataattcaaaataagtttttactggaaacaacaccaaaatttcaaatacaaaaatataaagtaaactgggatatataagataaataataacacaaataatacatatacatacacaacaatacacattcaaagatcgaagatcattaccgcaacaaatttaaaaatgggtttctgtactcttgtgacgtaagtctctccaccacagtcggagtaggcaaccgtagtaaatgtctaagaaccttgacacctcgatgcacagagcggcccataccttacctaatctattcttattatgtctatgctctgtacactagtttaaatatataaagattttgacatatgtataaagcaaaatgtcgaactcaacaatgataaaaaattgcattcaggtaattttgccataaagataataaagtattttttgaaagagattacttatgcagatcaatgtagctttgattttttacgttccaaaatatggaattttagtttacctagtcatttttttgtattctggtaaccagatggttggaagagtgtatgtgtaaatatgaatgtgtaccatagagtctattctgtgttgttcggtactaagttttagggttgtgggcaaaagggaaaaaatattctttttcatttcggttattgctggaaaaaattagtaaaaagaatttatgatgtatcgtatgatgtagtttttttaacaatcatcccaattatcgtttaaaagtatcaaataatcttaaatcttctagttatatatagcatttttcctacaagttctattgcacgtcattaatcagttgtagttgtgtacaatcaaggtcgtacatcgttgccagattgttgtggtagtaataagatgaaaagaattttaaaataaaaaaatacaagcatattatatcgtaggagaaacttttttgcaagtccattttttgttggaagtaccattagataaatatatctaataatgttgttactggttcgaggcatactaaaaaagtattctgggataccaatacaatgtaattttgtatctacgaagtgatttgacattaatttagtttagtaagtaaaaaaatgtccaggttaatgcagttgttttttaaatttttttccttctgaaacataattttggtcaagtttcttaaaatgtgaagttttggccaagacctgatcgttcaagtcatttttcttttagtttcaaccttccaaaactcttcaaccttcaatacaataattcttaaagtatcattgattgaaagcatctctgtccgacgtctctttgtttgtatcattcgtcggttaatctcatattcaccagtacaactgatttctgcttccaatataagttttcaatgatacgtaggtctctaccatcaatgaccatcagtgcattcgattcttaataatgttcaaaagcgtttaatgctgtaccctatcaaaagccttcttgtaatcgatgacagccacataaatatctttatgttggtggtagcatttttgtggagcacatcgagccaaaaactgccttacgtgtatccggcgcatttctaaatccaaactggtttttatttagatatatttcgcaataaataatgcgaagaaaaattttcaagctcatcaagactaattaaactatattcgtcgcatgtttttgcccgctgcttctttggaattgctataaaaacagacttaatagattattaccatataaggaatttcaccagtattatacacatcattaaaaagcttaattgctttttagctcagtagttgatatgttgtctgttccaggttccagtttctttcttgggtttggctgagtttattgcataaagaacttcaaatattcaaatttccttattgacataaattgctctatatatttggcctgtcatcttggaacatttcacttattactccactacgcaacgatacaacttgaaaatgatttttctgaagctatttccttgtggcatttttataattaactatttggatgggaagtgggcc

SEQ ID NO: 6668 - DNA, 2296 bp, Diabrotica virgifera
ggggcctttagaatttccgaaacatttataataaattatgataattccataaaaaatttatttgtatatcttatattctaactaaactaaaatttacgcaaaaattgtctatatttagtaataaaaaacaatactttacattcaatactactaaaaaagctgtacggcacggaccttccatttacgaaatgcaaaagacagattcgagctgttaactactgtttatagagttgcctatgtacttttactaataccaaaaaatctacatgtaaaatataaataagtaattaatttttgtatttcaaattagccctttcaaacctcttgtccattacaatggacatacatttttgcaccttttatttcccaattaagtaatggtagttgcttagagatagatcccgtatgtcgctacaatgatgtaaaactctttgctgataattattatgatatgcatagattctgtaaattaaatttacatgtccactaaaatagatggttggtagcaattataaaattttatcaggtaataatcgaaaaatgatgatattggaaatgctgagatgaaatgctaattagtttgacaaatacatcgcgtttagaaggaccatcaacaatcatgaaatgtataaatcactggatttacattttttgattggttgtttaggtgtacctaggctgagaatgtacctttgctgttaaggttgctcctctaaagaaaactctatgtaattcattggagacctaattccaatctcttaaagtcgaatttaacgaatatgtactatattgtgaagcaacaatagttcttgattgggtaaaaactgtaaccaatcctccaaaaatctttttggctaatatagtctctgaaatatcgtctagtacaaattccagcaaattgctgctgtaggttccaaagaaaactctgcagatttgcttaaaagagttaactctcagagccttcattctaacttatggtggaatgcccctacatttcttcaatttgcgtcgatttcttgaccaattcaacagtcccaattaagtgaggaacttacagaattgaaaaaccattcagtagaatttatcgtactacctaaaattgattttccattttatagattctctactttcaatcgactcttgcattgtgctgcatatattgccttcggttcgcaaataattccaagcattcaaattcaccaaaattgtctggagtactttctgtcaaagaattacaccttgcggagaaataggtaagtactaattgtcatattcatttatgttttgtcaaaaggcgattttttttactcgattcaattacaaataattgtaaattagtacatttttcccgagcttctgatgtatttagacaccttgttcattttaatggacactcatgtaaaatgaaaactcacaaaaatttatcaaaaaaaaaactgttatttctgagttcactagacaaaaattagcaaggaatgcaaggaatatcttttattgctgatcaaaatgaattgagcctgaaagggttaaatgaaattaatattcttaaattcaaattcagttgtataaatccctaatgtcttacactactgaaaggttttatttatataactgtttaaatctgcacggtcataattttctttttaataaaaatgtagtcgtgttatttacactttcatgtcaaaatccctgtcaattcttacaatcctgacaacactgtgcgaaaatggcaaagttcaattagatgacgtgacacggatttacaagaaaattatcaaaacttgtgttaatatatagcgggtgacaaaatacagtatcaattttttgtcgtttacctacttcacggcctgcatgctatgtatattgtccaggttatatttttagctgccaaaaatgtctgttttataactaatataattagttgccaaacgttctcttacatgcttctgttcttcggtaaatgtaagttgaaatttcattaaatgaaagagttttacacgacaagaaacgttttacagttttccatatctcttaagtggttacttcaattttcacaatataaaaatgagtagaggacgcgtcttgagtacgttacattgagaaataagatagatgttaacgttaatttattaactgtatctttgtttttttttgcccacaactgtataactatcattacataaaataatttacataatttataatatttaaggcataatttaggtcgtcatccatttaacgtgggacagcttgacagaagagacgatatattaatatacactcaccggcacaaaac

SEQ ID NO: 6669 - DNA, 2293 bp, Diabrotica virgifera
  SmartBlast Evalue=0; Info=Sodium/hydrogen exchanger 8 n=1 Tax= Camponotus floridanus RepID=E2A1X6_9HYME
gtcaatgttaagttaaaaactataatcacgattcacgatcgtattttattctgcgttgtgagttgaaatgtaatctataactcgaattaaacaaaattagcttagttattgtttaaccagtgaattaatcgttaagagtttaacttaaaatatgtacaacattttttaaacatggattacaaaagaagaggatatgtgatatgtaccatagtgttttttgttttatttgtaaatattgcgtcgcttcaaaatgtgaatcaaacaatcgtttcatcagaggccccactcactaaagaaactgttaccgaagcaaacacaaagaatcaagttgacaaagcaactgcagtgccaagcaaagattcacaaaatgttactgttacaactgcgactacaccaaataatgtcacgaatactactacagaagcccctgctactgtagacaaaccagacaatgcttcgacggtggtaaagcagaccaatacaacatcagaaaatgttactactgcacaaacagcggacccagtaccagtactgcctgccaaagaggctgctgaagatgaacataacagttctatggcgatattttttgtactctgcgttttagctttgggaattttgttgatacatttaatgcttcaaactcacttccagtatgtccccgaaagcattgttatagttttcttaggagctttaattggattgatcatgaatgctctgtctagtagaaatataagtaattggagaaaggaagaagctttttctcctacggctttcttcttaatacttttgcctccgattatattcgaatcaggatacaacttgcataaaggtaacttctttcagaacataggctcgatactggtttttgccatatttggaacaaccatttctgcttttattatcggctttggaatatatttcctgggtttagcagacgttgtctatagattaggttttgtagaatcttttgcatttggttccttgatttctgctgttgaccctgtggccactattgcaatattccatgctcttaatgtagatcccattttgaacatgttggtgtttggggagagtattcttaatgatgccattgccattgtgcttaccaatgctgctttggaatctaataatcccgatatgaatactggtgaagctattgttttgggaatagagagattttgcttgatgttctttgcttctgctcttcttggtgtggtttttgcacttgttagtgcacttttattaaaacatgttgacctgagaaagaatccttccctagaatttggcatgatgttagtctttacgtatgccccatatgtcctggctgaaggcattcatctttcgggaataatggcaattttgttctgtggaattgtcatgtcacattatactcacttcaatctgtctactgttactcagatcactatgcagcagactctcagaactctcgctttcattgcagaaacctgcgtttttgcttatttaggtttagcattgtttagttttaagcatagagtagaaccagcgttgattgtctggagtattgttttatgtctattaggacgagcatgtaatatattcccgctagcaattctagtcaacaaatttagagaacatcagataactaaaaaaatgatgtttataatgtggtttagtggattgagaggagctatctcttacgccctctctctccatttgaattttagtgatgaaactagacatgtgataattactactactttaattattgtacttgttaccactctatttttcggaggatctactatgcctcttttgaagtttatgcaagctactaagaatccctcgagaagacttaagaagcgcaagaaggacagggaagtcactctgagtaaaactagagagtggggccaagcattggactctgaacatctatcagaaaccacagaaggagaagtggaggtgtctttcgtctctgaccgcattaaaggctttgctaaatatgatctgaagtatttcattccattttttactagaagattcacccaacaagaattaaaagattgcaagagccagatgaccgacttgacgaatcagtggtatcaggccatccgtatatcacctgatcagtcggatgaggacagcgccaatacgggaagatctagtatatcaagcatcgttcgttgactatcgaatatatttactaatagtttaccgttatatccatataagaaacagtattgaaaggcaaaatatgtcgctagtcagataaacatattgtacttatcaatttttgctgaataaattatctaaa

SEQ ID NO: 6670 - DNA, 2291 bp, Diabrotica virgifera
  SmartBlast Evalue=0; Info="Eukaryotic peptide chain release factor GTP-binding subunit, putative n=1 Tax=Pediculus humanus corporis RepID=E0VHG4_PEDHC"
ccaacttagaaacggaaatgaaatagtcctctcgaaatatcaagcttaaaaacttccaatgctcaatgataattatatacacaataaaaattataattaaaccaaattaccaagataaatataataattacaaatttcaggattagttacaacttgttgaagcacctcagtagtaaaacagtagttttaaacgcgttaaaatgaagaaaaaaaaaaacgaaacgggtatcaacaacattttttgaccggcagaacttttgtgtggtgttcactaaatgtcgacaggttttgttttttgatgtatacaattgaaaaatgtccattagttttcagttcgtgtttcaattgggatgaaatataattttatggatctatgacagtctctctttcacgacactacagccgccctactccaccagcttcaggacctttccaatggcaattgtcctattttcatctcgtaacgtaaatcttcccatctgaggcatcgacttaaatggttctaagcaaataacacctgcgcattcaattctcataatagctacttgatcttgcttcacgaaccttggacgagttttacttttttcaccagtttttttatctaccaaacaaattaaggctttaacggtgacctcttctgccgcgcaatggatgtgcatcaccgcactgtatcccgcgcatatgatagatctgtgttctaaaataaccaattgagcatcaaagattcgtccagtgtgaatcggattgacggaatcgcaaagaacgaatcccggactgacatcctcctcttctatgccttttacttttattttgacgttttctccgggcactactcgacttacctcgtcgtcgtccgaaagcaacatatccaccgttacgggcgtcctattaggcattatgagcatcgtctgtcccttcttacactctccagattcaactttacccatgagaactgtgcccatgtctttgtatttgtcgacgatgggcattataaaaggtccgtccacctttctactcaaagacggcaaactatctataaaaggtataaatgcttctcctctgtaccaggtacagatcgattcgtctactttttctttcaaaccttgacccgtctgaccagaacagggtaggaaatataaatctttgtttaatataaaacctagtttcttaagataagggagtattttgtctttgcactcgttgtacctagcttcatcccaattaacagtaggatcgtccattttgtttaccagcaccacaaggtatttcacgccggccgttttggccaacatggcgtgttccctcgtttggccacctctgtcgaatccagtttcgaattcaccttttctagcggaaataactagcactgctaaatcggcctgagcggctccaccgatcatgttcgggacgaaactcttgtggccaggggcatccaaaatggtgaaatgtttcttctctgtttcgaaaaaggcacgaccaacttcgacggtttttcccttgtctcgttcttcctgattcgtatccaatgcccaactcaaataccaactctctctactcttctccctagcctccctttcatacttttctaatgttctcttgtctaccatccccgtcaaagccataatctgccccccaatggtacttttaccagcatctacgtgacctatgaacaccacgttaacatgttctttcttttcttcttctggtttctcttttactgttatcttctttttaatctttatgggagcttcctccgaggagggttcttcgtcttcgtcgccttcaggggtggtagcggggggagccgaagcggaagtgctgtcttcatctgccacgtcctcccaggtgccgccttcgccgccaggggacgcgtcgccgtctgcgggaggaatgggtggtggttccttgacttccacacgctctgtagattcatcaggaacgtttccatttataagattatgttggggtgaactattagatccttgggaattcgtcggggaagaggcctcgactacttctggaccttttgaaaaggaaaatgaaggcacaaattcgacagcgttaacattcaacgtggaaaacgtagctgtcacatctgcagtatgttgtggcgaattattcgtcgatgtagaatcggcttgagattcccaactgtcgggggctgtattatttgacatattgtgcacttagtttcaataaattactaaagagttaataaaaaaatctaccataaactcaacgctgctgcaaatcgtcgcaccgcgtgcgttcttccacttaccaccgatctc

SEQ ID NO: 6671 - DNA, 2291 bp, Diabrotica virgifera
  SmartBlast Evalue=0; Info=Ceramidase n=1 Tax=Aedes aegypti RepID=Q173S2_AEDAE
aatgaatcacttggattgacaattttctttcacagaaaatattctcgagacaccactatacgcatagatgccgctaaaaagcgtcttatagttgccgaaatgttggatttggtaagatccaggttgtgtgtcatctggaatctcccatcgaatttctgcttgactggtaggtgttaatgggtctggtctactccaaataaacttagtttcccagcttgcatccgttgcaatagttttccaagttggcttatcttgattttgactttcttgtttttgtacggtcaaaaaggttttgtcttgcataacatcattgcggggatgacctgcgacgaaaactgcagaaactgtttggcccggttcatagcagtcatttggttgaacgacgcagtcaccaaaattattaaaccaaccactagaatccataataacgggagtaataagagtggccatgtctttcgggaatttatagggacttgagtcgtcattcacagtttcattcttcatcatggctttcgttagctgaccataaatgttttcatagattggtaaagtataaggaccgtagatggttgaagcaccttcatatcgttgaagctgatattcttctggggtggcaatgtaactggtataaacgttgcttaagcccgctataacaaccaatgaatctgagggtccgtcgtttgtgataattgctttcctaacagcatctctcaatcttcttccagacatggttgtaaattctccaggaacggcaatcagaacaagctgtcctatttttactaattggttagaaactgttaccggttgccattcgtatggcttagtaatccttcctgacatgataagtataggttttggaaaatggcatacaacgtcatctggtgttggagggaaaataaagtcccttacaacattccagaaagggttgctcgtattagttgcttgttcaaaatcaaattctccagggccatcagttgtaccggcagcaaagccatatcccatggctggaaggcaacccctcacattaatttgtgttccattctccaattggtaagtagtggtttgactaggcatatgtgagaatttgtgaatatattgtatggtaccagttatttctgttgcgtctgtagttgcgccatccagtagtttctttccattttgaaacaagttattagcaatgatcttggtactttcgaacatatcttcaccgggcccaaaggagatgcaatatttatttcctccggcacaactactatgaacaaaatcacaaggttctcccgtattgacacaaataggatctttaagatttggtgaggtgtcacccaaattagtagaggcaaaagcacccacgaaatcgccttgacctggtaaggagtctgtgttaacactagattctagcagaagagacgcatatccaacattgtctgaatgcaccaaacagttggtgttattcattgaggtgggatgtaccggaaaccagttgattgcaccaattgcaacgttatccttggtactcacaaattttatttgaactagctccttgtccacgtcagtctcatacttttttctttctgattctggattatagaggtaagcagctggacttctgttcctgtttgtattagttactgtagtagtgctgtaaaagattcttgcttcaacttgattgttgtatgctttatctatggattttacaattcctgctaccaatgcgttaaaggtttctttacaatatcccgagcttggtatgtccaacattacatccttgaggaaacctccaggtgtgctgtgactgtgtgttccactgagaattgtattctttagagtaaatacattgggatattttagatccaatttatctattaccgcttgttttaggggatggttcatcatacatgtgtcaattgtcacaaatgcaactagagtgttctcatctttaatcacaaatgctcttgaaaactgccttaaatggataccacatcctttctgaccggatttggcataacccataaaagtaatttctgctgatggtcctgtgcaatcggctcgtccaactccaacattatatacagcttctaccgcagattggtgtgccagcaacatacataacagaatttttatgcttaacattattcttgtagtttattcaatgttcagttgttatcatctacgttgaccaacactaactcactatttaaccacataaataaatgagaaaagcaatatacttatcagttttctacagaatacttcacgaaattatataacatatccgcctttatatcgataac

SEQ ID NO: 6672 - DNA, 2288 bp, Diabrotica virgifera
  SmartBlast Evalue=0; Info=T-complex protein 1 subunit gamma n=4 Tax=Schizophora RepID=TCPG_DROME
cagctaggagttcctctcgaatctcgtgttgtttcatttttcattcgaacttttctataaaagaataaaatgtttggtggaggacgtgcccctattttggtgttaagtcaaaataccaaacgagaatccggtcgaaaagttcagctggaaaacatcaatgccggaaagcaaatcgcggatgtgataaggacatgccttggtcctcaagctatgttaaaaatgcttatggatccaatgggaggtattgtgatgactaatgatggcaatgctattttacgtgaaattacagtacagcatccagctgcaaaaagtatgattgaaattgcaagaacacaagacgaagaagttggagatggtaccacctcagtaattgtcttagcaggagaaatgttagtggcagctgaacagtttttggaacaacatattcatccgacaatcataattcgccagtacagacaagcactcgaagatatgattcagttattggaaggtccattaagtataccagtcgatagaaacgataaaaatgctcttgcccaagtcgtgaaaggctgcattggcacaaaattcataagtaaatggtcagatttggcagtaaatattgctttagatgcagtaaatacagtattattagaagaaaatggcagaactgaagttgatatcaagaggtatgccaaagtcgagaagattcctggaggatccattgaagaatctaaaattttaagaggtgttatgcttaataaagatgtaacccatcccaaaatgaaaagatatatacagaatccgagaataatacttttggattgtgcattagaatataaaaaaggggaatctcaaacaaacgtagaaatttcagcagaaacagacttcaccaaactattagaactggaagaggagcatgtcaagcgtcaatgtgatgagattattgcactcaaacctgacgtcgtcttcacagaaaaaggagtatcagatttggcccaacactttttactgaaagctggtattaccgctatcaggcgtgttcgaaaatctgataataacagaattgccagagcctgtggagccacgattgttaaccgaacagaagaattacaagaaagcgatgttggcttaggagctggactcttcgaaatcaagaaaattggtgatgagtatttctgctttgtggtcgaatgcaaaaatccaaaggcctgtacaattttactcagaggtgccagtaaagacattctcaacgaaactgaaaggaatctacaagacgccctacaagtcgccagaaatattgtcctatctccccgtttagtgcctggaggtggtgccatagaaatggccgtagcccagcgtctgatgcagaaggctacgcacggaccttatagagctcttgcacacgctttagaaattattccaaaaactcttactcagaactgcggagcaaacacaatcagaacattaactgctttgagggcgaaacacgccaaccacacggacgttaacaaaccatgcctttggggtattgatggcgaaactggagagctcgtagagatggacaagaaagaactgtgggaacctctagctgtcaaactccaaacatacaaaaccgctatagaaactgccattctcttacttcgcattgacgacattgtatctggctccaaaaagaagggaggcaacgaaccaccaactcctagccaaatgcaacagcaagaagctagaggagaagctgaataaactaatgctccaaccattcactaaattaataacttcttcgtctttgcaagatttctataaacataataatgcttggtccattgctggaattcttcgatatcggtacaacgcttttacggaatatattgtatataaatatataaaaaaatgttttttacttgggtatgcacaggtaaagatgatttttgaagtttgcacactaaagtgaagcaaaaaaaatgttctgggcaagatttgagacctaaaatggaactgtgcacttcaactttacactaataaaccaatagaagtgaaaatatctttgtctagtccattttttgaaaatcctcttcgtgtgtctacgtattgagtattcggcgtttgggtagtgttttatgtttataggacagtaattttgatcctagtgaactgatactgtacgtttgtttaagcggagaaaattgtgtcttgcaaaatgtctttttgttaattgtttttatcgcttaattcacatcattcacatttaataaaatgtcgctactttatatttgacaacggtttgtaataaagaatatttataacgt

SEQ ID NO: 6673 - DNA, 2286 bp, Diabrotica virgifera
  SmartBlast Evalue=0; Info=Putative RNA-binding protein 15B n=3 Tax=Aculeata RepID=E2BXM7_9HYME
gccaccacgtaccacaactattataagatgatcttcctttatcgcttcatctgataaattaggacaagtacgttttaataactctgtagaaaactgacagggagggaaggaataaaggaccccagtagcttcagtctctttgttgagtaaggaaataacaccagcagcttctttttgttttagatacgatactaaatttctcaaaggtcttgtttgaactgtagcatcatcattagtgactgatgcagtggaacctgctagtcccaagaaaattgcatgtgaactagcactggatattctcttttgaacatcttctaatttgggttgatccagtctcagtctttgggtgattcgtaattggtgtttaccatcttcatctttcattaggctatctactatatcagtatctccgtcaaataagtggaattttgcaggaaatagtgaatttttcagtattaaagctccttgccatacagtagcgcattttctagctacttctggtaaagtacgactagatgctagtagacctgctctacgagaaccaccatcagaatctgaatctggggatcttcttggagatctagacctagatctatcaaatcctcttgatccagaacgtcttctttcaaattcaggatctctacttctaccccactcgtcctctcttccttctgggtacctgtaaggatctctactggttcctcttttttcgggataaggtctcattctatatggatctctttcataatcataatcatattctacttctctagctctataatcttctgcagaagcatatggaggttttggtctgtatgtaactccaggtgttacatcagcaaaatctgttcttaatcttctctctggtccacctagaggaaaacctctcatttccttcacagctgctgtggcagcatcaatgctatcataaagaatcagagcctggttatcacctttaacataatcaattttcttaattgcaccaaatctatcaaattctctttccaactgtgtaatagatgtccaaggtcctaaaccaccaacccatatttttgtagttggagtagcttttccgtatccaattttgcactgaaatttgccaatgtattgaccagataattcaacttttgctctatgagccatatcaagagtgttaaatcttacaaaagcaaaggcgttacctgttcctggtggaggtcttttaatatcaatatcttctacaactccatacctactaaagatccttcttagttcttcttcagttatatttatttccaaattaccagcaaaaagtgtacgagtagctagaggatcatcttcaggctgtacgtggtgtaaataattgggaaacttatcctttttattctccttctgctcaaatggaggacgaggcatatgttgtctaggaggtccataaccatggactggagccatatggggagggccatggtgcataggaggtcgggcaaggtaatcatggtgtggtgcaggcattgcttcacgcctatattcgcgatggactgggacaccaggtggtggcccatatcccctatcatacctatctacaggtcgcattctttcaggagatctagcatagtaatgtctatcgtactcagggcttattgaacgtggtcgacttctgtaaatatctgctgatcggggaacttcatacacagcttcaactaaagctattttatcatatattattattcgaggttttccatgttttgcatcccgagcatcttcaggatttcggaagcaaacatacgctacacgttcatccatatcatgagtaactctaatgctaagatcaccgtattttttatattccctatataaagtgtctttgataacctcatcgctggctttggggtgcaaagcactaacacataaaactttataaggatacgagcgctctggtgggcgcatatagtcatcgcgatggggcgaaacgtatcttgcccgtggactaggactgcgcccacggcttccccggcgacgaattctatccggagttatcctttcgtcagagctgtcgtcgtaccttcccatgctagaacgagaacgtttgctacgtggtggagtgtccctatcactacttcttttcatgttatgaattctaactgttattttgtctcttccagaggcgatcatacgcactgcacacaccaattaactgacacagtggatgacacggcactcctttctttaaaactacacaacactgtgtaaaagagaggtttaacttcttttatgtaaaatttgtctcttccatcaccttgaaat

SEQ ID NO: 6674 - DNA, 2280 bp, Diabrotica virgifera
  SmartBlast Evalue=0; Info="Dynein intermediate chain, cytosolic n=1 Tax=Harpegnathos saltator RepID=E2B7N3_9HYME"
tgtagattgacagttgggcgttttaataaaatactctttatttttttaaaataccggactggtccaatcttacaataaactatttaacgtagtgtagttttcgtaatttattgttagtgatagtttttttatacaatttagatagacccaaaccgagtatggcagacagaaaagcggaattagaacgtaagaaagccaaactacaagcactgagggaggaaaaagatcgaagacgtcgggagaaggaactgaaagaggtcgaggaggctgctagcagaactcttctgggaggaggtggcgataggaaagaattagacgatttgctaagggaagttggtgtagcgcctgtttctgaagtgttttctagtatatccagtgcaaattcactcacgccagagcctagtcgaaaccacacaccagacacttcactgcaaccgcatattttaaccaacaatgtaacagctgtaaaaaagaagcttccccaacttacagttgttccagtacaaactacaaacattccccccaaggaagttgttgtctacacgaagcagacccagacaacaactactggacatgatgtcagagacgcccacgcgaccgattactacgtttgacgtatgacgatggccacgaaggagaggatgaggagggcagtttaccgccacatctcggaggatatggtgggagcaagctaccgcccggaatcctaccgcacggtcttccccaagtcaaggaggtccagccagcggttacggctttggaacaggaacagaagaaggaggaggtcaaagaaattagggaactgagcgaggaggagaagcagatgatcatactttcagaggaattccaacacttcatagatagggccggaagagtaatggagagggctttatgcgaaagtgtcgacatttatatggattatacaggcagcttaggagaggaaggactggacgaaaaatctcaccaacgtatctcgttccatcggaacttcttcgacgaacgatggtcccgaaaccgcaccgtcacatctctagactggtccccacaattccccgagctccttcttgcagcttataacaataacgaagaatctcccaacgacccggacggtaccgttctaatttggaataccaaattcaagaagacgacgccggagtacgtattccattgtcaaagtgccgtattatcagcaacgttcgccaggttccatccgaatctcatacttggaggaacctattcgggacagatagtgttgtgggataatagggtacagaaaaggacgcccatccagaggactcctttgtctgcatcggcccatacacaccctgtatattgtatgagcgtcgtaggcacgcaaaacgcacacaatttgatcagcatctccactgacggccgactctgttcttggtctctggatatgctggggcaacctcaggagatattagaactacacagaatgcaatccaaaccagtcgcggtaacatgcttggacttcccccattcggacgtcaacaactttgtggtgggaagcgaagaagggtctgcatattcggcgtgcaggcacggagcaaaagcgggaatcacggatacgtacgatggccatcaaggtcctgtaactgggatcagcgtgaatggtgtccaaggcggtatagatttctcgcatatgttcctcacgtcgtcgatagactggaccatcaagttatggagcttaaaggattcaaaaccaatatactcatttgaagacaacggtgactacgttctcgatgtgaaatggtcacctacgcatccagccctattcgcagcagtagacggcagtggtcggttagatttgtggaacttaaatcaagatacggaagtgcctgcggctagtatcaacgtagaagggaaccccgcattgaacaaggtctcatggacccccaacggcctgcaagtaacagtcggtgataaccaagggaagatatgggtgtacgatgtcgcagagactttcgcccatcctaggcacgacgaatggaacaaattcctttatacgacgcaagaactgaggaataaccaagtcgatgatgatctagaaaaattaaatatttctgtgccgaatacgtcgttaggtagcatgacttctctatcgttaacgccccttcgataagttatttaaataaatccatagtctaattatataattaaataacgagtacgaggcagatgtatattctattaagccataagaaaggacgaggtaaaaagtcacatggttttgagtctgtgataaaagagggacgtaag

SEQ ID NO: 6675 - DNA, 2273 bp, Diabrotica virgifera
  SmartBlast Evalue=0; Info=Histone deacetylase Rpd3 n=3 Tax= Culicini RepID=B0WJ91_CULQU
aggaaaaattcagtttatatttatcaaaaagtacaaaaaagaatacattttgagcattcttgagcatatcaggaattcgtttcaaaatgtcgttatcgttccctaaaattagacgtttactctttccttatctggcagtcagttcttccaaggttgacttcttgcttggaaatgagggggaattttcagctaatcctcaggcaactgttcgttatatctttgagagcagtccaactggagctgccattcccatattccactgttatgcttcttgaacatatcaggaattcgtttcaaaatgttgttatcttttacattttcatactcttaactcggaaaacaatgtgcacatgtagatctgtgacagacatgcccaacaaacaaaccttgtaaacagacttaatcttttaaaatggcgcgacagcaaacattgtaatgaactattgatgtctacttaaaaaaatattgtttgtcactaagaaaagtatatacaaaagtcacatactgtataaacatcaaatacaaactgtacacagttagaagttactataaaaatgttttaaactccaataatgtactggaattatatgattaaattagtacgatgtcatggagttggtcccaaaagcttttttgtgtcatcaggactggacttcataattccttcttcacctttttctgctttcatttcatctttaatcttatcctcttctttgttttctcctcctttatctaaccgtggacgttttctacctttgtaacttctattgtctcgtctatctccttctccctcatcttcactgtcagaaaattcattttcaggaacaattcttttatctaaatctttctgtggcaaccgttcatctttatcaactttatcctcattgtcagattcttcgttaattgcatcttctggaatagcctgtacttgtacaccaggggcatgaggtaacattctcaaattttcaaaaagtcttgttttaattttctctaaatattcgggggtgttttgattagccatattgcttggactgatatgaagtttaaagtcaggtccgaagtattcgaaatagtcattataaggaagttcatttgcaatttctacaccaagcgcaactgatgtttcgtaagtccaagctctagaaacgtttctgatggtgtagccgccccctcctaccatcatgaatggtaggttatatttttttacaaattcaacacatttgccatggcccttcactgtcagattaaagcaacctagacgatctcctgttaaagagtctgccccacattgtaaaactactgcactaggttgaaaagtttccataactttacttataattggtacaaatatactttcatatgcttcatcatccattccatctctcagagggatattcactgcatagtatttaccctttcctgcaccaatatctcgtaaatcacctgtacctgggaaatattctccatatttgtggaatgaaacagtcatgactctatcagtagtataaaaagcttcttcaacaccatctccatgatggacatcaatatcaatatacaaaacacgttgatgatactttaaaagttctaatattcctaatacaatatcattgacataacagaaccctgaagcttctgattttttggcatggtgaagtccacctccccaattaatgcatatttctgaggcttgtttattcagttttactgcagctgccacagatcccccagcagatagctgacaaaattcatataagccatcaaatactggacagtcttctccaacattaaatctctgcatttgtttgttgtattctgacatattgtctggacgaattgatcttaaaaatctaatataatcatctgaatgaaatttggtcatctcttctgctgtagctttatggggtctataaatttccattttcctatagagtccataattgagaagcaaattgtgagtcatacgtatgcgatgtggtttcataggatgtccttgtccgtagtaataatttccaatatcgctgtcataatagtagcatacacgctttctgctgtgtggttgagtcgacattttaaactacacaatttctgttttattatattatattatacgactttcagattaccgcgaaattttaaatactacagacgatcaaaaatatatttgcaacttggttttgattttttacaagaacactgaaaacaaattcataacgatgacaaattatgatgaaaaactatatcagtgtcggaccgccagtgttggtcacgaaaat

SEQ ID NO: 6676 - DNA, 2263 bp, Diabrotica virgifera
  SmartBlast Evalue=0; Info=Cysteinyl-tRNA synthetase n=1 Tax= Aedes aegypti RepID=Q17D29_AEDAE
tgagcgaaccggcgcaacgtgtaacaatttgaacataagttagaagatacaatggcaaaacgagtgcaacccacttggaacgtttctaatactgagccccaaccagtattaaaagtttataatagtttaacaagacaaaaggaagtgtttgttcctcgttctggaagaaggtgaattggtacagctgtggccccactgtgtatgatgcttcgcatatgggacatgcaaggtcgtacattacttttgatattttacgaagagtattgtcagactactttggatatgatattttctacgtgatgaatataaccgatattgatgataaaattattaagagagctcgacaaaactacctttttaagaaatacgttgatgaaaatcattcattagaaagtgttcttgcagatgccaagttagtattagaaaatgtacaatctagggttaaaactactacagatcttgacaagaagaatatgttagagaacatgttaacaaggctagcagcttcagtagaggaattagaaaaatcagtaaaaagtggagattcacttaaagtagaaaatagtaaacaacaatttattttagacggtaaagatcctatttcagaatggttagatcagaaacagggagatactgtacgagataatgcaatatttagttctcttcctcgacattgggaacaacagttctatcaagacatggacgctttaaatatcctgagacctaatgtagtaacaagagtaagcgaatacattcccgaaattattacatttattcaaaagataattgagaatggttttgcttatgaagcaagtggatcagtttattttgatgttgcagcttttgataaaagcgaaaaacattattatgctaagttagttccagaagcgtatggtgatacaaatagcttacaggaaggcgaaggtgatttaactactgcagaacaaagaagagaaaaacactcaccgaatgattttgctttatggaaaaagagcaaaccgggagaaccgttctgggattccccttggggtgtcggtagaccagggtggcatatagaatgctctgctatggcatctgatatctttggagcgacgatggatatccatactggaggagtagatctcaaatttccccatcatgacaatgaaattgcacaaagtgaggcatactttggcaactcagaatgggtaagttacttcctccattctggtcacttaacaatagccgggtgcaaaatgtccaagtccttaaagaatttcgtatcaatccaagatgctctctcaaaatacacctctagacaattaaggtttgcgtttctgttacacagttggaaggatacgttggactacagccaaaattccatggattctgcaattcagtatgaaaaactcttcaacgaattctttctaaatgtaaaggatgcgtcgatttcaatttgcttgaaaaacacaacagtagatactttcaccaaatggtctgagcacgaaaaaaccctgagtaacaagcttatagcagctaaaactgcagttcataatgcactatgtgataatattgacacgaaatccgcaattaatgctttaagggatctcgtaacagcaagtaacatctatatgagggaacggaaacctccgaacgcgttacttttgcacgacgtaggactttatgtaacaaaaattttaaaaatatttggtgcgattagtgaaaaagaagagataggttttccagcttctaccagtacttccaataatgttgaatgtgtgatcaggccttatttaagtattttagctgaatttagagataaaatcaggacaagtgcaagaaccttaaaagccacagatattctcaatgaatgcgataatttaagagacgaagttttacctaatgttggggttagattagaagatagagaaggtgagccaagcgcggtaaaattggtcgacaaagaaactctgttgaaagaaagggaagcgaagaaaaaggcagaacaagaaaaactggctgaaaaggagagaaagaaagcagaattagcagctgctgcagcagcgaaagaatctcagaaaaaaattccgcccactgaaatgtttaaacatgaaactgacaaatactcaaagtttgatgaaaatggatttccaacgcatgacatcgaaggcaaagaaattagcaaaggacaagtaaagaaattgcaaaagttgtatcaagctcaagaaaagaggtatcaagaatacctagcaactcaagggtaataatcttctcaaaaccagaa

SEQ ID NO: 6677 - DNA, 2267 bp, Diabrotica virgifera
  SmartBlast Evalue=1E-133; Info=Probable palmitoyltransferase ZDHHC14 n=1 Tax=Harpegnathos saltator RepID=E2BKR2_9HYME
gtcggataatcttcactttttaggagtgtttcttgtttatttgtaaaaaacgataatatgcgtatctctaaacaagatgatatattaaattctgtccaataatgtgtgttgtgaagtgtaacaaatatgaaaaagactacacttagaatatgagttaaaattggttgaagattcctttgtatttagtttgtagttacacaacagtacagacatggcaagggagcaggtaaccagaaaatgggaaatatttcaaggtagaaataggttttactgcaatggaaggctaatgacagcaccgcattctggggtatttttgttgacactttttttaattactgtaacgagtgtgttattttttgtatttgactgtaaatatttagcagaaaatgtgacaatagccattccgatcatcggagctttgctgttcttatttacagtgtcttcccttttgcgtacaagcttgtctgacccaggtattatacctagggcgtcgtcagaagaggcagcctacgttgaaaagcaaatagaagtaacaaactctgccaacagtcctacatatagaccgccacccaggacgaaagaagttttggttaaaggtcaaaccattaaacttaagtattgcttcacttgtaaaatatttaggccgcctagagcttcgcattgtagtttatgtgataattgtgtagataggtttgatcatcactgtccatgggtggggaactgtgttggtagaagaaattataggtttttttacatgtttatagtatcactggcgtttttagcagtatttatatttgcctgtgcagttgcgcatcttattttaatgacgaaggaagatcgagaattcctagatgccgtgaaggaatcccctcccagcgtgctagttgcagtcatttgtttttttagtgtttggagtattttgggcttggccggattccatacgtaccttacggctagcaaccaaaccactaatgaagatataaaaggatcttttacaagcaaaagaggccaagaaaacgtcaacccttattcggagggcaacgtctgcttaaattgttttcacattctctgtggaccggttactccttcgttaatcgacagaagaggtgttgtcacagaaagctaccaatacgaaaacagtagacctgttaccaatgcaccaactttgcctttgaagaaatatggattgcccttgcagaatggtccccaacaagtgacacctgacgcagcggaaatgccaggcatctaccgccaaaccaccgagaacacggaaagcaacacgggtagcgtaacccacttagtgtctagcgaacagcccctagccgtcgttcccgccgcagtgcatctacagagaacccacggggacttgcaacagtaccagtcgcagaccagtctgaaccactccccggtctacaacaacatcaccccaacgcacgccgctcccgcgcaactcagcaaatcacaaagctgtatcgacaatataaattccacgtcttcatcgaaagaaaacggcgcgaaagacattacattgaacatggaagacctccatttggatcctgtgatattgagggagaaccacgtactggtcaacatcaacgacaaaggacggctcgccgatttgaggctagacaacgatatgacagtgcaagacaaggagaacagtttgttgagtgttagtaggttgcgactgttgcaagacacgacgatgatcgagagtgctttagacttggattcgttagatgggtctagtttaggtacgaatagtcaggcgggattgatgaaagtagacgtgtagttcattcgagaacttttagaagagaatgtttgtcatttgtttggcaacagccaacatatagtagtattgaatacagaagaacgtaaaataactcatgatagtgcaataaaatgggatttctttgttttcgacttattttattggtcaaaagttttgtttatatttttataacagaataaatatgattaaataattgatttgcactttaaaatgtataaaaatcatcagcagatttatctgtagcaatgcaagacacttttatagtaatctccagctagggaaaacttacgcagtgcatcttagtatttcagaattaaattttaaatgaaaaaagacctttataaaagatatatttattttaaaaaaccattaaatacgaaggtaaaaaccctttaattattaaaaaatttaagattcagctataatcttcgagattcttcctaaatggagcatactatacctcaaatctact

SEQ ID NO: 6678 - DNA, 2267 bp, Diabrotica virgifera
  SmartBlast Evalue=4E-46; Info=Macrophage MHC class I receptor 2- like protein n=1 Tax=Camponotus floridanus RepID=E2AMH4_9HYME
tttcacacaacactgaaccatttaccccttgactgctcagagaagggtaaatttgtcttgcggacccatccctttcactgttgtgtctagttctatgttgatttatttcattagcagatttaagcagctcggttctagcatttggtatggatggtcttgccgctgatagactacctcttctaataataccgcttctagaatgtctgcccaaggaagtgatagaaccaatatggttctgatcgatcatgaccgttagtctttctaagctcatcatggtgccttgatctttgtattttaagccaccgcctttcaattcctccgttacttcggcctctctacgatcttgttctcgtttttcaaccttccttaaccacactaggtttagaaatgcatacgacaatccggaacaaactgcaaacaatcccattattcggaaggcagttgtaattccgaattttgcaataatatgaccacctataaagctgccacttcctcttccaacgctataatgtgctactgcacatacacccaataaagtagctagtaaacctctaggtgctagtacagcgcagtaggttgcagctgctacccacattaaatgcactgctatggattccaaagcctcgaatggaaaacaccaccatggactctcgattaaggaataacccacaagccgagtagcatgagcaaagaacgccaagataaccacagtcacgtgcccaatagtgccagtaattttgtcagagccataaaggaatggtacactgctcattgtaccaacggttacggttattcccaatagatagtttggagctccaagatcttttaagtagaagaataggaaactttctatgaaaccccataagttacctaaaaggaacaaaaagaacacaaccatcatcaacgctggcattttcaaaatcttctttaagtcgctgaacatactatcagagggtaatttggtatccaatggcatgaaaaacaaggacaaagatgcaattattaacaggaaatcaaacgaataaaatgcgagtgaataatcagtatggccgactttttcactataccaatcgattaagcctcctgttatgggtgcaaatattgccattccaaagcaagagaatagtctttctttgccaaaatcaccaccgtgcttttctatcattgatagagctacgggatccataatagttgttgcagctaattgcatcattgtagctaagaaacgaagtccaccataaatccagaagaccatgggttcagcttctttgtaatctggagggcatacttcaggaccacctgatctgaattgacacttctgtagaatgcaatcatcagtataatttcgtagaagcgatcttgtagttccattggcttccaaaacgattccaccacatcttaaatctttagtctccagttcgttgatgtccactccgtgtcttttaagcataccaagcctaaatctctttttaaaatcagtaacatcctcgtcgtcttcatcttcgatttcaataccgaattgttccactggatctccgagattcggatgcatatctagtgtgaatgctgtagcagtatcgttcctttgtttcttttttatgtggaaatttaggtcatccttatctccaggatcctcatcatcacaaggtctcttcggtggatttgctttaattaatttcttgttctttgcttgcttagcttcctttaatagacaatggtccatgcaaaagtcgaggactaaatctagttcttcatcgtcggggcattccctgcttgggcaaggactccaccacacctcaacgtacatcttctttggatgtctaataatatatccacttggcactgttccaggtgtttcctgatggggcatgaacaacagcgagtgatgcagtattgccgtaagaataaaacatccaatgaccacaggcttatacttaccgaatttgtccactaagtaacctgttgccggaggcgcaaggaatgtggtgaatggcaagcacaggtaaatgatggcgatctgctccatcgaaagaccgatgctctgcatgtggatggtgaggtaagggacaagcgacgatgtagctccatgaagaaagaataacgttgattttaacagcaataaactcctattaatcctaaaaaacttcggcggcgtataatctgtattaacctccacagacgtagaagtctcttctcccataccttcgccttctcaaaacccaaaatgccgccctgtcttgtgtcaatcacgctgctgctgacaaagt

SEQ ID NO: 6679 - DNA, 2269 bp, Diabrotica virgifera
  SmartBlast Evalue=0; Info=Synaptic vesicle glycoprotein 2B n=2 Tax=Formicidae RepID=E2ABF2_9HYME
tttttgaataataatatttattaataatataatacatgacgaaaatgtataaacactattaactaaactaatttctcttacgttactaatactaattatgaagatatattttatctccaggtgaattacaaaatgatcatttttttattgatttaagacttccttaacatagttcatccaaatcactacaaaagtgaaccataatgtaagtaaatggcaaacatattttcttaacataacagaaacttagaacgcaagtcaatcttcataaaatacggtcacgtatggatagtttcgtcttattgaagtggtttctgagtggtgtttggaaggaataggcagagaagacctcctcctatcaataaaccagttacgatgaaggtaggtgctggacagtataagtcaagtaactgagcaattactatgttaccaattatgccaccaagacgagcagcaaccatggatacagcaatacctgtagctctaagatgagtggggaagatttctgtgatgagcgaatctaaagcagcgttaccgcatgaaataacactactgaatattgcagatacaattagattatgagtcttgttgtaaacgaaatacatgcatgctgagcacaatccagatgatactgtactgaacaccaagaaaaattttctgcccagtttgtccattcccaatacagcaacgatgttacttggtaatgcagcagacactgttatcaatgattctaaaaatacagatgatgaaatcttgtcactgcataaaacactggcactgtggctgccactactgacaacgtagtccacaacttcacatacaccagcttctgcaccatcgtgaattttagcgtattcgtcaaatctgttaaacatttcggggaaccacatcataagaccgtagtatccaatgtgaaatgtaaagttgatggtaattgaaataactgtgaatttcaaaattggtgaaacaaacaactgtttactattatctaaaatatcaacaatcatattggtatatttgcctctctttgcaattttggctttttgttcaagagtgagctcttcttgttcgtagatgagatgtttaactggatagtcttcgggatcattcccggtgtttacatggtaaatgtacttaaagattgcaagagcttcttcactcttaccttgtgtaagtaagaacttgggactttctggcaagaagcacagtaaagccgccactataaaggatgggaatgagcaaatgagaagaaatattctccaagaattatacacaaaatactggttcttgaaaccaatatcagctggaataatcaaccaagctaatccagctacaaataagttacccaaggtccagaaagcggccatgaatgaaagcatggaacctctcttggatttgggttggaattccgcaaagtatgaccagattactggtccgctgccccctaatgccgccccgtttagaaatctgaagaccatgaacagctcatatgtttgacagaagctagaagctactatacatagagcattcatgaaggaactcacaataagcacctttttacgacccaatgagtctgctactgaaccccaaacgtaggctcctgccatcataccaataaatatgatggaattgagccaccctttggtttgagtgttgaggtttaagtcgcactgggccgaagggaggatgaacgacatcgagatgacgtccatctcctcggaggtgcttacgaagccgcatactgctagtagtaagaagtgaaatttcccatatctggtgagttcgatggctttttcgaagtcagctttatcactggatttatctacatccgacgagagtttagatggaagttctttggtcgttgtaaagtttccaagctcgagatcctttgatccgcagccgtttgctaggtgctcgatttttacatcagagtcttgcttttggtttcttggtgattcaccttctaccattctacgcagtaagcacagagagtgttgtgtttgcggcgacgggaatttgatgatttgggcgagttccggggtgcggctcagtgggggcagcggacggggtttctagctgaagctttcattgaagagccaagaaaaatccgtaaaaaataagataacgatgaaacgttggtcagttctttttgtcacaaacgaagcacatttcacaaaatttaaaatattgatcacgaacaacggataatgatagtacggtagtcaaagagtggtactgtggtactaacaacacctttcgctaatgctgg

SEQ ID NO: 6680 - DNA, 2262 bp, Diabrotica virgifera
  SmartBlast Evalue=1E-179; Info=Lipid a export ATP- binding/permease protein msba n=1 Tax=Aedes aegypti RepID= Q17P67_AEDAE
ctttttaacatgtatatttgaaaacaaataaagttatcaacaattgtatataaaatttttaaggtatatacaattctactatatatccgtgattaaaaatcagtcatccattaattgcgaaaacgtttgatgttgcaccaactctctaaaaggtccattattttgtagtaactgctcgtactttccttgttctacaatttgtccattttgtagaacagcaataatatcggcattttgaatagtagataatctatgagctatggttaaaacggttctgcctttcataactctatctaaagcttcctgtacataatgctcagactgggcatccagcgcactagtggcttcatccaacagtagtatctttggatttttgataagagctctagctattgctactctttgttttggcctccactaagcataacccctctctctcctacaacagtttcaaaaccttcaggtaggttttgaacaaattcgtaaacattggcttctttacaaattcttataaattcgtcatcattgattttctgaggatcatctgctccatacagtatattttcctttatcgaacaagaaaaaagtatgggttcttgactaacggtaccgatgtgtttcttaatccatgcaggatctaactccttaatattctggttatcaatgtatactgccccatctataggatcatatagtcttaataaaagcgccgctaaagtactcttgcccgaaccactaggaccaacaacggcgagcgttttgcctggttggatgtccaaaactaaacttttgaaaatttcaatgtcacttcttgaaggataacagaacttaacgtttttgaactcaatatgaccctcaacgtctgtcattggaattaaacctccttgggtaggaattgtgggttctctgtcaattatttcccaaattctggttgctgcccctaaagatttgtttagttctgaataaaaactggataatccaccaacagaaataccaatgtatgcggcatatagtaggaatgatgagagattacctactgttatggtatttgaagacaccatcaccccaccataatacaaaactgatattattataatatgaccactaaaccctgtcatgccataaaataaagctcttgcttttgcttctttgtaacaatacttaagaacattttcaattgaaatattataactagttatttctctaggttcttgtgcaaatgatttcactgttcttatattcgcaattctttcctctgccacctttgtagaatctgctaacgaatcttggactttccttgaaatctttctcacaaatctaccataaagcacagcaacaactgctactggaggtactattgctaaaccaaccaatgccaactgtggagacatgtacaacatcatacctgtaccagcaaataccatgactagagaccttaaaccatcagatatattctgagataaagcagatcctactatttgtgtgtctgctgacagtctgttcacaagttcacctgtaggtcttttgtcgaaccaaccttgttcttgtcttaatattgcaccaaaaacttgtcttcgtaaagcatttgtcattctatatcctgctgtagacattaagtaaactctggcataattacaaatggcccctaacacaaacacacctagcaatataccacacacttggtttaaccgtgctctcgctgcatctgagtctccactacccacatatataatatctaatatttttcctaaactataagggattgacattgttactgtactcgaaactacaaggaaacctattgctgtagttaacttccatttttcaggtttggcaagagaaaacaatctcttgagttcggattttttcaatctaggttcttgtttttcttttacttctttgtttcttttaaaaattctactgaaaatcctcttgaggcacctttggttgtttccggaatttctactgaaatatatgttttattttgacttattttctgagacatgttgctaaagtatctcctactattaaccaatttcaaaagcttgagcgacttcgatagattatgactactgactatcactgaatatacattcattcttgtctggttttggcagtaatcctatcgataaataataattatctcattatgtatatattatttacatcaacgtttacacattggtttgcaatgactatcacatattttatcattgttaactaaacaataggatgtgaatgtaatacattgaccgccagaaa

SEQ ID NO: 6681 - DNA, 2260 bp, Diabrotica virgifera
  SmartBlast Evalue=1E-167; Info=Putative glucose-methanol- choline (GMC) oxidoreductase n=1 Tax=Chrysomela tremulae RepID= B4F336_9CUCU
ttgcacaatatttccctacagttcctcgtgtttgtttccccactctcccattatcatcacagccgctttatgtccaatcatcatagagggtgcattagtgttagcactaactattttcggcataatactagcatcggccacccttaagttttttacaccgtgcactcgcagtcgagaatctaccactgaagagccatcctctttcggggccattttgcacgtaccaactggatggtatatcgttgaggacaaatgtcttattgagcatttccagtagtcatctgatcggtattcgtatttctcgcacttagggagatttagttttaccagttgggcgtcgtattgtttgaaaggtggtgtgtcgattaatttttcagcatatcttatactctctaacattacttcaatatcctcgttgttttgatctgtgaaatacccagcatgaatgagcggtttttctcctggatctttacttctgagaagaattcttcctttcgatttgggattcaaaactgtcgaatataatgaaagaaatggtctactatatgcggcatcttttttacttaagaatatttcatctgtaagaccagaaactttagctatttcaggaagtaaataaggatcagaaggtgggcaaaagaaataatggtaacaaatgtttggatatgcggaatcgttcttggtatttatgaagtttaataagttcgtcatactgattccagctaattctccttcgttgtgcctgaaatacttgtatatcgtgcccagcttattgggtattagaagcgactctacttttagactgacgtcaaatcctatatgtattacatggtcttccaaattatatccaaccggcaaattcttgataacaggtatacctaattcttggaggtgttctttgggtcccaatccagacaacattaaaacttggggcgagttaatggcgcccgctgagagaataatttcttttttggctttcaaagtaactattttttctcctattttaacttccacagctttggctgattttgtttctggatcgattactattttttggacataagagtggatggcagagtataaatttactctttcttttatcctacctaaaaatgctttggccgaattttctctggcaccttctgagatagtcatcgaccctattatgctacctaaagggcgttcaggattttcttcagcgaggacgggatatcccaaaagttcgttagcctcggtaatggcttgcgttataggatgacctgaatcatacttggttaactccaacagtccatctcttccatactgttcactagcatgcaaatacttcatattttccaactgtttgtaatgttccagtacgctattccagtcccatccaacgttgccaagttccgcccaatgatcgtagtctcgtttatctcctctcatatacaacatcgcgttaatggtgctggtacctcccaacactttcccccttggccaacgacattgtccatctttgaaagccaagcatgatgtttccgaaggttcggttttatattgccagtcttcatcggtgccttgtaaactgaacaggaatgctggtatgtcactgagaaaggaagggtatcctccggcctctagcactaacactcgccaaccagcattttcacttagtttattcgcgaccaccgatcctgctgatcctgctcctattactataaaatcaaactcatctccgtctcgcagttttggtccataatcttcaggataatgttgttcgtttcccaaattactttttaaactgaacagacgaagcatagacgctaaaaacaaataaccgactgcaccttgtatattctcgagagacacaatatctggtatataagcactgagtgtatccatcttctttacaaattagacacgtaatttgttcatttatttaattaatatattgtttttattggaaaaaaattatactttctttctctaaaaaagatttaaaacaataattattttgttttcaacatacagctacactcatgacatgaccttaatcagactcgtccaaagtatgggagataaatgttgaatgtggtgttttattacaaaatagcaacgtcagtggcgtagtcagtttcttatagtacgtttgtcgtattatggcttcgtcattgtgctggaaaaaatttgttgcacgaccagcaaattcgtagttgtgcgcgcgacactacatgatatgcgcgctgagttaagatgagatagtaaatcttatacacac

SEQ ID NO: 6682 - DNA, 2260 bp, Diabrotica virgifera
  SmartBlast Evalue=0; Info="Ubiquitin-protein ligase E3A, putative n=1 Tax=Pediculus humanus corporis RepID=E0W2B7_PEDHC"
gacgttcgattcgtcatattccaagagttgttttaaactattatatactacagggttccaatcttgcaggtcctcaaagctacccctctttcccattaacttcctatatagcaccataggaaaatttactgccaaaatgacgttattatatatcgccaatcctagcactatacctattaacgtgaattgagcatcactttcgaaactagtaggattaaaccaaactgtttgtgattctggttgaatagcgaacatcgcatagtcaggattaaaaatttcttctataactaattgaaaaaaattccttcgaaactcctccttcatcaataccttgttcaccttcaaattctaccaccaactgctttttaagatcgctaggattgtccatggagatcatttccagctccacgagagcgtcatcgatgatatgatcccttctcacttttaattttaaaaatggttgtgacggtaacccggtgaaagcttgtaaaaaactaatcctcctttccgaatacattcgtatcctattatcgaaatataagcccattgtttttgtcgctggtgtaaggatgaatggataatgcataaaactaaatttccctgtgtcacttttataattggcaaaatccctatccatttctacggcgtcgctgagtggttcattgtaaaattctgtaaagggtatataaggcgtccggcagtccaatacatggattcctaattcttcagctagaggatcagaaggcagcgtattttttggtttgatatttattccttcgctaaaatcagaaagactaggggacctcagtgccggtgattctaatactccacccaaaatatttgcataatatacaatcttcattaattttgtagcagatgtaataacattttcatcttgaacgaaaaaatccctttgaaagggagtcattatcacacgtaaagttatcaattgttgtagattctctaatatacttttaatacttgttcgagctactccagaccactgtcgtgctaaacttgcttgtacttcaatgggcagtctttgagctgccctacaaattgctggaagggctgtttctaacaaatctccagaacccaaagctggaatttcaaaaacaatgagaagaacattaacaatatcttcatggtttcctttatctttcctggtaggtaagtccatttgaagatttccagcaagtgtaactaaagcattaacaagagcattttcgaaaattgacgtttttaatttaaaaagagcagagaatgctcttcgaactgaaggaatatcaactggcgctaaagaattttgactcgattcagcgcaactatcttcatctttatctttttcaccttctagactccgtacttcttctttatttaatgtttttatgtctgcattttctaaatccgctggtgactttgttggtgtgctagcttcctgaggaaaactttttgatagattttcaatactactaaaaatttcacctaacgttcgaattagtggagaataactattattgccctcgcattcgtcgattatgtcgtataaagcttgttctgtcaaatatgttggtacgggggcactatttgatttgacactatctttactgtttgaataattactctgtgattcaatatcatttgtgggtaaatttgatttaaaattgacatcgtttgatgtttcagttttgttaattattatattctctttttttcgagctattttgttggggtgtctctcacatagccttgcatcttgggaaaacaactgaatggcttgagctgctgcttgatctggagtcagcgggttcatttcaccactagaagcgcagtagcgattgtcacaatgaggatttccacagccatcagtaagttggtagaagtatctctcaataagtttctttgcagcagctcgtttcataacttcgtccttattgtcagtagtaagttttttcgttgtttacgttactcgacgatgcttctgggttattcctggaagcttcgtctgggtcagttattttatctgaagagttcatagaattcgattctgcgtttggttaaactaaaaaataaaatatgtaccaaaaacattcacaaaagatcattcaagcggtattgtaagcattggttaaaatgttatacagtagcttcactattttattgctttcttgatgattttattcctgatttaaggtttttttaaaaatattttatggtgtgtaatgttgatttttttaattctacttattacgttggcaac

SEQ ID NO: 6683 - DNA, 2256 bp, Diabrotica virgifera
  SmartBlast Evalue=1E-108; Info=Ubiquitin carboxyl-terminal hydrolase 47 n=1 Tax=Harpegnathos saltator RepID=E2BSQ8_9HYME
ggcatgtcagtctatgcagttatcttcagatttactcggcgacgtatccaagtagatctttaaggctctctccccaccaggggagtaggatgacaggttcaatttacggaggcgggagttttctttttgggctagttcttttctttcttcgctggtgagttctttcattgtttctcggttgtccctgtaaaagaaaacagtgccattttcagcactaacaggccactcttctaaattagtggtctgcaaatgccatttgtgcgattccatatctaaaacatttatatcacaaggtagaggttgtttgataatggctacttctatatgttctgtaggtaggccagagagttctgataactttttctttaaatcttccatggttaggtggtataggactacttcttggaagggttgaagcgttaaagtcgacggacaccactgtcggacgaaaaggacgcattgttcccttgtcgtaactggatcagtatcagaaagttcttgcagaaaaacatcaacattggaagaaataactatgatatctttatcaaatcgctgatcatccagatacactctttttggctttttccaacttttctctcgcaaacgacatttatgataaggtatatcgagcatatgctgttttttcgcttgcaagagaatttcccttttcaccaaactgactgtctgtccttttacgatgatatgttcaaataaaaagttatttacgtccatattgtcaagtttcagatgatagacgttacatttcagctcgtctttccgtaatactcggcctagttttatagttattctttcaccatctctagcagatcgtaacgtatccgacaaacatacccattcatcttctgtattggcgtattgtttgtacaccttgaaatactctgaaggtactctcagaacaacttctaaatttttcttaagcctctctaaagtcattcttttgtctgccaagatcttacaacacctagtaacattattatccaaattctgagtctcactgttgtgcgtttcactggtaatcttaaaatagtaattctgcgagtactgttcctcttgctgtgtatcaacatcatcccaattcatttcctcgccggggtgacctagagcttcgtaactgtatgtgtcttcgcgaggatcgctgggtgatgacatgtgttgatctgcgggtgatgtgggactacttgataacatgcctatgtgatcacctggggtttctcctactaacgtcctatcactgtcacttaaactgctatcttcgctattactttgatcgccaaaaccgtccccatgaccgggttgaggagacacccgcaagttgggtgaattcgtacatctatcaccactacccaactccaatttgtctagattttgatttaaatccaacgaaggtatggacatcgattcgagtgtagctacatcggtatccggtaaaacaatcgtcaaactaataatatatccaaacaaagatatcaaccgtttcaatttggaaaataggaacgttttctctgggtcttcatctaatgcgttggatacatacaatttgtaattgctgcaattcggatcaaatttaacagggtcagtatcattatccaaatattttggttcgttgcaatacatttccatcacgatttttactttggaaggattcatattcaataactggccaattttatgtttgagaccaaacacagtgtcgtttaaatcaactcggactagctttggttcactgacctcttctgtttcgaggatgataggataaactttcatattgataccaccgggttgatatactttccaggaagttcctggttccttaatttctaacatccattcggtaaactgactaacataattcttcattctatttacaatatcacagaatttgatttcgtcagactcaaaactactatcgatacattcgtgttttctattgtacattaccaaacgacaatcccccaagttcacttgcgtagaattcaaattgaaacgttggtacgcctcttttgccgcctcttctaacgacgagtcatagaatacgtgtagttttatttctgataaagtgtttgatctgggattatcgcagaacaccgatattcgcatcatttcgttttctttttccctattaattcgatcttcttcctctttccttaacatatcggccaacaattgcttgatatgtggcggaaaatcatcaaaaccccatagcccgagcatttcgatccttatctatttgtctgt

SEQ ID NO: 6684 - DNA, 2258 bp, Diabrotica virgifera
  SmartBlast Evalue=5E-79; Info=Acid sphingomyelinase n=1 Tax= Glossina morsitans morsitans RepID=D3TQ63_GLOMM
cggatgtagagattgtgtagtaacaattttgcaacatatttcattaagacaatttttatcacagccttctttaagagatggatcaccacgcctgacgtagtactcaaaatataatttcgctaaatttgtatcgttaaacaacttatctgccaagacatcaaaacttgtcggagatagatctggtagattgtagtcttttttcatggaatataactttttccaggcaggactcgtgtctggccggagattagcttcagttaaattaaaatagtatgtctcgatttcaaggatatcaaaatttagcggatcaacagtcattactttgtaattcggattatattttacatagggtgttaaacttgctccattgaaagccatgtttataggtttgttatgcttgtcgtagaatattttgagttcgtcagtatgagtatgaccaacaaattgtcctttaataatatgagcatatcttctaacaatttcattgtagctcttctcccaaggctctatacattcttgattaccgaccgatacatgaccaaggatgtgtacgaattgccccttctgctctgattcttctagttcttggatcagaaattgtagctgctcatttagatactccgtttctaataacaaccaccaattaaaattatagcagacattattgtttaatccaataatcttcaatttatcgttaaccgaataagcgtagtacccttgtcgacgaactgtcttcaatgcactctcgggtaaccatggactccatagcttcgccattagatcatacaaccagttagtagatagaccttttgcaactatttcttctttatcgggagcatacaaattcagtggagtagattcgtggtttccaattataggatacactggaattgtaaaagtatcctttaacgctttgtaagctaggttaattcgcactgtatttgattgaactgatgagttccagacttcatggtcgatgatatctccagtaaaataaatgtagtctaagtctttatgagtgtgtttgatatgttgtagcgtattgccatatagccaaggaggaatgtcacaatcatattctccccaataaccagcattttgtccttttattttatttcccaaccctttcttacaacataccggaaagccacagttaactacacccttatattcataatccagtgaaatatgtgggtcagttaagtgaagaattttcaaaggtttcttagttggatctctagaattatttggatatttaggtgttgtctcaggcaaaactgtcacccaagaaagtgctggtttaggatagtaacactctttcgtttgtagaaggatcgtacaggccaattctggatccaagatttgactgttgttgacgacgtactccagaacaggcaaattaagatctataatctgcttacaaaatccattaaaagtcaatgtagtgaatagaacgtagattctgcatatgaattctgctaccttgctgatacgcaatccaaaaagttgaacctttttaatcagtagtttgcacagaccacaataatttctatcagaatcgaatattcttgtttgagaatcgaccagctctcctaagaggcttctgaatttttcggcgtccacttctttgtggtgatgtaggcccattcgttttgcgaaatctccctcaatcttttttatttcatcatcactaagaaaaaagtcaaccaatttttttgccgcatgttctgcaattcctatggatttatttgcaactagcgctgatgtgtttcccactgcctctatgactcttgccactttgtttcctgattgttcaattttacttccaatatctaatgaaatcggcttgacaatagttcctgttaagttagcaaggtttttggatccagtggctgcagcttgtcctatcgcttttatgaggttagcagtttgattgcttaaaagtcggacatttggagatttcttatgaatcgcttcaactttttcctcttggctccaagtcgtacccaccaaaactgcaatcgctaaccaacctacgaaccaccacttcatcgttcatccactgcgtttcgcgaggaataacaagaactgccgcttgaacgtattattatgatgataatttttggattagcaacgagcactttagtcgcatgtacgctactagaacaattagcatgtacaaataaccaataatcaactaataccgatttaattgttaaatgagtttatatactggtatcagtaggtattcattaatg

SEQ ID NO: 6685 - DNA, 2252 bp, Diabrotica virgifera
  SmartBlast Evalue=1E-125; Info=Glycerol-3-phosphate acyltransferase n=1 Tax=Aedes aegypti RepID=Q16L82_AEDAE
caaaaaccttcaatacgagaatggtgttgtgcgggaggtattgacaattattcaaactcgtttacatatctcagtggtctatagaattccaaatgggaacatattctatatgtaaacattgttgttaacttgtgagttctactttatttaaaggcaaaatgagtgttcaaagaaggtacgaaaactttctggagtacagacggaaagaaaaactaaacttcttatggatttcgaaacggtgggatccggtcattgcctttaaacaaggtggtagcaggagacctacccctcattctcataaggtggctgttttgcgtagtcctaagattcaagagttattagatcagataagtaggatcgataatatcccaaaagctacgttagaaacacaagttcgtgacattttagatgaaataggctacgatagaaacttaaaaattgtcagatggctgggtttagtattaacaaagatatgtttaaaggtcctctcaggaatatatgtaaatattgatcaagttgagaagataaaaagtcggatgggaaattgcccagttatttttgtacctactcatcgaagttatggcgattttatgatgttgtcatacgccaatttcaactatgacattgaaatacctgcaattacagctggaatggattttcacggcatgtggggcgtaggcaaggtacttagagataccggagcattttttatgagaagaacctatactaatgataatttatattggaccacttttagggaatacgtttaccagttagttaccaaaggtgatctgccaatggaatttttcatagagggaaccagaagtagaagcaataagtccttacccccaaaatatggagtattgtccatggctcttaaagccttctttttctcccaagtacctgatatactttttgtgccaattggtattagttatgatagaattttagaagaaagtctgtttgcatttgaattgttgggagtgccaaagccaaaagaaagtacttctggcctctttaaatcgatgaaaattctcaaggaaaactttggtaatatataccttcatatggacgaaccaatctctgtaaaagaatattttggtgacaaaattgacagaagcattcatagtataggtccattacataaacaagaagtaactgtcgaagaaaaaaggcagttaccacctcttgcccacgaaattttaaaacgacaacaaaacgcaacagtactaacagtattcaaccttatggccattattataaacaataatttgacttatcaaacaaaccgcttgactattaaggagttagtaggggaagtaacatggataaggagtgttgtagataagttgggggcttttacccatatcgaaaacgcggaaaaaggtgttagagaggctttaattacacacaacaacttaataagactagataagagaaagatgttgagactgataaagaataaagttagccaacaagtggtaaaccctaaaaaattaaagggacatgcgctcagtgattccacgatgactgaatctgtcccgtttgttatgttacagatatataccaacccagtacttcagtttttgattgatataaatataattttagtaatattaaagtacaaaacaatggacaaagatgaactatttgacaactatcaattcttaaggtctatctttgcgaaagaattcgtaattttttccgcagcagatcgaagggtatttgattcagctatcaaccaagctctatctttagaattgatacaaatttcagatgaatgttgccaattaggagcagataaaaagcttcaagaacttgtcattaatgcctttacaacgttctatgtttcctacgatgttgtttttttagttttagagaaactttctgctgaaactgatgaaaaatcaatattggtaaatgcacaaaagtggctagaaaatgccatcagtgaaaaactaaatgtacacccatattcgttaaatttggatactctagtcaattgtattagtattttatgtgatcttcaggtcttaaagaaagatagaagggacaacaagaatatttatgaaatcaacaaagggaagctaagcgtacttaaaaataattttgaaaaatttattccccagaatatcttaaacagaagttatacagttgttcgagatcatttacaaaataagttgtaatttattgtttaaataaatcctgccaaattaggtatttgtatgttttgtatgtgcaataaatgctct

SEQ ID NO: 6686 - DNA, 2248 bp, Diabrotica virgifera
  SmartBlast Evalue=1E-10; Info=Endonuclease-reverse transcriptase n=1 Tax=Bombyx mori RepID=D7F179_BOMMO
attcttcccttttctgtagtgtggtggaactgtttaatattttttctattattaaatgacaaatttcttatttgtccctttggccaccatttttcttagaaagtataaaacattttggcatttatcatactagtgacatcatcgatctgggtgtgatgaggtaataagtgatttttttaaatcagaatagggggtcgtgtgctagcttatttgaaaggttattcaatcctctattcagtaatacaaacatgaacataattatttatacagggtatcaaaaaatatttttgaaataaattaacacggtaacatgaatgtatgtactttatttaattcaaaatacattttgctgcagtcaaaaaacagaaaaaaatgtttattttataaataaatattgttcttctcttgtttatgtggtgttcagattgtatattagtttgtgacaagtttttacagtagaatctatggcgtaaatgtagaagcctgtttctattttgctaaaaataaactcaacattatgttaatcactaatgtcactgaaaatttaagggtaggtactcatggaccagcttcttttaacggatttaacaaaatttgcatcttattttatataaaaaacatgcatacaaaatttcagacatggaaataagagtcaggttattattttctgttataaaatgttctttacctttaatatatttcaaatttcgcatagtaacatgaaaaaaccctaatttcataataattcaaacctttaaaaatttagaaaactaatattaatatttttgaacttataaaaaataatatttttttatatattatgcttatgcaaaattttcaatgcattcaaaagtttaaaaaacagtttggatttgagaattttgtgggagtgtaagtagtggtattttagtgtgttttaaattattttaaattcatcttattttaatatgttggttgtcgtgagtcacaaatgtgtctcatgttgttttcgataacagccacgtgacacaccatagttgtctcgttagcagagaaacgttaaaatttggaactgaaacacataaaatactattatctagctctttaaattttgtagtacctgtagctattttagtccttttatattttaatattatagtaatgatgaaatcagtatttagaaattaagcatttattttcattataacttatgaaatatatcttcaaaaaaatttttattagcacaatatcatcagcgtatgctagatatttgtccttctcttgttctgagggtacctttgttgattttcctgacgttgtatttctgggcaagattaaacagagttgctgataaggaatttccttgtctaatccctttatttatgacaaattcttctgtatctcctacttgagtgtttatactcactacagttctactcattgtcatttatgttaatcatcttaatttcttttgtattcccatttctttcagagctaccattaattttgatattttattgtatcaaatgcttgctaaaaatctataaaaagcagttcaatttctattttatatccattagctttctccataatttttttaaccgtatgtgtagcatctgttgtagacttccccttaataaatccgcattgatactatcctatgatattcgtcatagcttcggtcagtctttgttgtattcatgtcgacataattttataatgctgtgtttaatagcgtcattcctatgtagttattacacatttgttggtttccttttttatgaatcatgataatttttcctttgtacctacctaccgtttttccggaattttgtattagtccatatgtcatttattaaattgtacagtttttctctaaattcttcccaaccagctccatattaacaccaactgatcctgaggctttaccattacggttgctatttataattcaatcaacatggtcatcaataccatacgtatatgtatatcaatgctatacaagtattggacattacgtcatcagtgttggcgtactgacgtaattgacgattttttaaaatacaaaccgaggtcatgggatacctcatttgaaagttctcctaatcgacttgctaattaatcttgctgttattcgaaaatacatcacttttcatgttaaccatacattaaataaattgatacaacagagtatcaatggacccgacagagtttgaaatttgcctgcataattttctttacttcgaattgaaaacttataattcatgta

SEQ ID NO: 6687 - DNA, 2251 bp, Diabrotica virgifera
  SmartBlast Evalue=1E-123; Info=Hrp65 protein n=1 Tax=Camponotus floridanus RepID=E2A569_9HYME
actttgttataagttgattatattttatcttagagatatatgaagggacataaaatacataaattatgtaaacaatgttgaattaactaaaaaaagtcacacacaagtcatttcaaataattaggtactacaatcttatggataattagatacttcctaacattaagtattatcaatactaaaattaaaaatattaacggctgccaaagtcacaacattttgaccaaaatgcgggcatgcgggctttatccattgtacagatatctcattaaaggaacagaaattgtcagaaagaaaaaggtttaatggttttcacaaataactggaatgcaacaccaccactttatcgtatccacaatttccgaaattcccataatcaaatgtccaaagccatcaacccgcacttactcagaagttgtgatctaagacagcctttggacatctaaacatgtgctattttctattaatttagctctcaaatcaatgtatgatagtataaagtcaattattcaaagtaaatctcttgcttctccttaaaaacggcgacgtttatttggaaaatcatcacctccaccgccacgtcgagaatcgttgacccaatgaccaccacctctggctccttgaggttcacgtgcattgccccgatcaaagcgagatgttccacgctcgtaagagctcatgaatgatttgggatccatcatgttagtttcttcttgtccatctcctccatgatgactataaccgggatttgaatcgtaggcttgctcttgctgatcaagcatggagtccaagttgtgtgcttgtacaaataaattattttcttgctgtcttctgcgtagatcatcatgttgggccattattcttgcctccatatcagctgttgtccgcttcatttgttcttctgacctcatccgttcttcctcgacctgcctttgcttcatttcccattctctcttttgacgttctttgtctaattcacgagctgccaattgatctctcagcatatcggtttcatgttcatatctttcaaattccattttggcctcaagtttagctattccaagttctaaatctttcttgacctgatcgattttctgatcatgaagatcgtagagttgcttccatctcattccataatcattctcaaaagatccgccaacgccaaatctaggtccaatttctctttctttcataaaacctgggtgtttcttgttgatattcttttctgaaaagccatcgttgtcatttacaacttcgtaggcttctacaatgcaaggtctgacggaacctgttaggaaaaagcagccatctgaacattttctgatcgcgtgtaaagctgatcctttgcgcacaaaatcgacgatagcttcacctgtgggttttcctctttcgtcaacacggactgttgccttttcaatttctccaaatatagaaaatgcgtagtgcaataattcgttggttacatagcccgtgagattctttactttaactgtagcattatttggagcatatcttattttgagactgcgagacttcaagacagttccatcgagctctctcttagccttttctgcattggcgtggtaatctaccttgatgaatccaaaatttttatccttgtttataaacacctctgcggtttccccgtaaggtttaaatagttcagtgatgtcctcttctgtaacttcagatcctatgttccctatatacaatctgtttctgccgctaaacttgcgttctgtcacatctacaggcggtacatcaaaggaggggccagccatctgctgaaccttctccataaatttgtcctcagcaccgcgtcccatgcgtcctcccattcgtcctcgtcccatattatctcctctttgatcatcacggccctcacgatcccttccaccagggcgatttccgtcgccttcttggcgattgtcattaccattgttttcatctttgtttgcgtggtttctattaacacctccataattgcctctacctcgtctattttcaaaatgctggtttccaccatggttctggccacctcgtccgaatcttccacctctttgatgaccgcctccacggcgttcgccccgattgaaattatttggtttttcttgtgtattttcgttggttgattcaactttagtctcggccgctgcttctccttccatgatgctaacaattgcttttttttaatacaaaacttgaaatttaactattgattagtgaacacgaccaccttgctctttcaacg

SEQ ID NO: 6688 - DNA, 2249 bp, Diabrotica virgifera
  SmartBlast Evalue=0; Info=Alpha-N-acetylglucosaminidase n=1 Tax= Camponotus floridanus RepID=E2AYI3_9HYME
tagccttagcagcttcaatagtgtttcctgttggctcaactggaaatactgtacggtcaaaagtaaatggttcttctgcttttctaaacatttccctcctcgcagctgtttctgaaaaccatgtattgtgaagcaaactgtaattcattctattaataaagatttcccaacgaggcttgtaataattagcgacgatccctgaccattgcttgttagcgtaattaataatctctccttctggtccccataaagtaatttggtttctagcgttatattcaaaaagattactttcctgtgagttgtttccacaactttttgctgcttcaatccaaggtcctaacaaaaatgctttgtttgtagataatatgagttccagatcatcgaatatttccataaaaactgtcgcatgttgactaaaattcgtataatcgtcgtccctaaatgcagtaacaatcttgggatagtaaatgtcaccgtaaatttgtaatacttgtcttgttaagtcgactaagtcgtgaagaaaacctgggctgtttttaagatcatcagcatttcgtacaaaaatgtcccaagcgtcaaatacctcactataattgtaccacgtccagacgtccaattttaatgttggtgtccatgtaatggcatattttcctcttagtttgtgtaatccagaaaaatcataaaactgtgttctttaataactgccatgcttcattgatctttgcgttggattttccatacctccttagtgcataattttcgaaccaggttgttaaatttgctgattcttttctccatgcttgttcagtcattaagtcatatataacataattttggttaataccttccggggtaagcccagttcctatcatcgtgctgttaatgctgtgtcttgcttggataactctcatgtttataatgttagctgatccaaacatgcccaaagttccaccaaaatcgtgcagcatacaccaaatataaggttggccgaaatattgatctaacgcgtcatactgaggaaattcctctgattgaagatctaatataatcattttgcccgttggtacactggtaatcaaagctttggctcgatccaaattatgccaatactcgttgttgtaaaatagccacccttgcataacccaaatagcatcaggatctgctgcagtcatagctgcataaatacttttcccgacatttcctatgtacgttgtattagttgttgtaggatcattttcgttgaaactatcacagttatagatgtggtccgtaccaaattcttttgtttgctcctctataaaaagctttcctattactttgaaaagttcttcagtaggatcgaggaaatatggacagcagtaggagtcattgaaactgttccatgtctccattttagtgacattcacattggggtaaattcttgtaacggctcttggtaaatgtccagcaaaagctggcaatactggaatgattcccaaacttctcattcgttccaagatttttttctgcaacaatattgacctctcgtgccatgatgcagacagtggtccaccccatcctctcatatttcccatacgtaaccaagataaaaaggctggtcctgtaaagtgttcatcaatgtcctgttttgtgaaatttaattttttgtatactcgttcccaaatagcctcttgcccattaaaggctaaaactagattaaaagaattcagtgccatccaatctatatgtttttcccattcctgccaattccaccacacgaaactgtagctagtggtacatgtattttggtaatatctaaacctgtcgttcaacgtaatggtaacattaacgtcgggtaagtcttccggtagattcagctgtgaggcctcccaggaaatatgagcgttacaaaaatactttaagtaatggtggaatcctgtcgcggctgcgactccactagttccgacgatgttaattactcccttttctttcgacacctcaaacgtgtctttgttattttgtttaaatgttggatccacatttacagaaaatttgctagctttagtatcaagtaaccttaaaattaaatccttaactgcttgtgtttggactgctgcactagcttttggtttaatgtgtcccaatgtggcttcaaacttgttggattccacattacttgtaatataaactagaatagcacagaaatagattatcttcatctcatcaattatttatttattttcactattattatttcaccgaaaaggtct

SEQ ID NO: 6689 - DNA, 2242 bp, Diabrotica virgifera
  SmartBlast Evalue=0; Info=Xenotropic and polytropic murine leukemia virus receptor xpr1 n=2 Tax=Culicini RepID=B0WSZ6_CULQU
aaatacataattctatttcgactttcgacagtactcagctgatcacgaggtactctacagttaattaaagacaagacacctttacatacatttgttgattaattttcagtgtcaacattcggtagcttaaaacaatttaattagtaggctaataaatttcaggaacaaatgcaatcattacttaatccaaatttacaagatccaatatttacatatttgccttttgtttagcacctagattcttttgtcatgagattaatgtacagattctagttagacctgggagagagatcatagtaagtgattcaaaatgaaatttgcagaacatctttctgctcatattacaccagaatggaggaaacaatatataagttacgaggaaatgaaaagcatgctctacctgaccgtagaagaagcaccttctgcagaaagtgtagaaccagaaatagttacccgacatctggcaaacttcgaagaacaattttttctctactgcgataaagaactgaagaaaatcaacacattctattcggaaaaaatggccgaggccactaggaaattcgcaagtcttcatagtgaactaaaagattctttaaacaatatgaatctcggcaagaagaaaagcggaagccgaaggattgttcctaccagaaaattacaggaactcaaacttgcttttagcgaattctatttgagtttaattttacttcagaactaccaaactttaaatcatacagggttcagaaaaattctgaaaaaacatgacaagctattatcaacagatgtaggtgcaaaatggagacaggaacatgtagagacttcacactttttcacgaataaggacatagacaaattgataaacgacacagaaaattcagttaccaatgaactagaaggaggcgacagacaaaaggcgatgaagaggttgagagttcctcctctaggagaacaacagtcaccatggactacatttaaagtgggcctcttctctggttcatttatagtactgctgattgctgcggtactatcagccgtattccatgaaggcaccactgaaaacttaaaaatagctttccgtctctacagaggcccccttttagtaatagaattactttttttaatcggcgttaacatttatggatggagatcatcgggagtgaatcatgtacttatcttcgagctagatccaagaaatcacgtatccgaacaacatcttatggagctagctgccatatttggagttgtttgggcagttagtttactaaattttttgtacagcgcaactttaagtattcctccatatgtcaatccacttgttttgactgtgataatgatagtgttcctggttaatcctctgaaaatatttagacacgacgctagattttggtttcttcgtatttgtggccgcatgtttggagctccttttttccgtgttgaatttgcggatttctggcttgcagatcaacttaacagcttagcagcagcatttttggatttccagttcttaacatgtttctattttactaacggagattggcttgtagcgggagatacggctcaatgtatggaaagaaattttaccataaggcctatagttaattgtattccagcgtggttacgttttgcacaatgtttaagaagatactatgattccaaagatgccttcccacatttagttaatgccggaaaatactcaactactttcctcgttgtaatttttggaacgttaaaatcagtttacaaagacgattatgcaacgccttcagataatccgtatatgtttctttggatagcagcacaggtactcagttccacatatgcatacacatgggatattaagatggattggggattattcgacaaatcagctggtgaaaatacattcttgcgggaggaaacagtttattcttcaaaggttttctattacttcgccataatagaggatctgattttacgttttgcatgggcagtttcactttatttgactgagaatggttatgttagtggagacttaatgacttccattttagccccccttgaggtatttagaaggttcgtgtggaactttttccgtttagagaacgagcatatcaataattgtggtcagttcagagccgttcgtgatatatctgtggctccaattgactcatctgatcaaattcaaattataagaatgatggataaagaagatggagtgacgaatagagagaagggaaagaggaagaacaagaagaaggaagac

SEQ ID NO: 6690 - DNA, 2238 bp, Diabrotica virgifera
aaatttttatttttgagttagtgctttgaacatttttttcataatataaagctttattaaagtatattacatcatattttgttcgatttagattcataattttccattacgtgcttgatttgtctagatcttggtaacaatttgtataaatctctatctacttggtatactatgaagctttagtatttttttcgaggtaggagacaaaataattaaacatttattaaaagtttaaaactggacaaaaatgccttttaaaaatgagcattatttgttgctaaatccaaattaacaattttatctaaaatatcaacagtttggtaataaataagtacattatattatttgacctacaacgctctaaacgatttttaaactgctaaagtgccaagacaaatcaatatgcgaaacatcccttaaaaatatcctagatgcatttccattattttgctctctatagcataagcgaaaacctttaaagacataggaatattacacagacgtatctttaactaacgatataaatgtttaaaatagtaacaaatttgtgataatctcatgaaatgttttaccaaattttctttgtaggtacaattcctcacaaaatcgacgaaattctttttattttatactatttgtatatatagatttgtatagattcaaattaaattttagttaagaaaaagacttgctttcgattcagagggatgcacaatccctggatagctgtttttgtcttacacacttcctcagcagagctagcgagcacacctgtaaaggaaaccaatccaacccacttttcagtttaaattttagttgtagagaagttttcctataaaaatacaacatatcgattatatagcgaacaaaatgggaactgaaaaactttaatgtttgcaaaagaaagtggcattttgtgatataaaattgcgcgaaatgacatactttcttatgtgttatagtagtaccagctgtctaagagactcattaatattcagctcagctggagggatgctactgttcgaggtgtgaaattacaaaaacaagggatcatttcataagtcaggtaggtctcttgtttaagaaattctacgcctcgaacaatagcaccttgctgagctgaatagctgattaatgagcctcttagatggctggtattactatacgcgtcttctatcctcttaacggcgaaccgatcagcaacttagtactgcttcactggtgtatcttgagaatctttcgtaaccaaaagccaatttttttttgtttgttagctcaaagaggattttaagaaatcaaagtttaatataccacctaaaatttatccgagagaaaaatattcattatgtgttcagaaagacgtaattatttttaccatttgtgaaataaaaaagtaagttctgaaagtttaaaacatgaatatttaaaaaagagaaaaaaagtgatgtctagtgatgaaagcatcgatggcttgattaacattatagcgatttcttttactcagtctttgattgacagaagagacatatttacatttttttttgtgttagtagcaagtctcattagacatttattcaacagagaaaaaaaaatgacatgttcaaaagcaattcttattcttatctttgtgaaatcattaaaaaatagtatttttcacggatagaaaaaagtgatgtttactgatgaaagcattcataacttatccgattacacatttatttcattcagtctttcataagtaatagatattttacagttttttgctttggtaacaagcatttatccaacagagaaaaaaatatatgttcaaaagtagaagagtctatttatttttgtgaaatcagtaaaaagttgtaaattttatacgaaatatcaaaacaggacatttcaacagtagaaaaagtgatgtttagtgatgaaagcattcatggctagaccggcctagagatttttttgagtctaagtgagtggctaagtaaattctaccctaatattctttcaacgggatgtgtgtcagcggaataagcaaaagtaattgcagtgcttagcccaataaatccaaaaatatagtggacagctaccgcccgattgcgctgttgaccacgtgttacaaactacttgagaggctactcatgaacagattcagctcggtacttctagagagcgtaccaatagaacaggctgggtaccgtcccaatcgcagctgcacaaaaaagtgctcagtcttaccacacatgt

SEQ ID NO: 6691 - DNA, 2235 bp, Diabrotica virgifera
  SmartBlast Evalue=4E-59; Info=CG3106 n=3 Tax=melanogaster subgroup RepID=Q9W322_DROME
aataattttatttaaaatatttttttacaaaaatatgtgtaaatgtaaacataaatttctacaatttttcttacatccagtaaatagttaataaattcattttttagtaaaattgtggcttatttcccataaaaaaatacgtaattataaaaatgccacaaggaaatagcttcagaacaacatccagtaaataggtttcctaagatttcaatcaggcagtttttggtcctttattattattatcagcgtgtctctgtttcttagaatgcgcccttcctccaaatacatatttctctactattacaagaggagactcaaaagttaaggtccaaatgaatgagaaacccagtgttactataaaaaatgcacaccatgacttgaacgcattataatggctaaaagttaacctagtactaaactgcgtagaaacgagcgttaagacaattccatgtacaagatacatacagtaagacaacttggccgttatttgcaagattggtctgcttaggatccagttaactattcctccgtaaccatgataacaagagtatgttatccaacttaatcctagacaccagattggtcttgaaaaactgtagtagaaagcttgaacagtctgagagtatcttaatgaataaacaacctcttgatatagaatagcgcaagcacccattgaagtgagcacaataatccatataacaaaattcacgatcttagatttcactaaatatttgctactcttcgtttcacgtatatagattcccatcattataccaatgctgtagtcaataattctagaatgtgtatcgtatggattgtcgtattctgtccatataagtctagcagctaagggtaatacagtaaataatatatttaatgtccagcaaattcccattactaatttgaagtttttgctgcttttcgcaagtattacagataatggtattaagattatattagcaattatgaacaactgcatatctgctgataaataccagctcggtatgacacaaacatcatcgtaattaacataattttgaagatataaaaagaatgacaaccaatgtgtacgacaagtttcaatgactcgtttgttgagtgcataataaacgggggtgtcattcatatgtttgattattgtggtttggaaaaaatataccatagccaaagctggagttaatctgatgtacctgtgtaggattgaatatggtaaagtcttcaactgtatactcaatggtttgtttttctgtttcatgtacagataagctaagagaaatccactcatgaaaaaaaatgaatccaccgccatttgtgccccgcttgcataaaagaaggtgatggctctctgctctattttaacgtaatcgtagttagctacgttaactaaccaaccgttaaatccatggccagcgatgatccaagctatactaatagattttattccattaaaaatttgaatctgctccctattttttttggttgttgttattattttacggcaatttgtataaacggagaaggccaaaaataaaggatgggaactctttttaccagttttcaccaaatatacatcgtagctagttgatacggctagaataactgcaaaaattgacagcactacgagtatagctttgtctccaggagtatattcatctaaatcatcttgcgtatgacattcttgatcattaaataaaggtaaaataattattttattgaaatcatctgcagaacaagcgtctggcatgcataccgataatttgaagaaatcatccacattaatattgcttaaatctgccttcaaggatggtatcgctaatccaaatacacagtattttccctttattcttcctccggagtaaatatgatttatttgcatgcattgaggataatttccaaagtcagcatatgagctgacggcaagaccgctccaaggaaacttggaagtggcgtcgaaaaagttccacagatcagcttggccattcttaaaaagttcgtcaaactgttttgaacattcgctggagagtgttttattatctagtaaactacgtatagctgttgtccatttattgtaatcttgtaagacagctacatccgaatgtgctacatcagtttcagctacatccctatgcgatttcaccagagttataataaaaaacaaaaaaataatgaagaacttcatattcttcttcaacatgaaaatttcactaatcattgagattgtaccaatgattgtac

SEQ ID NO: 6692 - DNA, 2233 bp, Diabrotica virgifera
  SmartBlast Evalue=0; Info=Heat shock protein 60 n=3 Tax= Apocrita RepID=C1K659_9HYME
aaaagtaacaatatatttacaacaatataggtacatctgaggtcatataaactatatcgatcattctatcggatttaaatgcagatcagttcagcaatcacaattgattttaaggagccacgtacataatctcacaaccccctaaaaccacttctgatcactatacgagactaaaataattggctcttactttctcattcacgcaatttaattcgtggtacacataagaaaacttcacacgaatttatgtagcacaacaaacagtataaaaaagtatttaaagggtctgccaaatacgaaaatggaaccttttgacagatactgtccaacttgccactttcgcggcaaacactcgacttaagttagaacagtctattgaaagtatgtttaagatgggtttacatcattccccccatgccgcccattcctcccattccccccatgccgccggcgggcatggctggttcttcctttggaatttctgtgatgactgcttcagctgtggtcaagagagaggcaacaccggaggcatctacaatggcagttcggacaaccttggtaggatcaataactcccctttcatacatgtttacatattcattgttgagcgcatcataaccataatctccttgttgttgttctactttagctaccacagacgctccatctactcctgcattacgagcaatggtcatgcaaggtactcttaaagctctctttacaatctgtataccgacttcttggtccttatttgcaggtttgagtgcatccaaactaggactgcatcttaaaagtgcagtaccacctccgggaacaataccttcttcgatagctgctcttgttgcatttaaagcatctgttactctgtcttttttctcgtttacttctacttcgctgcttccgccgacttttaatactgctacacctgatgctaacctggcaagacgttcttgaagcttttccttttcatactctgaagttgtggtttcgatttggtcacggagatgatcggctcttctgtcaatgtcttcctttttacctttacctttaagaatgagagtatcatcttttgtaataacgatttctccagtgttacctagatctgataattttacatcttctagtttaacaatattggcgtcgtcaccaaataccagaccaccagtggcaatggcgatatcttgcagggtagcttttctattgtcaccgaaaccaggtgctttaacggcagcaatttgtagaccaatacggagtctgttcactacaagtgtggtcagtgcttctccatcaacatcttcagcaattattatcaagggttttctttgggcatttgctaactctaaagctggaacaatgctttgtaccgaagaaattttcttttcactgagcaaaagcaaagcatcttgatattcgactttggctcctttaggtgtattaacaaaatatggtgagatatatcctctgtcgaacttcataccttcaataatgtctaattcatcatgaagggttttaccatctttgacagtgataacaccttcctttccaactttcttcatggcatctgcaattaaattaccaactgattcgtcaccatttgcagaaatggtggcaacttgacgaatttcttctggtgtggtgacaggtttagaaagtgacttaagggatttaacgatttcttcaacagccgagataatacctttgcgaatttcaacaggattggcacctttgcctaagttatcaaatccttcctttgcaatcgacctggctaatactgtggctgttgttgttccatctccagctttttcatttgtgttatttgctacatcctgtactagtctagctccaatattctggaatttgtctttgagctctactcctttggctactgtaacaccatccttggtaatttttggtgatccccatgattgctcaataattacattacgaccctttggacccattgtcactgccactgcatctgcaagtacatctaccccctggagcatcagggctctgacctctgatccaaaccttacatctttggcgtaccatctttgaacttgattatttatgtgggccttgcggagtgccacagagcgaacagtgttaggtagacggtacatctttatataataacttgcacttaacactctggtttgattttctttcaatgaatgccggcgaaaacgggcttcctacaagttccagcaatgttctagaaaaaagaaattat

SEQ ID NO: 6693 - DNA, 2231 bp, Diabrotica virgifera
  SmartBlast Evalue=0; Info="Probable citrate synthase 1, mitochondrial n=3 Tax=Culicidae RepID=CISY1_AEDAE"
ataaactgaaagtgtgtatattttgacaacagtgatgtaagagtctagtaaattagagcatgatgatagtagttccaattgggacgaatctgtcgttggtgttagttttgtgaaaaaggtgaaaatacaaaaattacgaaaaatggcattgttccgtcgactaacacctacaaaattatcagaaacaccaaaactaaaatctcaagttgcagtcgtcctcagacagctaagtgatagttcaacggacctcaaagctgtactcgcagctaaaataccaaaggaacaagaacgggtcaagaatttccgtaaacaacatggaggttctaaagtcggtgaagttaccgttgacatgatgtatggtggtatgagaggaatcaaagccttagtaacggaaacctcagtgctcgatcccgacgaaggcatcaggttcagaggcctttccattccagaatgccaaaacgttctccccaaagcaccaggcggcagcgaaccactcccagaaggtctcttctggctcttgctcaccggcgacgtacctaccgaagctcaagttaaagcactatccaaagaatgggccgaaagggctgaactgccttcacacgtcgttcaagtcttgaactcactgccgacgtcagtacatcccatgtcacagctttccgcagctattaccgtgatgaacagcgaaagtaaatatgccaaagcttatgccagtggagtacacaagtcaaaatactgggagtacacatatgaagatgccatggacctcatcgcaaaactccccgtagtagcagccaccatctacagaaactcattcagggacggttccggaatcggcgccattgacacatccaaagattggagttataacttcacaactatgttgggatatgatgatcctaaattcatcgaattaatgagattgtacctgaccatccacagcgaccacgaaggtggcaatgtttctgctcacactgtacatttagtaggctcagccctcagcgatccctacctctcattctctgctggtatgaatggattagctggtcctcttcacggattggccaaccaagaggtacttgtctggctccaaaaattgcgtcaacaagtcggtgacagggcgacagaagaccaactcaaagatttcatctggaaaactctcaaatccggacaagtcgttcctggatacggacacgccgtgttgaggaagactgatcctcgttatacttgtcaaagagaattcgcgctcaaacatttacctgacgatccattgttccaattggtctccaacgtatacaaagttgttcctccaattctccttgaacttggaaaagtcaagaacccatggccaaatgtagatgctcactccggtgttctcttacagtattatggacttaaagaaatgaactactacaccgttctcttcggagtatcgagagctcttggtgtaatggcgtcactcatctgggaccgcgctctcggcttgcccatcgaaagaccaaaatccatgtcaacggatggtttgatgaagctccttaaggctaagtaagagactggaagagtcgattcatcgttaacatttacagcggcattgtagtttgaactattacttgagagccatatgtatgagttttaaagtgaacacaagaccaaaattatcacaaaacgcagatacatttaaagaagacgtaattttatgaatataagggcatttttgttgtattatttgcattttgtgacaattgttttgtacatattactccaatatgtatttttttaatatttaagaatgttcgtgtatatttttgttactacttgaagggtttattcatttttatacgaattacgaatttatagataatttaggcaaccggtgtctaaattttaactttaattataagtgttctttatttaactaaacaattgttctgtttatgttcgatgaactgttcaagtagctcttaggttcttctaggctctcaagtatcagtttccccatttttgttgaacattagtattttatttatttataattgtacaaaggaattaggtgtacattttattctgagttaatttatttctctctactacttattctcggtacacattttaaagtaaatattataaaagagactttctttgttaaattatttaaactttgtaaaaattgtccagatgtatttgaacattattttgttttttattttttgcagaagtacaatcacttgttctgt

SEQ ID NO: 6694 - DNA, 2221 bp, Diabrotica virgifera
  SmartBlast Evalue=5E-74; Info=Exportin-1 n=1 Tax=Harpegnathos saltator RepID=E2C351_9HYME
gtcggggttagtctcagggagcttcttctgcggaggttccaggactcctgggccagttgtggagttttgagacaggctaggatccacacctggagccatccaaaagtcttacagtccaactgtgtagatcgtagaagatgctccctggtgatcagtatgctcaccggccactgtagattccgacggcaccttcatattcttggattctatgtaatgaggaggaggaaacctccttacatgtcctctgggaatgcccggcattggcctatcagaggtggcagatcctgggattagcatctgtgcagccgagcaggtgagggagtagcctttgaagagacttgtggctttctgtgaggccataaggtttctgggggattagacgttcggggtggcatcggcaggaggagttcagatttgcagaccctactgatctgacagacatgagagcccggtgcagtctgggcctcagaaacaccaaagaacatgttattatggacctggtccataagatagggtgatacagtggacccgccgtaggaggtgtaagtgtctgaagggcccatttgtgtcccgatttaccataccataccataccaatatgaaatattatgcatgcaaaatatgaaatattttcttttatttgtccaccaacactgcagttcaaagtttataaaaaccaagccgttccaaaattgtattattaattatagcctttaatgtattgttgatctcattctttaattcaataagcaaagctgtgaagatgaacattttcaataaattttcgtttgtccaaagaattagttgttaaggctcgtacaatattgaatttttgataaaatataaacgtcaatcttgattattgaagtgtttgttactgtatatcaatacaaacctgtataggtgccaaacaagtacaatgaaaccatctttaacacgtcctttctgtaccacgacttctggtgcgcagcaccaaggtaagaagtaataattttagttctgtttgcacatctcaatcacatcaaatattttaaactgtatttcattcaagattcgaggtaataatgattgggaggtttgaatgatatttcacatctgcgacaaaatcaatgtttaagtaaaaaaaacgaaacacgaaagagattctgcgcaccaacaaccgatacatgtgaagtcaaagcacttctggtacgcagtagcaagtggaaaagtagtgggaaaaatttacttggatttttaacacgggaagtaatgtagtagtcactgaaatgctcatagggtatcacatactcgaaaaaattgatggctcttgactatatgttgttaataaagattgtcatgcattcgaagattcaattgagtaacaaacaacttctctttgtaaggtatttcaaaatatctgtcaatattatgaccagaatgtgtagcatcaattctttattatataaaaggaatggtgttttagaaatttactaagaaacgtgcagaaacagctttgttaaacttaaatgagaatccagctcagtaaaatagcaacagctgttaagttcgtaacaagatccccttaccgatcacattctaaatagtatttaacacgtaaacttataaaagtgatatttttacgggacatcctgtatttttagattaattacacagttctctatgagatgtcggttagtcttgcatctcttctggtacttcgtgtggattgagtatacccggcacggacagctcgatgcgtcgtttttccgcttgggcgatttccagagctttttctcgttcctccaagaacaagtctgaatcgtcttctccagtatattccctaatctgcactaagaaatctcgtaaatgttctttaaactgaggtatatcttgatctaaattgaacattccctggacagtgatcttaatttgattatccgtaagatgtgggaaggcagatttcaacagagtcgctgtaaactcttgaatgtacagaacgttatccggtctgggtcccagctgacaattgacgcctcccgattctaccaacgtgaaaatggaagccaagattgtagcgtgcatagaaagtccggacgaatgcgaagtatccgtcacaactgagaatatatgttgtaggatgtcagtcaggtaggtctggtagaagctgggcgctgccgattcgtgctgttcgatgttctgtagtagcttcaacaaaatctgcaatcctatgtcggccaca

SEQ ID NO: 6695 - DNA, 2222 bp, Diabrotica virgifera
tctatgcaactaattattaataaaagttgatggctgataaaagtaaacaaacactatcattgcattagatgaatagagtgattaaatctgagtgagccccctccacccactttacaagcctcctattggtcggttggagaaatacaggtttcatctttagagaaagacgggttttattcaaaatttttgttttaacatttaatttatattgggtaaacctatttttaatcaaactaatacaagcagattcagaaaatataaacaatcaattgcgaccatggatgtagaaatcgagttttgattctacactcttcatatttttgaattttgagaaatttctcattaatgttgaaaaatgtgcgttacatcactttgtgtctcgcctactcatttgttggtaaaacatttccaaagtagctttttatacagttgacacagtttgttaataaacatggtaattacactttattttagttatttactgaattttgtttttaattttaagagagtattgtctttccttcttggacaaatgttgattcatcacaaacaattgaccaaactggatttctcttactgtccacgataattgattattgttacgggtttatttatcatctccaagaacaaatgcttcatttgaactttttgagtttatatggtacaaaaaaataacgcattgttaaaatgtaagctgtagatagtgtaataagtggaattacctgagaatatcttgtgtatttactggtccatttgttgatatattaaattaaatatcgcacccccgctgcagcagtgacctaagtcaaaatataccaatattgaataaattctaatttaatagaattgaaaactgaatattattattgcaaagtaagaagagctgaaatcttttttttttattatgctgttgtattttgaatttataatgtatatatggtatactctattgtctctttgttgcggcattaagaaaatatgaaagtggttttccaaattatttgacccccccccccccctaatattttagagttgtgactttttcagttaactttatttgaacgatttggtgataaattaactttaatcagtgtctaatattttatacggaaaaataaaaacagctaatatagataggtgttacattagctgataatactgttccgtaaattaaaataagtgtaacagcaatgaacagtaatatttatttatttgtgtcggtaaaatagcgtgcatatttctcgaaagagggttggttgttattgttttgcgagggtgtctccgcgccgggtggttgctgtgactatactgaaaaaacacatgtctgtggttttacgttgaatactaatttatcgacataaagaggctgcccctttatctgatgttttaaaagctgaaaacatttctgtcaagaagcgtcctcgaatgcattcaaaaagtgattcattgacataaggtctgataaggtttactatttaatggggaatttttaaactgagactgaacaggccattaccatctggtttcgtatagaaagaattgtgaattttaaatgactcatattatttccgtttagaaaagaaagttaatatttaaaattagcaattaaaaaataataaatgaagcgtgtcgctatactactctataactctataatatttaaaaagtattttttattataattaaacttaaaaagtatacattgcgactaacaactaacattattttaaagtttaaaattgtgaaaaatgataattaaattttccaaaaaatctacgtaatagcgataaagatcttcctttttgctctcctttatgtttagtttatttttataggtggtttttaaagcaaatttatttcagtaaattgacttgcagaatactttgtttttatataaagaattcataggttactgcgatcaacttttaaaacataacttcagttatttttagtgaatttcatataaactcaatttttacttatttttagtattaaaaagttgtcgtattaaaagtttagtatttttagtagtataaacttaatagaagtagtaggtaacctaactttttcgctttcgaaatgtcacaactcaaaatagtttcagcatcgtaactgcataaaataatccacaaaaaaaatttacttacagcgcaaaggacaattttaaacaaattgatgaaaagaaacttaggaaaactgaaatatttagttgaatttatgta

SEQ ID NO: 6696 - DNA, 2224 bp, Diabrotica virgifera
  SmartBlast Evalue=1E-10; Info=Endonuclease-reverse transcriptase n=1 Tax=Bombyx mori RepID=D7F159_BOMMO
ggccacattccaacggattggctttgtccaacctttataatgatctctaaatcacaaagagcgacaaggtgcaaggaccacagactgaatactcgcgatacttaaaaacgcgcgataagaagttgtcacttctgttggcactccccaagtgcgtcttttttgaaaatattgttatttaacagaatgagaaacgccgttctttgataatgagaaagctgagagattaattattttaaacgtttacagtttgatatgatttgtactataaattcaaaatattgacttcatacaatacgcagatccgttacattaatctaaaaaaaaaataaatgcgaatggaataattttgtgacgctgcaagagaattttgtacaaaataagatattaaataatatctattgcaccaaacccccagaaaaacttaattcagtattttatacttaatttgtggagactagttactaaatgtattttttcaacaaatttcgatttaatcaaattttaacacataacattttcaaaacacaaatttggaatgcatgttgtccagtccaaggtgtaattaatttaaagcatttttcaaacctcccaactctgatatcatacaacttaagttgtcacatgtatataatcaaacatgcattttacgattgattaaattaaataaacaaacaaaaattttaaaaaataatttgtactttgaaacatttgaaaattgatacattagatatttttcactcttttatggtatgtagaaattggtttgtcctgtggcaacagtgcttaaaggtgttctgcgcgccatgccaaatcttaaacagagtcgttaagtttttatagtacaaaaggctatattttaaatgaccaccaaagtaattattgagccccaaccaagttttatactctgtctccaaaataatatttgggaaccaaacaataaataagcaccaaaaaaccccaactagaaattatgaatgttgaagctaatgtatatatttaagccgcatctaaagtaatacaagaacatcgaaaacattaaataatcttcaaaatcaatgactgatatccaataaaagtcaatgagctggaagttaaattaaatgctgactatgcaaaccccaaaataatgattgggaataatattgcgcaccaaaaaataaaagcggattatgaacatgtgcgcacaacacgccagctcctaaggtgcaacaaaagagtagttgtctttgtgttattatatatggtgtatatttactgccaattcagttttttgttgtcaaattgtgatattgtaaagtattaccgatgtaacttcccgaattgacacactgaaatggaactgagccggacacgtcgcccgaatcagtgatcaaagatggacgaagagattacttgagtggaggccgagattagacaaaagaagtagaggaagacccctactcgttggggtctttctctgacccccaactgactatctcaagaaattggatgcaaagtgctcaaaatagagcacaattgacaaaaatgagggaggcctatgtccagcagcggacgcaaagggctggtgataatgatgatgaaattattacagtatacaaggtcaaacattgcatgtgacctgccactaacggactgtagggagcaaagtcgtacttttcctccctagggagactaagtacttttactccctagggagtaaaagttaaagtgacgtcatggtatgtaattaatgaaatacacctacctctaccgaaagtatactttttctgacctgattgtagggagcaaagtcgtacttttcctccatatggaggaaaagtaaaagtgacatcatggtatgtcattgatgaaataacttattgatgccctatacaatattctactatctattacgtaagtatttatacattttaacgtttatttatagagcaccctgtattttgcagaatggtaaaaacagtaaattgttattttgatttaacaatgtttactgtagctacttgttagttttagtgctctaataaattttgtcagttagttacataaattatttaaaaatgaaaaaattacttgatatttgaggaaggtggaaaaattatatgtataacatgggagtaaagtgccttttcctcccctgttatacaaatagctattaacgccgtatacaatattctattttctattacgtaagtatctatacattttaacgttatttatagaatcc

SEQ ID NO: 6697 - DNA, 2219 bp, Diabrotica virgifera
gagaacatctagtttataatctgggagtatagactgatattctcactttttttaccatccaatagaggttgcatgttgaattttttgcagattaacgacatcgttctcgtttatatataaaagtagaccattctttttcttcttcctctttttataatccaatgtctggtgtctagaccgggattttctttcccaattttttaataataatgtcagcgtttgcaccatctgctttaggaagccacaaggtggctctaactcccgaccagagtgtttccctgagatgtccagttcttaggcttttaccactgctagtctttaactgagggattagagcatctaaccactcttttgtatacggatctttacatgtgatgacgcatgctcctttgcgattaatagcacgttcaatgcttagccctacaatacctttctcggccatatgtgcaatgtttgtatttaataaagcttttagaactgtcatgtcaaatttcgacaatcgtacttctggatattctacaggaactaccactgtctttcttacgatgtcctcgtctacaatcataaaattagaaaggtagtcgtttgaacatccttcaacaccttgtgatgtagttaactcctcatcgttaaaatcgtcctcctcatcatcctcttcgttaaaagttgattcgccatgcaattgatctttcttgctgctgatagaacctagttcatcaattttaggttgaaattgatttctttcattgacgaaaggatttcttccttggttttcaccatgcgtattactaataccacttgggaaagggtttcgttcctggtttccataaggcaatgtgttcctggtttcgctagtaaaaggattaacactaccatacgaactttgtccaaaagtttcaggatacgactgactgtaagaactttgtccaaaagtttcaggatatgactgactgaaagaactttgtccaacagatccaggatatgattgactgccttcattactgaaagcagccctttcacttgcgaaagggttcgtttcaaaggtttcacgatgaaattgtgtcctttcccttgaagaatttcctcggttcctttcactatgcaacggacttcgttcacttgcaaaagtatttgttactcggttttcgtgatgaaattgactcctgtcgctgacagaaccattaggacttctcctacgggtttctttctggatttgacttctctcattgctgaatggacttcttccacgggcattactgcgactgtcatgtctttgacctctgaagggacttctttcgcggatttcacgatgcattggacttctttcacgaccaaaagggcttcttccccgagtttcacgatgcaatggacttctctcgcgggtattacggtgaatttcatttcttgacctctgaagggacttctttcgcggactccacgatgcagtggacttgtttcacggccgaaggggcttcttcctcgagtttcacgataggtttcctttcgttcactagtaaaaggctttctttcactggcaaaagtatttctttcgcgagaatcacgttccctataagaatgcgaagctcgatcttgatcataaggacttcttttacgagaaatattagactcccttcgcccttcatctatatctcttccacgagatggatttctgctatctgtagcaggattagaatagctgtacttcctgttatctgtgccagaattaaaagagttgtaccctctggcctcaggcattgtttcacgtttttcgctaccagaaccatatggtcgactgcgctcttctgcttcacgaggtatgtaacctctatcacttcttcccctttcaaagcctgtaccgcgagaccttccccgcgagtaaccccctctgttgaaagacatttttgtcttcttctgtggttatcgtatcttcacaattagatgttgcccatcagcacttttattaaaactccatacaccagaactgaggatttatccacaattttactcccgaaaaattcttgtagattatgtattttaatctttatttccaactaaaaaacactaaaagacaattcactacagaagttatttgttaacattcgcaaatataccagtaaatcaggaaaaattaaatgtttttgctgtgtatttcatatattgaataaaaagataatttattcatcgatttaatcaaactttcctgtgaaacgccgataacc

SEQ ID NO: 6698 - DNA, 2219 bp, Diabrotica virgifera
ttactagctgaaagttgttctgcttatgtaatacattgtatgtaattagaactaatcatacattttgtactatttttaacttcaattttttttgttatttaattttattttttgtaatgcaaactgataaacatcgttttgttgatccatagatttttaagctttacaagctataaatatttacatttatatacataaaaacagatagttaacatttgaatagccattttgggagttacgatgtatatttacataacgttttttccctggtacttttccagtgggaccaatgtggttacttatataaaactaagaatatattttacaccaattctcagattttcagttaatgtagatgtattaggttgatgtggtgaacaagaagatattcattcaaatatgaaatcgtaaacaaggaaacagttcactcataaacagggttatatgtttcacagaaggtataaatcgacatttgtcgaaggtaaaagaaaaggttgtaaacccacaaatcaacgtttttcagaaaaaaaccctccatttaagtaattttatgaggagttaatctaataattttttccattaatttgtagatcaataattcatccataaattaattcataaattattaggttaattcctcataaaattacttaagtagagtgttttttctgcttcccgaaaaagttgatttgtgggttacaaccttttacatgattacattgaattcagatttatagactgacttgcctattaatgcagagtatgatttaccattcataattttatttacatgtgtttgcatacagttgtttttataattcattgttttagtctgcaactgtttaacttgatatgtgtctgttatataaataatatataatgaaagctgaaatgatttcttttcatatgtttcattagggtctattgtatacaaatccatatgaatgctggccaccctggacttctggaaccaacacaactttcttatggagtcaaattcatgtagatgttcaagtcaaacctggaagctctggcattcctaggttggactagtcaatcctcgggtctaacttgaggtcttagtcaaagcccaaataaatgatgcctttcggactttgactaaagaattcttgtcaaacctaggagagactaatttggtcaggcaaatgtcgaaacttaattttatgcaatcagggtttgactagtcaaactccaatctatttatcttttgacacatttcacgtaaatgcaggtaatgtttatgcactcttttgtgacatttacatgtttttttaaaggctttaattgtaagatctctaccagcatgaccacattcctgatgagctcattcagttgagctaaaacagcaatactgtaaagacgtcatagccactttaggtgattctaccttacagataatctgtacttacatctgtttaattcttaataacaatcttatgaaatgaacatcttatttaaattagtaattttctctttaaacttcatttgtaaagcttcttgatccatgttttcagtaacattttttgaaatacttatctttaatcgtaaacggcccttagatggtcaatattatttcacaataaattagtggctgggtcttgtgctatcaacatatgggataaaaagacagcaagttgtatcgctattgcgttgtagcttcaaaaagtaagaaaaaaaaataaacacaggtggataaaggaatggcaaaaaaagaaataactatactcaagaaaatttggcgtggagtgattttaaaaactttctgggactagatagtacattctttgatgaactattaagaatgattatacctgaaattcaaaaaagggatccagtgatgcgagatgctatcgcaaaaaactgtacttcctagctactgtaaattcctttgatgatttaaaattccaaagtgctctatctgccaatattgtgcagtattggccacacatgccacaatatttattatattgcacagtaaaaataaaactcacttcgattggcatactattcaatgttatttataggcgatcaatatattgtatgatatcaataattattgtgcaatattttgacaataatattgattgtctcaaatcatcctttggcttagtttattagtcacttctaggatcttctaggcaaagcacgaaacatcgtttttctttccacatttggctgaaaatttaggagcttctaag

SEQ ID NO: 6699 - DNA, 2219 bp, Diabrotica virgifera
  SmartBlast Evalue=4E-28; Info=Leucine-rich transmembrane protein n=1 Tax=Aedes aegypti RepID=Q17HN9_AEDAE
atttggtaggttctgctagtgaggatggtatagttacgtacctttttgtttaacagttaaaactcatttcaattaaccaagtatggactatttggaacataggtaggtacctacatctcacttttccggtcgacaaaaatactaagaaaaactaagataataaaataatttacaagttatataaatatgtattagcaatttattgttataaattaaagattaacataatcttagcttaattatttaattgctatataggtacctaggtaatatttttagtaaaactaaaagacattacccaattaaattattgtcgaagctgtttttttgtttaaatagaccataaagagtattataaaaagaaaagacatatttatcataagtttcagaataatatgaaagaattaataaaaatagaaattatccatgtgcgctagaaaaattccattagaatatgtaacttttgtcactatattttcaattttcatcagaagaaaatataggtattacaaatattttcttctgatttattctgatctatttccttgaaaattacgaacaaataggaaatattggtacctatatggacgaataaaatgaattattattattttgtatattcgtaaagcaaaagtacagagcagaaaaaaacgtcaaagcagtatgatgtaaaagtaaaaataaatctaaacctaagttacacaaaataaaacaatccatataggtattagtcatgcgtggatgccaagttgtaaggagagttaggtccaatcctgtgggacctactgaaactgcttactggatatcttaggaggaaaaatatgaggccacacagtactactatccctagggataaaattacgattaacagtctgtggctctttttcccgtaaatggctggatagcagtctttcaagtcgctgtgttccagttgcaagactggtttgtgcttgaggtcttccggagagtggcatcttatttcctgaggcttgtaaaattccagcgcaaaatgttgaagccacaaaatatcgcaatcacactcccaatgattgtgcgacaaatccacatggtccattttcacaaacagatacttgtaggtttcattcaggcttctcaaaccatttctagctaaagacagtatcttgaggtgatggtcgacatctttagaaagtacatcaaatgccagttcactaaattggtgtaaatttggacagtcattgataatcaatttttccaaagcgaagagattgtaaaaagcgtaatgatgtatatccgtcaaacttgccattctgttcaatttgagactttttagagaatggtagttcagatatttagctgagatgaaagtgaattgattaccggataagtccagatgttccaaggtgtaaggaactgtagggatgagttcgaattcattatctgctagtgatagacctttcaatgcagtaagattatcaaaatatccagctggtagttcttttagagccaaaccatccaagcgaaggtgggttaaatttgaagtaacccctaatttatctgctaacacttcttttgattgggttaagaatttatttagatagttgtagctcaaatctaagtgggttagtttatttagaggattgaaaatagagtccggtaaggattttaagttgttgaaactaaggtccaacttcacgaggtgcacaaggttttgaaacacacctgcattatccaaactggtgatgaaattgttgctcaagtcaagtctttttagtttacgtaggttctgaaagaagctgacgtctatgaaggtgatattattgtaactaagacttagttcttccaggttttcactacttaagctgtatttttttggatcgagcgtttggatgttgttgattgacagatctaatatatgtataatatgttctatgtttcctggaacatcttgtaggcttctacttctacaatccgcgtagtaggtaggaaggtgtgtcttgggattggtaaactgtctacagtcgcatccactttcactagaattggtacatatttcaccggaaacaatgtccaatgtcgcaaataaaaacaacactaacacttctttaacaaacatcataagtcttctatggtatgtatctacttgttttaagaaaacgatatcgaaatgactaggtgaagtatttttgccgtcttatcagtttagatagatatacaaatgagtttgtgttatttgccag

SEQ ID NO: 6700 - DNA, 2218 bp, Diabrotica virgifera
  SmartBlast Evalue=0; Info="Procollagen-lysine,2-oxoglutarate 5- dioxygenase 3, putative n=1 Tax=Pediculus humanus corporis RepID=E0VRF9_PEDHC"
aaaaattagaaatgctatgtgttataagaggagaacgcgaaaagttctaagactagcccatagagggtactgttttactacagacgttattgatgttgttaggttggtgcatttgttgcaaattattgctcagcaacgagtgaggccactgatcatgctcattaatcacaaaaagtcgtgccagtttatcatggaactcgaaaattgtgtctaatatttgccacatacattttagtgtaatattaagatgaatcctactaattttatacattgctttgatacgatcattattacttactaattaagtactgtaaaagttatggttggtgtattctgtgattctaaatgagtttttttagttagctacctttttatagtaaaacaattaatgagtaatgttaggcatacccttttgatcggctaaaagagaaaagtacctatttgaaaagtgaaaaccacaacaatacagcaacaggtacctacctggaacttttcacattactctcgtatacatgcagtttcgctaaagaaaatattaacaatattttgatatttcttcgttgtatcaataaattacacattaagtcaaatatgtctaccgtttatggatcgacaaacgcgatcattatatatcttgtgcctttggtaaccagcaatccttcgtggaagtgggtcagtcttccaggatgcattaacagccatcccggtttggtgtccacgacgctgcagttgtatcggatgaatctgcaaccaccaccttcataatcgacacctttttcgttgagtgctatgttgatggtgtaggtggagctgtcgtggtgaggtctcaacagtggctgttcgtctgggcgataccttactacgaagttcattagagacttaggagggtcgtgatagtaaccagtgaaaaccttttcttgcaaaggccttacgtatttttgcaagaagtgcaaccagtgtcgctcccatccgacttggttcatgtgtatatccctggtgggaactgcctcgtatccaccattcagacgatcgtcttcgttcttacccgatgaccatttaccatagctttccatcatgtggatgagggcttcgttgaatcttttggacacgattgggaaccagtatacgtcagggcaaggctgtgcatctttcttctccagattgaagttctcagggtactcttcattgatatacctatcctcccaatccctctcattctcgaagatctggtacatgtcaggttcagtcctcgtagtatcgaacgtgtctgcgttgatcaaatgcccgaattcgagtctgttcgacacgtacataaaaacgtccagatctcgcaagttgctacagaaggtcatatcggcgtccaagttgggtttggtgtagttgagaactttgcgatcgtgttttctcaggagagtggcgttgatgatgtaggcgttggagatgaagggaacgttccagagtcctcgtttctcgttgtgaacaatatccatgtaatcattggacctcgagtaaaacccatctttggtaagggcaccccagaaattactccatgcctttcctggcctggtcaacatcggagctactacggttctgttttgttcaatgagcagttttagagtgtagggattgtctatgtgcgctatggcgtccagtgagaagtagaagtcacattttttggaaaggcagtgatccagcgacaaatcacgggctgtccattcaggtgtaccatcttctggagttatttgtttgaacgatgcataatcactgctgtacttgtctacgaagtctttaacaatgtcgacatgatatttaaccgaattatgaataaaaatatgaagtctttctttaggatagtccaggaagtacaccttctgcaacatctcttccaaaaacggcgtgctttgttcgatgaatacagaaatcagcacggaaggaaaatctttaggcgcagtagtaccgagactgatcgctcccttcttgcattgtttacacccgtccacggagttccatacgttaggaacgtaattgctgagatagttcagagcgtatttggctgcaccgttaccgtggatgactaaaggttcggtacgagtcaacgtatttctgacgtagtataattctccttcgccttctttttcttgccgagtagcgatttcgatttcagctgatacgccgttaaggttctggaatatttcacttttatggtccagcttgattt

SEQ ID NO: 6701 - DNA, 2212 bp, Diabrotica virgifera
  SmartBlast Evalue=1E-78; Info=Ubiquitin-conjugating enzyme E2- 17 kDa n=3 Tax=Coelomata RepID=C1BT96_9MAXI
ttctactttgtcgactggcactaaaagtcgccacggaagtgatcagtcataaattctggaacattaccattttaaagtgcatatttgagtgaagacagggtgttaagaagcattttagtttttcttgtatttatttccgtcaatttaactggtaataaaagtggttctgggtggatgatcacgaaaccatatttatttgatttacgtcgtgtctgtgagttttgaaggaggccatctttgcaatctctattagaggtcttcagcttgcgctttcattgtctggtgaaaaaccagtatttattacacacacatttcaccaaatggctttaaaacgaattaataaggaattacaagacctcggcagagaccctccagcacaatgttcagcaggtcctgtaggagacgatttatttcattggcaagccacaattatgggaccaccagatagtccataccaaggcggcgtatttttcctaacaatacattttccaacagattaccctttcaaacctccaaaagtggcattcacaacaagaatctatcatcctaacattaatagtaatggtagtatttgccttgatatattacgttctcaatggtctccagctctaactatttctaaagttttgttatcaatctgctcactactgtgtgatccaaacccagatgaccctttagtaccagaaattgctaggatatacaaaaccgatcgggaaaaatacaacgagttggcgcgcgagtggactcgcaaatacgctatgtgatggccaggcccccccgaccctcatttcacatattagaagaaaaacaaaaacaatttatttaataatacataaaaaatcaacaaacacatcggaggggatcggccagcctgtcattttcacaaacaaaattctactgtacatttgctttttgaggttttggattccgccacaataccatcatggggcttttatgtaacttttcgattcccaaatgacatgttgtggtgatactagcgtccaaactttggaggaaggaaaaatgtttatataaaataagtactattttttcgtctctacccaagttatctggctgccattgcctcactcgctcccaactgatactatatttaatattagataaattaatacgtaggatttttgtggttcaactaggtgtactataataataaatatatattttttccatactttccatgctctttcaacaattttcattctaagagaaagcaatatgagagtttgtactcacataaaatctgtagataatttgtaagtaatcagtgtgtctttaagtacaaactcttctaagatctcaaaggaatattcgactaatggaaaatgttaaagatttataatatatacataagttttttttaaaccagactgcagtttcatattgaaatgttgggtactaaattaaaaaacgatttctaacaataccttaatataaaaatcgtttaaattctttagaacctgcgaattagaaaaagaacaatgtagatatttgtaaattttttaaattagaatatttttttatttgttaaagcaattttggaagaattataaatcttaaaacatttttctaatagtaaaactggatgtgccgtgatgtatattgtttaccttctaaacagtgttcattattttactgagacggctggctaatgtaactttcaaggcttttagaaaaggaatctaccgtaaatgaaggcgtactttacaacaatgtttgataaaaattgaaattaattgtaaactttttatttatttactgaatataaataaaccttaaaagtaatttttttcagttattattttgaaactccacaaggaaaagaaagaatttttcctgtagctggctgtataccatccatcaatcacaaaaatttttttaatgaaaattcttcgtaaaaggtataaaattttattaaaaacgccttaccctccattagtcgcgcggtctacaatcgtagaccactctcaagtggtcgccaattgcagaaaactgcacatacgcccccatcccgcttagtagctgtcactaatactttcaacttcttcagtttgctaaacgccgccgatctgtttgcattatttttttaccattattcaaagagcactggtctacaaccgtagaccacgtgactaagcgcgttccagtttttagttgtacagtggaaccccgataagtcggcccccgataaccc

SEQ ID NO: 6702 - DNA, 2211 bp, Diabrotica virgifera
  SmartBlast Evalue=1E-172; Info=Disulfide isomerase n=2 Tax= Culex quinquefasciatus RepID=B0WFQ4_CULQU
attgatggtatacagccaactacaggaaaactttttctttccttgtggactttattattttccgtttgtgtcgtacgcatagacactacctaattttattttctggctctggcataagtttatgttgacattgacagttatcagaaccgtgtatccgtctatccttatgtgttctctccgaccaatcaaatccccacacgaagtgtttgttgctttgtcagcaaaattaagttcttattaaaaacaggctccggtaacgggatcggtcttcttttcattcagtacttgattcggccagttctcattttcttggctggtgccacgttgatgtgtgaatattttcaatttagtttcatatatcatttgtaggtttaacaggaaaattcgtcaatatgttccggaccggttttctgctggtattctttttgaatgctgtttttgccgctgaagatatcaaaaccgaagatggagttttggtcctcaccaaagacaatttccaaggagtcctcaacgataatgagttcgtcttagtagaattttatgctccatggtgtggtcactgtaaagccctagcccctgaatatgctaaggctgcccagcaactagaacaacagggatctaacatcaaacttggtaaagtcgatgccacagaagaaggcagtcttgctgagcaattcaacattagaggataccccactctgaaattcttcagaaatggcagtccaattgaatactcaggaggaagacaagccgacgatatcgtcaactggttggcaaagaagacgggccctccagccaaagacttgagctccgttgaagcagctaaagaattcatcgaaggacacaatgtggttgtcgttggtttcttcagtgaacaaaccactagtaatgaagttgccaagaacttcctgaaggttgcttctggtttggacgatattccatttggaatctcagccgatcaagctgtacgtgatgaatttgaagctgccgacaacagcatcgttttgttcaagaagttcgatgaacgtaaagtagcttacgaaggtgacgctgatgaagatgcactcaagaagttcatccaatccaatgccttacctttgttggtagaattcaaccatgaaacggcccaaaagatcttcggtggtgaaattaagagccatttgttattgttcttgaacagagaagacaaagacgtatatgaaaccatttccgaagccgccagatccgtagctaagccattcaaagaagaggttcttttcgtcagcatcgatgccgaacaagaagacaaccaaaggatcatggaattcttcggaatcaaaaagaacactgtaccagcagctcgtctcatcaaattagaagaagatatggccaaatacaaaccagcatctgacgatttgaccgccgataacatcaagaacttcgtccaagacttcttggatggtaaacttaagcaacatctattgaaccaagaattgcctgaagattgggacaaaaaccctgtcaaggtattggttagcagcaatttcgatagtgtcgctcttgacagctcaaaggacgtcctcgtagaattctacgctccatggtgcggtcattgcaagaacctcgcccccatctacgacaaactcggagaacatttcaaggacaacagcgacgttgttatcgccaaaatggactccaccgcaaacgaattagaacacaccaaagttgttaactacccaactatcaaattgtacaccaaaggcagtaacgaagccgttgaatacctcggcccaagaacattcgaaggtctttctaaattcgtagaatctggcggtaaagatgactccgaagactctgctgaagaagatgctgaagatgatgacgcttccaagaaagatgagttgtagagtgtaaaagtgcatttgttagtttaactataaagaactttacttatatttttttagatttgttttgtacagatttttgtgatttttttactattatcgttttttcagttttctcatgatttgttcaggatttagatttatttatattatcggaataggaaataattaactctccatttattggagaatgtatgagactggttgtgttccgtgctgtcattgttgacagttgtaaatcctccgaacatttttttataaagttgataatatattttgtggaattatgtataaataatattaaatgcggctaccactcacaaaaaaa

SEQ ID NO: 6703 - DNA, 2203 bp, Diabrotica virgifera
  SmartBlast Evalue=1E-120; Info="N-acetylgalactosamine kinase, putative n=1 Tax=Pediculus humanus corporis RepID=E0VT04_PEDHC"
attcgtgagtgataaatcagtgaattttattaaaaatgacgggatttgacgttgttcctgttcgcgaattaccggactctagtcggtgtaaggagttaattaatgtttttaccaatatttacaaaaacaaacccagtttttgtgttcgggtgcctggaagagtaaatttaattggcgagcatatcgactattgtggatattcagtatgtcccatggcactagatcaagatattttagtggctgtctctgtccaaaatgacaagaaattacagctacacaacaccgatcctaaatttgaagactttgaatgtgagattgatacttttgagatttccttgggggaaggagccccgcagtggtataagtatttcctgtgtggtgtcaaaggaattcttgacactttaccaaatgagattgaaacaaaaggcttgaaactagttgtaagtggcaacgttccgctaagagctggtctttcgagcagtagtgccttggttagtgcagcagctttagcaaccgcacattctcatgggttccaaatctccaaggaaaagctggcgaccctttgtgcagagtgcgagcgttacatcggaacacagggaggagggatggaccaagctattgcatttttggcaactgaaggttgtgcgaaacatatcgagttttcaccgttgagatcccaggatgtaaccttgccatcgaaagcgatttttgtaatagcccacagcctaacgagcatgaataaagcggccactgcagatttcaactgccgggtggttgaatgtagactggctactcagataattgcgaaaaaacaaggactggaatggatgaaaatgaagcgattatcggaactccagcaagctctttccgccgatctctccaagatgatttccatcgtcgaatcgagtttacacgaacatccctacacgaaggaagaaatcgtgactgaactacaaacgactcctcaagtgctcgaagagacatctctaaccccgaacacgaaacacatcaaaagttttaaactgcgccaaagagcgctgcatgtgtttcatgaagcgctcagggtgaaaacgttcatagagacgtgcaagcagcactccggtggaggcgatgttttgccagtattaggtcgtcttatgtcagagagtcacgaaagcctaagggatctttatgagtgtagtcatccacaattagacaggttagtggagatatccaaagagtacactttaggcacaagattgacaggagccggatggggcgggtgtgccgtttccctcttgtccccagaaaacgtcgagaagtacacggagttcctgaaagaaaactattataaggagttgggagttaccgaaggctttcaatcaatcctctttgctactgctcccatgggaggagcgtgtatttatgtttgagaatgtttttgttattgattgaattgtcatttcgaaagaaaatatactgtgttttaatacctcgttcaatcgactgtcactagaaatggacggtcttatttttagagactttttggagaattttctttgggagaagtctatgaaatttggcataggtatatgaaatgttatcttgagattaaacattaaaacagtattataaataaaatttttgattaaaaaaatctggaataaatattgttttcggaataaataatgtatgtattttcagtactgctactagtaattatactacatatgtaaatgtaaagctgtaaagccactaaatacataagtgaagtgaaaaccctttaaatattattaaattgatattacacggtggctgataattttatagaatgttaaaattttaaggcttctgtcgagttttaggagaattttgctctccctgtagtagaagttttagtctcatacagtagtactatatacagtatgggtgatgatataaggggaagtcgcacctgtggactgtggaggaaatctaggaccaatacgagattttgtggggcctttacttctaggatgaagaagtcgggtatcttataacagggcaactcaaggcacatgcttggtttcagttttttgttattaaattatataaatgaataaattatataaacacgatatgctgcagaataaacagtactgaaatgcgcatgcctcaactttgtgtcatgcttagaaacatcgtcagcggtttccgaaggccgttatatcgtatgtgaatgttg

SEQ ID NO: 6704 - DNA, 2185 bp, Diabrotica virgifera
tttcacaatacttcatcgatttctgtaatttttatagacgtgatagcgaaaaataagttccaacgaccgattacttgtagtttaaagtgtctgtaataattacaacgcagtattttaactatctgtcgcatttatattcgattttttcgttggtgaagtgtgttgtcacgccctattaaaggatatagtatttccagtgttgcaaatattcacgtgagtgccaaacaatttagtaagtaataatattttaagatggcctatcaacatcacaatggaccacctcctcaaccgtatgctcccccttatgagcctcaagcaccacctcaatatggggcaccaccttacggaggtggtcaaccttaccctccacaacagcaacaaccttatggtatgcagccaccctacggtggtcaacctcaaccaccttatggacaaccacaacctccctatggaggacaacaaccaccctacggacaacatgtacattatggaccaggaccgggaccaggaccatatcaacaacctcctccacagccatattatcctccaacacaacaacagaaccaagaggatgattgttgcaaatggtgttgtggattaacatgcttgtcacttctatgttgttgtttgatgaatcatgattaactcttagtcaccttctttattgttgtattgtatagatcagttgtaaatgaagactgttttaggagggttttaatatctgcaagaagtatttaaattataattagctaagtacttggagtgtccatttcaaatcaataggggttttcagcacttctcatttgttttggccacttctcatgtgttgcataaatgtatagggctattcaacgctcctcatttgttttgggcacttgtcctatgtcacataatattaatatatctatctcataaattaatggtatacagattatacataccaaagacataattattatgacgtacctacctagatatattaatatgacatatgacaagtgccccaaacaaatgagaagcgtttaatagccctattatgtgacacatgacaagtgcctgaaccaaatgagaagcaatgaaaagccctattacttagtaagcttttaccattaattcttttggataattttcaagttaccagtctttttaatttaagataaatatgtgttaagtgcactcatcttcaagcttattttaaagttctataagttgacaccaagtttgcagactattttttttttgtaaaaataactgagcacctccgtaacacattatgtgcggatatctgatcctaagacatatgtactctgaaatgacaaagaaaaacacatattaaaatgtgtataatcacattcatacatacatcacatatataagtgctgttcacacattggtgaaggcatcatgtggctcacatgtgtgccatccgcacggaatgtcttaaatctaatttaaataaaaaataagaatttaaatgtttaataaactatacttagtgtttactataaagttgattttaaaaacatttgaatgtatagtatttttactacaaaggcgttattcgtgggtcaaatttttgacgtgggagagctgtcaaagcattggaatgtgacttttcattattgccgtgtttattataaacatggcaatgatgaaaagtcggattctgatgttttgacagttctcttgcgtcgggaattttgacctgcgtaatatcgcttttgtggtgaaaaatactatactaccgaaaaccccatattataatcactaatgaaatagaaacgtcaacattcataataaagaaacgtgaaataaatatgacataaactaggaattgacaaataaagaaatcgctataaaaataggagatcaaatacctaatgaacttctgcttttttcatctttagcctataataccgtgtgtttacttttaaattagatatagagtacacccaatacatgccaactctgctttcccgcttcccacactcgagtcgcgccgatttattcagggaggtattcgtcgattctagagtggcaatgcaaggcatactcgataaacgaatgttgccgatgttagtgctcccttcaatcgcctatctctaatcgaaaactaaacgtatggtatatactcagaattttgatgagaatactcatctttcttccactactatgtgcatcgttt

SEQ ID NO: 6705 - DNA, 2193 bp, Diabrotica virgifera
tcgacttttgcgccctctacaatataagtttacgtgcacaaatgaaaggagctatttgttttgtattctctaagagttggatattggatacgtaaagggttttgtgtttatttttaataagagttctgagaggggaaatcttgaaaaaatgcttatttttggtcttctaagtgtactagtaccttaaccaagcgatcccgcgcatgtgactgacaaagatggctagaccactcaatcctatgtcgacattacacctcgatgcattgagtggcatatccctagccaagtctatccgtaacatgtctctggcagaaactcagttttttggaaattgttacgttgtgtttgacagcaaccttaacccttagtctcccatcacttctagattttttgacagttacttcccgacggtacttaatttaagtcttaatttcaaatcttaatttaagtccgccttattttttcgatcataactttttaaaataagctcaaagcatagttttttccaacgatcgtttagagtacctataaattttattgtgtatttaacacgaaatcgtttgaataacatttgaactattaaatatcagcttataactaataaacgatatttaacagaacattcttaaacaaaatctactttaacacttgggatataagggtacccaaatttggtggtacttaaaagtaccgtcgggagactaagggttaaacttaagtatttctattgttaggaccgtttctgaagctagcaacaataagacttaatatcacctaaagcattcccgtctgtatgtttactaatagcaggtattgaacgagactattaataaatttaaaaaaaaatcaacagacactaattacaatacctactaatcaactataccttcgatggcctattgttgagagaaaatggtagttctccacaagcgcaatataatacacacaaatttaaattggttgctcaacaattcaaaaaaacaataaagggataataatatataaaaggtaattcaatttaggtaaaaacttacaatcaaaacatcaacggcgaaaccaacactatttcgcgtgtgtgtatacactcgaggtctgaaggagtctatcttccttatcgcatggggaaagaatttctggtttcgagtggtaccccgaacgtcgccaccgcgatatgtaaactttcgatacagtggtagaaagggacacgggtgtcgacatgggtaaaagggacatgatttcgaactattcacacaaccaaattaatttatgggatttcaaacaccgtcgataaaagttacagataggaaaaaactgataacaattgagaaaccgatgcatgaaaaccttgtagcaactactgctagtggcataattaaattaaatgttaattaaaatgagaaaaatccagaagtattagaagaaattacttggtgaccgaaatggtcaccgaaaaatttaatgaaaatctgttaacgtagtacttagtggccgacgcacactgaaaagtccgaaaacaaaacggcaactctatacgaaaatgtgaacatcaaaattttaggacctacagtgaacttcaagacagaatacaaaggtcattcgtaagaaagaaggttccctataccgctgagaaagagtgcaacgtatagggagaaatctgataacactgccttacaatcaactctccctctctattattcctctactttcaccttgctgcattgcacagtgtcggtctagcagcctttgaagatggaggtcccgatcacggttacgtgaaattcgttctttgattcattttttaaatgcaacatggattatataaagttctttattgaataatgtagttatttggtttttattattttgtacgtctaatcgaatttgattttcatcattggtaactaactttaaagaaaataatgttgatttcatattagctggtcattcaaatgtggctttgtggcttttgagatatttaaacaattattaggtatccaaaaagcctttcttgaagacctgctttaatttgccgtcttgaacattttgtttgttagttaatgtcgaaagttttttttgatggaatattattaaaaagagaaatgtactctgggcttgcacatatttttaaagttgatgtatgtttaagcgtttatgttaaaatgaaaatgcgttttatatatccgttgttgctac

SEQ ID NO: 6706 - DNA, 2197 bp, Diabrotica virgifera
  SmartBlast Evalue=1E-155; Info=Dymeclin n=1 Tax=Camponotus floridanus RepID=E2A5K1_9HYME
atttttataaaatatattaatatttgttacaaatttgtacataaatacatattacattacaactttattttcatttctaaacatacatatttacaactgattcttaaggttaaatatatagtttagactactacaattgaaggtgacgaatcagttacccagtgtaatattgattgttgacctatcagagcccatatataaggaatgaaaaaatcttccggttgatcttcttcaacgtatttaaatttaaggtcgggaaatttcgttaatctttcttttggccaacctctaactccttgttggattatcaataagacctgatgtgcatcgacttcgtgctctagtgacttgtcatgcaagagctgtgaaaaatacttcaggatgatgtcgatattgtgtattatatcttggaaaactacgttatctttgaaagattcgaacatgcttttgttatagagcatcgtgtaaatcaagttgggattatttccgagttgcgtcgataaacaggaattcagaatttctaataccatacgtaatacttcctccaaaactgaaacgtcttgttctacatcgtcagattcttgatcaagctctacagttactttattgtctttctgagaattgtcagtcttgagtctcaacatcaatctattgtactttttggctaaggtctcaaaaagggacaccagtctttgactcacgtaagggtgcaagttcctaaaatgagctgacatgttggctagtgctgcgagacagttggtgtgtaaatatttgtccctcattttgagcatattgtactgcacagttcggatcactattatgatcagtagaccacctagagatatatccgttaaagctcgttctacgtaccacggaacgttcttcagtttcaggtcatgaatggtttcattaaagctatcgtcttcgcttaaaataagtaggatgatcaatgacatataaatatgatgggaattactattcggtgcgttatacaagcttttcagtattggaacgatcagaagatccagatcactccttacaagaatataagatttgaatgaatgattgcgatgcaataataaatacagtaacaatgtagctgcatctcctgcggctttcttacaaagagctaagtacaacaaattaaaatctattttaaacaaggacgctacgttggatggtggtacaggattggtatcttgactatctagacaggtaaacaaactatttcggtagggattagacagtgttgtccaatgatgaactaaaactaaaagtaaaagtaaactttgggtcgctagcggagcttcttggtacgaatactcgtctgaatctgaaatttcctcgttggactttttgttaaaagtcaatactgaccaaatattggaagccaaatttaataccatactgtttccatcgcctcctgaaaatcctggaggcattttttgctgatctatgaaattggtcatcagacgtttgactagtatgggagcatgtattacatgttttcctttcatcataagtctatacatgatactttggtctgatctaccaccggaatgatactgaatagaaagacaaattaaaagacaagttgcagattctaggtgtattagatatgtggaatcctctataggtacatcaactattataccaactaaagcacctatgaatgcttccattgtatttccactgcccttgaattctatatgcttcattagatcgtcttcccttagaatttctgtgaaaaatttcaatacgcatcttatcaggaacaaaatgttgtacagttgccagttaaaaagatttgcttgtgttgatgtagatgataacaattcagtagacctttccagaaatatttgaataagggtactaaaatttccagaggttggattgttcttgactagagcttgtagaagaggttcaattcttgtttctaaagacaactggtcatttaatgacgttggaggaattaagttataggccaaaaatctgttccaaaaaggatcattttttgatatgggttctgttcctacaaacctaacacaatattcgtttgttgacaactctaaatttttacttatagccttgcccattactgctactaaatttcatatatagtttgtttaattaaaatagtttcacaagaacgactagataaatattttggaagaaatacacatattctaaacattat

SEQ ID NO: 6707 - DNA, 2196 bp, Diabrotica virgifera
  SmartBlast Evalue=0; Info=Splicing factor 3 subunit 1 n=3 Tax= Aculeata RepID=E2ATB4_9HYME
ctacagattcggcaagtggtacagtccacgaatcatcttacccgtcagtttccattctgatttttctggcatatgtggaatcgaaatcttgatagctacttggctttgatgtcttgctaaaaatagttttccggtataagcgaatcttcgtttctcatttttttgttactcggttcatcttcgtgaggtgcttcagcctgatgtttcattggggacagattcataggtggacccataggtgaggacattggtgctacaggaaaacccggtattggaggaggtcctgtcatcattattggaggtggtctaatgggaggcatagatgtagctgacatcatcataatgggaggttgaggtggtaacataggttgtggtggtaccgatattagcgacgcagttgcttgggtttgaattaaagagactggcggtttgggttgaagtgaagtaggcggcttcgtagtaattacgctttgaatgttgattttaccagattttgaaccaatattctttggaccgattttctccttttcttcatcaggaagcaaaccctttaccttgtgtatttgatgaatttgttcctccaaggtgatattggctctggcagctcttgtagcggcttcaacgctactcgtatgcccatcccaagttaccttctcgtcttttctaacatcttcttcaccaatcttcttaccaatagctgtttcttcatctccaactccaaaaatatcagtacgtctctcggcgagcagtttcaatgaagcatcgatggcactaccagcagcatatactgtttcttggttcattttgtccgttatttgtttgtcgcgctgctctacccaacgcggatccaacagaccaatacgcatatgttcctggactttgttcgcaggtattttctctccagtaatgggtgagacgagaaagtcatctccaattgttggccgactaacattgacagcttgtttgggatcatattttttcacgacaactttatcaggaataggaggtaacggtggttgaatagatggtggtggtggaggtaaagctaattcctcttcttcttctttttcttcatcggagctttcttcttccatatcttgaattctggtatcgtcgcgtgtcttccgattggttttgtcctgcatgctgcttaaaccagcttccataactggtggttcttcctcatcactctctaattgcatttcgatatcttccccttcttctatcctctcttgaattaaaatacgggctccgacttcttcaggggtagttggagccggaaaatttccaatttcgaagggttggtagtcaacagtttcgacgactacaaactcatgccagtcaatttgtgcatacgcaaccctttctcgttctaaaagctcctcttccttagctttttgttgctcttgatacttcaaccattctgcacgatatttgacttgctctaacacattcttcggactattagcctcgtttcgcaggctttcatgcatactttttgggggaataagaacctttgtatattgctccagtaatttggtgaagtattgaaataaagagtgttgaggtctcaaaaaatcaaactgcagatttctctgttctctattcatcaattgtgtcagaaaagctctaccatttctagctacgaactgagctgtaagcttaacaatatctaaatctagagctgaaattgatgggggatcagctataaattcaaattctgaaggtgtttccttgggtataaagggctgttctacttgctttaaaatttcttgctgtttctgttgagctgatgcagtgacagaaagttttgagacggcttgagttaatccaggggtaggatcttgtccttttccttccctaaagtctttaactttatgttgatagtaggaatggtaaggatccccactgtttaaaaaattaaacttagggtttcctaactcattttgtctaatacgagcttcaaattctggaccatttctagcaacaaaacttgcagttttgtcgacaatatttctcacctctggtggtggataaataattcccacaattggatttattgggccaggttcctcattgttgttgttattagttgactctaaaggagccatttagattgagttactttttaaaaaatacagtcaaaatatattatgtagtttagatttaaaatgtacaacccagtgtgcgtcttgg

SEQ ID NO: 6708 - DNA, 2193 bp, Diabrotica virgifera
  SmartBlast Evalue=7E-80; Info="Lightoid, isoform B n=1 Tax= Drosophila melanogaster RepID=A1Z7S3_DROME"
ttaaggtagtgattattcaccactctgctccggcagaaaagtcgatttctacagttttagtttcattgaacaaaaataaaacttatcttacagttgtctgcctcttatcagctatgagtagtgaaggtacagattctccaaagatttaaataaattacttctttatgataagtgttatgggtaacttgaagtcccagtgagtttgtgttttacgtgtacctaatgtttgtcacgctagaggtggagctattattgtgaaatgtccaatgcaaatcagtccaccagcaaaccaaaggaccacttatacaaaatcttggtaataggagaccttggtacaggaaaaacttcaataataaaacgctacgttcatcgatttttcacgcagcattacagagctaccatcggagtagatttcgcgttaaaagtactcaactgggatgaaaatactctcataaggcttcaattatgggatatagcaggccaggaacgttatggaaacatgacaagagtatattacaaagaagctgtaggagctttcatagtttttgatgtgacacgtaagcccacttttgaatctgtagcaaattggaaggcagatctcgacagcaaagtccagttacctgatggatcaaagattccctgcgttcttttagcaaataagtgtgaacagccaaaggaaggaattgctagcagtccaaccaagatggaggaatattgcagagaaaatggtttccatgcttggttcgagacttcagctaaagataatattaatatagatgaagcagctagctgtcttgtagaaaaaatattagcctatgattcagtcataaacagtgactcaaagcgttcctcagatcaattttctttaagacgagatagtgatggaaactcatcatccagaagaagttgttcctgctaaaaaaagagctaaaccacattgtgtaatattactttatttttaatagcaaatactattgttcaattcacttcttaaacagatcttctcatatgtaaatagtacccactaatcgcaaaacaagtactgttacacctatctcataatggaaccaacataattcttagaaagttcaagaattgtctaaacctataccgcacacatcttatggagaatataatgtcaatcaaatgcaataaaatttacatgaatagattcgtctcgaaatcgcaatcatttcgtatcgttgcgtcagctctgaattatgattaataacataatataaattgtaattaaagtttatgggaatagcatttttgaagtctataaaactgtcattcataaattataagtcgattagaggaactataaacttttgtacaactgatcaaattatacacactatgagataagggtaagcctatgtcttaatacctgaagaaagatttatgaactggtgatttacaaaatcttttttctctctttgacacacgtacattcaaatttgattttagatttatttatatcaatttacgccattattaatcaaaattcagagttggcgtagtgatgtgaaatgattgtgatttccagacgaatttattcgtgtaaattttaaattttaaattttaaaaataaaaatttgaattgtagagaaacactcattgatatttttcttaccacaagttataaacagtaagtttgtttaataattaaacatttttttcgaattttcttgccaagtttttggtttttaaacctttccgaatgtattgcatttgacgattattatcaaaacacagagtcttagttgatatggatacggttttagtatatttggaatatttggcatatagcaggtctgcaaaatctaccatcgtcttaaaaactgtattcttctggaatatttttagaattgattgttgtggaggctttcctctacagtttaacattaaaatgtatttattcatgagataaattgttcctattagatcttttaaatgagataattattgttttattgccttaagtgacctagtaatacaacctgaatactccaggcttctccagccaatatacaaatacaaccacaactgaaataacttgtaaatgtacttgttttgcatgtggtgtaagaaaaagttagtatgtacttaaatatacttttttcaagttttggaacctggtcttttagataagattgtagacagttttctttgtattcactaatagataag

SEQ ID NO: 6709 - DNA, 2191 bp, Diabrotica virgifera
ataacaagtggagttgacaacgcttctaaaccttatatcaaaggcctatcgctcttccgtgtcgccttaaatttaagggcataaaagcttccgaaattcttatcaaaatttgagccttgctttttattatctatcggtaagccaaaaggagctatgcggtcgtttggcttcaaccggcaatttttatgcttacttttttaagtgatatactgttttagtcatgtattgagtaagatattagttgtaagttttttgcttcaattattttggttataacagcagtttttagataaatggtatttctactgaaaataagattgattgtaagtgtgttggaaatttcacaagatgtaacttgtatgatgaacaaataatatatttttggtcgattttgctcatatttatttgtatgtcttatacgcgtttttaaagtatgtacttgatcagtcttgattttggtaaaaataactatattgtattggattttgagacaaatgtcaattgtcaactaagtgcataggtacagtttgtcaaacctagcaataagtatgaaaatcttacaatcgccatgtggcgttatggcaaactgtgctaataaggataaagcaatgaaacgttagaaaaattgtcagtgtttgtaatgaacttttgccctatgtttgatgtttgacaattgtgtacttatatttgtaccaagtcatgtcaagttcatgtcaccctgaataatgatttacttttacaaaaagtgttaatattgccaggttctttcgatttagactaaaaatagttgttaaaggaattgcaaataatgaagacaaattataacacaaaagacgattagtcaactgaaactatatttactactatgtactacatttgcagtattcgaatgtaatggaggtatatctaaaacaaagtaaagttcttctcagagccttttttcatttcgtcatgaattttgacgtcataatataagtataagaatttctggaatcatttcatgacattttagttaaatctgactgctgtcagaatcgtaatcagtcaaatgtgaaaaagttattgcattataacccttttatttgcaatttggtataaaaacaaatcaagagtgttgattgagtttataagaagttcttctttgattcgtatactcgcatagattgtatagattacagtcgtatatattacaggtaaatcattttttccgactatagcgccatctatcaaaactagaataaatgcgtgcctttttttctgtctctttaaacttaatgcgttagaaagaaatcgtgacgcactgaaagaaggctctgaagagaacagtagcgactacaagaactgaatatgtagttaaaaaatatgtactcgtttcaaaacagttttcacatagaagtgaaaagtgcaattgcagaagctacaagtaagaatgacagcgacatgttaatattaacactagtatttaaataccgactgaatttttgctcaactcttttttgattacttaattaatcttttttcgctgaactttagtatacgtttaattataagtattctgtcattgtacattaataatgttagtgttgcaaaaattactgaagacaacaggttaggcatacattttgtatgatgcaaaattcaagatataaatcatattcgctttacttctttgagcacattttcaaagtaataaattgagatgtattcgctttgtgcgtgaccatggtggggtactctacaacgatgccagcgtgagtatcggcgaaatttgacaatattggaggtatctttgtattgtcattgtttgtataaaaaatttgattgtttatttatggtaaataaatgttgcgtatttaattgtgctaataatagccaaaaaagtaagcgtaatttttatagatctccaatgatgacaaataaattagagaaaagatttaaactagtaggagtaaactcaaaatacagattcacaccaaataatgtcactataaaattcaccagattcatcttcttttttggttaaccttgtcagccttgacggtaatcccgtaatcagtatcggacaacttataagattaataacaattcgctatagagttctaaatacaacaggttttttatctaaatgcagactaaaaataaaagaataactcaactatattcaccaaagattcacaccaaataatgtcac

SEQ ID NO: 6710 - DNA, 2191 bp, Diabrotica virgifera
  SmartBlast Evalue=1E-134; Info=Hepatocyte growth factor- regulated tyrosine kinase substrate (Hgs) n=1 Tax=Aedes aegypti RepID=Q17AG0_AEDAE
cagattctttacattgatcattgattatcacaaataattaaaatcattgattacatttcgtgcaggtttttaacaaaatgtcgttgtttcgaactagcaaaaacatcgatgttttacttgataaagcaaccagccatttgttgatggaacccgattgggtatctacgttgcaaatatgtgatttaattagacaaaatgatgttcaacctaagcaagtcctaacctcattgaaaaagaaactaacttcccaaaatcctcactcagctttgtatgctctcttagttttggaaagtttggtcaaaaattgtggtactgtagttcacgaagaattaactcagaagacatactgtgactttttacatgaactggggagaactacaccccatgaaaaggtccgtagcaagctgttggacttgattcagacttggaattatgcttttagaaaaaatcccaaacacggagctcttaagaacattatgaccttgatgaaggcggagggttataagtttccgacattgcgggagtcagatgcgatgttttcggctgatactgccccagaatgggccgacggggatgtttgtcacaggtgcagagttccgttcagcatgatccaaaggaagcaccattgcagagcttgcgggcaagtgttttgtggacagtgtacgtcgaaaacgtcaactttgccgaagtacggaattgaaaaagaggtaagagtttgtgattcatgttacgatgaagccacgaaaccatctgcagcttcaaaagcggccttatctaaggcagaatcagagcttccagaggaatatttgaagagttcgttagctcaacagaagcaggatcctcccaaaaagagcgaagaggagttacgagaagaagaggaattccagttagctttggccttaagccaatcagaagcagaagcaaaagaaaaggaaaaatttaagcatacaacaaatatttataacgttaaagtggaaccaactccagtcgtagaacgaccacagactccgccacagcaggaagaaacaaatccagagctagccagatacctgaaccgatcttattgggaatctctacaaacaaacgaccaaaacgagcatggccgtccagcaagcccatcggctccagctacggctcctacccaaaatatcgacataattaaatataaatcaaaggaaaacggtttagctgacaacgatctagaggaattcatgaaaactctcaagagtcaagtcgacatatttataaataggatgaaaagtaattctagtagaggaagatcaattactaatgacaccggagtccagacgctttttatgaacatcacagccatgcattcgaaactcttacattacatccaggagcacgacgatagtcggattcactatgaacgactccaagacaaactaacacaagtgaaggatgctcgcgctgcattggatgctcttcgtgaagagcatcatgaaaaattaagaagggaggctgaagaacaagatagaatgcgccagatgcaaatggctcttaaactagaagttatgaggaagaaaaaagaggaatatcttcaatatcaaagggagctggctttacagcgaattcaagaacaggagagagaaatgcagatgagacaagaacaacaaaaacaacagtacatgatgccacaatttggatacatgggatcccctgtacatggacagccattccccccgaacacagctccacctatgggtaactataacacatatccattcccacagcaacatatgataccaccgcagagcgctccaggacaggtacctaatcaaggaccacctcatggttctttgcctcctcaacaagcccacaatccagcacttggtcatccgccaggtttccctcaagttccaacaccatctgctacgtccatgcctaataacccccattcccgctatgttccacatggagtcccatcacaaccaatgctaggcactgcaaatcctcctgttgggatacctaacatgccacctggacaccataatcaagctggtatgccaagtcaacatcaaagtggtatgcctcctcaacaaggtggaatgtctcaccaaaccggaatgcccccacaaggtggaatgcatccgcaacaaggtggaattccgcaaaaccaaggattgccacagcaaggacaggtggcgccacaatttcagcaacccggagc

SEQ ID NO: 6711 - DNA, 2187 bp, Diabrotica virgifera
  SmartBlast Evalue=0; Info=Ribosome biogenesis protein TSR1 n=1 Tax=Culex quinquefasciatus RepID=B0W236_CULQU
cgaataacagcagatttcttgtggattttaaatggataacctgacaacactatcctcttcacgaccaatctgtctgggttgcaggagagtaaactaccggtagccacaagaacgagcctgttatttacttctttataacataaaacgggcgcaggagggaactgaataggtgcgtagaatgtcgctactgccgtcgcatctggttggaagtatctttcaaacttatgtttttggccgttggtatgactgctgaaaatcggattgacaacaaatcttctatatccgcactggaataccaacctctctttcgatttgatcggcaaactgtagttttgggtccttcttagcacaacattgagcactgacatcttatgctcatgaggaaacatacctatcagagtcacaggtgcgttagttttttggaaagtctcccaaagaagctgtgaaactgccttaacgtgaactgtaatataccaaccaggcaaagcgccatctttgtcatcttgttcgcttaggactctctttttggttctgtcaaagttttggaactgaaatatccttgcatagtcgcttggaagattttctttaggatcccaaggtgacgttctgaaactttctagtcctctatatttctggaacctctctctggcaggcacttcaaaaggtgtatcgatttcatccggaaactccctgtcacttttagctgccttcagtttgtccaactcctgcttttcggcatacaaatccatttctttatcatatttgtcgtcattcacagccacttccgactcggttaccgaagcaaagtctttatcttctccttcgtctccagaaacgtcggatttttcctctgacatggcgtccatgtattcatcgtctgattcggattcgtcttcatccgaattgtgttcctgaaattcggcatcgtcttcaggaatccatgctgcttggtagtctgaccatcctttgggaactctcttcacttttcttagcttttgttgtttatctgcagcctccatttcttcttcagttggccacgtctgctctgcatccattggatcaggcacattctcggcatccagagattcttgtttcaatggatcactccgttcaagtacacggatcacttgctgctcttctgattccattgtgtttgtatctctacttttcttttcatgtttaaaaggatcgtttggagcatcaatctgagacatctggaaatctcctaatccgggaatatgaaccagctgatttacagatagtgcagtacctcttagataaccactaattttaaggttcctagagtaccttccgcatctggaacatactcaattctctcactaaaaatatgtggtcttcggtctctatacaataccgattttcttttttgacttccaattttccgtaaaacattgactccatccacgtatttatccatcactaaaactttctcgtcaggcaaccatttgtttactaatttttgaatttgttgtttgtggtcattcctcctctttggtacaatgctctctagatcagtaataacaactagaggagttggcaaaccctgtgcaaacgaagacgataatatagaatttccccaattatcaataacaacttcactgtcctcaattcctgttgcagctgatatcaaaaagagtacagtatctgctacttttaaggtatctaatatagcaaaatcatgatctctatcaggaacaacaaattcaaacctctgtttaaatcttggtacacttaaatgggtggctcctgttgaagatttggatattatcgcttcttcatcgcattgacaaagtaacgttaatgccgtattagggtctatatctttatttaatggtacaacgcatactaaaaaaggggcaaaatccagacctccaagagatcgttttttagacagaacttcatctctcttgttttgtctaatttgtaccgcctgattccgcctttcgcctctatttagttctcttttattacgtttagacaggtttttaactgaaacctttccttttgttgatacgcttatcgatccttttgagcggtgtcttccatgtttatgttctttattggtctgcttgtaagcaccaggtctatgagctattcctttttcaagggccattcttattatttcgtaaaaattataaatattgtacaaagcacatggtaaacatc

SEQ ID NO: 6712 - DNA, 2190 bp, Diabrotica virgifera
  SmartBlast Evalue=8E-87; Info=Epithelial membrane protein n=1 Tax=Aedes aegypti RepID=Q17PS1_AEDAE
cgactaaacatcagtcggcaagtgcagttgggttaagattagtgaggttaggaacgaaaagtgaggttaacatgaagatgtttcacgaaaatgaaacgttgcgcgaggatgatgaggacgaacaaccgaaggagatttgtaggaactgctttatggagaggaattgtaaccagatcttcgttaaaggacctgctcttacaaaagaaatattggagaaggtcaatgctgagatagtgccgaagagaacttatatttttggatatgagatgaagactaagagagtattacttactgctggtctgtcccttctattctcaatgagttttcttggaacaataatgatgtggtttaccgaatcttttgacaactttttggtatcgcaaatggctctttcaaataataccgatacgtttaacatgtggaaaaaaccatcagtacatgtgatatataacgtgtatatatttaactacacgaatgtagaagattttagagaaggatatgcagagaagttgcacctggaagaagttggaccttatgcatatgaagaacatctcgaaagggttgatttggaatttccaactgataactctatctcctataaagaaaaaaggaattacgtatttaagcctgagctaaccaaaggccgtcagaacgatcagcttattgtaccaaatatggcagtacttagtggagctgcctttactaagccaaacaactactttcagcggttggcattttctggtttgctatcgacaatgaacgaagaaccatttttgacgaaagctgcagattcctttataactggatataaagatcgtttatacgatatagctaaaacttttatgcctgataatattccgcaacaaatgggtgtgttggctcccaaactcggtcaaactccatacagaattactatcaataatggaaaagatgatattgatcatttggggatagtagaaaaatttaatggagaaactgagttaaactattttgctggaggacagtgtaacagtatcgaatcaacagacggcgcaatacacccaccaagaaaagtccagaaaaaagaacctcttcattatctcttccctgaaggatgccgacgatttcctctaatctttaacacagaaaccaccgtgatagacggtaaagtcccagtttatcaatacatacacccagaagacttgttcgactccgctgatgagaaacccgaaaacggctgtttttgcagtatggatagcgctcaatgtcctctgaaaggtgtttacaacgcaactgcatgcaactatggttcaccagtgttcgtgtctcatcctcattttcacagaggcgatcccagtctaacaaaatattttactggtctacaccctgaaagagattttaaatcatatttcaacctccaccctacgcttgggttcgctatttctgcaagaaacatgatgcaggttaacgtccaggtccaaaaagctggagggatctctcaggtagacatgtttgaagatggcatgttgttacccatcgcttatttggaagcagtactagatgacaaaagaatcccacaagatgtactagatgtaatatatctagtatcatttaccgtaccatccattaaattagctctacaatatggctccctacttacagccatcatcaccatgatttcgctcatcctcgtattaagaagaaagagctcgccaaagattcttcctaccagacttcttagaagcaatcaaaattactatgaagcgagctaaacatttttatttcttacgccaaatttttgttcaatatttgaacatttgagaaagactgagaaccttctggggaactacttaaaaatatttatttattttttttaagaaaacatgagatgaggttgagaatgtttcgatgaatgggatcatgataacgttaagttggattttagctgataaattaatttttattgtattcatttatttaacacttattgtataaattatgttgaatttatatattgcagcctttctagtatccttttgaaccaactatctagatttgcttcaccatctgtatctctatttattattaaattatacttttagcaagacaagcgattttccatgaactctcttaaaactgccaatacagtttacaaattttaagaaattctctcttatttctactaaagtgataacacaccgatttataaaa

SEQ ID NO: 6713 - DNA, 2182 bp, Diabrotica virgifera
  SmartBlast Evalue=0; Info="GMP synthase, putative n=1 Tax= Pediculus humanus corporis RepID=E0VNC1_PEDHC"
aaataaaaaaacacgaacaataaaacggaaaaattattcgcaaacaatttgtcttaaattatattacttcacaaaaaataattacaattagcgagtgtcattcccattctgtcgttcctgggggttttggtgttaaatcgtaaagcactctagaaatacccggtatttgcaccacttcctgtaccattttttgaaccacctcaacagggatttgttttcctggtatagctggtacgccagtcatgaagtcctgggtacagaaaggacgcaaaaccactgatctttgacacgaaggaattcttaacgcttgatccctatcgaaatgcaaaggaataagcacaatcggcatttgactaattgatcctgagtatccgctattatgtagtatcgtagttgcgacatcatcacattgccttaaagtacccaaaacgtgagtagtgagataagtaagtgtgatatctggcagtggctccttcacgatacccccaaatatgtaacataccctatttacatttcggcatattcttggtattagagaggataagaaagccagatcttcccaatcgggttccttgtcggcggatatacctactacatagttataagaccgacaatccccttgaactccaacgctacgaatgggaagaagggttgctgctaatttttgtttactagaaatttgacttaagatatccctttcttcatcgctaataaatccttctactctatttaataacgcgtgtctcttctgcaacatttgatgaaattcaactataattttcactaaaacttgagtttctgagaaatcgttttccatgtatggttcatcggcgcataaaactcttatagctaaaccaggaccgggaaaaggatgcctcattactatctcgggaggtaaacccaaatccctaccgatggacctaacttcgtctttatggaaatctttgagaggttctaccactcttccttcgtttctaagttttctaataagttcagaatcattgtgatgtgtctttatcgtatcggctttcgatgaaactaacttagaagccgattctattagatccggccttagagtaccttgagctaagaaaacctcatcagctttgagattaagatcggcgactatttcgtcggcgattttgacgaaaatgtcgccgatgatttttcgtttttcttcgggattcgtcgtgtggcacagcattttcgttatcattgttctactgctttcttgtttgtctactgggattatcgttgtaccttccataaaagtcgaagctgctttgattacttttacatcgagtcctattttaagtaaggagttgtgaactttgctactttcgtttttccgcataaaaccattatctatgtgtatagctataatctgagcgggatttaaggctttgtgcaataaagcggcgcacacggtactatcaactcctccgctaagcaataagagtactttattgttacctacagtttcctttatgtatctcacacattctgattcacgaccatccatcgtatagtttccggtcaaaccggcaatatcgaacagaaaattttttaacatcgttttaccattggcagttagatctacttccggatgaaattgaacgccatacaattgaagcttttcgttgcagataccggcgcaaaatgacgaactttgtgcaatcggtttaaaattttcggctattttatctattgcatctccatgagttagtagtacaggctgaattttgtcgagacccttgaacaacaaacattttgaattaacttcgatattataaattccatcttctctcgtttcttttctaatgactgtccccccaaattctttgttcatcatctgcattccataacaaattcccagcacaggtaaacctattctgaaaatatctgcatcgtatctaggagcatcttcagcatacacagaattgggtcctccagaaataatgatagctttgtaaccagcttcttttatgttgaaggctggggtgtccaagggtatgatctgagactccacacataattctctaacttttctatcaataactttgccatactgtgcaccagcatctagaatacacactctctccgtattagtggctccgtttacattgacataaggaccgtctgggtttaaattgtgcatagctataattacagcctttactac

SEQ ID NO: 6714 - DNA, 2178 bp, Diabrotica virgifera
  SmartBlast Evalue=2E-90; Info=Ubiquitin-conjugating enzyme E2- 24 kDa n=1 Tax=Camponotus floridanus RepID=E2A970_9HYME
catgagccaaaatttgtgaaaagggagtgtaatttgttttgagttttatacattaaaaagtcgattaaacgttttaaacaatgtcatctgctggctccagtggatcaggccgtggaagaggaggacaagctgctgtaggtgagcaaaaggaaagtaaagaatcaaaacctaatccgaaaatgtcaaaagctcttggaacttccgccaagagaattcagaaagagttagctgaaataactctagatcctcctccaaattgcagtgctggcccaaaaggtgaaaatttctatgaatgggtttcaactattcttggccctcctggatctgtttatgaagggggtgtgttcttcctggatatacatttttcaccagagtatccgtttaaaccacccaaggtcactttccgcactaggatttaccattgtaatattaacagccagggggttatttgcttagacatcttgaaagacaactggtcaccagctttaactatttctaaagtgttactctcaatttgttccttgcttactgactgcaatccagctgatccactagtaggcagtatagcgacccaatacctacaaaaccgagaagagcacgatcgcattgcgcgattgtggaccaagcgttatgccacgtgattctacttccccctaagacatagcttcacacttccatctttcaagatcactccctttgccaaacagaatggcaaaaaaattcatctttatcatttttcatttaggttaggctatgtgtagaattttacgctgaaacatattaaatcaagatattgtttaagttcattatacaatatgtttagttttcgattagatataggggactgaaggaagcgataaaatcggaaacattgcttataccactatcgttgtttactcgccgaatgatggcggaggacgaagcgacggagttaaaatcggcgagaatcaggtgcattagcgtgggaagtggggaccgtctaatacgcgtgcagtgttgccatttataggtcgtatatctaatttaaaactaaacatgctgtatatgtatagatcaatttgttgttaagaattcaacaaaatgcaatatttatcgaagggagcagcgatttttttatatttgtatctttgttttgtaacctctctttcattcaggtaagtcatataataagaattaatttaaatttcaaaaaattgaaagattgacattgtatagttatgtgttggttgtgggttgtggttgtggagcattcacttgaaaaccaacaatagtagtacttgtagcaataaaaataatatgtgctgacacttatgttccttcttaattttattttttctgtgcaagttcaaattctctaattttagcgtgaaatgtaaagagaaatgaggaaattaaaattacaccagcttattttttaattatgcatactaaattaatttaaacaatatcttgataggatttatcaatgttttcagaattcttacacgctaacctaagatttttgtctgtcttcagtgttttgcatacttataaccattcatttttgtttagtttttaacggaataggataaaataaatttttgtgaataaaatatactctttttaaagagaaaattgtataatatagtctcgtcatttttgtttttaaaactaagtgtctggaaaaatggagaaatatgtatggacgagaaacttcgttgttttgattattgcttagttgtaaaagaggatacatattgtaaccaaaaagtgttgctgagagtatgaatccaattataacctactattgtttttctgcctgaaatgtctcactgcatttagtgagagtttcggcataaacgcattagagagtcgtggacgcgataatcacgaacaatacagtagaagacttgagattcgcattaaagattgaatcaaggcctcgtcccgtccgcgactttcaaatgcgttcatgaacattaaaaacaacgtaaagaatctgagctagactagcccgcgacgagtcgcgtctgcgactctaagagtaagaacagaacaagtgggtcgcggtggaggtcgcggtcgctgccgatatccatgtaaaacaaacacattgtggcagagaacagagcaggtaagtcgaggtggaggtttagcgcgatgccatccaggaggtttacatcgatgtcatccaggagg

SEQ ID NO: 6715 - DNA, 2180 bp, Diabrotica virgifera
  SmartBlast Evalue=0; Info=Probable nucleolar GTP-binding protein 1 n=1 Tax=Harpegnathos saltator RepID=E2BWL7_9HYME
agctacaagtgtagcacgtgggaaatttgtcaaaaacatatttgcagttaaatatttttttatattttcaggcagtaaagttaacaacagattttcaaaatgtctaatatgtacaatttcaaaaaaatagctgtagttcctacagcaaaggactttatagatattatattgtccaaaacgcaaaggaagacacctacagtagtccacaaacaatataaaatcagtagaataagggctttttatacgagaaaggttaaattttcccaacaaagctttcatgataggttaacacagattttgacagagtttcccaaactggacgacgtccatccattctacgctgatttgatgaacgttttgtatgacaaagaccattacaaattagctctgggtcaattaaatacggcgagacatttaatagacaatgtagcgaaagattattgtagacttttgaagtatggagattcgctttacaggtgcaaacagcttaagagagccgctttggggcgtatggccaccatcatgaagagacaagcagctaatttgtcttatttggaacaagttagacagcatttggcaagattaccatctattgacccttacacaagaactattattatctgcggtttcccaaatgttggcaagtcctctttcatcaacaaaatcacaagagccgatgtggaagttcaaccttacgcattcacaacaaaatctttatatgtaggacacacagattacaaatatttgcgttggcaagtcatcgacacacccggtatattggatcattctctcgaagaaagaaacgttattgaaatgcaggctgttacagccctggcgcatcttagagcttgtgttttatactttttggatctatctgaacagtgtggacataacttagatgaacaagtaaaactttttgaatcaatcaaaccattattcgccaacaaacctcttcttcttgttgctaataaatgcgatataatcaaattagatgaattgccaaaggaaaaaaggaaagttcttcaggagatcgaagaagataaacaattgactgttatagaaatgtcgacagtagatgacactggtgtgatggaagttaagactgaagcttgcgagaaattgttgagcttccgagttgatcagaagatgaggtccaaaaaggttgatggtgtactaaatcgtttacatgtagccacgcctaagcccagagatgataaggctcgtcccccatgtatccctgaaagcgttttagccaagaaacaattaataggagaaaaacgtaaacgaaaacttgaaagagacatcgaaatagaagagggagatgactatgtactggatcttaagaaacattatgtcgatataccagaagaagaaagacatgatatcataccagaaatttgggaaggccataacatcgctgattacattgatcccgacatttttgaaaaattggcagaattggagaaggacgaggaatacagggaagaaaccggtatgtatctggtacctaagatggaactggatgacaccatgaaagagattaagaagttggctctccaaattagacacaagaaggccatcattaaagatgaggcaaggattaacaaacaaagtaggaaacctgttatgccaaggacggctggagctaaggttagaggaagatcagcttcaagacttcgtgaaaacatggctgaattgggtgttgacctttctgataatgaagatgctcattacatgaatactaagcaaagaagcagatccatgggtccaccagccaagaagatgaggatggaagtgagcgacagtacctctctgaacagatcaagatctttgtctaaacctccaaggaacgaaatgggtgtgaaggatgtagctatgaagaagaaattggccaagatcgcccacagagctattgccaagaaggtcaagaagatgggattgaagggtgaagctgacaggttcatcggtaacaaaatgcccaaacatttgttctcaggcaagagaggagtaggaaaaacggataggagataagtcgaagaacatattattatactgggagaaaaacgattcgtgttggaagtgtgttttggtagaaccataaaaatgatgattttgttattttattatagaacatgattagattgtttgtaattttattgataataaataaaatgtgagcc

SEQ ID NO: 6716 - DNA, 2179 bp, Diabrotica virgifera
  SmartBlast Evalue=4E-34; Info=Jerky protein homolog-like n=11 Tax=Eutheria RepID=JERKL_HUMAN
aacaaaagcagtttaaattcaggtaaaatagaaacaaaacagattcaaaattataataatgagattttattacatcttgtgcacaaactctacatgttctcattagatatacaatttctctccaactattacaagattttggttaataatcaatcaattcaaaatggaattgaacacaattccaagttttccataaaaaactgtccaaaaatgaatatgatcaattctgcaacaacttagttaaaaataaaaagtaaaaagtttttcgaaagataaaataaagaaagaactgacaagattttattgatcaacaatgttggaatacagtggaacctcgataagtcgaattaatcgggaccgcggccgatccgggttatccggagaatatgataaaaattaataaaatacggatgcacagtacacatctaaattacgtatagttgtaagagtattgttcatttcttggtaaaaatctcagtcagtttctgttgtgtaaatttcgtctgccgcttgcgtgctgtgcgatcccgcactctcttcaacataagcagttcagccggcaatgtttctgccagccgctcgaaataaaccattagtgcgtctaattgggtcattacatctccatgactcatcactggctgttcaatgtcccgtctgcgtcctcagcgtctgattcactagcatcaggtaaacacaatgtgatcactgcctcgtcagtaagtggcgcataatctccgttatctgcctctaaccacagattaatgttactttcatcgacttcagagcaaccgtcaatattttggaacatatccaaaagttcttggggctggacctagtctggcgagtcattttccaggtaacagttctccactggttgaattgaattttctggcaagtcgcatacatgcttccatagtttttctaacattatcaagctgattgtagtcacttgttcccaagattctgcaatcatataaattacagttttgacattgaacgttttgagaacctcaactacaccgtgtttaggattgagtggtctagccatctttgtctgtcacatgcgcgggatcgcttggttaaaagagatagatagaccaccgatcgactgtttccatgctgtttccgcgttacgcttttttggtgagtatgccaagtcaatggttgtccttcatcttctatgattgtgcttgacatctgtcttctgtaaaccttcttgattttctcgagaaccccctcgtccatgtgtaatataagtaggacactctgtatagaataatatgttttaagttaattttaaataaccttatgaaatgtgtactattggagtgacattgaccgcaggtgaacttagagacgtgttgttgtgattaacaattgaatataaaatagacgacaaaacatatgagaattcaattatattattgtacatagaattgcgacatggtttggctgatttaatattattgtttataatacacttcgaagacttgtaaataaagtatgttgtagcagatgaagtagtaattatttaaataaggactataagggttatttgagtaccaaccctttaagatttccttacacatgtaatagcgctgttacattaggcggcaaaatcttgacggtaatgtctccactgaccagcacatctgctgaaggatgtaagggcgcattatcaattattaggacagctttaattggcaacccacagtcttttaaatattttgttacacctggcacaaaacaatcaaaaaaccagtttttaaaagtggtgctgtccatccatgcattcttttgagactggtaaataatcccgatttacgtttttcagtgctcgcggattttttgcttttcctattaagactagaggaaatgcttccccaaagcattgctgcaggccattattgtcaatcagtctttgctttttttgtatccttttgcggtttcttcagtttttgaggtcaaagttttgcttggcaacattctgtaaaacaggccagtctcatcggcgttataatatatttgatctgccgttaaattttcttctctcacaaaatccaaaaacttgtttttatagtcatgagcagcgttgttgttcccagatagactttctccagtgatagatagttggcgtattccatgacgtttttccatctatccagccaacctcgactcg

SEQ ID NO: 6717 - DNA, 2157 bp, Diabrotica virgifera
  SmartBlast Evalue=0; Info=Pro-phenol oxidase subunit 2 n=3 Tax= Tribolium castaneum RepID=Q49I38_TRICA
tagcagtatcaatctttaacatttagaaaaaatattgaattaattgttctgtcttggcctgaaagtcctgttggaaaatcgaataacaacatcttgaactctcatgttgggagtaaggaattgctgcaaagtgtcaactccttgtctaggttgtctgtcaaatggataacccatggaacgacggtctgggtacaaacggtccttaacaccacagaatgagtcggcatcgttgcaaattccagtaatgtcttggtcaatcctgtcatcatcgatatttgaaatcataacaaagagctcgcatctgaatcctggattgtcggtattacccattggaattaacatgtgttgtggccatccacaaccgcagaagttgaattgagccaagttgttccaccatcaggtctgctggtgtccaagtctctgaaggttctgtcaaacggaatagtaacagatgaatcagttgaagcgcgagtgattgtgttcgaaccttgtctcaaattaactctgaatctgtcgagttcaatgaacatattcttttgatccctgaataaccatggattgcccctttcatcgaatttgggagccataaatattctgcaagttgcttgtttggcagctccagagttatttacaacgacacggtaattgtatgcctggtggttaaggtgagtaaacctaatgaagacaggaccacgtggttggaagtccatacctctggagagatctacatcagattgttgccagaatgtattcaaggcgttacgtgtacctcctgattctatgctgacactctcaacagtaactccagggttacttagctgggcttcggtatacctcggcaatgtagacttgaattgctggaagatgtcatcaatataagaatgccatctgtagaatacaggatctcgcatagctgtggctgagtcacccatgacaccaaatgactcaagatgtctatgatctgggtcatgaatataagaaataaagacgtgtcccatattgtgcatgtctccgtagaattctctgttgggagaaaggatgctggattcaatcatatttcccaaagtatcaataccttcgttttcagtaagcgcaacgttggttccgtcagcccttctagcatttccagaatgaatggcgtcaaagattctgtccctccatctttcaagatcatcgatatcttgagttatctgatcagtttctcttctaaggttggagagtttctggttagctacacgagagggccaagatctactagacaccaagctgtctagttttgggaaataagcttcagggattgcttttctccagtcaatgaatctttcgactcgttttaacccatgacagagacgttcataattatatctggcaacaatttgctgatgcatgtaatagaaaagttctcctctcctattcttattgaccacatcgaaagcagcttcgaatggataaaccaatgccaatgccaatggtgaaggttaattcccaaatcttctctgaagtaagctaaacgatgttctggttccaggttagaagcagtaaaatctcttggtatttcaattggtgtccttgaattggtaggcacaatgttggcttcttccctagccttggcgaatactttactgtcgacatatttgtcggggaacgacctaatgaaggatggcaagtcgacgtcctgggtatcagctctatgcaacaatgcaaccgaaagagcatagttgaacaagtaaggattaacacgatccctggtataacagctactgagagaagatcatcaacgttgcgcatacctatgtaaatgttaataagttgtccagcaatttttctatgtttcggcaagaaaagagagaaattctcgtctcttcttaactccaaaatctcacccaatggaggtatggaaatagtgtttacaggaattttacctccttcagcttcttctccaaatcgagacacaatctgatttccaacattttgtattgatctgtgatatattctttaggaacgtcaaatacagttttgtcatctcctttgggcatgatgaccagctcttttggtctgtcaaagagcttgacaacatttctcttagcactggtagacatgttaaacaacaatggtgcctgtacttctttagtccaataaacgaatatgttaactgag

SEQ ID NO: 6718 - DNA, 2175 bp, Diabrotica virgifera
  SmartBlast Evalue=6E-40; Info=Putative RNA-binding protein 16 n= 1 Tax=Harpegnathos saltator RepID=E2BYL9_9HYME
caagacgatttatccaacacatttggagaattcggcgatgtagtgagtattgatctaatcccgccaagaggatgtgctttcattgtcatgttaagaagacaagatgcggctcgatgcttaactaaattgaaagggcataatttgcatggaaaatctattacgctggcttgggctccgggcaaaggtgtcaaaggtaaagacctaaaagactactgggaaggtgacctgggagtttcctacgtaccatattcgaaactcaaacaagacatcgatattgatttattggaagatggcggtatgatcgatgaggaaacaatgccgcaatggatgaaagaaaaagtagacaaaggaaagaagcccgaactggaccttactggatttgtagggggcagcactccaaatatcgacaccagccaaccgccaccgctaccaggagcggggctcttgcagccgcctccgatgttgccaacgttcaatccatttcaacttaataatagattcttgggcatgaacgtaccgccaggtatgatgcctaacatggccaacatgccaaacattcctattggagtaccacctccaaatatggccggagcaccaatgatgggtaatcaattgttgggacttggatctgctttccaaggacctccaagcatgattccaccgcagatgccccctgtggagaacaaaccaccaaccttaccttccgatgccaatctccattccttaggggagagtttaatgagtttgacgcagtcctttggcgtagttcctcaaccgcctgcaccgcatgaagacaccatggacgtcgaaatggaggatgccgattccaaaccattagataaaccaggtagagatgaacactccaataaatcgaacaatagagacgatgatagaagagatagcagaagagatgacagagataggcggaatagaagtagagatagggatagagacaatcgggaccgagacagggatagaagccgcgatcgtcacagtcgggacagagacagggatagagaccgcgacagacgttacagaaatgacagagactctagcagaggtagggatagagatagacgagacgatcgccgagatagagatagagatcgtagtaacagatggggcgacagggatcgtcgggataaagattccgagagagatgatagacgtgacagggagaaaaccttaaatgatcgattaagagagatggctggtatgggaggaggaggctatgatgatagagatagaagaggagaccgatttaatcgagatagagaccaaggattcaaatttatgcctccaagggctaacagtagatcggacgaagactatgggagagatagagaaggtagacaaagagatcggtttgatagaaatgagaattctagacagagaaacgattctaacgatagaaatgatcgtaaacgtaacaatgataagcccgtacatgaagaacgggaagtcactaaagttgatgaaaagcaaattctcgaggagcaagctacaaaagaaaaagaaacaggtagcggtcaaaatatcgaaggtaattccccttcggatgatgaagtaccaccaggtacagaagatggcgccgaaggatccgaaagagcatctgaaagaatggaagacaccaaagataggccagaagctgaagaacattcacaagaaaccctacgatttgaagctccaccttccttcaatgctgccccaccgatgtttgaccacccgcctccatttacgggtccaccaccatttgatggtccaccaggagcctttgatggccctatgggtatgttcgatgacagaagaggcccaccaagaggatatttcgagagtggtccgccaatgtttaatgatatgagaggtaggggtcgaggtagaggtagaggtgggcctatgatgccgatgggtatgaatatggagggtccgccaatgatggaagggccttacaacgacagatttatgagaggtggtagaagaggaggattaagaggtccacctccaggtgatttcttccccggcgatgatttcaggcgaggcagaggacgtggaaggggtcagttcttcagaggtagaggcaggggtggttttaattctcgatttgatggcccgccgtttgacggcccgtatgatggtccgccgtttgacggcccgtttgatggtccaccgtttgat

SEQ ID NO: 6719 - DNA, 2176 bp, Diabrotica virgifera
  SmartBlast Evalue=1E-178; Info="Ubiquitin-activating enzyme E1b, putative n=1 Tax=Pediculus humanus corporis RepID=E0VL42_PEDHC"
gtgctttttgctgtatttgttaatttttttttaaatccttatttactgatttaatactggtttattagaacaagagttaaaattacagcaataaaacgatgctcgcccctaaggatgctcatgcagctgtctcagaggcaaaagtattactagtcggggccggcggtattggctgcgaagtgttaaaaaatttggctatttctggattttcaaacattgaaattattgatttggatactattgatgtaagtaatcttaatagacagttcctattccgcaaagaacatgttggcaaaccaaaggcagaagtagcccgggacagcattctgaaatttaatccaaaattgcatatcaaagcttatcatgatagtattaccagtgaagattatggggtcaatttctttaaaaaattcaatctggttttaaacgcactagacaacagagctgccagaaaccatgttaatcgtatgtgtttagccgctgcggtaccactcattgaatcaggtacttcgggttactcaggacaagtggagttaattatgaaaggagtgacacaatgttatgaatgcttaccaaaaccacctcaaaagacttttccaggatgcactattagaaatactccctccgagcctgttcattgtattgtatgggccaaacatttatttaaccaactctttggagaattcgatcctgatcaagacgtttcaccagatacagaagacccagaagcaaaagttgagggcgaaggacatacttacactgaaagtggaaatatccaaagaacatctacgagatcttgggcagagtcaaatgactatgatccagaacaattgtttaacaaatttttccagactgatattgagtatttgctaaaaatggaaaacttatggaaaactcgtaaaccacctgttcctctatcttggcagcaagcactttcacttggagggactgccgaatcagatgcagaatctggcaccgccgcaaatatgcaagtttggtcaataagtaaatgtgccaaagtattcgaatcgacagtttccatactaaaaaaagatttatctggcaaatctttcctagtgtgggataaagatgaccaacccggaatggatttcgtcactgcctgtgccaatgttagggcgcacatattttccatacctaccaaatcgaggtttgagattaaatcaattgcgggaaatatcattccagccatcgctacagctaacgcgataatagctggcctagtagtccttcacgctttccgtgtcctgctgaaaaattacgaaaagtgtccagcgatctatctcaggcagaaatctatccactccaaattcgtcctggcagccgacaaacagatcgcacaagcgaatcctaactgttacgtatgcagtcatagtccttcagtgaatgttttcgttaatactacagtgatgacagtcaaagagtttgaaacggaggtcctacaaaaaaatttaaacatggtagctccggacgttgtgctggatggtaaaggtcttgttgttatttcgtctgaagaaggagagactgaggtcaacgagaaaaagattcttaaagatattggaattgttgatggaaccatcttgaaatgtgatgattttcttcaaaattatgcacttacaattacagtcaatcattatgaggtcaaagaaaaagatgatccaccgtacaaaattgtcgcaaacgcagaagatctgaaagctaaagaaaacggcgagcaaaatggcgagaaaaacggaaactccaaggccgacacaaaagatgaagtcagcgatgacgatgatcttatggttgtgggcgaagaagacgacgacgaagcggaagaagttgataatgatccccaagaaggttcttcctctaaaagaaggaaacttaatcctactgatgaggatatttctattatcgactagatgtaataattgttttgtttcataaacatttcaagaacattattttaagttgatacttgctaaagaccatttttcttgaaggaagaattccttttcttgaaattcttaagagtaaattatttttgttacttcctacatttaaaatttgaataatctctaactcttatacctattagttcattgtgatatttcatacttaaacaaatatttttcaagatcactttcgttttgtactgtcaagggaatttgtg

SEQ ID NO: 6720 - DNA, 2158 bp, Diabrotica virgifera
  SmartBlast Evalue=1E-47; Info="Papilin, putative n=1 Tax= Pediculus humanus corporis RepID=E0W094_PEDHC"
ggatcataaaaccaagcttggattatgtttctgcatgttcctctttcaggtggtgccaaacacattgctttttgtttggagcgcatacagaaattttcgcataattctttagtcttaaatcgattatcatttcctccacatccagtgaaccaaaactttctgcataatccaatactctggtcaaaataataattaacttcgaaattatggcaatttgaatgacctttgtctttgagtttaaaacaggcatcgtttaaattttccgcatacgtatttgggttgcataagtttaaacattcttctttcgacttaaacctattggaattacccaaacaaccaccatacgtgtattttacacatgtctgttgtgattgatcataaaaccaatgaagtaatcggtgattacacccacccaaagatattggaagtttacatctttctggacccgttggattgacgcaagtttcttcacatgtttctttacttgcaaacctattatcgtttccaccacatccgccatatctgaactgtctacattgatgtcttagagtactataaaaccatttaaaggtagagtttgcacagtttccactatcttgacgtaatgagcaactttcagctttaggaatagggtcacatccatcaaaattaggtcttagcgcaaatgttacaccgtcatggcagcaaccatatgtggattcatggcaggtcagttctcgagtagttgttgtaggtgtcgttgtcgtaattgttgtagtaggggttgtcgtaatcgtggtggtagttatttcttctataataggttctacaactagaaaaccactgtcaacttcaagtaaatcatctggattaaacggagtctctgttggttctggttctggttctggcgtgctaaattcttctataatgtagcttgtgatattgctgcacattggtaattcactaggctttcttggaatgatcccctcgtaagcatcttcaatgttcacagtttcattaggggtatttggtttaactacgaccaaagaggtaaaatcggtgaccaaggaatagttcatagctatttctaagccaattttagcgagtgttgtatttcctgtgacgtgatattgatcagccaattgttttactgttaaataggcccaaattcgttccaattttaccataggaatacctatctctgcttcaaagtccatgggacctttcttggaggttgctgaaatcgttattggtggagaatttttaccactaattccttttccagcaatcaccaattccgatccattaaaaaatattggaaaattaatttgtgtaacttcagccgatgcaggtaaatttttgacaccgacattctttaaaataggaactgaaatagttttgtagaagtcttgaatatatatcgatgaattcaaatccacagtaatttgatgttctttggctttaagtccacttaaatcttgcaggaattttcggtctatatctggtttttttccaaaagaaagagaatatatcggaacatcgtagctagctttgtttaattttttaatcatttcagtgatgagagttgtatcacgaacgccagtatttggcattccgtctgtgagaaagacaataatggtaaatatttattcgggtaaagttgttgagtctttgagacagccattagtccaacttctaaagctcctatactgttagtaccaccagaatcataaaagtcattaataacgtccgtcatggttgctatatttttcttggtggcttgaattatcgaaggagtatacgactgaaaccgatcagccaaatttccataaggcagattttccgggtccgcgtgaccaaacacatcatttttatttttgtattcatcccaatcaaaaacatagtcctcaaattgaagaacagtgaagacatcatcttcgtttaactgaggcaaaatcttggacattgcatccttgagttggctaattttaaaaccgtacatacttccgctagtgtcaagtataaaaaccatatgtttggggatgggatctaaactgtgtggtgcgaaggaaatgaagaagaaattatcttgataaagtacttctccaccttcatttgtcctattaacatcataattaacaataaactgtccagcaaatccattatattctgtatttcc

SEQ ID NO: 6721 - DNA, 2171 bp, Diabrotica virgifera
  SmartBlast Evalue=1E-161; Info=Vesicle amine transport protein n=1 Tax=Bombyx mori RepID=Q1HPK0_BOMMO
ccgatgaagtggaagggagggggttgacaaatgacagatgtatgtgtctcaaaaatgtgtctcgctcagaacaaaaatcgacctgtttccttaaaatctaataaatactgccaaatatccaggtggaccgttttcaccgacccaccctgtatactcgaaacctttactcattttttgcgtttgatatgcatagaaaacgttaataacagctttatagcaaaaatacgggacaaagctactttttacaatttatttgtcctttctttctcttggattattatacgagatagatgaattaggtaaattgaaaaaataaattcttacaaaaccgctactttttggtctggtacacaggatatgtgtgtcgtttaaaaagctggatcaaaaagatttctcaaatctactggaaaaatgagcaccattgatacaagtgtgaaaataatttataaaataattgatatttcattggtctcagacttgattcttagaaaacaataacacagtttgcgcttagaataggtatatagttaaaaacttttgcaacatattgagatctgttgtttgtccgccgcatcaatgtttctagaataaaaaaaattaaaactatagataaaatgttaaaaagtgtaagcatatatttattttttgaagatagctccgatgtatatcatatgggaattcaacttgaagcctcctttttagaatctggtgattcgccagccgaatcaccattgacaacaggttcctcctttttctcctctttcgcattttcttccttcttctcttctggctctttcttttcttcggaagactgcttcttcttatcctccttatttttacccttagctggagtagctggtttcggcttcggttctagactaggatccaaaataactttgcctacgttcttacggtcatgcatcttctgcatcgcttcagcaacgtcttcgagagcccatgttgaatctaataaaggtttaatcttctgctcttggaataaagaaaatactttttgaacagtctgcttgacatactcgtcgccatgttgttgatacattaaacgtcttaggttaaaaccggagagagtgcggttttcgtcaaagagttttaaaggagatatcttgtcaacttgccaccacgatcttgcagcactgaagaaactcttggtttccccggtaacgacgttggatgagccatacagaatatatctgcccatcggcttgagcaaagtgtaacccttgttgcattcctcgccacaaaggcaatctaaaacaatatctacaccgtctggggaaacttttctaatttcactagcatagtcggaccccctttctaataagtggtcgatgggtgattcggcagttttcaatgcttcgtgtttgccttttgaacaaacgccgaaaatagtaacatctgggacggtcttggctagttgtacgatcgcttgacccactccacctcctacagagtgaactaggatggattttccctgagttagaccagaaagctcgaacaatagaatataggccaccgtatagttcattgtaatggtaacagcatccaagtgggacacatccttaggtagtttgtacacgtattttgcggggaccgatactaattcggcccatgccctgtattccggtaaagctacaacttggtcaccaattgcaaaatcttccactccttcaccaacttgttcgatttctcctgcacattcgaaacctaagataaagggacatttgggaggagagtcgatggctccttggcgtaccattaaatcttggaaattcaaaccgcatgctttgactcgaatcagaacttcgccctcgttcacagaaggctcgggtttcttgagaatcttcacagacttcaaaccaccgaatccagttaaaaccacggctcgcatctccttgggggcctctttttcagcctctgcaacaggttcgacatccccggtcccattctccttcacttcttttgtttcttcgaccgcattttcggctttctcagtttttggttcttctacggcgttgttggggactgcttcttgttcagacatggtttcttggtagatatacacacgcgatataagatgcgaatttaaaagttaagttacaccgagtcgagctattgcctgtagtcggtcgtctcctctttgtgtgcaaatggca

SEQ ID NO: 6722 - DNA, 2168 bp, Diabrotica virgifera
  SmartBlast Evalue=0; Info=TBC1 domain family member 23 n=2 Tax= Formicidae RepID=E2C6L6_9HYME
gtcaaaattgacacgttgttttttttagaagagtaaataaattaagaaattcttaaatattaataatttaattatgatacaatggctggccccatggaagagagtcattggattagtgatcttgaaaatgccttattagaggaatgttcagcaacagacgtctattgtatttgtaagggcaaagccctaccagaaaatttaagatctgatgtgtggcagatatgcttagatgtgagggacaaagggaaccagttagaccattttaatgaagtattcgacctgccaaatcaaactgtacttagggaagactgtgcgacttttgtagcaaaactaggaaacgaagaggatgatagactttctgttatttcagacttggaatcaattataacgttttattgcaaaagcagaaatattcagtatgttaagaacaacggttggttggagttgttggctcctattttaacgctgaaaacaccaaagtctacaacttataatttgttcgaagcaataatagatacttacgtaccccagagtagtaaaaccgatgcccacgcctttcatgttttaagattattattactttatcacgatccagaattatgttctttcttggatacaaaaagaataacaccagagcagtattgtctttcgtggtttcaatctctttttgcagccacttgcaacttagaagtggttatcaatatgtgggacttctatttccaacagtcggatccatttttcatattttttctatcgctgataatggtcgttaatgcaagagatcaaataatctccatgaacgacgaaaaccgagataaaataattgctagtcttaataacatgccatgcggtcttgaagctgatgatgtatctgatttttgcacgttagcacaatattacgcactaaaaaccccagtttcttttagaaatgatcttatgcagagcatttacagtggaaaaggcgatagtgttgcaatcgtttcacaagctttatgtctcccagttacagtacacgaattagtcgaaaataccacccatgaaacaatcaatgttgatgctgttagattctttttagtcgattgtagacctatagaacattataatgctgggcacttgcctactgccttccacttagattgtaatttaatgttgtcagaacctagtgcttttgcgaccgctgttcaaggattacttagtgcacaaaggcaggctttactacataagtcacatgctggaggtgaacacttgtgtttcctgggttctggcagaaacgaagaagaccaatacactcatatggtagttgcgtcgtttcttcaaaagcatacacaatacgtctcattactgatgggtggctacatagctgtgcacaactatttctcagacaacgtcgatgatttccttcaagatcacaaccccaagagctgcatcgtgtgtgctcctacatacgcttcaaaaatgctgcagtctagtcaaaaaccatcacagtcgaacgacctgtttggtaaaatttcagcggccatgaaatcaaaatctgctgaggtcaaagggaggctgatagattatattgttaaccccaatggtagtccagtgcccgagaggcatgtgtctagtactgataaaataggcaagaggtacagggatgttgcaccagtgtttagtattgatgatgatcacgataacgtagcaaatgagtacgttggccctgaagacaaacaagagatggtgcaaattcaggcctacctaaaacaatcagacgtcatcgagcacttcccgtgtcaggaagtgaaactgaatggatttatgtacaagagtcatttgattgttaccagaaccgaattaatcgtattacgagaaatcccgaatatcaaaggtgctgcagaagtcatcgtaaaacggcctctgtcggcaatagtgaaaatcaccgctagaaaacgccatcccgaattaatcacattcaagtatggcgtacccgatggcgagaatttgaaaaatatcggacatggataggtttcttataccgaacgcggataaagcaaacgaaagtagtgtctgatcaaattcttaatcaattaaaagctaaagagtgacctttttagaataagcaaaacttcttaaatatttgttaatgtgcattatgacttaaataatttaatatattctaaagtatt

SEQ ID NO: 6723 - DNA, 2167 bp, Diabrotica virgifera
  SmartBlast Evalue=2E-75; Info=Protein 4.1 homolog n=1 Tax= Drosophila melanogaster RepID=41_DROME
cccaagaacgcaacgattacaatattagatccagtcactggtaaacaagaagtagtacaaggacaaattgatccagcaacaggacaattacaatttgttgaaggacctgtaattgaccctagaactgggaaaaagataataatctaggtcagattattgctattgcttcatatgaacctaaagagggaacaccaattaagaacctacttccctcgcatcctgttcccaagaagagagttatcaaaattttggtcattactggccgaaaggatccaaacagtggcaaaattgacacagacaaaggtgtagttgaaaaattaacagccactatagatcctgtcagtggaataattgactcgaagtatggcaaaattgatccacagaataaaaaagttgtcattaaagataaatctggaaagtccgtcgttactccaattaaagtcgatgataatacaggtcagatttatattgatgataacattgtagatccgaaaactggtaagatcgatcacagtttgtctcaagttattaatgttgttgatcctcaacatcccgctgtagtagtaactgccattacaactacaagagatcccaagaccggagctattgatttgagaaatggtaagactgaaattacaaatggtaaaattatacctgaaacaaggcgaaattgttacaaaacaaggaacaataaatttgaaattaatgagaataactaccagagatccaaagtcaggtatcatacaagaaagaccggtccaagtagataaagatgataatattattattacatctggagtcattgatcctaaaacaggatctgccagtcctactgctgtacaagttattcaagttggccccgaagttgatcctgaaattcaaatcaaaacatatgttggtaaagtagattcaaagaaaaatactatcgacccaagacacgtttcacctgctgacaccacaccaggtctttatgatccagatagaaataagatatatactaagtatggccacctcgacccagttttagaaactcttacaatagttgatcctaaaactggaaaagcagacgttagacaaggtcacatcgaaccgaatacaggcgaattgttattcaaaggtggatttgctaatccaaaaactggaaagattgaaaaagacttgggtagacttgtgtcagttcatataactgaaccagtaatagattcaatagcttctcaacaaccgtctgaaaaagaactacagcaaactactcctattaaatcacatcctcaagtcgaaaaaaatataacaaggacaacaccagtaaagtctacttcacctgtaaaatctgcaactccaatcaaaaccattcccgtaagatccgaaactccagtgaaagaagttataacaggtgtgttacatccaattgccaaacacagaattgtaaaaattatggtaattactggcaggaaagatcctaaaactggtactgttgatagtgaatatggtactgttgaacatatcacggggattgttgatccaaagactggtttagttgaaactaaatacggccaactggatcctacaacaggatctttgataacaaaggataccagcgggaatagtcagattgtccaaggaaaagtcgaccctactaccaaccagatcgttgtaaatggaggtcctgttgtagaccctcatactggcaagctagattcaactctgggacaagtattttctattgtaggtcttaaacaagcacaggatcctaacctggctcctattccgaaaaagaaaatcattaaaattacagtgatcactgctagaattgatccaaagactggtaagatcgacaacgaaaaaggacaaatagaacaatcgactgctttactgaacccagaaactggtttaatcgaatctaaatacgggcttattgatcctaagagcggtaaaattatcattaatgatcctaaatctggtaaagtagatgccaaatcagcccatgtaaatgatgtgaatggtcaaattattgtttcaagtggtgttcatgatccaaaaactggtaaggttgataatacactaggacaaatcattagtatagctgggcagaatgatccagttttagaaataacaacaataacttgtaagagagatcctattacaggtaaagttgatgtgaataatggcc

SEQ ID NO: 6724 - DNA, 2165 bp, Diabrotica virgifera
  SmartBlast Evalue=1E-137; Info=Chondroitin sulfate synthase 2 n= 1 Tax=Camponotus floridanus RepID=E2AAJ9_9HYME
catttccgttgctctcatacaatgcagcttttcatgatatttaaggaacatctcaaaaacgtttccaatatctttatgttcctcgtcaagaatttttgtaatatcgttgtcgattcttattaatgggatgatatgttgatgtttttttctagcaaatacgtaatctttgccatagaaagatatgtatttatactcctctcggtcaaaatgtccagatattttgttaacatcgaaggtagaaatttgtgacacccttggattgtactgccgaaacggtacagggctgaatatttgaaaaccttgaattgtattcattctaaccctattcaaaaagtccacagtaacgttagaatacacatctaaaacaagtgttaaactatctagaccaattttctttagagccaaatccacaacagcaaaatttaaagctttatatttttctatatacaatggatttggagcttctggtagtcttatagacaaccatgcaattttaacatcatcattcttatattttgttagcgaagatgtaacgaaacttttcaagtctacatatggatccgtagttcctttgctgtcactgttgtattggtaaaacaatactaacaacagaaacgttttttctttcctgtccatgatggttgcagcatagctttttaaaaattccatggccatcgctgtgtccgtgtcttcaacgggaaggacaatatgaactcttgaattctcagtgacgtaggggactgaaattaattcgatgtttccaagaggtttgctaacctcgaacctttttattacttcctttccattactggagtccttaaattttaaatcaactgtataatccattcccctacttaaatcaaatattttgtaaccattaataagatctacgtattcaaaaagatttgaatagttgttggcagtttttaatttgatttcctcaataatgttccttagatccactaactcctcactagtatgtttccttagtgttgtaaaatcgtctgagaaaaatacatgagactgattaaaataacaatttcttggcaaatcaaagcgggtagctgcttttgctccttgtctctgccctggtggccacgtatcaattagaggttctgatatccttttaatttcattatttatcttggtcaacctttgtctaagaaaataagcattcagtaaataaaagtcttctttttgtagcactggatatatagtaatagctttattaaattcttccttttctgataaatctttcaagtaaggagccaattcaaattgcttgatcctaaaagaatgaatactttccatttgaatgttctgctggcagtaaattcctaagctgtggaaggcacatcttcctatattttcactaggatcctctgagacggcattcatgatacaccaatccaggtggtttcgcattgcttttagaacagagttgcttaaaattatacctgcatctaaattacagtaactgccatctttcacagttgatcctaggtaaacatccatgctaacgctaatttttttgataatatccttaagttcgtaagcattgatgaaagtgaaatcattagcaaagaaaaagtaatcataattttgtccaaatgtatcagctacatacttgataacttggaaaggtctgaatttatgtctagcatctgtaaatcctactaaaccagttaaattgtgtttcgtcttgagtttgtattgagcagttataaaaaatttgattctatctaccaaatgtccaattgttctattaatatgaatagcttgagtatttatcttttcctccgaggtgaatacgccaacaaatagtttctcccttatccccaattctgttgaatagtatcttggtcttattaatttaggtttatctggattaggacttgtttttttgggtggtttaacttccaatttattaactgaagagtttattatttcttgggccgtttcatctttcattaagggttgtttggaacaagttaattctacactattggatattatagttgaaatgtagagtccgattatgatgcccaaaaatagataaacattttcggagaaacattttttgattcctttatgcatgtttttagtcatattctaacgtttacattgtttttttgattaaatacctaaaataaaattaggaaggg

SEQ ID NO: 6725 - DNA, 2165 bp, Diabrotica virgifera
  SmartBlast Evalue=7E-12; Info=Chorion b-ZIP transcription factor n=1 Tax=Bombyx mori RepID=Q538A5_BOMMO
cgactataccagagaacagacgtgtttctgctttggttctgacgggaatttttgaaaatagtttttaaaaaaagttttgatcgctagtagtgtttaattgtgttcctttttgcgattcaactacctacatttgttaaaaaggttgttgatcaacaaagtttttgagtgaaggcaacgaaaggcgttttgagttgagcgttcataaacctcagctcaattcctggtaaaggaagttcagaagtcaacatttctagaagaagacaaggcgaatctaattccctgtcaacatggtccctgccagcaaagttcaccacctttgtggatcctatcgagaaatacctgtcgcatacccggcacgaggtcggggtaagcttgcgcgagcaaatcgaggaggacttgatgacggcgacggagaaaaggcactcgttcgaaagcagtgccatagatccagtttcgtttatgtatgtggacccgtacgacgtgaatccattatccagaagctcagatttgccccccgcaacgatactagcagatataccgctcaaggtcgaatccagtgtttcacaacagagccagttcgcaacaggaggtggtgtgttttacgttcctccaaggagaatcaagttggaaatggaggaattcggcgacctatcgtcgttcgtttccccccaacggataatatccaatgctgtagatgaactcaatactccagtcttcgataaggatgcttttgatttcgacatcagcagttatcagacaaatgttcaggcgcacctcatgctgaagtgcgatgctgcgttcttccgcgaaaacagctcccttaatccactaaacaaccaagaggacgttttcatcaacccggagaacatgcatcgaaacgcagtagcatttaataatcaacaactatacactgacgccgatatttattcgcccacagcgtcagaaaatggtacatacattgttaaacagtccccggacaactcatccatgttcgacatggacataaacagtagtgttagtgttagaagtagtagtagtagacattcttcttatccatcgtcgccggtgggctccgtcgtccgccctgcggcgacggagacccccgacgatagtgaaatgtcgttccagtccagttcttcgtcgaagcctaggctgtccttggatctcggtctggtacaccagaccaactttttagatgtcaatacgcctagcatcatcgccgaagtggttagcttggaatcgactggttttaacatcttggatctcgttaaagaggacgatatacaattcgtaaatgacgtttttcccgatgcgtcaacctcaaccccaccatccaatgtgtcgcaaaaagttgccgtcaaacaaccgagaaggcggcatagaatggccgatgatgacgacgacgaagactacgttccgccttctatgaagacgagcagatatcccgtagctcatgactattcctcagacagcgaggacgagaagcctctgaagaagaaggcgagaggcagaccccctaagaggacgcagtctatttcgtcagactgttccaaagatagcgacgtttcaaaatatagggaattgagggacaaaaacaacgaagcttctcgaaaatcgaggatgaagagaaaagtaaaagaactggaaatggataaggaagcagatgaacttcacaacaaaaatattaagttaaaagcacaagttgaagaactagaaaagatggttaataatttcagggataaccttttcaagataatgataaataaataagtagttttagtcatttagattatataataatcgttgttgcacatacaaattggaatattagttatatgttattatatcgacagagaaaaatttgtgtgtgcttttaaatatttaatgtgatttaacaattttttactattttttttatattatattatatacgtgttagtttatatcacctagagactaagggtgttctgtggtgggatttttattagttgtttttggttccaccatatagaccttataataaggtcgaacttgtgttttttgtgagtgaagagactgcaaatgttttagtataacactaagattactattttattactaaaagatgtatgtacctgtatttacttattattatgaatcaataataaaaaattttgtagtactaa

SEQ ID NO: 6726 - DNA, 2164 bp, Diabrotica virgifera
  SmartBlast Evalue=0; Info=Putative glycerol kinase 3 n=1 Tax= Camponotus floridanus RepID=E2A7C0_9HYME
aaattttcatctattttattgctttattttcaaaaataaacccataacaaacaatataacaaaagattgtaacaaaatataagtacatcaatatttgagtttaaatataagttattatacatagtaaaaagtggtaaaacaataaaaacaagacagtctatggatttttaaaatcacactattaatacctaaaaataatttcatctcagctctgttacgccaataagtctgccacagccaacatgccgaaactaaccataatgtaaatacaccctggaagactcgatagaagacggtaccgttcctctgtcattatcttagatttcttcggaacggcccaccctaacgatctctgaaccgccattttccatttgctgtatctgtaatctctttcactttcagtcgatgtgggaaggaatgtatttattggaactagctgtcgttcttctgaattgatatcccatatgtcgatgccttttgcagctccagctgccatggctgcgcccagagctgtaatgtcttctgattcggcgcgtatcacaggtattccacttatgtcggcttgtaattgcatcagtagattattttccgacatctttccatctacacgtagcttagtcaaaggtattccacaatctttgttcatcgcttgtaaaatatccctggtttggaaacaaatggcttccagagccgcccttatgatgtgttgtttggtcgagaaggccgttaagccacatatgatccctctagcgtcttttctccaatatggagcatagagtcctttgaaggccggaacgaaatacacgtccccggtgttgaatacttcttgtgccagcgattcggtgtccttatcgacgtcctttaagaagcccatattgtcccgcaaccattttatcgcagctccagcaacggccacactgccctccaacgcgtatactgccggcgaatctccaaatttgtaagctaccgttgttactagaccatgcgtagacatcactttctgagtacctgtattatatagcagaaaacaaccacttcgatacgtattttttgcttgaccctctttcagacatctttgacccaaaagagaagcttgttggtttcctaaaactcctgaaatgtatactcctccgaaaggccagtcttctgccacttgaccgtatatttctgaactgctttttatttctggtaaaacatcttcgggtattttaaaatatctcaataaatacggatcccaatttaaaagatcaatgttcattaggaatgttctcgaagcgttggttacgtccgtataatgtttgccgccatttggaccgccggtcaaattccatatgatccaactatcgactgtaccaaaaagacatgttttgtttttgatcgctttccttacttgaggcacatagtgcataagccactttatcttaaaggcgctaaaatacggtgatatgggaagaccacaatggtttttgaagtaattagtattttgttcaggtactttagctaaaatcctgtctactgtggaatctgtccttatatcgttccatactattgcattgtgtaaaggctctccagtggttttatcccatactatcgtcgtttccctctggttggtaatacctatagttacgatgttttcagatgcttcagagccaaggcttttggcaacattttccatacaagtttctacagctctcaggatctccctgggatcttgctcggaccatccttcttggggcacagctgttgtaatgtctacagtgtgtttggctatttctttcgtatgttcagtccgaaacacacaaaactgcactgttctggtacccgcatctatcactccaatcaaattctgttctaggtcctcgtcttgagacatttttcagtgaaaacaatctaaattttgtgtagattctggggtttagtatgaacactgtttgcggcaaacgtgagttagatacaactacaacttatcacatatccacattatctgattatctgtacttatgagaatccaccgtaactatcagaacattattagaataaataatctttaatcagttatcaattgtgtaaccaaaacacctgcattacttacttgccaagtatgaaatacattgaaaatgttttcgacttatgctgaggtgtctacgtctacacaactacgaaa

SEQ ID NO: 6727 - DNA, 2160 bp, Diabrotica virgifera
  SmartBlast Evalue=0; Info="Xaa-Pro aminopeptidase, putative n=1 Tax=Pediculus humanus corporis RepID=E0V912_PEDHC"
aaaaattaaatgcatttattaaattctcataacaaaatttagtttgaataaaaatatacatattctatctagttaaaggttttgtttctctaaccaaccattccttagcttgaatctggccttgtttgtccaaaactgctcccacaacttccagacattgcttgtgataatcgttaagttgtttaagttcctcatcagttaacatttctactaaaataaggttattgctcttcggcattaaagtaatagtttcaaaagtcaaatatcctctattattgaagttatggggaggcctcgcttcaactacctggactatatcttcgattctaaggccaaattcaccgtctttatagaatcccggttcattggatatgaacatacctggttctagaccggggtcttcaggaatgggtcgccatgagatacccattggtccttcgtgcacattcagataagaaccgatcccgtgacctgttccatgaccgtagtccagacctacttgccaaaggtattcacgtgcgaacgtatccaagcagttacctttaattttggacggaaatatgcgagaacccaacttaagttgccctttaagaaccctcgtatagcactctttctcaaaaggggtcggcgttccaaaatgcagtgttctcgttacatcagtggtaccatcgagatactggccacctgagtcgcagaggtatacctgatctgcagtaatctgtgcgtctgtatcatgactaggtttgtaatgaataatagctccatgtggacctacagaacttatggtcgcaaaactcggcccgacgaagtccttctgcatctttctgaactctaaaagtttgtctgagccagatatttcggtgatcttttctgattttacgttggcttctaaccaggcgaagtagcagcacagagcagcagcatctctaatgtggcagttgcgcatgccttggatctcattttcgtttttgacgcctttcatcaagcaaacaggtgttatatcggtcagcaatcggtgtttcttggggacaagatctgtcagagcaaagctggagtgctccgaaaaccatatatatccttcgactttattggtcaattcttctattttcttctcgatattatcgtagttttcaatcttgtagctactattttcaacctcggattccaaatgttccttaacagcactactattttgtttatcgttcaaaaatactgtaaaattattgttaccaatgatgacataggcaaagaataccgggttgaattcgatatcagagcctctaaggttcagaaaataagctatttcatccaaggccgatagtactagatactcagcatgcttctctttcatggcagtattgacttctttcagtttttgtgctaccgattttcccgtataattcctcgcaagaggctttacaggatttgtaggtcttgccggtctatcggtccatatcagttctataagattcgtagcaatggggaccagttggtggccagaggactctagtttggattggagagggttgaatttgctgtacgaatatactttaggatcgacacctactttggatccttgtattaggttcttagaaagccaatcgccttgggtgagagtggttggcagtccctctttcatcagctcccaatttgaatccaactgctcactggcttgtaagtaataccttccatctgtccataaaagggcttctttatctgtgataatagcagtaccggcggatcctgtgaagccggttataaaggccctgtattcatcacattcggctaggtattcactattatgggcatcactggaagggacaatgtaagcacttataggttctttgacatattttttgttttgcataagagcccttagctgctgtagaagctttgtcgttgattttggtggactcatttttagttaaaaagaaactatgcttttcaataattggtatattatacttctgctaaaccgaatacttttaacgagtgacaccacatcggaataactaaaactgctagtattagtatttcatctttactggtgtcaattaatttatacataaatcaaatcttatcttacttgtagtagaagtattaaaattaaaaatactttcaaaccttagacaaggaaaaaagagaggacgggtaacactc

SEQ ID NO: 6728 - DNA, 2155 bp, Diabrotica virgifera
cagttcatcctggctctctaaggaaatggctattttggctctaaggaagattattataattcttgctttatacaatgtagggctttggatagtctagctttagtaccactaaggtctattcatattccttttgtttttgatccatcagtgtaaaccataatgcacctattttacccttcttacttgtacatatttacaaggaatgtctagcattacctctaagactgcagtgagctatgccacggtttcgttgtactcatgattcctgaacatgcaagtctttccattttttgcaattatgttattaccttttgctatgttgtttcgctccacaaaaccagcatatcacaagcaaatatgttcttatagtgtccgactggttggttactaggtttgtatacctttttctgctgcagcagtcttaaactccaatagggtgttatcaaatatatatcaatgtatgagataatgtcactttttctcaagagatggtttttttgagatgtagaacaagagaatgcaaagcacctacggtgaatttgccttgttgtttttcctgaagtacttgtaaagtattcatttcttatgtaagtgctctcatactctttagaagaaagaaggctagactaataggtttacatgactttggtacttccggataaggttttcctctgataggaattgatcagaccataactgtggttactcctttgaaacataacctaaaataacactcatcttgaatattttgtcaaaaatgaggcagtaggaaagattgcatcgtgatgaaataatgaacaggagaattccactttcttcctaaacaaacgaaagaaacatagactaattgtcatattctatttatattatttaaaatgtgagaggaacgttgtagtttttaagatatttactgtataaacaattattgtaatatttaacatctaccaaattatatgtaaaaataatttcaaatagctatatagtttcataatagtatgtatataaagcacaaagttacataatattgaccgagagtaacagttactgcatgttgcgagaaagtaaaggtcagcagttacgcgagagcaataatgttgctagtagtatacacaatattttttccacggacgcttaataaaatggatctttttgaaattgttgcctttaataaaatcattaaaaataaatattccagtaaactaaagcagctatattagtaattagtagtatttataatcgaagctaaaattgcattcggtatactatttactaataattcctgagcatatagtatttttggactgtattctgatgtaaactcttgattattgtggcgagaatattcacataatatgtaaatatacagtattgttaatatttttccgaaaaatgggcgctttcagtgcaataagttagatttttgattttccattgatcagtgtaaatttcaatatagcgtcgcgatgttttaaaattaattcatttgttcgactgtaatacctttactgctggctatcgcacaaacgatgcaatccgatggagcacctcagttcactgcagtcgaacaaatgaattaaatatgaaacatcgcgaggttgtctggaaattgacactggttaattgtaaatcaagaatctaacttgttgcattgagggttcctatgttccgaaaaaagatttccaatactgtatacattatatggctccggtaaaattttctacatttctaaatttttattaataagttttgtggttcaaatatttaacaacgtctcttgtctttatcatccggaaagccaaaatcttaatggaataaaatgggcatataatctgcaatgaacaacgctatagtatgcttcgaaccgtactacaggcaaggtgttcggaaaacaaggaaaaagaagttagcctagctgcacaagctaagaaaatctattaaaaatagccaggatggtatcaaacatctgtaacggggataggccatccaagaagatgaagatattgtttgttgtggatatcgtttacatccctataattagaaacagctatgctatagtaatgtatattagagtttaccaacatgaagatataattttacattagttgaaaagtttcaacattctccatctcagaaagaactagaacagatataaccg

SEQ ID NO: 6729 - DNA, 2150 bp, Diabrotica virgifera
  SmartBlast Evalue=1E-33; Info=Similar to Monocarboxylate transporter 14 (Fragment) n=1 Tax=Heliconius melpomene RepID= C3PPH7_9NEOP
ttagttaatattaaggataatttattctagatcctaattcttttatatatgtaattggcgaaccagacagcgcctgtgaagaaatgaagtaatgcccattaatttgaagcacgttctaaacgtcatatcaaatactaaaaataacaataatgcacagccgcttaatgtactaatgatagagaattctttacttgtttctcctcttaatgtcaaacctaaaataggcattccgacatactgtaatgtagctatgctgaggattacccctatcgctccgaatattaagacttgcttggaattcgaatctgcaagcatgaaatatccaaaggctccaacccaacataacacccagaaacatatcggtcgtctctttttgtcgatattgatccaatgggagactccagtgaacagtaaaccactaatcgaaagcagtccaaccatcactgacatttctcttaaagttaaacgttccacttcttggtaaacatacaatggaaataaagtataaaatatgaacatagaaaatttcgtagtcaacactgtcaaaagcgatttataaaacgtcagttgctttaaaacttctagcttatcagcaagccttcttggtttctcgatggtcgttggcataaatactacaggctcagctgaacgcaaatcattctccataatatcgtaagagtaagtattattattatttaccggtaaatctgaaaacagtggctttggtaatccagttaaactactagtaggttccctctttgcagtctcagcaaaggacagctctaatttgaggtttttactattctttggctcatcctcaaatttcacccagtctttctttggtttctcttcactttcttcgtcgtcttcgaaggtttcccaatcctggtttaggatttcgtagttggctttctctctagcttcttcttcgtcttcgaaggtttcccagtttcggctcagttggttcgttccgctgctatttggttcagcgtctgttggacctgaggcaggtaatgcgtgtttttcgatcatgacttgcgtccccgtgctgttttgtcttttaatctggagctctctggagtttttggataaaatgtcttcttcatcatctggattggacgttatatagttatatgtttctcgttgtctcgattttaaataagcaggttttttgaacaccatgttacatatcaaaccttgtaaaataatagcctgataccataacactacgtgcaatagactagaacttaacacattgtgtcctataacaacggggacgataacgaagccaaaagatgccattccttgacatacattagccaaaatagcgtgctttactctgaaatattgagccagcagtatttcacattgagctatttctatagaggctccaataccacaaactattcccgccagcggaaacaatattcctccagaatattcagccaggcccatccataaaaaaagaagacccgcgcatgtcaaacaagtgccggcagtagcaacaagtcgcggccatgtgctatttgaaataaggaatctcgaggtaggatcgaatattgcccaaacagcagcaaataagacaggtgcatacatgaatccatcgtcccatagctttggatcttgatcgtcctttgtatataattggagccttgacattgctagaaatatcccaaaactgactcgcaaacttggaattaaagcctgaaaaaacaaagttgcgatgaaaacaacccatccatatcccccatctggtatgctgggcccaagttctgattgtgtagccacaacgctatctatggccaattcctgatcccgaattggtcttcttgagggctcggaaagcattttccaagaattctcaggtactaacactacaattttaaggttattaacacatcacatcgtttcactttgtgtttttttacgaaaaaattgtatttttcagcacagatcaccaccaacattcaggttaatcacttttcttgcttcaaacactctggtatatcgtatattgttatcttatctattggataagtacacataattagagtagaaatgattatttatgtaatttcgacatttccccaaataggtgtaacgtttggagacgacttcttttgagtgttgcctaatgcaatgatcagaac

SEQ ID NO: 6730 - DNA, 2151 bp, Diabrotica virgifera
  SmartBlast Evalue=7E-14; Info="27 kDa hemolymph protein, putative n=1 Tax=Pediculus humanus corporis RepID=E0VKF6_PEDHC"
gtcgcgaactcggttccattccatctaatagtagtagtagtagtagtagtgaatgagctttcattcgtttcggcgagggattagattttgtactcgtgaattgggtcaggttatttggcgccatgaatcttcttggaaaagctctcgtttttgtattgatgggttgtgcttccacccagaattttggtcaaccaccggaaggctttggaaatcaaggaagattcgattttggtaacaatggaaatagtccatttggtagcggtggaaacagtccatttggtagcggtggaaacagtccatttggtagcggtggaaatagtccatttggtaacagtggaaatagtccctttgggggcaacgcaaatggaccatttggagataatccagagctaaatcaagttatgatgcagggtaaatctttctttgatctgatccctcacttacttaagcagaaatgtgacgaatctggacattctgacgtacttcagtctattcaggaacagttaggtcaaactcaaaaatgcctgaaagacaaagtcaatttagacggagaaaaacttgctgatgaatttgctggtgcttcacgaactggcgaactcgacaacttttttaagaaaaactgtaaggtttggcctgacatccatggatgtgttcagcctatggtgacttctgcggagaaatgtttgactagcgatgaaaagcgcaccgttgaaaagttattttctctcgccgatgacacgaatactttcttctgcgagaacaatgccgatcgccttaagaaactacttagtggtaatcttgcgcaatgtatggaaactgtaggtaaagatgtccaagaatgtgcagccaaaaccctgcagaataggcaaaaacaacaacaacaacaacaaaaacaacaaaccagcgataaaaaggtcatattcagttttgatgaagaaacctgtagtgacttccagtctggacgtaaatgcgtcacctcaaaagtagctaaatgtgaatcaaaagatacttccaaaatcgtagatgactatttagcactggttcaagaccatgtttgcagttcagcgtcaagcttgtcttggttttcgtttgctaatattttgttattggtaggaacctacttgtattctaggatgttctaagcctttctggtgtacaagaactagttaaacaactggctacctcacgaacattcttgaatataaatgcttctggccaaatattatgactgtaataggtatgcataactttgtttacatttataaatacctagcataaagggaaacaattcgtgtctacctacccttaccaggccattaaaatgtagtttattttaaagtaaatagagacaaacattattattgaatggataataattccagtagtcttttaaatgctacaacattgtttacacaacgtataataaatgttgactttcagtaaaactccacacataatctacttatatgcaaccaatattacacaatatttttgaaatgttgcggaaatctattgaaaaaaaaactttggtaggtattacttgaatatatctaacaaaataagcgtttttttgtagatgttaatgcaatagcgttaaaaattatttttaattactgattaagttgtacgtagctaattacataaattctaatgagttcaataataatcaaaaatatttttttattttaacgattcaaacattttagttttattttcgaattttattgtaaagggatcttaacacaaagcatttatgtattgggacaaagaatgtttataattatgttcttgtaatatataccatatttttcatctctacagcttggtcagcttggacgtaaaggacacattgaagtagattgtttaattacatattagttttttaatatatttcttgataatgcccaatttacatacatagtgtttaagttgttgttttattgtagtaagtgtcacgcttctgtcaagtgtatttagtaatatgtagttgttataaaatattatcttaaatagtctttactcatgtgcctgttacttatatgaagcgaaaataaatataataataaacaacttgtcaatttaatttcataaaatattattttttgtttcatctgtttgcattttgttatttaaaataaacatatccttctt

SEQ ID NO: 6731 - DNA, 2141 bp, Diabrotica virgifera
  SmartBlast Evalue=1E-149; Info=Pyruvate dehydrogenase kinase n= 1 Tax=Bombyx mori RepID=B0LL83_BOMMO
gacacagacaaggtcagatcagtgttattgtaagtttagtgaagttctaatgtggtgcttattaaaacgatcttagtgtgtatctctaaacacttaaataaaaatgaaagtgtcgccgaaatcttttcaaaacatcgccaagatgttggacttctactcgcaattcaacccttctccattatctataaaaaaattcatcgattttggtttgaatgcatcagaaaaaaaatccttcatattcctgcgaaaagaaatgcctgtacgattagctaatatcatgaaagagatcgccctccttccagaaaacctcctacgtatgcccagtgtagtagcagtcaatgattggtacatgcagagttttcaagaaatcatagaattcgaaaaaaaggaagcaaacgcagaaaccgtagaacatttttgtaatgaattagttaagatcaggaatagacatacgaacgtagttgaaacgatggctcagggtgttttggagctgaaggaatctcacgacgtagaccagcatactgagcatagtattcagtacttcttggatcggttttatatgtcgaggatatctattagaatgttgattaaccagcatattaaattactttactatttggcggtcagttggaaaacgcccctggaccaaacagtagcaagtacatcggttgcatagacacccaatgtgacgtcgtgagcgtgatcaaagatgcgtatgagaacgcgaggtttctctgtgaccagtactatttggcatcaccggatctaatcatagatatatctaggaataacataactgaagaagaaactaacacaaatatagtctacgtaccatcacacttatatcacatgctttttgagctatttaaaaattcaatgagagccgtcatggaatactacggatctgttgatcaatacccaccaataactgtcacaatttcgaaaggaaaagaagatttatgtctaaaaatgtcagaccgaggtggtggtattgcccgatcgaccacagatcaccttttcaaatacatgtactcgacggcaccccaaccaagcaaatcagacgcccataccgttcctctggctggctacggttatggtttacctatttctaggttgtacgctagatattttcatggagatctcatacttttgtcctgtgagggatgcggaactgatgcagttatctatatgaaggctttgtcaaacgaagccaacgaactcctgcccatcttcaataaaaccacgtcgaagttctacagaactgtcgtccgcactaacgattggtcgaaccaatgcaccgtcattggagataggcaaattgcgaccaagtcgaaacgtcacgagctgtcccactccagtcaagaatcgatgaccagggccttatagtattatgaggacgatcatttcgagaaaatgtaataagttaaaaatttagtagaagtgtggaaaatgagttgttgtattatgacgggtatatgtaatatgctagatgtaggtaatgtacagatataatttgcttctatagggaaatcgtatagaaaagggtacatacgctacaaatcttctcccgttagccaatgaattaaattcataaattaaacttttttaagtttctctaaatctggggaaatttaaggtcacatgaccaaaatcctgcgtactggttggtcgagagcatcaaaaatatacggatttgtcggaaatttaaggaaattgtttaatattgtttaatttcctgtagtcggatcaataccattaattacaaaaaattagataaaatcctttataaaaggtatatttaatttaaaaaaatcccatgcagggttacatcacagaacgttttcgaactaaagcattcatcatcagtgctgttaacaggtttttttttacatgcttgagccaccaaaatatcggggtgaaagcactttaaatgttgtacatttgtagaaaatttacatttttatattaaattaattgtgatgttcaaattaatcctagattttaacatcaagccacacagaggtctcgccacaaaacgtgggtttctcgtccagaaggcagaacctcacattacggactgtaaatagcaactcagaatctaaaatcttactgaaatcgtaataataatagacggagaggca

SEQ ID NO: 6732 - DNA, 2146 bp, Diabrotica virgifera
  SmartBlast Evalue=0; Info=DSec61alpha n=30 Tax=Neoptera RepID= Q8STG9_DROME
ttaaagaataactttatatttgtgtaaaagaacatgtaaatttgtacatttcaataatatttcaacatttaaatgatagatgcccttatctcgaaaaatttacagtatacattagcatcaaatgaaaaacaggatttcagaaatttctgtatttaaaataaattatatctaacaacaaataataaatgatcaatacacaaccgtactgcatgaacgagaatgaaaaaatgtaaaaaataaactaatagtatgggacatccgcacattataaataactcgcttcttaaacacaaaatcatgtaaatgtacaatgaaatatatttgtctattttcaatcttttagtacaaaaaaatgtttcacactttatacaaagtgacatataagttgttccacataaataataactatagtggagacactgaggtacaaaaactaaacaaataataaccacaatagttactatttaccaaacaaaatcacaatatcagtcaagctatagctttgtgatatcttcaatttatctagaagagtaacgctcccattccacccatctcgctttgttctttgacgaagatttcgaagtattggtagatgatggtgacagctaacaagataccagtacctgaaccaatggctcccatgaaatcagcgagtactgacaaggctccaatacagagacctccaaaagctgcggcggtgggaatgtacctgttcaattcgtgaatcatggagttatctctgtgtcctctcattaccatctgttgttctttcaattgcttagcgacatctttggctgagcttccagatacttcgatccatgttttggagaagaaagcacaagatcccaacatgaagacgatgtagagcattgcgtggattggatcttctagaatgtgacttacactttcaggtggagataagtagtaacataatcctccaatggggtaagacctagctgggccaccgcctccaacgtcagcccagactcctaatagattaattaagaagttcccttggaatttaacagccaacatctgtgagatgacatacaagttagatacaagagcagattgtagaataatagggatgttcgaagtgtagaacaatttgattggatagctggaatattgtccacggtatcttgcactcttgatgggtagatctactctgaatccttggaagtatattactatagcaaaaacgagtactgtcgccaacaagttcatcaaattgggaagattttgcctgtagaaagcttcacgtaatcctctgattttgtcttgtctggtggtcaacaagtggaataaggcaatgacagctccttcaaattctgttcctcttccagtgtttactgttgctggtgagaaggctttccaaataatagtttcacaaatgtttgttgcaatgaagagggaaataccagaacctaaaccatatcctttctggagaagttcatcgagaagcaatacaatgagaccggcgacgaacagttggatgatgatgagaaggcacactccagctccaatttcagccggatcaccatacatgcctgtcattacatacacgatggcttgaccgacagtaataaccataccaaacaatttttgggcaccattgaataaggctctgtcttttggagtgtcaccaacctcgataattttggcaccggccaacagctgcataatcagacctgaagttacaattggggaaataccaagttccataagggtacctctgtttgatgcaagaataacacgaatccagtagaaaggatctgcagaatctgaactcattataccgaataatggaatctgacaacatactaaaaagatgaaaagagtgattgcagtccatagtactttctccctgaattggatttttctttctggcttggctatttcaggcagtatgctgcagaaaggctttataacttccaaaaatttaatccccattttgctgggttttaaccactatttcactaataaatcacagttttttcattaaacgcccccctgagctgtcacgtcttcaccgaatcccagtttgaaagaaattacggtacttcttgtctctgttttacgtctacacgtcgtacacgtagcacagcacacgggtcacgtgatcgatgatgttggccagttggct

SEQ ID NO: 6733 - DNA, 2141 bp, Diabrotica virgifera
  SmartBlast Evalue=4E-87; Info=SCP-related protein n=1 Tax= Bombyx mori RepID=Q0PRV2_BOMMO
tcaagatcatctgttggctatttctataaataggcacttcaacgttttcatttagagccaggattgagctacgtctatctggttggtacatgaacctcccaccggtgtaccagactacatataaatgagtataaaggttaatttttctcaaaactaacgccccttacattaattaggtattcgaatataagaaatacatattatttactaaaaatatatttttatacaaagaattgtaaaaaatgaatcaaacaaataaaaaatactggggtcaagaacccaactaaactaaacatactctttggcatctatataatagtaatagaaaatatatgttattatagagtaaaatgtacttttttcggacttttcgtacgtcaagacctcggtctgggtacgttttctacaaactgtccaatgtaatttcctcttggagaatagttggccacgacgtatgtctgtcccctcttgttctttgccatacctattcctaactccttactctccttccatatgacttgagtaaagtgcaaagatccctggttaactctctcgactccgaaggtgtggcgtttgacttcatcgtaccattcctttactgcgtctctggcacttggtgtgtggctgtaatctgaagaatacacagagaaaatgttttctccatattgagagttggctctatgttgtaaacttgcagttcttgcgcaggtgtcagcccattcttgagcatatttgcagatctcttcacttaataccaaatcctgtgtcccgtgccgtcttctatactcgttatgaactttaagagcttcaagtgcgaaatcggaaaaatttccttgactgcataaaccaggagaagaaggagaagcaagagatttagatgaggatctcggactaggatctttcttcgatgatgagtctgcaaaccaggtaggctttaccggaggaacattctctacgtagtgacctacgaagtttccggctggagagtagttggcaacaacgtagatgctaccttgtgagtttttggcgacaccaactcctaaagattcactagacttccagatcacttgggaaaaatgtcccgacttcaagttactaggttctcttccaaatggatgatgtgaaacctcctcgtaccaagtgtctactggcgtatgtccattgacagtaaagtttggatcggaagaataaaggcagtaaatgttttctccatagttactgccaggcctgtgttctagtatgtttcgttgagctagataggccgcccattcctggctatatttacaaagttttttgtctagtttaagaagtggcactccgtggcgttttctgtagttgttgtgcgcttcgaggaagtcctcttcgaagttgccttctgtggcattctgatttagcttttgtgggatagaccttgatgaagcaattgacaatttaccaacgctttctgatagatctatgtgattgttattacttctgaaacctcctacaggtgggacattttctgcaaagtggcctattacgtttccggctggtgcatagttagccactacaacgatctttccaccagatttggcaaatgccacacccaattccctagattctttccataccacctgtgtaaaatgtcctgatgctaaactgctcggttcaaccccaaacgtatgacacttgatctcttcgtaccaattttccacagctttctttccgtcaatggtaaaattaggattagacgattggatacaaaataagttttctccgtagtctctactattgctatgttttaagacactcttttttatcaaattattcgcccagtcttggctaactctacacatttccttattgagctttaatggagggacaccgtgcttatgtctatattcattgtgggcttgaaggcactcttgttggaagtccattttggaattctttttctttacgctaggttttttgtttgatcttaaaactttatcggtcaaagcttctattatgtctggagggcacttttcttccgtatctttcttctcggttgtgattttgcattcagtcctttctcccctaaaagtttcgattgtctctcgcgtgatagtctccaatttgggttcctacttgaatagtaaaaaccagtactagtattagat

SEQ ID NO: 6734 - DNA, 2140 bp, Diabrotica virgifera
  SmartBlast Evalue=1E-106; Info=Sulfhydryl oxidase 1 n=1 Tax= Harpegnathos saltator RepID=E2BAZ4_9HYME
catctcgaactgaaatgctcatcaaaagcagtccccccagtaacaaaccatgatttgtgttaattatcctattgccgtgggatgttgagatggcagcagcggcggcagctggtgttttactattcacaaccttttgatgtactatccgaggatctgaatacatatagttgattttatcagcacggtacatttctttcaggtacgctaacacctcaacctcttgccatgtaccgtcaggtctataacattttagacatctttgaattgagggaaattgtattttcttgttacgagggtcttcagtagcatcaccagacaatcgcttattaacttcattgtgtgctctccagagccaaagaacagattcttcccatgattgaacttcaaaaagttttcttctcttagccatatcttgaaaatgctcactacagtccacacaaccaaaatagttctttatatatccatgcattgcttctaacacaacagtgggctttgtatcttgagtgttacttggatctaatgctgcatttgttaccaagaaatgaaacagtttccataacccacatggatatccacgttgatgggttggtgaactacccctacagcctaaccatcgttcaggtccagaaaatacatttttacctggttgatcaacttcttttatatgctcagctatatggtgaccatctatttctgatgatgaattgacatagtcttcaaggtgtcttagtaactgttttcctttctccccaaatggaaaatactttaccaaaacgttcatatattttcttaaagcatctaatttctctcccgagattttttgaattcctccaacttctctttttaatgagtatctaagagcattttccagatctagttggaaaactgtatcaccagctgctcttatttttttctcaaattccaaatattcttcagttagatttacaggttctgtaacctcatctgtaatagtaatatttctcaagactgccggtggaacttcaatatttcttgagaataaaagctcacgcagcttaaatttaattccttctcgatttggagaagatatattcaagtgctgtaaatcaccacttttataaattaaatataaagcaggtagttcctcagttgtgacattagtttcattattatgagtgtatctaataactatttcctttacactatgaaaatccattataatagaaggacctgtatcatcacctggttcctgtacaatcaaaaatgctaagtctggattgcctccatttgtactatatatgtttgatatagctgaacttttaaatggctgtaaatttggtaacattttagctctaccttctctttgttctttaattaagatatcgactaaattttttctgtgctctgaaaaattggtatgggagtcagccaccactggtagtcctatgttctcaggcccttccatataatgttcatgaatatacctgaacgttggatacctggttattccgaaaaattcacaaactggagcatttcgttcattggcacaatctaatactgctagtacaactaagtcattccatcctttaatatcagttccaaaagctttactctcggaactgctcttctacagaagccacaccaattactataaaattcaaccatccaagctttatcgctgttataaatagtagtattgaaattatcgattgttaaaatgtatagatcatcttcagatgtatataaaccaggttcattgttcgttcggtttcttagcactgcacaagaagtggtatgaattaaaatcaataacaataataaatctaaagtagatgtaagttgtttcatggtgttgcactttaagagtataaactacaactgactgtataattaaccatttagaattaatcttaaaaaattccagtgactaagctattcttagagctccatgtattattcttgtggattgtagttacaatttatcagagttggttttctataattgtcttcaaatggagttcaccttgacaccgtcttggatttgacatgcataagcgaaaatcaggggcaaacttgcaaataactttgtgcactgttgattttagacctatgtacacagaatgtaaacagaacaagcacaacacaacacaaccacttccac

SEQ ID NO: 6735 - DNA, 2141 bp, Diabrotica virgifera
  SmartBlast Evalue=6E-48; Info=Mariner transposase n=1 Tax= Bombyx mori RepID=Q1HPJ3_BOMMO
ttaaggtaatttcttatttaaaatatacaagttttgtacaacaaaacgttgtgcagtgtcctaaatctaggaaaacgcaacgaaagagcttgtttataatgacgttcttaaaacaaggttagatacattttcttatgtgacacctatcatttgcactgtcaatttttaactggtttaaatggatgcgagctagagatattaaactgcaagctagagattgagatcttgaatacgtattatgtaaaaggtgtctaagctattaatgtaatctacagtttttaaaaagcaagcaaatatttcttacagtctacttaatacaacaaatactcccataatctcaatttccattttattatttgtattagagaatatcaattgtctagcactagaatgcggtagatctgatgttatcgactaacgagaacttgaatgttgtaagtacatgcaatacgaggtttgtctttttagttttgcttataacagctcagtaccaataaaacctttcgacacaaatgtaacctcaatcttttgttgacacaaacccagagttttattgcgataaaacaagttgcgtagatacagtgaattttttgaagttagccagtcggtcgaaaaatggatcttaatcgagaacattttcgagcaataattttttacaatttttgcagaggattatcccaacagcaatgtctcgctgaaatggtttctgtgtttgggaatgaagcatcacaccggtcaactatttactgctggtattgctaatttcaacgtggttgcttcagtctcggcgacgaatccagatctggtctactcgaaaaagtagtcacacagaaaaacgttgatggggttcgtcggctgattaaggatgaccgccgtgtaatataccgggagatagaggcatctttgagcatttcaaagacctcgattcaaaagattctacaactgggtgttacgaagttggttttcagttggatccctcatttactcacagaagagcaaaaagcggttcgtgtgaattgatgtaaaaaaaaaatggaacgagtcaacgaaagaagctcaaaaaacgtttctagtatggttagtggcgataaatcttaggtttattcctacgaaccggaaaataaacgccaatccgctgtgtaggtgtttcacgaggaaaaaccaacaaaagtgatctgttctcgaattgagtcgaaagaaaatggtcgcaacttttgtgtcaaaatctggtcctgtggtaaaaattgctttagaaggtcgaaaaacggttacttcttactggtatataaccgtttgtttaccagaagttatcgcgaaattccaacaaagcaacacacaacggcgaatcatcctacatcaggacaatgcaagtgctgacactgcccagaagacaatatagagttttgagcttcaaacatcgaattgttaaacagtttaaaatagttaccaccgtatagccccgatttaagtccctacaacttcttcacgtgcccaaagatcaagaattcaatgcgtgaacagtatcccagttaccaaaggaagccatcgatgtctttaaaacagcgattttgcaggtgtcaactgaagactggaataacttaaacgtatgcaaaattgtatcgatcttggtgtgaaatattttgaaaagcaataaagtactttcaagtctatatattttttgttttatggttatatggaaaacaaaaagacaacactcggatgtccaatttagatgaataagaaacacgaaaattagaatttaccttggactttaggaaatatatttgaacgacagtttttctatacaaatgtctttgaccaaaatcaatgagtatttgttgtggaagtagcatacttgcttcaaatcacttcggtttctactgtgtaataagatagcaattgcggaacttttataattattaatagtgacgaaatatgaaagataaaaaaatcagtctaaaaagccatgtaccaatattggtaatttaaataaagaacagttgtgatcatttaaaagataatatgacatcagtatttgtctctacttttattctttttctgatctaaattactaaaagttgtttgaagtaaaactataccacaaaattcaatacatgaaaatataagttcaagtacattcc

SEQ ID NO: 6736 - DNA, 2143 bp, Diabrotica virgifera
  SmartBlast Evalue=1E-125; Info=Gelsolin n=7 Tax=melanogaster subgroup RepID=GELS_DROME
gttgtgtgacagttcagtgtggaagtgataattcaaaaaaaaaacgcaggcgacaaaaacaaaataggaactacataatagagagagaccgaggcgaataagatggaccacccttaaaccacccaacttagatgtatctactgcagattgggcagatatgttgaatgatagctagcgcatgtccaaaatgtggggaaacggagcgtttagtcgcggcactttggtgtgtctcgcgcttttagtttatctgaaagatagtagctgtgtgactacaaacagacgagagcacttttcgcagttaccacagcggaccggcttttcaacaaacagaaacaatcagaggaccggtgtaaaagtgatggatccttcatttgagaatgctgggcaagtggatggccttgaaatatggagaattgaagacttcaaacctgtgccttatcctaaaaatcaatacggcaaattctacacaggagactcatacattatactaaataccaaaactacaagaagtggtgccaaagtacatgatcttcatttttggttaggtgctgaaactagccaggatgaacaaggatcagctgccatatatacagttcagttggacgagcatttgaacggagaaccagtccaacatcgtgaaacccaaaaccacgaatctcaactgttcttatcttacttcaaaagcggtggtattcgataccttcctggtggtgttagctctggcttccaccatgtcgatcctaatgctttcgagaagaggctgttccaagttaaaggctctagaaatattagagttaagcaagttaccccatcaatcgcctctatgaacactggtgactgctttattttggacgttggaagagatatttatgtctatgttggtactaaggctagaagagttgaacaactcaaggctattaatgctgccaaccaaattcgcgaccaagatcatgccggaaaggccaaagtaaccattgtcgatacctacagtccagaaagtgactatactacattctttgaagccttgggtgaaggttccagagactcagttcctgactataccaccagtgacgacgatgaatctttcgaacgcacagaggaaaatcatgcttcactttacaaggtatcagatgctactggctctgttaaagtaaccaaagttggacaaaaacctttggaagctagttcattggaccccagcgactgctttattttggataccactgatgccttattgtatgtatggatcggcagcaaatgtgatgaaagagaaaagaaggaagcgatgaataaagctgatgggttccttaatgcgcacaatcaccctaaatggacacatgttcaaagaattgttcaaggagctgagcctactgcgtttacacaatatttcagaaattggcaggcctttggagaaacccacccaagattactacgttctgtcagcacctcagcccacctttaccattgccaaatccgttcaagatctcgcagacttaaagtcgaagagattagggactatgagcaggaagacctctgggaggatgacatcatggtcttggacgctggtgatgttgtgtttgtttggaacggcaaaggagcttcagatgaagaaaaatctagaggacctaaatacgtacataaaatgttgaatcgtcaaggtcgtgaagacgtaccagtaaaaataatcgagcaaggtgatgaaccagaagaattcacaatacacttcccagcttggtcagcagatcactgggacaatttaccagatgtaagaagctacatcaaaaatgaggaagactgaattctgttatcatgattgaccaacgcgtcacttgttttaaataaggcttttaagttgaaaaatgtgcgcaaaaatattatagctttaacatttttaaatatgcatttatatagctgttttagttttttatatgccaatgctctcggttaaatagaaatagtttcaaaattattgttacaacactagaaagaacttatgaattgtgcctaaaaagatttttaaataatatatttaaatgatactttatatatgtactgttgtgtacctatcagtgttattttttaaaatgtatttgttaagcttgtgtggttacaaaaactataataaaaatattatactttaaaa

SEQ ID NO: 6737 - DNA, 2142 bp, Diabrotica virgifera
  SmartBlast Evalue=5E-31; Info=Arylalkylamine N- acetyltransferase n=1 Tax=Periplaneta americana RepID=Q76EI8_ PERAM
tggagaactcgttgaccgtgagtttcgcgttgtttgttgtaaattaaatcaaccagctagtaacaaattatgacttccccaacagaaaaatcttataaaataagagacgcaactaaagccgatagggatgctattgtggagtttttgaggattagttttttcagagacgaacctttaaatgcttttttagaattagtcacggaagaaaatccaacttgtgaaaccttagaagagttcacagtgggacatattccgaatgggataaatttggtagcaattcataatgatcaaatcgtaggtttaatattgagtacacctttagaaaaagtccaagaggaacaatatgactgcaaaaacgaaaagtacaataaattggttaggttactggactatgctgcaaaacatgctgatccatttgttatatatccatcaagtaccaaaggtatatcagtacaagtaatatcagttagaaaagattttaccggaagaggattagctgttgaattattacaaaagacatgtgatttggctcaacaacaaggatatgatttcgttgaaattgcatgcacgagtttatattcagcaaaactatcagaaaaattaaactttgatctaaaatattccttgaaatatacggactacaaagaaaatggagaaatagttttcaaacctgagtccccgcacaccaccttgaacgtatacttgaagaaattataagtaataggtttgcgtcaaatggaccgtgatagtgtgatgtcaaaacgtcaaaaaggtttccaaatattgatataaaagtaccaaacaaagcaactgtcaattgattatacacgtgatttgtgtaatcatttttaattttattttgttttaacaatcatctgcacattttttctaaagatacaatctttgttagtcatatcaatcatatttcttttaattttataaatgtccttacacaaaatcaaggatttacacactatatagtacttactgtgtttcttcaggtttttaaccagtcctatttggaaatgtaatgggaaatatactatgagcattgattacaatcacgggtacccaacacattacctaccattttgtaaaaattaaacatcctacaagcaatatattccaattataaaaagcaaaacaaacaccatgtgtgaatttctgctttgtttggaaaccatttcagagtagccaacattgatttgacgtcacgactatcacggtccattgctcgtccggcaaaagagtgacacaactccaaaaatgcacaattccagttatcttgttaagtttactccaaaaatcctataggtacttttaccagaaaagtgtcacataggtatgtatttacaacttcgtaagagagcagtagtgtcattattcatttggcgctagaatgaatatttttattcccgaacaatgacacttttgagttatgctctgatattcgacgtgaacgtttcgttatttatcacgaaaaccgttgcatttcgagaagtgtcctaggtttcttcgttaatgtttaaaaagtgaccaatattttaaaatagaagtgacataactcaaaatgtttatgttttttctttgttaaatcagatatcatagtttttcttcttacacaattagaagcattcacttaccgaaaaagttgttttttgagttgttgcagttttattccggatgggcaaaatccagtgaagcaattctagtgaaaaatcattaagtttgtagctaaacttttcaacagaactgataaaaactggggagttattcatattttttctactttgaataataatttcatattagtgaatcattttggaagcctgtacataattggatcaaccctcgtatagtttatgttgtattaggtaacaaataaagtaataaatatatatgtattatttaaaaatgactaaaagtacaaacattgaagctaataatttataaagtttttatactatatttttaaattgctgattaaaattacgataatcatacgaatcaagcaagtatgaaaattttccagtgtttgtatgattcatacatctcaggctgtgatataatattgaaaatattgttaattttttattataacagtgaaaaatgatgtacttacttaataaaaattatttaagt

SEQ ID NO: 6738 - DNA, 2142 bp, Diabrotica virgifera
  SmartBlast Evalue=5E-63; Info=Rho GTPase-activating protein 18 n=1 Tax=Harpegnathos saltator RepID=E2BYW3_9HYME
aaattgtattagtaaatgtggtagcttgtgtgtgtcgcgtatatacgataggaggtacttaattcgaggtttttctgcttttattaagtacaaaagagtggttattttattccaaaatcgagcataaataaactaaaaagtgcaagtgttatttaaaaagtgtcaaaaagtttccagaaactgtttttaataccagaatgagttcataaccacaatcttggccgtgattatttgattgtcgaacattttaatacaacaatggatttcctgaaagaaatctagtgctagcaatggaatcggaagatgctctgaaatattatctagaggaagtcaaagatactcagcatgatataaaccacatcgaagaagaaatacacataccaaacgaagccgaacaggcgactgacttccttcagaatgcgggactcggagacctctcaaagctctaccagcagggcaaagagataaccgaaaatgtgatcaaaaattccgttcatcaaaggaatctgagcgagaaacaggcccagactattcgatctcgagtgaggattctaaatcaaacattgaggagtcgacaaccacgaagaaaacaaagacaggacattcgagacatttcttggaatgctgagacttcaagtacaggaactaggtcacgatctgctactccggattccttggattctcttgacaatttaaatgacgaaattacttatgatgaccaaaatttgacttcgctatctcccttctcactggatctacaagacacaggaggaaaaaagaaaataaaatcaacgaatagtgaaccatggcaaaacaaaaagttttacagaaacgaccgaggagatgtagctcatactggctctgaaaatgtagttctaaaaggttaccaagctttatccgaaaatggaacatcacctcgacctcccagagaaagaagtggtagcgatccaaccaccgagatccatttccaacccctaaaacaacgcaattctgcagactctgtgagaccgacgcaaaacgatcatcataaacctctgtttcgaagccatactagtgtaacaaagaataacacaaaggtttacttgaacagtaatgaaaccaatgaaatagaagctgtcagttttgaaggaatgttgaaaaatgataatgatactaatgctgtgattattgaaaaatgggacaacgaagggatcagtattgatcagttaagtgatagtgaataccaatatttaaagccactgttgtacatggaattagttgccatatttgatacttataagattgttacgacatatttaaaacgcaaggctagtaaaaacaaaggtggaaatgtttttggggtgaacctttcaacattggtaatgcgtgatatgccccgaccaaccgatcactcaatggtaccagagatttttcacgatattatagacaatttgaataccagatgcatcaaggaagacggaattcttcgtcttgccagccaaaaacaaaagctggagatattgtgcaacgatatagaaaccaaattttatagctccaatagaaaagaagtggaacagttgcttaaacaagcgcctgttcacgaattaaccggagttcttaagaaattattgagagatttacctgaacctgtatttacaatggaactttttgaaatgttttataagactagcaatattgctaacaccgaaatgaaattaaaagctttaaatttgctggtgctgatgttgcctattgagcatcgaaacacttaccgtctattattaaagttttccaaaacattataaataacgagaagtacaatcgaatgaatttacacaatgttgctatgattagtgcgccttctttgttccctccaagactgttattacctaataaaacagcgctgaagcaactttcgaaggaagaaatgacgaagcagatccaagatgccgcagtgtgctgtatactgatggaggtgatgctaactgctggggaccagctttggattgttccgggttacctggctgaccaagcgagggaggcccagaaaagagctcaagatagaagggatctgagcaaagacaaagacaaaagaattcggtctggtaaaaacaaaccggtaagaagcaacactcattatgaagccagtgtaatgaatatacc

SEQ ID NO: 6739 - DNA, 2139 bp, Diabrotica virgifera
  SmartBlast Evalue=3E-60; Info="Protein FAM13A1, putative n=1 Tax=Pediculus humanus corporis RepID=E0W353_PEDHC"
agcctctagcagacgagactttgcctttatttttttgtatgctatgtaagaagattccattggagccttctcctctttttggatcatttttccagtcttcaactgtacctccagttcgaactgctttagctttcttttaagctctttcctctcctccatggcgatcttcagctgctctattaattcgtctttggtcatggaatggagattatctccgacagagctgtcagtatcgctatcagtgctggtggaagggaggatcgttttttctgattctgtgtcgttggattgggatgaagaggtgggggtgacgaaattcatggcttcgttttcgtgaattgttgctaattcgtttcccgataaatttgtcatcgctagttttgacaccattctcttcaacgtgcggtatctgtcgtaaaaaggtcttacaacatcgcggtcttctttggtattaggtcgcccgtgtattgattctaacagtaataaagccttttgaacagcaaccttctcttctaccaattcttctgaagacatttcatcgatgttagtgcttctattggcagcttctctcttggcagatagttttttttctatctcgctaatggtaatttctaagttggtaatactagcagaagtcttttcatcggaagataacatagaattactagtagatatttcatttaactgcttttgatctctcttcaaagaactaagttcagtatacagtttcttaatattgatatcgttcatcttctcaacatgtgaaggcttgtaaccatgcttattttcaaattcaacttcacacttctttatcttctttttaatactgttgatttgtttggctagcttgtgtagtctttcgtctagaggattgtgaggttttttatccaagttggtggtgactttcggaacgtcaggatctaggtagatcctatgtgtagctatgatggagttcctaggggaagacaacagtcgatttgaagcaatgatgggcattgagtcggtttcatgaccctgcctggaagtcaaaggctcagaacagtcaacttgttcgtgcaacgtggaccaatccacaactggcgaaaccagttcctgcgttggactaggggatctgtttccttcttcaatgtgtagtttcaaaaatccggttctagagctgtcgtgttcggctagaaagccaccgtgggtgagctggagctttttgtgctggtctcttgtatcgaaagatagttcaggcttgtacttagggcgtggaatacattttactttaagtcttttggtggggtgtttctttcctttggttgctagcggtcttgcgaatctctcgtgggatcttcttttttcatgttcacagtcgtcgtaagtcaaaagcttatcagaaccttttttcgccgtagaactagccactctttctacagaactagctctttggctctgaaaatcttcgctactcgatactctcctaatactattcttattttctacgtatttcttttgagcaggcctctcttcagaactcgatctaatcacttttctctcctggcacagagagctgatgctttcttgtctttcttttcgcttcctagctttgcacgtcgctttagcttcatcgtaagtcgttagcaaagatattggtttgctgtttagagagcttgttaggacgcgcttctgcttacccattttaccatcgtgcaacttagaaggggattcttccttccgagtcggacctttcatgctttttcttcaacctttattaaaagcttctagtttcacaaaattatttattagtactttaatacttatgtatggtaatgaatatctctaataaataacagaatttatgaatatgataaagttagaactttgtcgcagtgtgattttaatgagttatgactgagaacacatcgggttcatatctctatctcgacacatatcgtatctatggctgtttcagaaaatgggttgacaccagccgaaacttcagcatgagagtgatcacaccccacgaaacagtcttaaacgctgagctagcagatggcgattaatttagattctgagtcatcgctggagtataaatggtgattaaaacaaaatacggcaaaatagaactgacactgtgtttttgcgtctagatttcgt

SEQ ID NO: 6740 - DNA, 2138 bp, Diabrotica virgifera
tccggatgagcgatatgtcgctcatccggaagaaaagtgacacaactcaaaaaatgcataaatccagttatcttgttaaattgactccaaatatcctatacttttatcaggaaaaatgtcacatagatatttacttccaacttctaaagatggcagtagtgtcattattctttggtttggtaaaatgaatacttttattccggaacaatgacacttttcagttatgctctgacattcgacgtgaatttatcgttatttaacacaaaaactgttgtatttcgagaagtgtcgtaaagtatttttcgttatttttaacaaaagtggtcaatatttcaaaagaaaagtgacataactcaaaattctgatcttttttctttgttaaatcagatatcatagtttttttggatttgcctcttacacaattagaaacattcacttatccacattcttcgtttttaatttatagattttagcagttaccgtctaaaatttatagttaaattaagatctaaaaaatctatttttgtcttccccgaaaaacgtgcttttttgagttgagacactgttcttccggatgagcgatgtgtactttcaagtggagtgtaattgtacctgctcccaacttctgcagttttaatatggttaaactacgttgacgtaaagttttcttgcggtatcacgtaccgcatgtcagtgtttacgtttctatagttaaaagcagtccattcagtattgttctgctattagtatggcagcaagttcatccagttattctacttttcagtgctttcaacattagtttactattttttggttaccaatgctacttttttttgtattcagttctacaggattttccaagaatctccaccattttttaatatcatgaatgcgttcataattttcttgaaaaaatgaagtttattttatttgaaacagtattttattctacagcagtgtgaagaatcattccgtagttaatgtaaaaaacaaacaagaataggcaacggtatgacataccgcatgtcagtgtctacgttctgaaacatccacgtcaatagttaagggctaaatttacagtgtgatcgagacggtagtaaaataaaagttgatttgacaacatattttactatatttgaggtctagattcgttcaaaatcgttccgacagagttacacctccctatttaaataaaaaataccagatgattatataatatgtactatatactatagaatgactttgatttttatatcgagaggctattcctgcatttcgttaggtaaaagacatcagattctatgtaattttgaacaacagtgtcgattccaaatcaatatcatttttacagataacacttgcaaaaaaaaataggaaatgcaggaaattaccttctcacagcaatgtaaatatatacagtatggttcatgataggactaaacacacaaaagtatcatatattcgggtctatgatgaaacatactgtaagtagtagctttcacggacatcagaaatctacaaaaaaaaacataatagtaataatatgaaaaaatgcataactccaagaaaaactataactatagaataactttcgattcctattcgatgattgaatttgaccgatgtctacttattttcaaatctttaattacgaatatttaaatttaaacaaacaaacaaaaggttgcctcaggaggggaggggggtgtatatatattatccattgtatatataaacttcttcaaaatcagtatcaactcattcactactgacacagtaaagggaggtcaatcttttgtcccataaacaactgttccagatcaaattcaatctttccgataggagttttagttaggcactaagaaataccgtaacttttgaatatgtatatgtaatggattgtcagtcagtggttatattgattacagtgactaactgatttcttttccttgttttttttttgcatatgaatcaacttgtttaggttgacttttgatgtgttactgtacgagtcgataaaaaatgtgtggaaccagacaatcacacaggacaagttgttataaaaacatcaaaacatctaaaaactatatattatatactttggcaggttaagacatttagttctgccaaaaaccgat

SEQ ID NO: 6741 - DNA, 2133 bp, Diabrotica virgifera
  SmartBlast Evalue=1E-178; Info=Autophagy-related protein 2-like protein A n=1 Tax=Harpegnathos saltator RepID=E2BCN5_9HYME
tcattttcttcgctgattgtcatcacaggtggatggtgggtgggggtgttatgtttggagatgttgccttggtcatccgtcttttcgcaattatcgtcactaagatcactgaagaaattaatgagaaataataaagagtcttgatcaatatttaatcgaagcggcaatatcgatactttcagacaacattcctgagttggcagcttcgggtcaggtcgtatgtgaagggacttaatgactaccatatgtgcatgtgactgttttggcctgctttgactagtatattggtataaaatttattaaattgacttgattctaatctatctacaatttctacgtcggatattattaacacttgtcgcgacgcttgtgtcgttgtttctggatacacttcgtgttgaaatctaaccttatttaaatgtaactccatgtgaacatcatgatccctattaactcctcccttgactatccaattcatgttagctctcttcttatccatattactagtgatatgcacttcgtttttactttttttggaaaaactaacggtatcattcagttgagtttctgaaaattgtacagtcttcttcttgttttcgctttcggctattttgaaatcgtttccaccatacatgtgccactctactgtcatgtcacacagagtataccgagtgacaggagtgggaaacgacttgggaggtttcagaagatcagttttaccaacagggatgttgaagtgattatcaatgactcgcactgggtcgctggaaagccatcgaatgtcaggaatgccatttgcagggtatagtcctagaccgggttctttacctatgatacagaactcatcatcggtgtcactacttctattggagtggtaagcaatatcacctaattcgtatgtcacttgtggtagaggtttggacagtgtttcttgttgtattagctgcttttcgtcgggaaagtaaaatagtttggcaccgaggtttgaagaatgcatcgtattatcttctacaatttcactttctttcatggcttctcccaatagtgtgttaacatgctcatgttggctcttcgacaggttactaatctgtggttcaaccgacaccaattctgcttcggcttggtgtctaggactcgagtaagagcttcccgtggttgtggaggctggtggtgatagatctccgtcattggcgaagtatattatgaggttcgttaacattttacagctgtctgcgcatgtgtgtatgttgagaatgttattagatgctcgaaggtcgatgtgagggttgatcccacttctcttatctgtagttcttaaactcaactcaaacagtcctaattgtaagacgtttacgtaatctctaattaagtccacgggtgccacagatactttcccgtttttcgagggagctttttcgctcaaaaacagagcacattcttcgaatataaacctcagcgtagatgaattcgattgggctgataagtgcgaagacatactgaagtttcctattgtgattgcagatctaatagctaaatttaatggcctataatctatggcacaatcccaaacgtgtaaatgtaattcagtcagaacatctttggcatgataatttgctatagggtaatcttgtacattgaaaaagtctaataaatgtgaaatccaactattcggttccgtgcacattctatgttttaacgtactcttgtttaatccgatggctactctcacagtcttaacgtgatgagtttcgtggttggcttgtattcttattgcgatcgtcagcatctctctatttcctcctctagtttttgaggtcgcaagcataccctgctcagatttatatatggtgggatggagatgactcgcaacaggtgacccaaatggttttatggtaggagcctgactaggaatgcccatcatatcacaatggtacagctgagcgttatgtaattgaacacaaacaaatcccaagttatcatcacctttgtatccactaaccacaaaaatgttggcgtcgtctaaatttaggaaaaattctccctgttgaccagggatcacgttgcttccagaatctctaacaggcggatggatttctagaattccttgaactatctggatgctaaggacaaagt

SEQ ID NO: 6742 - DNA, 2132 bp, Diabrotica virgifera
  SmartBlast Evalue=1E-146; Info=Beta-N-acetylglucosaminidase NAG3 n=2 Tax=Tribolium castaneum RepID=A5YVX5_TRICA
atgcgaattattattgatacacatcaaataaattttatagacacgaacgattaaaatgttgcttattataaagttgatttaaccgtttaatatttatttatttatggtgtatattttattctatcgttagaaacttttaaaataaacctcgtaggaaaacagagataagaaacaattctaataagctcggtttcgacattactaacattaagttagttttttggttgatttcatgtcaacgttatcaagagaatatgaattttctcgggtttcaagtggagcctttggagtcgatgttggtgttaggcgcagatcaagacgagaggtcatcaaaatgactgggttaataagtttgatagtgtttgctctggttattactgttgtgtatggtgtacattattcggaaagtgatggtcccacattccggtattttcaaagagttgaatctgctaatgaaaatgacaaatatcaaaagatatccaattctacaatatggacttacgaatgcagatccgaacaatgtgagagaagaccagctgataccaatgaaattagggtgtccctagagcagtgtaatatgttatgcagtaatccgtccttatggcctaaaccaagatcagtttacgtatcaaacaaatccgtttcttcttttttgaagaatcaaataaaattgaaaataaatagtccgtcttcaattaaagatgacttaaagcaagccttcagaatttttttgaatactattccagatgaaaggaaatttcgaactcaagatgaagtcgatgtcgcagatatcttcattaatctgaccgttacaaaagatgataataaaccaaaacaagatacggacgagtcttacactctttcggtaacaaaatcaaactctaatataacggtaaacatttcatctacgacatatttcggagccagacatgggttagaaacactcagtcagctaatctggttagatagcgtttcacaaaagcttctaatatatcatgatatttctataagagacaaacctatgtttcctcatagaggcttgatggtagatacggctagaaacttctttcctatgaaacagctcttaaaagtagtagatggtatggctgctaataagttaaatgtattccatctgcatttaactgattctgtgagttttccaattgtacttcctaataatccttggttggccaaatatggagcttacagtccagaaaaagtctacacaccagaagaagtaaaaagtttggtagagtacgccagaattcgaggcatcagagtaattttggaagtagatgttccaagtcatataaacgaaggttggaactacgccaataagaacgacgacaaaatagtaatatgtggggaagaagatgtaaatggtggtcacttaaaccctgataacccaagaagctttaaactgttagaatccatttactcggaccttattcagttaggtactgataatgaaacttttcatattggaggcgatgaagtagatttaaattgttatggaaagacgaacgctgcttctcatttttccgacccccatgagttctgggctgacctgaatcacaaaatatttaaaacagttagtaatgcttttaataatcaaccaccaaaaaatattgttatatggtcaaatgatctgaccagtaattatatgtcgtatcttaaatacacgaataaccttgttgttcaattttggtatggacaacttgatccaatactaagaaatggcaacaaggttatattttcaacggtctcaaactggtacttagattgtggatttggaccttggaaatcaagcaatgatgtaggaaattgtgatccatataggcattggaaagctttttatacctacagaccatggtatgaatatcatacgtatagacaacaggttctgggaggagaggcatgtttatggagtgaacaggtgggtgtagatgatttagaaacaagaatatggccgagaactgcagctatggcggagagactatggagtgatattcctatttttgactcaaaagacgtatttaccagaatttctactcaaagagagaggcttatacaacggggcctcaaggcagaagcaacttggccggagtggtgtacacaaaatccaggaaaat

SEQ ID NO: 6743 - DNA, 2133 bp, Diabrotica virgifera
  SmartBlast Evalue=1E-115; Info=Endonuclease-reverse transcriptase n=1 Tax=Bombyx mori RepID=D7F170_BOMMO
tctccaggcctagaaggcccatggcttggtttactattcctttccaatctctcctatttgctgctttatttttccaatttgtgattttcagttcttctatgtctttttcaacatctttcttccatctggttttcggtctacctttcttcttctttcctcctattcctcccgttagtattttttttgggaagtctcgtgtttggcatcctttggatatgtcccaaccatctcagtctttgtgattttacgatccctactatgtttggttcaccatacatcctctccaattccacatttggtcttcttatccacattccattccatatctttccgccaaatatttttcttaggacttttctttcccatactttaagcatgacttgctcggatttgttcatcgtccatgtttcactggcatacaagactataggtcttatcactgtcttgtatattcttatcttagcccctctagatatgttcttatttctcaataagttgtttagagcaaagatacaacgattaccagccataattctcgcttggatttcttcttttatatttggtctcctagtgaatgtcgctcctagatattggaatctctctacttcttcgaatttatatatttttgcctctgtgtttattgtcagatattgtccttgtgtgtattctcgttctgtccattccatatatttagtcttttcttcgtttatgtatatccctttctttcttcctatcgcctctagtctttttagtatttcttgtaattcttgtttgcttctggctatcattactatgtcatcagcgaatgccaagcattggtgttttcgttggtatacaagtcctgtcctgttaatttcggcttctctgatgactatttcaagaaggatactaaacaacagtgatgacagtgggtctccttgtcgtaccccttcaccgaccctaaacttatctgtttcctttccatttattttaaccctgttctctgtttctctgagtgtaacttttaccatctttattaattttttactaattccaatttcacatagtgctttgtatatttcttttcgtttaactctgtcaaaagcttgtttaaagtcaatgaatagggccattgtagattttccgtattcgtagctttccgcttgtatctcacgcagcaggaaaatttgatccaccgtgctgcgtcctcttctgaatccacattgatattctcctatgtcattatctatcttttgtgttatcttgtcttttatatgtactgcaagtattttatatgcaacgtttagtagggctactcccctgtaattatggcataaacttttgtcgccttttttgtgaattggacacagtgtggcttcagtccattcttttggtatgtgttcttgttcccaaatttcttttatcagcttttccaaatgcttaattagtactggtcctccatatttaaacatttcagctgttatttcatccttacctgggctcttgtttttctttagtttttctattatttcttttatttctttttcattaggcggtctttcctgtatttcttcttgatcaatattttcattcggtccttcttcttcttcttctgcatattctgttgtgggaatttcatttagaagctcttcgaagtattctctccatctgctcagtatttcttcgtcgcttactaaattccttccatttttgcttttgtagtgtacaggttttctttggaacccctttttctcattttttactccttgatataagttcctgacttctccatttttatagttttcttctatgcatttcaatttatcttcgttgtactttcttttctttgctcttatgattcttttagttcgttttctttgttcgttgtattgtatctccatctctggtgttttcacttgcatcattttgagtcttaacttatttctttcatccagttctattttacattcttcatcaaaccattctttgaatccatcttttatatttctattactgacttgcgctgctttggtcatacatacttttatttgcgtccatttttgttcgatgttttcattttttgcaatattttccagttctctagtgactagtctttcatatttactttgttcttcttctgacagtagtctaata

SEQ ID NO: 6744 - DNA, 2131 bp, Diabrotica virgifera
  SmartBlast Evalue=0; Info=Phosphoglucomutase n=1 Tax=Spodoptera exigua RepID=E1U7I4_SPOEX
acttaaatatgttttattggatgccaacttcaacaagtgtaataaactatctttaagcgagatattggcagtatcaagatgcaaaatgttcaagctacaccggaatgatacactttgaaaaatctctcaacataaaaaataacaacgaataaaaacatttcaatataatttcatcaaaattgtaacaaaatataataatgtatatttgaaaaaaagtgacaaaaaactaataaaatctagtacaaacaatatttttgtaaaatttcacctaaacttattattctttttctcttaagtagtaacatgattatgtaatgacggttggagcgtcacgacccgtgaatttcttcagttgggagatttccaaaccgacgtccaccaagggttttagcatttcttgtgcatctgatagtacgttcttcttttcgtagctatcaatgtatactcttatggtggcgccgctgcttcctgtacctgacaacctgaagattaatcttgaaccatcgtcgaaaagtatccggataccttgatttttagttacgctgttgtcgatgggatctacataagaaaagttgtcggccttgctaactttgtaggatttaccgccagctgtgaatgctttaccaaccaaggcatttgttgctattaagttttctaaatgtttcatcatgtcattcgctgcgtcactttcgcattcttcataatcgtacctagtaaaatagtttcttccgtatatactccagtgttctttaaggatttcttctacgctcatatttttgtgttcaatcactgataaccaagccaaaacagcccaaatgccatccttttcacgaatatggtcagaaccagttccaaaactttcttctccacaaagggataaccttccagcatccattaaattgccaaagtacttccaaccagttggaacttcaaacatttccttacccaatttctcagcgaccctgtccacagcagcggcggtaggcatagacctagcgaaaccttgtacgccatgtttctggaaatatggaatgcattccaagttgttggccaaaacagctaaactgtcacttggagtcacgaaaaatgcgtttttaccaatgatcatgttacgatctccatctccatcaaaagcagctcccaaatcatagctggggttggctttgactttgtccacgaggtctttagcgtaagtaaggttaggatcgggatggatttcgccgaagttgtccaatggaacgattcggcatacattattgtcaggacttgcaccgagttcctcaacaaaaatacgtcgtacataaacgccagtcactccgttcatggaatcgataagtacattgaaggggggacgctgctcagttccacgaatcaaagttcttaactttttgaagtcgaagatgtccttcatcaatgctacatagtttgccgtggaatcgataacttcaacgataaaatcacgtccgtccactttgactgcggtagttcctaatatatcaataagtctatcagtttctagtttaggcgtatatttgtacgattttattttcttagtgtgttcataaatagcatcggagacttgatcaggagcagggccaccattttcgatgttgtatttgatgccgaagtcgttacggataccaccaggattgtgagaagctgtcaggacaataccacctaatactttatggtgtcttataaggctggaaacagcaggtgttgagagtattcctagttgaccaatgagcaactttgaaaccccattagcggaagcgattctgataataatgttgatggcctgtttagagaagtatcttccatctccaccaacaataagtgtagagcctttagccttgtctcccaaagcattaattatagactgtacaaagttctcagtataatgtttttccataaacactttgactttcttccttaaaccgcttgtgccgggcttttgcccctcgaaagctgtagtttccacatctactgaacttaatgccatttctaacccctaaaaggtaaacagcacgcctttaatgtttttatttgagtgtatttttagttttttctgggatatttaactgatgacagtctcacttttccttatattttgaacactccaatgtcattg

SEQ ID NO: 6745 - DNA, 2130 bp, Diabrotica virgifera
  SmartBlast Evalue=3E-84; Info="Solute carrier family 2, facilitated glucose transporter member 8 n=1 Tax=Harpegnathos saltator RepID=E2BLV7_9HYME"
ttcaaattatatacatatatttcagagtagtatactcaataaaaaatctcacaaagtaagtcatttgtacatatttacatatacattatccttattcttaaaatcaagactgataacatataattatcttaaaatagaatcattctcgtatcacgatggacaatctacgtaggactacaatctatgacactccttgaattgggtcttagatattagtatttagcaattagtggtagagatcacgagtttacctattaattaaaagagaagatattgtgtataatcaaatctgatctcaagtcagaagaagttattgaatgtggctcccctcacttcacattaagaaatggattgtttttaaaaataacgattttatcatgttttttatatcattggtcattcctgcacgaaacctgtcatctggctttgtcacgtcacttcaaatttccaaaaatttcaagctatcacatcacgccaaaagacgatatttctccatcgtttattttcattttcaatgttactatgaataatcgtaaataacagttacacaaatttaaaacatttgatttaaattttgaagaaagagatataaatatacaaagatagtattgtcaagatgatgttgataatcataatacagaaaatatataaaagcagaaaatggagtcttggaacaaccattatagaagaaagtaagcaactatagattaaccctctctttatatgtaatcttaccactagtgagcaaaatttgtatttcttgtaagcttagtcctgtcgtctctggcatgaatttgagaacaaagagagtagccataactgaacaacaactgaagaatccaaaggctccatatgctcctaataaacttgtcaaaaatccaaaatagtttacagttagaaaacagcaaaaccaataaagagaaataacaattgtggaagccagcgattgaacatttcctggaaacaactcaccaatataggcccaaggtataggaccaaaacccatgctataagcaatgataaatgcgagaagactagcaatgggaagccagcttatgcttgatgtgtcagattttagaacgtctttaatatagaaatagattgccaaaactgctacactgactgctgaaccaataccagaaatcataagcaaacgtctctttcctgatttttcaacaaataaaggacttaaagtactggccagaatttggataatacctacaatgatggtgcaaatctctggcgccaaagcaactccagcatcctcaaacaaagtttgtgtaaagaagaaaacaacattaattccagtaaattgttgaaatattactaaacacaacgataatatcaaagctcttctaagtcctggagttttcattattaagccaaaacctcctttttgctcgctttcttgtcgtatctgtacctgcatatctgctaaatctttttcagcaatagaagtcggcttccctgataatttacttaaaacctgtagtgcctgttcaatttttccacgttgcaataaataataaggactctcaggcaagaatacaataaacaatactatgcatatagttggaggaaagagtaaaataatgttaaataattttaaagttacatatggtcctagagaatatggaaacagtatacctatggtacaaaaaagttgcaggtaagatcccaatgaacctcttacttcgttgtcggcgatttctgcaatataagtgggtatgttgacataagtcataccgcatgctaatccacataaaaatcttccaaagtagaatagttctatttttgtcgcaattgtaaatatgatgaatgcaatgatgaaaggtgtgactgcaattattagtgtcagcttctttccaattttactcgccagtattccacctaggacgggtcccaagacggctgctagcggtaggaaagaagcgatcaatccctcttcggatgttgatataacatgatctaacgggctagcgtccaaattctttaaacgggggattactggggatgaccatccgaatgcagtaccgcagacaaagactgaaatattagcggcaattgccaccaaatataggtatgtacggtttggtccgctagcccccatttccccacgatgcgatggtt

SEQ ID NO: 6746 - DNA, 2129 bp, Diabrotica virgifera
  SmartBlast Evalue=1E-92; Info=Novel protein similar to DNA polymerases n=1 Tax=Danio rerio RepID=Q7ZYY7_DANRE
gtctatattataagctctacggtgtctgctacgaggattttcttgtggcacagttcaaattctgcaataattactaggtgaggcatccataagggcagcgttaaggtatttttaagatttaaatgtaaattttgtgtttttattgtgaacgttggtattggaggtgatgttgttttcaatttgatctagtaaattagtcatatttacttctgctttagtatctatcaatacaggctgttaattcatcgtttaaggcgacaattcgtattttatcgcttggtttgtacccatccttctttttacatcgttgaatgtattttacacccctcatgtatttcgcaaagtttctttatcattctgaagactaccacgtacatagttttcacagcataactggaatctgcattggtgtacattaaattttttattgcgcactggtttataatatgcaaagaccaagggtgcgtagacattaaaaaataaaatgtacagcacaacacgtctgaacactaagagtgcctagaacagaatgagtatcgctattcaggattgtctgttttaaagcctaaaggttttgtgtcaattaatgtttcatcactatgtactgtctttcgtttcttatagctcatcctaaaagtttttgaagccctcttctttgtcacaatgtctttggtctgtgtctcccgatcgatctgatcacagtacaaagtaactttttgtgaagggtcgtcaatgatactactcatagtttgaccatttagcacttggctgttctcgtagtttaatgtgaaacctttaattttagttacttctttgcctttatgggttttgtagtagtaactcttgggaccagttgatcgccaatcaataatataatcatcagtgcctaactcatcactccaatcacctaacatatctcccgttttaacagtatttttgccatcatcaatgtacacaattgagtcagtgtcgaagtaggcgacagcttctcctagtttgtcaatcatctcgtataacctgagacgggcatttgacgtcgtaaaaattgcgataaatatgtttgtagaggtaggatcttccacaaattcatctttggaatcgtaagagacttgtgcaatattatcattaataaatatgacattagaaatgtttattttgtcatctaacaatttctcataccatttttttggatctgtaatatattctgtctgttttaaattttgtctttgtccaaatttaccccatagactgttcagacatattttagctactgctcttctaccagggttaatagatattttagtcagatctaagtctatatccatttgatcttttacttcccgtgcatattcctcgtttgagacatatgtatgagggctactttctaattttatttttataaagtcattaacatagcctttaaataggtcggtggatgttttttcaaaattccatacctcatgaatttttataattttgtatcccttttctagggctttattaatttctagcgtagtccatgtgcctgttaagactctttctgagtcgttatgattgcactctttcgaatcttccactttcgaatccactacacattgatgacatagaggaaacattagtttgtcagttttgataggcaaaaccggatgatataagtcgtagggtggtaatatttggcaatgtactagaccaaaccaagtagggtcgtatgattcaggtgcatatattttaacagggtgtcctactgggtagctgtcgtaatactgtactgtaggatacaatgatacaatatctatatatctgagttttttatctgttacttttaatttaatggcatttgttcgacctccaaaaaaggcatcacgaggttttaaagattcaacaacttgagggtctggagcatttttaaattcttttgattttagccactcacattcccaaatttctactaggttatacccggcttcttttatctgattgactcgtcgaacagttctttcgtacaagtcactcattgtctccttattagcgcggttaatcgtatcgggcgcataacactctggatgaccatgccagaaacagccgttatactggtacaccgtatttgtgttgggatcatatccatctac

SEQ ID NO: 6747 - DNA, 2121 bp, Diabrotica virgifera
  SmartBlast Evalue=1E-174; Info=Protein FAM46A n=2 Tax=Aculeata RepID=E2AXF4_9HYME
gttgccgtcagttgccagtcgctgttggagagggtaacgtcgtcgtcaaatcatcaaatcgtcggtccgtgcgcaatctggtgttaaatttaatttaagtgaaaaagcttaagtcaagtgatagtttaggaaaatgcaacttaaggagtatctgtataagtgcggaatcgaagatgattcagacgacgatgaactaggcgctatgaaagaccttaccatcaacgattacatcaacacaagcgtcaacaccaaacaacaaaacgatttggaatctcaacagcgactggccgtgctcagtttcgaacaagtcaacaggctcaatgaagtcatggacgaggtggttttcatccatggcagaggaaacttccccacattggagatccgtctcaaagacctcgtgaacgtcgtgagggagaaactagaggctgatacctctgctgggggagcgggtatgaaggtgaaggacatccgattaaatggtggcgccgcttcccacgttctggccaccgaaagccaaccctacaacgatctggatcttatcttcggagtggagctgtccagtatgcggaatttcgacagagtcaaaagtgcagttctcagctctttatacgagatgctaccagaaggcgtaaaccgaaaacgaatctccacctgcagtctcaaagaagcctacgtaagcaaaatggtgaaagtgaaccaaaacattggcggtgaccggtggtcgttaatatccttggggaactcccgcggtcgcggtgtcgaactcaagtttgtcgattgtatgcgtcgccagttcgagttttcggtcgattctttccagattatcctagactccctgctactcttctacaaatgcagtgagttgccaattagtgagaacttttacccgaccgtagtcggggagtctgtttacggagacttccaagaagccttgtaccacctccagaagaaactcatctcgacgaggcatcccgaagaaattcgaggaggcggcctattgaagtattgtaaccttttagtcaaaaactacaaaccggcgagaccagactacatcaaaagtttgcagaggtatatgtgctccaggttcttcatagactttcccgacatctctcagcaaagaggcaagttggaaaactacctgtggaaccacttcgtagagcccgacgaagaagccctccgccatcagtacctaatgcttctccacgacgtagtcgaagaatcgacagtgtgcctcatgggccacgagagacgccaaacgctccagctcatcaaaaacctcgcctggcaagtcctctaccaagaccagcagcgcatgatgacccagcagccgccgcctctcgtctacgccaatggaatcgtctacgctcccatcatccagaccaactgctattgcacgtgcaataccacctggatgccacagtgctgttcgtgatgtgcgatcatggacgaacactaccgactggagagcgattggtgaactccattggttcgctggtgtgtgtgtgtcggactatgtagacgcacctcgtacatggacttcagtggcgtgacttcagtgacgaaacgggcgtcattgtactgtacgtttttaacaaccattccaaaatttgtaggcctttctggcacaaaagtaggaaacaattctgacaagacaaaatagtatttttaaacaagaccttaaatagagaaaacaatattaatatcaatgtacaaatattataattaatatttaatcttaggtaattatttataaatacttttgccaaaaaatgaatactaaaaaaataccgcaaaaatactaatcgttttttgtagggaactttgtatatttattctgtgttaagatgaccaacctatcaaaaacaaattgtatttactctttttaaaattaaaataagttaaaattaaattaagcaaataaaaatgataaaagttttcttaaaaaatgtcgtattagaattttttaaatatatttataactgtaataaacatattaggcaagaagaattcgttattagaaagtatataaaaaaagtttaaaatgaaatacttaagaaaatacttaaaaagaattgtcaaggtaatacattttctttctgaaaaataaaacgtttttacaat

SEQ ID NO: 6748 - DNA, 2120 bp, Diabrotica virgifera
aagaagctaatgtagactgaagatttattaactttaccattgcaaattctcatgttgatgctcagagaggtgcatgcgtgccacttctgaaaaatttaagctgtgatttggatagtgattctgaatttctagatttacatgaacgttgtctaacacccaagccatcgcaagtgcctgaagtcgaagaaacaccagtaaaaccttcattgaaattggatgccgcctttctgggagacattccaggacagtacactatctgtgccgtcgaaccccatcaactaccagttgttggggtttacatcgacccaagagtggtccctggttttaaataccgcatcagacctctcccagaagtcggccgtccttctaccactaataaatgcctgtttgataacaaggctttgactttgcagtcaattggtagaggatatgctagacgttttactttcgaagctgatgagaatcaattgaacaacaacgagaactatttctggagcgacaacaggcctgaaggttacgcttttgagctggagttgctgtctgaaggggacaagttcacgttcttcaatcccaatggtgaagctgaaggaacagtagaagtactttctatcgaggcccctcaaattgaaatttttagctctttagcaaaaggtgtcattgacaagaaagccacagtcgcatttacaggtaaagttgagtattatgagactggtgtggctaaacctgtgaatcttactggtactgtgttgtcacgtaaagtgaaaggcagatcttcagctgagatcgttaagatcaccaaagttagtatcaataagcacaggtgttatctgttacctggcatacaaaagattcacagaagatttactgttagaggaaaagatattaacgatgttccgacgaaatatactatgactggattggaatcctttgaaattcccgttgtaggtacttacgttgattcaagaatcatccctggtttctgctacaaagtcagaccaaacgacaggaaagatcatctctttggaggaagagccttaaaactgcttagtattggtatgggttatgccaagagacttactttccaaccagattctctagtggaaccagataactatctatggtccgacaaccatcccgacggtctaggtttggaaccaagagcagtacacaagggtatggaattcatcgtcaaagctggcgatattgtcctaggcgaagctcaagtctttagagatgatcttcctcaatttgagcaacatatggaaaagatacagactccatctggtgtagcaatccaaaaatacatccacgttgacgttttctgccacatccgacttgaagcaacagttggagcttcaatagaaaacgacctacatctcatgagaatctcaggattagcggtagttcgaaaagaaccgagggcatctgaagcccacgttatcagggtagaaaatgttggttttgactctcaattagcccttcttttcacgcagacctacatggaactgacattcgttcctaaacattattaaatgatcagtctatagagaaagcaataagaggtatatgctctaccacctaccttctaattgacacgactcttcctgtttatttcaaactggaagtagatgaatttctaattttacttaaaaatgatttgtcaatgatagtgatgtaagatagttatcgatctcagaatggagatatttaatttaacaatcaaagaaatagtcaccacaatctacttacatcactttttgaattcaatagtcaaatacatagcttttattactttacaagatttatacaatttgtcaccgcaaaaatgtagaggtaatatctcttatgcaatacttctctatatttgatgatctgtggtgttctagcgcaccatttgcttacagaagtctgcttgagctgatgtagcttgattttatgagtattgatttttttaggctattagtttaggttgtacttattttatttaatattaacttatgtaagctacttgattgttatacaattctttacacaaactatatgacatgtttacatattgtttttattgaatttgtttatatttttgttatattttaataataaaactttctgatataatc

SEQ ID NO: 6749 - DNA, 2119 bp, Diabrotica virgifera
  SmartBlast Evalue=9E-83; Info=Rhomboid-4 n=1 Tax=Tribolium castaneum RepID=D2A5C5_TRICA
tagttatcaacaccgataatgtgatattaggtgttatcagtaaagttttacatgagaagtttgtgtttgtgtgtattttgttttaacaggattttgtttagtttgttctagttaagatgtcttctagtagtgatgaaagtaaatctacactggaagagaaagagaaggcggatcaacataaatactataagagtgtatttcgcaaatttgataaggataaatctggaggtgtagaattgagtgaactggctgaaaccttagagctagacgatgaaataccaaggcacatatcagaaagaatatttaaagctgctgacagaaatagaaataacgttttagatttcgaagaatttcgtaacatggtcagaaacgcgtcatacaaggaagtgttttctagatacataaatttgtatattcagtatgttcttccaaaacgaaaacatcatctagtatattctgaacccgatgctttatacgaagaaaaatatacatgctggccaccacccatagcattaattattatctcagctatagaattgacactgtttattataaatgaagaacctgcagaatcaaataattatggtgaaaattatcctataggtaaaatgcttatttatgatccctataaacgagaagaagcttggagatttttaacatacatgtttgtacatatagggtatactcatctaattgtgaatttagtagtccaactattccttggttttccattagaaatggtacataaatggagggtgcttacagtgtacttcgcaggtgttttagctggctctctaggtacctctgtcactgatcctcgtacttaccttgctggggccagtgctggtgtttacgctcttataactggtcatattggaacgatatatatgaactggaatgaaatggattttccactaattcaactgggagttttcctgcttattacctgtatagatattggtacttcactgtacaacaagttttacttggaactcaacgacaatataggatacgttgcgcacgcttcgggtgcagttgctggtctactggtaggaatatggaacttgaagaattttgtgccttcccgaagagaaacttatatatggtggggtgcggttaccgtttacataatatttatgggtattcttatatgtataaatatattttggactgaacattttttaactggtgcaaacacatgatgtatgattattatagtaataattttgttaagactgaattactactgccatatggaagggttttaaaaatagtagaaaatgacatcatttatatttacttaagattaagactgagatttttatatatacgagtacacatttgtgtgatagtggcatagaataacattttttgggggggttttgtgatagttaaaaactatgaggcggtaaaaatctgtataaaatatgtaattaatctgtttcttttgcttaattctgtagaattgaaagtggtgtttaaggtgctatatattaattacaacggctcttctcagggacgtgaactcttctcaggggcgtgaaccctcactcgcctagggtcgcataacgtcaaaaccattaggctcgggctgcgaacctttccaaccgtacctttcttgagcaatatgaaacctagatgaggttttaaaatataaagttaggtgttttgggaaaaagggtttagttaatcaaagtatattgattccagtgccctatatatactattttatttattccggattctctttttttcgtaatatacggtattattaagggaaatattttgacagggccggctataggttatttcttgtaacacaacaatctcagtgaaggtaaaatgtagtacgtacgccactgaatagatgctgagcttccaatcgtttcgacagtcgggctagctcgatactcgagctatagaaccagtggcgcacctaggggcggttttgggggttaaaacccctcccaggacatataaagaacagtaggaaaatgtaacttgtctttaataaactatacaaaaaaatatctgtgcccaagccaaacccccccagacgaaaattctaggtgcgccactgtatagaactagaaaaaatatgtgatttcgtgtgctgacc

SEQ ID NO: 6750 - DNA, 2112 bp, Diabrotica virgifera
  SmartBlast Evalue=2E-70; Info=Maltase 1 n=1 Tax=Harpegnathos saltator RepID=E2B6I8_9HYME
aattttgtgaattagtatagtagtaaccgaaatatacttttgtagttaatgttatattaatataattaattcttttgcaaacttgttaattcttacatcatctctcaagcatacatttttaaagggaaggaagaaataatgaaagaaaatcgataatattcatattcagtgtagtcgtgtagtgcatgtgctgttggttgggtatttcagatttcatttcagcaggattcatttgaggcaaaagtgcacaatcgcagatttgatctgaaatctgacctctcacattttattataacgcccaatataacaacggaagcactacttaaattaatctaattatttaattgtgattagaccaagatgaatgggaatagtaaatcagaagataaaaaggagtcgccaggcagtggctcatataagcctgtaccaaataaggaaatggaggttttaggagatacagttatacgatctaaagctggaagtaagtccaataataaagaaaccgatggagcagacgagagaatgttgcccaaagaagacaccaaagtgtccccaaaatcggaaatatccttaaaggatgtgaaaatcgtaatgggggagaaaaatggtgatgcaaaactcgacattgttgagcctaaggccacttttggtggtatgaccaaagaagaattgatgaagtacgccaacgatccgttttgggtacgtcttcgttggttcctcttcgtcactttttggttactatgggcggctatgttgattggagctattatgatcatctatgctgctcccaagtgtgatcctccaccaccgagaacctggtggcaagtgggacctttggcgacattagatcctgatgctaaacctgaaagtttaaattctcttaacaaagatattaaaggcgttataatcgtatggccagaggactcatataaaccatttgatgaaactcacaacaccatacaactgatcaaaaaaggtaaagaattaggcacgaagattattgtagatttggatccagcagctacagatctttggtatgcagagagtgaaaattcgagtgagaccttcagtgattactatatttggcaacctccttcatatgaaaacggagtaaagttgacacctcctaataattggaactatctaaacaagaactcgtcatgggaatattcaaacgttcgcaaactattctactatgctccattaggtgttccccatctcaatttccgaaaagaggcagttatagatgaattctctaaggttataaagaaattcataggacatggtgcgtcaggaattagaattcgaaatgctccgttattgctggtagatcccaaatttgaaagcgaaggcaaaattggaaacaaggatggtgtcgtgattggagatcctgggttcttcactcctaccaaaactatgaatttgttggatcttggcaagctgctgttgaattggaaggaggtggtaaggaataatacagtggacggccttttaatggtggctgaagaattaggcaaaattcaatcttaccaagtcaacgacagcttagtggtggatctacctcttatgacaaatgtgttctccaaacccaacgttacaaccatcgtgaaccggttaaatcatacatttaaaattgataatgtcaaatggcccctatggaaggaaacaagttcttctcttcctccagacgtcgtcagtatcgtgacaagtcttcttccaggagcaagtttggtgaaattaaatgatactatagatcaccagcttcttcaaattagggaatcgccttcgatcatgaggggtaattgtgacatgtatgcagtcagcaatgataccgtattcgcttttgtcagggagatatcaggaaatccaggagttctcgttcttctaaacacaggtgatcagaaggttactctaaatgtcaaacaaaacatcgccgccttgtccgatttagacgaggtgacaatacaatattatagtaaaaactataatgagactacacataaggacattaatgccaagaaagattcgacagatatacctatatcaccgaaatctgtgttggttctccaatatgttccgaaaaagaaacagtaaatggagatagatgaagaa

SEQ ID NO: 6751 - DNA, 2116 bp, Diabrotica virgifera
  SmartBlast Evalue=4E-40; Info="Vascular endothelial growth factor A, putative n=1 Tax=Pediculus humanus corporis RepID= E0VES9_PEDHC"
gcaagtcaagtcagttattgctactcaccggtcgaggtacgaattaccgaaagactcgttcctcgttctccaaaggtcgtctcgattcacgcgaaacatatgattttgctaaactgataattgaagttttaagttaactaggtgaccatgcatcaattatttacggtttttgtaacgggtgtttgcttttttaattgtgcgggaagtgaggagtatgttagtgaattaaaagatgcccaacataaaaggaatacggacacacacgaatcttactatcgtacaggaatagaatcttatcacaaccaagagggttatggcccaccacatcatcatcataatggatatcctcacccagatgctgaacctcggtcgtattctggatccaacgcagactcgtggaacgattaccaaacacgacacagaattccactacctaatccgttcaatactccccaggattatcaacctcgacagagaattccaggacataattcgttcaatcctcctcacgaatatgaaccaagacatagaattccagtacaactttcgttcaatccacctcacaatcatgatacatcaaattgtgaatcttgcgacgatgacagaaatgctagaaataatcggaagcctgaagtagcagttacaaaatacgctaataatagcgcaaaagagattcccagagattatttggaaaaattggatatgtatgacgtagatgatattttactaaactatcttgacggatatgaagatgacgaccagacgccattattttcaagtagatttggatctgacacaacacaagagagaagtaagttggaaaagaaagcgggttatattcctgctaaagcaggttgtaagccggaaaacactacagttcctctggtaaattcagacgatccttccattttgtacattcccaaatgtacaagaatcgagagatgcaatgggtgctgttcacatcgactacttgcatgtcagcctattgaaatcgaaactatttctgtacaagttataaaagctcaatacacaggagacaaaaagatgcgatacgtgtccaaggaactcattccattagagaggcatataaaatgcaaatgtgactgcaaacattgtcttccaaaccaagtatacagaaaagacgaatgcgactgtgtttgcacaaacaccgacgaagagaacaaatgctacagagactacgaaaggaaagagtgggatattgacacttgctcctgcaaatgtagaggagtatacgactgctccacaggatccgtttacgaccacaacgaatgcaggtgtaaaactgcaccaaagagaagatacgcaggtttggaaagaaaaacgcacaatagagagaagcaaaatgttgatccattagacctatagatttttattgtaaaattatttaatatattcatggaaagaatatttttttatctcatcagaattcagagctcttttcctaaaagtagtttcattgtgatttacataatatatgcaatgtggtctattagtgttagtttgaacaaaaccacatactatgtttcacgtacgtgtatgttcatactcacctttatattaactgaacaaaaaatcctaagtatatactttacattttccttaatatcaacaaaaatcttacgggataaaatactctagttccaataaaacaataacttaaaaatattataatcagcctaaattagataaggaggaaattactgtttgagttaatgctttaacacgtccactacttctaaaaaaagaaaaattgtggcaccaattggagccacatacagttaacaaggtaatataagaactattgttcaaaaatatgatccaatcaaagtatgtcttgcaaacttttgcaggttagaagtttctatggcaattttactgtaggtatgtgaaataatgaaactataattaatttataatgtagccaaactagttcattgttctggaagaaaagagtgaagtgaagagagtgagcaccaatagaatttcggtaaatttaactgttttttattaatttttaaaatacaagactaatagttttgcttgacaaacttctgatatttgtagagcctgaaaatgcatattcttgcagtaatag

SEQ ID NO: 6752 - DNA, 2112 bp, Diabrotica virgifera
  SmartBlast Evalue=1E-135; Info=Putative acylpeptide hydrolase n= 1 Tax=Heliconius melpomene RepID=C9S261_9NEOP
gtgcgctttggctgaatgaaagtcacaatttcgaataagtgaatttttctatactgctggatatttaacaattctttaaaatgtctttaaagatagataagttcgtaaagacctataagtcgatatcacgaattcccgcagtggttggaggtaccatcagatcaaatggaataataagtactcagtggagccagagaaatttggagaaaggtaaaagtactgaattcaccaaagaattcttcactacgaatttaaaaaagactgctgaatctatgccaattgatgttggaacagaaatcatttcaagactatcaaaatctgaaaaatacagggctgttcttcgagactatgatagcaagcaatttttagagatatggcaaggacacaacctgattagatcagtagatttaaatactttggaagctcatggatccgtatattctgacggagaatttgcatcatttgagtggtcacctgatgaaaaaaaggttttatatgttgccgaaaaaaagaaagttaaatctgaaccattttataaacgaaaaggagctacaacaaacaatgtatcaggcaatggaagtggagaggaaaagccaaaaggtgaagaatatctatttattcaagattggggagaacaactagttggtaaaaagatatccataattgccgagtataatatggaaagtgattcggtagagatactaaaaggtattccggacgatatttttgttggtcaaccaaagtactctccagatggatcttatattgttggagttgcctatcagttagaaccaaggaaattaggaatcatgttctgcgctaatagacctagtaccatcttctctttggactttgatggtaatttcgttagcttaccccttcctggaaaagccgtgaaatctccaatattttctcccaagggcgactatattttatggcttcaaagaaactcgggtggacctcatgcctctgcgatggaattagttaaggctagtgttcctttgaatgaaaatacagtcagtaaggtagtaattgatattgtggataccgagaaaaaatagaaggtggtaaattgttttacggtttatacaacacaggattttttagaagaccatgggcgagcaatgaccgactaatacttaatactaaccaaaagtatacaataaattcatatgttgtaaatattaatactggctcattaacacagctggaatataatgagggcagcttaagggtactggacgttcatgaagatacaattcttgctgtcaacagacattttctgaagcccgacaaaatcatactgggtaaattgcctgcgccaaaccaggaggctactattgtctgggaggagctcacaactagtgaaaccgtacccggcctagaaaactcgaaatatgaatatttggaccttaaagcaccagaaggtgattttaaagatttcaatgccatttatattggccccaaaagtggtagcaaccattccgtccctctgatagtttggcctcacggaggacctcattctgtctttggaaactatttgtttttagaagaagctatgtacttgctaagcggttttgcagttctattaatcaatttcagaggttcgttgggttctggacaaaaaagtgttgactatctgccaaaaaaagttggaacagccgacgttaaagactgcatccaagctaccgacgaagcattggcccgatacccttggttgaatcctaaacagttagcattggctggtggttcgcatggcggatttttagttgctcaccttagtggacagtatcctgataaatataaggttgttgttgcaagaaatccggtgatagatgttgcttccatgagcattaattcagacatacctgactggtgtttcgttgaaggaggaaaggagtatactcaaaagggagagattgacaatgatgcacttacttttatgcgtcaagtatctcctatcgttcacatgcacaaagtaaaagctcccactttacttcaaattggttcgaaagatttgagagtaccaccgcaacaaggtatagagtaccatttgcgacttaaggcgaatggtgtcgttacgagaatgaatttatacgatgacaatcaccc

SEQ ID NO: 6753 - DNA, 2102 bp, Diabrotica virgifera
  SmartBlast Evalue=5E-69; Info=F-box only protein 21 n=23 Tax= Eutheria RepID=FBX21_HUMAN
cagtgtactgaattctcaaagttcaacaaaataatggagaaattaccagtagaggttattgaaaatattctcactttccagaaaatatctattgaagatgtggtacatttttctctaacttgccattattttcataatattgtaacaaacaacaacaaaatctggaaaactaagctgttcagaaatttccccagttgaggagcctcttggaaagtaaacatatcattttccagcatgaggttaaatatatttatgaactgaagaaaagaactcgagctctacttgagaaaatgcctgctaaattttacaagagatatgaaatctcagactcggatctatatgagtggagcagtattttactcgaaagagaagaagtatacaaatgtcttgtaacagatttaatggagattgtaaatacagatgtttccatcaagagtatagaagtggtaccattaaacacaccaggaaataagacgttccagtattatgccaacaaagtactcagatacatacgacagcatcatctttccaaggtatggaaggaatacatatctttaccgccatctaaacaaattcttgaagtaggtgcggtatttgttgctcagtggtgtcaaccaaatgttgaagtgacagttgagaatataggccacagattagatttgatagctgaagaggttaagtctgcactgcgaacagtatatcccgagcatccaatatttaaagcgactcaagagcaactcgatttatggcgcagacaaaacaaagagcaaaatgaatggaaagtaaacgaatgtcgtcagctaataaccatcatgcgcgaagtactctttcaacagatgagattcagtggaaacaaccatgcttactatatgccacaaaattcatttatcaatgaagttttggataaacgtcaaggtttacccataacactagcaattgtatttgaaggtgtagctagaagattgggtctaagatgtgagcctatcagcttcccagcgcattttttgcttaggttttgtgaaagcgttgatcctgaatctgactggtactatattgacgttttcaatggaggccaaatagtgggaagaggagcatgtccgcatagtagattttcaggttccagagatctcattccggttgccacagctgtacaagtgatagaacgcatggcaaacaatttggaagtttcagccagacaacatgctcatcccaatggcaagataacacgtttaaggtcaagtttggagttgttgaaattagtgaatccgagagacatttcagctttagtcagcttagctagattatatatgctgcacaacatggatactaaatctttggaaactttcttgttatctcaggagtttgaagttccggaacaagctcaaagagtacttcatatgcttcgagattacgaagcgcatcattctcgcaacgacctgggtctttttagtcaagtagaagcagcacaacgtacgccaaatttacattatgcagtaggaatggtgatgaagcatatgactttaaattacaaatgtgttatctatgactgggatccggtatgcttggcggctgccgaatggcaagccgaaaataatgtggataaattgcagctcaaagatgaacaaccattttataacgttctggtggaagatgggtcccatagatatgtggcgcaagaaaatttatttcctacatcagatagagaagagatatatctcaatgaagatgtcggcaggcatttttctcactacttcgagactcactacgttccgaatgctgagaaagagaaagagtacccagctgataaaaagatacgtcactggttccatcaccaaaagaagcttgaaagtattaatctttaataattgtaaatgtgttattttaatgttttagactagttgttaagtctgtgttggctaattgtccaatatgtattatgtattctgattccaaactctatgttttattcttttaagacgtgccaagttgaatgatttgatacattcgacattgtgcgtgtgtagatgtcggcataaagattcttttcttttctgttaagctatagagttttatattttatttgttaaataaaatacatgttt

SEQ ID NO: 6754 - DNA, 2111 bp, Diabrotica virgifera
  SmartBlast Evalue=1E-133; Info=Epsin-like protein n=1 Tax= Tribolium castaneum RepID=D6X0P5_TRICA
aactgctacccttgtggatatttataactttcaattcataaaatatattgatagtaatattccgaaagcatcaaacctaaaaccaactacaataacttttgatatctttattttattcttttaaagaatagatatatttagtggtaaacctcaactaccgtatttattttaaatctatgaaaatatttctgatttttgtttgtgtttatgtttgtatattgccgtctgagatcattgtatgggtttgccaatattcaaaacctcagttatgaagtgtcaatcatttgaacgcagcgaagaattgattattctgttggggttggttgaaaccctgcacgttgttaaagttcaattgcgtaccgaagcccggggataccacccccgcgttcattggccgaggttggtttattggagaggtttggttgctggccaattggttcatacttggagaaggacctgtttttggtttattggttagtaaattgtccaagtctatgttgatattaccggaatttttccacgtgctaccgactggtaaatttttatttattgtcggtttgtctgtattgttattattggttgtggaagacattggttggagtggttgaattgaagtaggagttagcacagaacctgcgctcataaagtcgttagtgttgtttgctagcaatccataattattgttactctgaacattaattggagtaggttccatactgagagatccaaagtctaaatcgcctaataaatcactattgctttgtggagtggacatcggagctggagttggaggcaaattcgaaacgggcgcaaaggtactagcaccgaaattggaaggaggtcctgctaacaaattttggggaggagagttaccgaggagtaaattagaattatttaatgcgggagttgagtccggagtggttcccagcaaatttggtatagcagagtattgtgatgcgttttggcttggtggtttagagaaggcggagctgaaatcggcgaaattatcttctttttggggagaatccgtagatcctccaaaagcagtctcaaaatctccgaattcagacgataccttgacgtcgtttggtggttcgttagctctggggtcaaagtcatcgtttagcaagttacttcctgttggaggtagaggactctgactcgcatctcttccgaagttagctgcagcacccagatcgaccttctttatctgtttgatcgttttcttaggtgaattgttcaaagaagtgttaatattaatattgacgcgtttgtcgacgtgcaccggactttgtgatagctccgtatcttgatattttttaatactattattgtaactattatttttagactccgaatcgctgtcttctttctcgacatcgtagtcttcttcgtacgatttatccctgtagcggttagttgagttggacgtgtcgtcccaatcttctgattctcttgtgtagggtcgttcgtcccaggtatcacggccaccaaatttgtttccaaatgtatccgaactcattccaataaacttatccttattctttttggcctttttcctttcttctcttaggcgatcatcatcttgtataaaatcgataagttcttttactttatgtctaatgttaactccttgatcttttcctatatcatctatgaatgtgtaattttccaaagatctaagatcatagatatgttctcttgctgatgtgactactctttctgaaccattttttattaggtagtttagaacgagtaatgacttgtatgttctcctccaatgttgtttgttatcttgaagcattcgtttccaaagcatagacataacttctggaaaatgttcgtatgtgaaagtggaatgagctaattcttgcattatttgtcctgtaggtccccaaggttcttcatttgtggcttctcgaactttcgcttccacttctgtatagttcattactacgttcgtaactttatcagccaactcgcggaccttccacatactcggaaagaagttctccattttgttgcaattagtttaaacaatgttcctaaaaagtttcaaaaaaaatacttattttatctagagtttgcaaaaacggtgacttggccagtcg

SEQ ID NO: 6755 - DNA, 2109 bp, Diabrotica virgifera
  SmartBlast Evalue=1E-141; Info=Phospholipase D3 n=1 Tax= Camponotus floridanus RepID=E2AKQ2_9HYME
gctaagattaatagattaatttataattacatattacggaatattaaaaaacttaaattcagtatttaaaatgtaagtatatttaaggtaaaatatataccacagctttgaccaactaatatttttctaattaatgtttttaatttcaattttaaattaatcacatttatgtcaaatttccaagaaaggaaaggacttgtcactactggcgctcatgaacttttaaatgtcccctctacgtacgagctcacagcgtatagattgcagcgcgcagtccaggtatgtcgatggttataaaactttctgggagaaaaattatgttacgatgatacataacctcaaaaatgctatttttgcacttttaggttaggacatctcaaaaaccagacccaatttgccaaaaaccttctgaaaagtatattctgatctctgggtcctaatattagtcaaattttttcggcctgtgaaacattgggtcatagttgagaatttggtgtctttttacaaatctccatacgattttaaacttattcattaatacccgtcgtcgtattctgaaaaattcatatagtgcgcatacggagaattccaatctctttcgaaaacgccttgcagctgacttcgtatcgttgtatggctggtgtttcggtcgaagacgggatcgtgcaagacgaacgacacacccgccgtgtccgtgaagtagtcgccggaccaattggaggttccgatgaacgccgtattgtcggtgaccatgtacttgttgtggttgacacgtgcaaacgggatcttctgctggtctttcgaggcgggaacgataaaacggcgcacttcaatgctaacaccgcgataagcgttgttgatatttgccaatgattttaagaaattatcttcagcaggtctggaatggttccaccagcttatcaataacctcaccttaattttgtgttctatcgcagcggttttcaaggcatcgtcgatgacgggccagtactttactttgggtgtgtatatcatcaacggaaatagtccattacggcgatatacacgaacttctcggcatgttttatgacagtcgtcaaagcgtggatgtcgttcgtacgacctgtcgggttaaatggcggcggagagctagaaaaatatgtttgaaaggtttcgttgttataaactaatgctagcggtgtttgggaattaatttgcgtagatagatttgctggccattggggaggtatcttggcattatctgctcctagtgcccaatagacctcaaatatcttttggacgtcggtggcaagacaagagcaattacgaataacaatccccaattccttgacctgcgttaacgacctccagtccatattggcgctcccgacccagacgtgtttttgatcgatgatccataacttggtgtgcaaaacaccggatcccagcaatttggcaaagttgacgctccgcacttgggcagcttttctcttcaccagcaattcggtgtcgatgttgggaaaggcttgcgacggagagttttgggctattcgaatcgttatgccccgttcggcgccagctttcaatagagattggaatattttttctccctgttccgatgacggatccggatagacttcagactgtctaagcgtccaatagagcgatgctatatctatagattcgttcgctgaatttatcaaatctaaccatgtatcaaaagtggaagggtatatgattgaatcgtttggataaactaggccctcaggaatgctttccaccaaagacaatccacaagtattgttgcaattatcttttagaagaccattcaaattgttcaaacttttttcggaggcgtgatctaatagcggcaataacactacgaggaagatcaggatacatattatagagataggaatacacgatggtctgcaccatttgtttttacttccccacctttcaggagaatcatctgtgttagaaggtatcatgaaaccgtgactccaaatatcagaatcttcttcattttgtacaggaggagtctcgagtacagttttgtttatcgtgtttattttaattttcattgataattgttgctaatactttcttatcactaaagttagcaattta

SEQ ID NO: 6756 - DNA, 2107 bp, Diabrotica virgifera
  SmartBlast Evalue=1E-100; Info=Heparan-alpha-glucosaminide N- acetyltransferase n=1 Tax=Harpegnathos saltator RepID=E2BD48_ 9HYME
ggaccatatagaacaatttggtgctggaactttcaccttggatgtctgggtttgggtctagttataccatactactatatctaatgtctgatcagtcaatgctatatctatttagaaagaatcagtggttattaacaataaacaaatttatatacattataactatatcacaaactcgactactatattttgaaaaatatgttatgcttgtacatccaaatcgaaatacaaaaccataagaaggtgccccatagattcataaacagataggtaccatgggtgataactgtcggtttccatccgaacggaaacgtattcttcatgagctcgtgcccaacgtagacaatgatgggattcatgcctgggtagaacaacggcctgccaccccatttccgtaagatgtctacaaataagaatagaccagcttggattaggaacgccataccagctgttacaaatgtgtatgaaagagaccagagtttcttatttaacggaatgggaccgtcgtttatagagaatgtgcacagacctccaccaagaagtccaagtataatgccccacgctatccatctatacattcttcctctaacatcctgataggttcttaagattcttccagcttgcactcccaaatatacagtaaggatggatgtcaatgtgccaagaaaaccttcaggatcaaacttattttcaatttcatatactttctccaaattttgatctgaatacaaatgatttccaaacagttgtcgatcgatgtatccagcaacacctcctgtacaattctcaagttttccatgatctcccaatccacctggccctatgtaacctttgccacaaccgggaacttcggcaagaaaagttacgcaggtgtgaacaaaaactaaagatgatactactatccactggggccatgaagatagcaggtctgatgcccagttagtggtctcagtttcagatcttttaatgaagcaaacttcaatcagccctacaaccatataggtcaaaccaattctttgaagtacacctggtattcgaagatcggcgactgtcgacaaatttttgttcgaatttagcagaaatccgagaagaatcaatataagagttcttctgagtatttgaaaaaccataagtcgtctaggtacaagagctcttagtttattttgaatagatatagtcagtgataatcccattaaccacagaaaccaggggaataccaagtcagcaatggttaaaccattccatacagagtgtttaaaaaaccagtactgccctcctccataattaacaaatatcatgagtccaatacacaaacctctaaatgtatcaacggattttaagcgattaggatgtttgagcaaggctactggtggtcgttcgaaaacaactggtgttcctgccgatgaaccaatcaaatcttcctccatctctgtagtccatgttaatagttgtcttactctaccactgtttttgtaaatacatttaaccatataccaaaatgttccaaatgaaaataatatcacaaatgccataagtatcggtagatatgcattatctgctgggtctttaatataaatagggccacaagaatttgaaacgttcagcccatatcgataatgttcttgaagaagttgacggtaatggcactttgacttgttgttattaagtaaataatctatttgaagaggagagctagttctcacaagaacagaagtccatttacttggctgaagaacagttaaattttgaaagtcgcatttgtaacattcatcatattgataaaagagtctcacagtctcatttagtgtattggtgatatctaaacatgcttcatcataagttaaattaggttgagccgcaagacacctccttatgttatcaaataacattgtgaaatgttattcttgctgttaatgcaaagcaatttacttctattgtattgtattcaaacatagactataaaaacgcctgactcacttaaccttgataacaaattattttgtgtttgaagacttgaagagtcactaaaccactatgtcttttctttgtttgcactttttagatatttgtaattaaatttacgaaaacattcgtcatcatcttcccc

SEQ ID NO: 6757 - DNA, 2099 bp, Diabrotica virgifera
  SmartBlast Evalue=0; Info="ATP-binding cassette sub-family B member 6, mitochondrial n=1 Tax=Harpegnathos saltator RepID= E2BRY8_9HYME"
gattatttttagtttgacaataataatatgctgaacatatcatactgcccaccaaatatttcagtatgggatgtatgggtggatcatggaatcccacagtgtttcatgaacactgtgacttcttctgtattagcaatatatatactaatagctggttcaatacaactacatatttacagacgatggggtgttgaatctggaaccaggtttttgcctagagggagattatattatttacaaacctttttaatattgtttataccagtgttagaaatagttagatttattttaaccgcaactgtttatgatgataaacatatttatggatatatgattgtttctctagtattaacgacatttgcttttccgttttctttatgggttttaaaagtggagttatataacattcttccatcagttcaaacaagaggccatgggatagttttattgttattttggacattggcctttatatcagaaaatctagcgtttatcaatttgacccaggagaactggtggtttaaactgaaggatttgaccgatcagctggaaatggcattatttattttacgatatattgcttgcctacttatctttttcctgggcctcaaagctcccggaatagtaaacgaagttgattattatatgttaggtggtcatcaaaggaatgttatcaatccgaacaatgaaaatgcctctacatggaagaatttttggaaaaaggtgaagatattagcgcctttcttatggccaaagaaaaatttcacattacagtttaaagtactgatttgcttcatattattattaggaggaagggcggttaatttgtttgtgcctatctatcaaaattaattgttgatagcatggaagaaactgtggcaaagatgcttttcagatgggactgggttctcatatatgttggtttaaaatttcttcaaggaggtggcactggtggcatgggtctattaaataatgtgagatcgttcttatggattagagtccaacagtacacaacaagggaagttgaagtagaattatttaggcacttacatagtctttcgttgaagtggcatctaggaagaaaaacgggggaagtgttgagagtgatggacagggggacagatagcatcaataacttattgaattacattatattttccatttttccaactatagtggatataatagtagcaattgtcttcttcgtttctgcctttaatatatggtttggactgatcgtttttactacaatgatactttacatagttctaacgatcgttattaccgaatggagaacaaaatttcagcgtcgtatgaatttagcagataatgaaactcgaagcagaagtgtagattctcttctcaattttgaaacagttaaatattacggagctgagaattacgaagtggatgcttttagggaagctgttcttaaattccaagatgaagaatttaagtcaagtatcactcttaatatcttaaacacagtacaaaatgttataatatgcggagggctattagcgggaagtttgctctgtgtttatatggtagtagaacctaaaactctaaaggcaggcgattatgtattatttgctacatatatagtacaactttacgtgccgcttaattggtttggtacctactacagggccattcaaaagaattttgtagatatggaaaacatgtttgaccttctcagagaagaacaagaaattattgacgctccaggagctactaatctatctgttccaaggggccatgttgagtttaaaaacgtcagttttggatatcttcctgagaagttgatattaaaaaatataacgttcagtgttccttctggaaaaactgttgcactagtaggaccatcaggaagtggcaagagtactattataagactcctcttcaggttttatgatgtcgatacaggagttattgttatagatgggcaaaatattaagactgttactcaagaatcactaagaagagctatcggcgtagttccacaggatacagtattatttaataatactgtagaatacaatatacaatatggtagactaacagcaacagtgactgatgtgatagaagccgctagaggt

SEQ ID NO: 6758 - DNA, 2096 bp, Diabrotica virgifera
  SmartBlast Evalue=1E-122; Info=Luciferase-like protein n=1 Tax= Pyrophorus angustus luscus RepID=D2KV87_9COLE
aaaacatcaaaacccgataagtttatatcactccgagctttggtacggttaagttgacattgactgcagcagtgaacttgattttgaaaatggtaaaagataatgctagtttcgaaataagcggtccgcagcctcacgaagctctcaaaaatgagactttggggcaagcttttttgagagttttgttggaaaatccgtacggacacaaaattatgattgactcgcacaccggtagagatctcacaagccaaaagctactggaggagtcatgtcaacttgccgaagcattgagagtctatggttgtacctcaaacacagctatctgtataggaagcgagaataatctcgagttctttgtacccatcatggcttctatttttgcaggcacaatcatggcaccacttaatgtaaactacacagaccaagaactgaagcacacgttaaacataaccaaaccaatattggctttctgttcaaaacgtgtaacacaaaggtacttaacgctgcaacgggagatgaaatttatcgagaaaattatcgttatagacagtgaagaagaaatcgaaggaactgaaactatgaaatcatttataaatcgacttcttcaaggaaggatagtctctccccaaaagtttattccattcgatggtgacccaaaggaaaacgtagcctttgtgttatgttcttctggtactactggccttcctaaaggagtaatgttaacacactttaatgtagttacacgattattacagtctaggtatccagattatttatcacatcattccatagtgctcggactaatgcccttctttcactcatacggattatttttcggcctcacgtcattctttaacagacatctcacaattatgatggacaaatttgaggaagactcgtttctgaaagcacttcaggactacaaagtatcagttgtaaggctggctccacccttagcgattttcttggcaaaaagtcccaaagtaagcaaatacgacttatcctctgtcgcagaaatattctcagcgggagctcctttgagtggaaagacagaagttaaacttaaacagaggttaaaccttaaagcaattcatcaagcttatggatgcactgaaggaaccttagcactaacgatcatgaacaaggacatctataggccgggatcctgtggaaaagtgatcacatacatgaaatgcatcgttagagatcccgaaacaggtaaatggctgggtccccatgaggtaggagaactttgctataaaggaccgacagtcatgaaaggttactacagaaatcccgaagccaccagaaactctttcacggaggatggttggctaagaaccggtgatcttgggtattatgatgaggaagagtatttttatgtggtagacagattgaaggagttaataaaatataatggatatcaggtagctccagcagaattggaagctatcctagttaatcatccgaaagtatttgaagctggtgtggtaggtcttccagacgaaagagctggtgaattaccactagcatttgttgtaaagaaagaaggtcaaattgtatcagaaaaagaacttcaagactatgtagcagaaaaagtgtcagcgcagaaaaaactaagaggaggaattatttttgtaccgtccatacccaaaaatcctagtggcaaaattttaagaaaagagttgaagacattagtaaagaactatcgaagtagagttccgtctaagttgtaaaaattatattagcattaactttggcccaatcttatgttcctctccagcgatatatacgtatgatattttgtctagttttaattttgttacactgtaactaaaatttatttatattttgtggagtggcaaatgaatgtgtaaattgtatgcaaaaatattaacttattgaaataaaacatgaatattgttaaataagtgtgaatgtataaataatacaataaaagtaacttattttagttaaagtgtgtaacaagtgattttcaggataatatataaccttttattttttctgtattaccggtttaatataaacaaacgaagggataatcacgttatatcctaaaagtgcaatctctttac

SEQ ID NO: 6759 - DNA, 2093 bp, Diabrotica virgifera
  SmartBlast Evalue=1E-133; Info=Protein GDAP2-like protein n=2 Tax=Formicidae RepID=E2BE82_9HYME
acgatagtagcaaagttcaaagtattgcactcatttgaaagactgcaaagaaagcacacgtcatttttaatatactatagtacctcaccatatggtcatacatattggcactgtttgtggtaccggtgggcgccagatttcatggcttaaaaatatcagagactggaccggccttgtttcaacatctttgtttagagccgcatttaaaagagacagattgttgtctctattttaaacatgtttaaatcgagtggattaactaaacaataaattttgcgttctttgtatttaactaaatattctcatgtgcctattgtatgtttttttggatgtttgcaagttcattaagttcattgtttgttgttaaacattgcttagttcaatgtattacgatatactatttacaaatttattaatggaacttgatgcgtctagataaaaatctgtgtcaaataataaaagatgcaaaacctgcacatgtaactaactagggagtatttcatatttattcttctgttactacagatacttgtcataaatgataaaaaactagccctgtctctttatgcaagaagaagtgatcctgtaaaataaaacacacagtaaaagattatcaaaaatacatgacagacttcagcttcagaagaatataccgtttctttggaactgaagaagaatctgttcatatttttagatagacatagattatatgctactgaatatagctttgattatttttctcacaaaaattaacaaagccataattttcgagcagcatagactttctatatcacaagtactgtctagattactacaggtagtgcctgataacacttacgtacatataatgacatggaaagttctatactactctgctgaacaatgatttgatgcgctcaacacttaattgttctaaaatatgttttcttagttggcacacacaacttatttctttagcactagttgaaaaatatattgcgacttatcacctgggaggaaatggttaatactagactttttgctttggtagggccgttagacccacagttatgttgtcacgggctggaagtatctgataccattgatagtcatgtcatactcggtaataaatgcaggtatctctagctggtctggagacattacggcatagaggtattcaactcctggtaagctgttaaccttttgttttattgctggtgccatgaaagtggtaaaccaccacgtcatcatcttagtccaaaacgttggatgaacaacataaaacgccttcagattctttttgtacttatacggtaaaatgttgtaaacttcttttagccacgaaaatgatggataattgttgcttgatgtcaaagtatgaaaataagctatgacatagtctcccttcacgattggatccagtagtgtaatcaggtataacaatgccttatctaggttgattttgttgaaagggaaccattttcctataaaaacgaccacgggtctaccgagcctatcgactccactttgatacaaacacccaattcctgatacttccgtcaagtcctctgatttggcacgtctaagaagtcgctcgtatctttcttggtgctgtatttccttaaccataatatctgccaaagggtcattgaacggtcgctctcccaacaatctctgctgatccaagtcaccttgcatttggctgaagacatggtcgccgacgttaatggaagtttccaactgcacagagagatctactgattcttcttcgtggtgcaaagcatgctgtggattgtcaatgattcgtatttgtcggtcaggcatgattggttctccgtcagggccacccgtgtcggatggcaactggtaccttgctgattcttcctccagtttggatcgtggaaaatataacggtaatagaacttcgtaaatacctaaatctactttatcgataacaaatatcacagtgtctatcgaactgccgtgattttcgaaaaaacgtcgcacagtacctaaacttaaaatattcctctacgcccagacacactgcacacttatgaactaattagcatacactgcgtaggtaggtagaggtacactcactcaaatacaac

SEQ ID NO: 6760 - DNA, 2082 bp, Diabrotica virgifera
ctaataaactccaaccaaaatattttgttgacaaaccgtgtgccaatgttgcggttcttgggtccaccatttaaaacaaaattattacccctctcatgacactttttgaagttatacttctttaggtgcgatagggagtgaatttttattaatctgcgcgcatgcgcacagagacagtatgttgttcgttgctaaatcttttaagttacgtgtatcagtccaaaaaaggtgtggaaaaaatatattagtgtttttagtaaatatttttattataatttttgtgtctttggatttgtcttcctcgggagtaaggtaatacgtattattaaaacatttttatttaatacttcacttcgtctctatttgttaccgtggtttgtcataatgtccgagaaaccgtcaaaacaatgccttcgtagcctcgttggtacagcattcgactacgaatcgagaggtcccgggttcaaatgcggacaattgctgtctttttttttaattttgtatatttggaaagtggtaagtaactattaaaatcagtttaatatttaataaaataaaaataaactgttaaaagtactattttatttcgctgaaatcaaaaagtttaatagaagtataacttcttacgtgagtacaaagtaaacacacattcattttttttttagttattactcagtcattcgatttatgttgagtgggacaacttttctatttcgggaaaatttttggaagtggtcttttttaaatatagaggtttctaaaccttgatgcgtcgcacaactggagtaaccttaaaaatttgcagaaaaatattaccagtcaattgtaaatatttttatcaaacaatcctgcaaaaatcagctgtgagggtataaatgttaagactgttggtgatgcgtgcgcccctcctatggggagcgcactatggaggcataaattattattttttgtaggattgtttgataaaaatagtcacaattcactggcaacattgtccgacaaatttttaagagtacctagtccagttgtcggactcagaagtttagaaatctctacatttacgaaacgcccctctaccgaaaattgttcgaaatgaaaagttgtcagactcgacatcaataactgaaaaaaaaaagtctcatgagcgaggtaatatttttttaatggtgggcccaagaactattataataaatatgtgaattcactttgggttactcaggctaaaaactctattgactaggtatacataagttgacacaaaagtatcccaatttcttctctaatcacttaaattactatatacaaatacattttaccaatgttttaaaaaatcaccagatatataatatatacagggtctactgccatttaaaaaagtaaccagctaccttaaatgtacctgaatatcactttcaataattagtattatagcccgatcaaccaacacaaattgttgtcaaaacccaaaaaaataaattaagaatgaaaggggaaaccgtgttaagatcaaaattccctcagtcccagaattaactttttattttttttactttctatgtaattaaaaataagactcagcgtaactttaaccctctacccccttcccatcccccacctcaaaccgatattttttcgttttgttttttttaggtgggatgcaatcaattcaaaaatgtcaataaattcacacacatggttgagacggttacaacacatatcttattttttatgggcccgtagattgagtgtacttaacctcaaaatggactttatttttattttttggaaaaacgcggaacaaaaattaacttttttggaggtgtattttttgtgtattttactaccatatcgtttttgtttatgttcgaaaaagatattgttgcttaaattttgaaagtgcacttaaaaataaaattttaaaaattgctattttaacacaacacaaatttttatccttacaagtatatctaaatgattatataaatgttataaaacttacgacgaaaattttttgttactctcaaaaactatatattatgcctatctttaaacatatttttctaaattaaatattttttaaat

SEQ ID NO: 6761 - DNA, 2084 bp, Diabrotica virgifera
  SmartBlast Evalue=0; Info=Transcription elongation factor SPT6 n=2 Tax=Formicidae RepID=E2A0W0_9HYME
agtatgtaaaaataaaccagtaagagatcttgcaggcgaccaatttttaaaattatgtttagccgaagaggagaacctccttactattaccatcaatgaccatattcaaggaaacactactaacaattacattgatgaagtcaaacaattatatataaaggatgaattcagcaaacacgttcaggattggaatgcgctaagaatggaatcggtagaaagggctttaacgaaaagtgtcttaccagatttaagatctgaattaaaacgaacgttgctcacagaggctaaagaattcgtattaaaagcttgctgtagaaaattatataattggataaagattgctccatacgcaataacttttcccgatgaagacgaagatgattgggatacatccaaaggtgttagaactatgggtgtagcatacgtaccagagcacacagtatcagcttttacctgtatttcagcaccagacggagatataactgattatctcagattaccaaatattctaaaaagaaaaaatagctttcgaactgaagaaaaacttatgaaggaagctgatcttcaagcactgaaaaatttcatattccttaaaaagcctcatgtgatagcagtagggggtgagtccagagaagccttaatgatcgctgatgatatcagaggagtaataagtgaactaatagaatccgaccaattcccacagattagggttgaaattattgataatgaattagccaaagtgtacgcaaattccattaaaggttcaactgatttcagagattatccagagttgttaaggcaagctatttcattagctcgaagaatgcaagatcctttggttgaattttcccaattatgtaatagcgatgaggaaattttgagtctgaggtttcatcccttgcaggaacaagtccagaaagaagaactactagaagctctctgtttagaatttgtcaacagaacaaatgaagtaggtgtagatataaatcttgccgttcagcagattcataaaagtagtttagttcaattcatatgcggtctaggaccgcgtaaaggtcaagcgttacttaaagttctgaaacaaactaatcagaggcttgaaaacagaacccaattggttacattttgtcatatgggtccaaaagtttttattaattgttctggattcataaagattgataccaatagtttaggagacagtactgaggcatatgttgaaatattggatggctctcgagttcatcccgaaacttatgaatgggcacgaaaaatggctgtggatgctttagaatatgacgatgatgagggagctaatccggcgggagctttagaggaaattctcgaggcgccagagaggttaaaagatcttgacttggatgcatttgcggaggaattggaaagacaaggatttggtaacaagagtataacattgtatgacattagagcagaactgaactcgcgatataaagatttgagacaaccttttcgttctgcaaatcctgaagaactattcgatatgcttactaaagaaactcccgaaacattttatattggaaaaatggttacatctaccgtgtttggcattgcaaggagaaaaccaaagtcagaccagctcgatcaagctaatccggtccgtaatgacgaaactggtttgtggcagtgccccttctgtttgaaaaatgattttcctgaattatctgatgtatggaatcattttgatgcaggagcatgtcctggtcaagctactggagttaaactaagactggataatggtatattaggttatatttatataaaaaatataagcgacaaaccagttgctaatccggaagaaagagtaggcataggacaattaattcacttgaaaataaaaattgacgtagagaagtttagtgttgattgtacatcgaaatctagcgatcttgctgataaaaatcatgaatggagacctcaacgagatcctcattatgatcaagaacgtgaagacaaagacaatcgattagaagccgagaagaagaaagagaaacagcgtatgacgtacatcaagagggttatcgttcatccggcgttccataacatatcct

SEQ ID NO: 6762 - DNA, 2093 bp, Diabrotica virgifera
  SmartBlast Evalue=1E-117; Info=Vrille n=1 Tax=Tribolium castaneum RepID=D6W6K1_TRICA
ctctcgtgttcaacgctcagttgttgtcgatcgctcatacgaactagacgtgtttttagtgaaatacattgttattattgtgcctttgttgacattgtcagttgttcaaaagtgattaagatttttcttcgggacgttgaaaaaaattttgccaccacgtcagccaatacagcggatgttataaaacaacatataatggttgccgaattcgtgggccgtggtcaaagtgggtccccagtaaatggtgaaataccacatctcaattcaaatttgccgtcttctcaccaacttgaaatgatggccagcacatctacatcaggagacgagtttcctcccggaagctatggaatgtcctctgtcaaacataaggagttgttctcccaacgcaagcaaagagaatttactccagataataagaaagacgatagttattgggatcgtagaagaagaaataatgaagctgccaagaggtccagggaaaagagacgattcaatgatatggttttggaacagcgcgtcgttgaactgactaaggaaaatgctattttaaaagctcaattggaagctatcaaggaagagtatgggatctgtggcgaaaacgttgtatgtgtagaaaaagttttagcaaacttaccatctagtgaacaagttttaagtttgtccaaaagacagaagctcgctcatcctgcaactcctattttatataatccacagacacctatccctaccccagtaatacatcaacctgttatgggatctcctccaccacaaccaattcctcactcccacagtgtccttcatgctcctccctcttcacatttggaaccagcatacagagaacccgattaccaccatcctcactaccaactagcttaccacacaggtatctcctacgactctaataatgctctgaatctctctcgctcccgctcacgagtacaatcgccttttgaagtctcaagtaactcaggcgatgaaagcgctcctgtagctttaacgacaaacgaagccaacaatagcctacctttgaaactaagacataagtcccaccttggagataaagacgctgctaacgcactcctcgccttacaaaacatcaaacaagagccaggtccccgcgctagtccaccatgggacggggaaggctccagtgacgaaagagactcaggcatttcccttggtgccgaatggtcagccgctgcaactgctgcagctactctccaaaccctcaaacaatcccagctaactatgcaagacagtacggaaggcgacaccaccgcaaaacatagactgcactcagaaatcgttcggctttccacagaagtcgaacacctcaagtccatgatgactaggaaggagaaataaacagtttctgtttcctaactgttagtttagttgttgatgtgatgtagtggttaccaaaacgccactgtttttgtgatgattctcaaaagagattggacatatcgtgctccaaaggagcatatttattatatttttagttatttattattagttaaggattaatttgacggatatttttgaaatagcacaaatactgcttcattttgccaatgtattcctatgattattttgtattttattcaaattgattgtttaccatcctcgttttaaactattattgtattattatattacgtcatcaccagctgattcacctattcatcttgtcatagggattaatgtaccttttaatataagctgaaaatatgtgtgattttgtaaactatttatcatatatgtataaatgtatgtaatttttgttatttaccactagaaacctagcggtccatcttatgttacgttatctcattattgtatatttataaatatcaatatctattgtaagacttaatgctggacgttacctcaacactcttttctactgttcactcgttgtctatctatctactacatattatatgtatgtgaaaattgtatgaaccatatttgacttttgtccagctttaacataactatgcatattatcaacataaattatttcttcctattaccgaagtgaatgtatcctaatatctatgtgtaaaaataaatatggcatcgtttcaatc

SEQ ID NO: 6763 - DNA, 2091 bp, Diabrotica virgifera
  SmartBlast Evalue=1E-158; Info="Glycerol-3-phosphate acyltransferase, mitochondrial n=1 Tax=Camponotus floridanus RepID=E2A4R3_9HYME"
ttatcctaacgactgtacagtatggaggtggctaggtaatggtgtagggtgtgattaatttggaggctcgtaaagagttagttagaatagatcatgggcggcttacatcacacaggtacgttacagacattttagaagagcatgtcttgccatttgcaccatttattggggataatttcataccagcgagaagtcccgacctcaagacaatagaatacgtttgggacatcgtagggagatgactacgacaactacctaatgcaccaaacacattagatcacctgtttttgcgattggttgaaatttgggatcaaattgatcaattttggcgcgcagtgtatacagaaagttgaccaacgttcacattacgtatatctcgtactaaggcctctagtcacttgttaccggaacttttgtaccctttgatacaatgcggaaatgcactcagaatcgtcctggctttcttggagatagtacaacctcatctttttctccgaatggcactcgagaataccccagtgttggtaaagctttagggcgttctttatcgtatcgactgaaacgctttctccatattttattcctccagacgatagctgagatttaagttcctccaacacatcactgagtagttctgactctaagagctgccttccaaccaatttgtccagcgtaaatgcagtgatggcgtacgtgtctacaaagggtgctatcggtactctaagatacttgagcgcatccacagcctctttattggggtttagtttatatatttttggagaaattctttcctcttcattgtcatcatcgtcgaactgtcgggctaagcgcctacttcttatatttaaatcattttcttcctcgctgtccactaaaaatatttgtttcctatcaattaaatcatcaatgcagctggtaatgatttgttcgaggttttggcacggtttgcagaacagaaattcgaattgtaacatatcacaaagctcctggacgttttcgactagatcttgttggacgacgttaccggacgagtggtccatagcgtctatggcgatggcaataactgattctagggcaaaatgtgtcaccagagtattactgtaataggatagttcgattacgtttggtagaattgctattggtttaattatatcttcgttgttgactttttctttcctgatcagacctggtcctagcatttcaacggcataattgataacgtctatggagtctccactaaagccgatatcttttctttcgtattctaagtctctccgtaacgcatcgaatgctaccacaagtttttcaatactgacaccatctctgaagcatgttaatagtaaataagctagtgcgtttgttgacatcacagaagaagattgtgcacaatcataaatgatgtgttttgagatccgttcgacaatacacttgtgttcgtctgacaccacatccgtaccatacaaactggttgtggaaggattagactgcagcttgtgaggaatgccattgggtatgggcatctttccagttgtattaaacgttttaataagctcccttaaagaaaacggttgattgaaatctatcctcatcataccataattgctgttcagcactttccaaatacccctaacggcgttgccaaatgtttccatttcttttggttggcctaattgttcgcgaataaagtttccatcgactaatttttcataatttacactaactggcaccaagagggcatcttctatcgtaccatccatgaaagtctctacaataacactcaatattccatattttggcatacatggctttcctgttctggtgcgaccaccttcaaggaaaaattcaatattatgtcctgctcttaaacacgtattcatgtaggtgtgtagtacagctttgtaaatatgatctttgcgtcccatcactggatctacacggcgtttgataaagaatgctcctaatcctcgcaacagagatccaaaaaacggtatcctcaaattatctccggctgccactaacggtgatcgtatgttattgtttaacaaaataaacgatatcaaaatatagtccaaatgtgacctatgtaaaggt

SEQ ID NO: 6764 - DNA, 2093 bp, Diabrotica virgifera
tacaagcactcccatagagtgtgatgtgacagaagtatattatttgttctgtgaagcagctttgttaggaaaaatcaaaatgttttcagctacgtttaaactgttatttttgataacagtaatattggtatccctttcgccatccagtgcagacaattataacaaatgtcctgaaaccagccatatacgatccctaatttaccagaatacattgaaggggagagttatacatgtacgcattccaggcacaggtttctttgaagctccaatcacttgtcttcaggttaccgatataaatgaaagtttcagtacaccagttgtagaagaaggtggatatggaagggagtacgtagttttacgtattgacccagttgaatcaggagaacagttacaatacgatgttcagatttatattgacgaagctgttacagcctatcctcaataaatgttcggtataaatgtttaagaaattcgagtagcccctttaaagataagcagttgctggtattttaacagcattactgattgtaagttaatcatttcagaccttcacgtaaactatgttgttacaaaaacgcatattaggacaataatccaaattattagacaataaatattaggcaagagaaattaaacgagtttctagttttaagtacaaacaagtgaagttcatcagcaaaacagaattcagaattattctacgtattatattaaaagcactatttggttaaaagttatcatttttgggggtaaaagaatctattaatttgtcttgagtaaaggtagtatttgtttaaatttgccgaccgatgataggtagattgggccaagtacagtgggtgatcatattattagagccacctaatatgttcagtgttttggaggaatgtttacaatgttttgtaatttaatgtttacaatgtttagaatgtttacaatgtattgtaattcaatgttttggaggaagggaatataattgggctgtatcatttattaatgcatttgtttccatttggctgtcttgttacactttacgaaagtgcaacaaaaagtctgacaatagtggcaacatgcatgtgtggcaatgcgtgactcagatgtcattgtttgtcagtgctgcccagcctagcttgcaactggtgtgcctattttttttttgtattcttggtgtttagagttataataaactttgtgagtttccattgctctctagtgatattctaacagtcctgtaatatattttgtgaatttagtaaaaattgcgcgttcgttacactagtactaccagaacatcatgggaaatccaaaagacatctcaccaaggaaaatagcagaaataaaaactttaatagtcaatactaatcgcttcaacagaaatatagcattcatttctattggatgtttaagttttatgcattacgtttcaaaatgcattaagtttcaaaagcaacttaatgcattaagtttcaaaagcaacgtggaccgtataaagaaaaaattttcataccattattaaacaaaagtaaaattttctgaggtggctctaataatatgatcacccactgcatacctgtaaatttattataacggaatcaattttgcttaaaatttggaattagacttattttacccccctcttcataagttatatatatgtgctagctgagatttttatttgtaaggaatgaaaacaacctcatattgaaaaaataaatattaaagcgttttatagatttaaatcaaattagattatgttattgaaatattttcaattgtagtaatgattgttttatacattgtcgacccttgaacaatcttaaaaacttccccctttaataaaaataaatgtaaaaaatcgttaacagattcaaaggtttttgtagtgcagttatatcatccacaatgtaatgctctgattatattaaaaaaaaaatttgggtacataattactttggctaactaattaagacttcaatatttcaaaagtacctacctcctatgacaaacatatctatataagaaacctttcaacaacttcaaaaatttaaatgccatttatactcaaaaattcctttcttgtcaataaaataata

SEQ ID NO: 6765 - DNA, 2082 bp, Diabrotica virgifera
  SmartBlast Evalue=1E-143; Info=Alpha-glucosidase n=1 Tax=Aedes aegypti RepID=Q179V8_AEDAE
aaactctggtagtactacaaaactaggagatcttggtctttcaatagcactgttaactccaaaaaggggtacttctccttgaagattgtttgtaaatattgttttgtattcatctgggttgagtagagccttttcacattggtaatagtgcggcatattatacgcaactcctatatctaagtagaatgagtctattttatacgtgttcataactttctttaatttgtgcagtaaccacgagattgtttggacattcgttatatccaaaactccagcgctttgaaggcttttgtatctggttagagctggtattcttttatcactgaatctttcggatactaataatttcttccttaccacttctgcaaaattgaagctttctgtcgatataaatggctgtatggtgaatactactctgaaacctcttcttttaagtttttctattagtttatcgaaatctggaaatcttgattggtccaattcgaagtctccgatttgttcttgccaaaattcgttgatgagaatatgaccctgctttagtacggccacagagttcgtaatctttgtagttacattatctataacatcttgagttaatgcttctttcatatcgggcatttcccaaactggctctgttagaaagtaatcaataatgttgctatcttctttctttaaaccatcccaaagggtgtgttcactaagaaaaacgtgtaattgagacatgttggcactggtacatatactgtagtttaactgggcagtgcttgtaaatttattaacaaaagcgaaattatcgtattgagccctgagacaaaattccttctttggtgaatctcgaattgagatatataaaggtgtttcgttatcgaccactatagctgcccctttcgaattaataaaatatctcttgagaacatttccccattcgtgtgtttctatatttccagtaatgaatggttgatagaaatggctgcctttttccaaaggccatgcgttttctgccgtttgtccaccaccgtaccagtgcgagtgtgacatgtcgaaacaatccgttggcgctagggattctgatagagcgatccattgcacgttgtaacacttcacgtctgaaccaagatcgaagaaattcatatatagtctcgctctatgcatccattccaaacaaaggcttccgtcatctctgttatctgctggtaaacaatttaacacattgtcgtaattaagcgttgtgcccaaatgcagtttaacgacatcttctccttcatcattaaatattttcacagttcgttttgctttatttagtttcatatttccaaaatatactttagctaatactttttgttggtataagaaatatgctgtgactatgaggactataattgtggtgaacagaagacctacaaatactttagttttatattctggcgacttctttttcctaaatgtctgtggcaagttctgaattttttccttaagtaaactggctatagaattaacagaagtgatcgaattagatggggaacctcccagctctgtatcttctggcggttttaacattctgggactaagtaccgatttcctccttacactacgtgggtagctagagatattttggaattctggatcctcaggttcctcttgaatcgtagtattaattttttcagtactagtgtcataaccgtcgccctcctgttcgataaaaacctttaaatcatccaaatttggcatcgatatactatttttgcgtctcattggaggtctaactgtgtctctttgtatcacgtcatcagtcttatctgggcttgaattattgtcatttctacttttcgaatccatttctgaatccagtaaactaaggttttctgtagatggggcggccaaaactatttttggtatttcttgtggaaccttgttgtattttgtagcatttctatattttttccgatccattatttacaacggttaaaacttcactctttgatatattgattgatgaaacatttcacatttcacgtgatattaaattaatatattttttgaagtcacaagttaatacctttgaagaaacaattttcaaccatt

SEQ ID NO: 6766 - DNA, 2077 bp, Diabrotica virgifera
  SmartBlast Evalue=1E-105; Info=Glutathione S-transferase C- terminal domain-containing protein-like protein (Fragment) n=1 Tax=Camponotus floridanus RepID=E1ZY44_9HYME
ccctgttctgttttggcgttttctttatcatgagtttggtcagccgcatgagcaagattcaaatagttttgtaatcctaaatctaattttttaaattggttgcttctaggataggtcaaatgatggcagtttctaactccaccataacagcaaggacaaactactaaatgagccttcttatttatacagttctggattactaaatcagtggctactccacaggcgtgaagagcaacacctatgtcgaagttgccttgaaaataatccaaatttgactgcacaatacatacattcgttaatcccaatttttcaatcctttccttggctcgtaataaagatctttctttattttcgacaaggacaatttcacaattcgggagtaaagccgctagaagtattcccaagtgtccactaccactacaaaagtctactatgctatatcttttttgagcagctatcttcattactgccttagctaagttttctaactgttcacactttctatcagctctactttttggcagtgcccctccatttggatttgcttccaatggaacatctaaccaattaaaatcaatttcttttccaaaaggagtttcttcattaactatgtcatatttaattggctgcaaaagatcaaaagcaacatcaaggtcgttttgttttgtaaatattctcttttctggtttatgtctggatggatctgctgtataaagactttgtctgataaaatctggttcaaaaatacttttggcctgaatgttattatttgttatactaaatttagaattagataaagctgattcctccattcttttaaaccaatttaaggttaaaggtattcttcctttaattagatctaatggacaatttttcaaaaacacttcatagcatatatataatataacatcagctagagtcataaaaggtccttcgctaaatatgtgctgtatattcagctcttctgttggtattcctgatttgatgcctttatctttgtttttaactcttgcaaccttataaatgttgtgtatcctgactggagtagataagtggtattcaaatcttactatgtccgaaggcaaatgaaattcctcgccaatacaacagttgtttcccaaaatatgttttattgtctgcacaatatcaacttcacaaaaccgagtccatattgatgtctctgagcatgaaaataagcaagcttctctaaatccaagcaaatttcttatatcattgttaggactacgttttattaagcttctggttacggaacatacgccagcagttacttgatttgcggatacaattgctggccacaccacaaactttgcgatgtcaggtatcgttttgttggtattaaaatttagcccttcagaagaaactttaataagaggttctgcgggtttacctaataatgatttaatgataagtttaacttcatcagtttttgctattttgtagacaaataatactattagagactcaatatctatccagaaagaatcagatgaatccaagtaagcacttatgtacagagtcgcatgcgtcatctttttaaacacaattagcaagttgtcgttgaactcgttgtaaaatccttttgtttagtactcttcttcttgatatcacacaaacagtagaaattaatcctatggcaaacataaatccttcaaacctccaaaacgatagctcatcataataaacagctttatcacaacttctggttacagtctcaccattagcacatttgagaacttctttgtaatggctatgaatgcaaacaccaatagttttgctacgaatttcaaaggctgtacatggttcacattccttgatcacttcaaaattaccagcctcccaacaggttgaattctgctcaacaatgaaatttgactttttgtctcttcgtgtcgactctgtccagtgtgactcaataaatagtactaatattgttaaaattcctaataccgtgattcccaataacatacgtttctttgggcatgattctatcattttttgtttaacatatgtggcatatatactgcttcaaaatattatttttattcgtttctaattt

SEQ ID NO: 6767 - DNA, 2078 bp, Diabrotica virgifera
  SmartBlast Evalue=1E-178; Info="Serine palmitoyltransferase, putative n=1 Tax=Pediculus humanus corporis RepID=E0VJB0_PEDHC"
gacctccaggcatgcgcttattcagcaaggtggtgtgactgctgtgtcggctacagaaattacaggttagattaggtttgggttgggagttttctttgatttgttcgtgtgttgtgcctaaaaacttcagtacaatgtcggctaccagactggagaacggtgcgggtgattatattcaaacagaattgatatcgggcatcgatttcgttaataaaaacaattctaaaggacattgcgccaatggagaaactgggttaaatgaacacactaaatacaagaatggatttaaaaagtcggtcatttccaatggacatgtcacatcatcagacgaagaaacgacaaaaaataggacaaaaaatggttacaaaacagacacatcaacagacgaaccaaaaatccgacaaatcaaagaatccttcgaaccgcctacgttgatcaccaaagcactcacccacatcagtttctacatcctcatgttcttaggatacctcagccaggcgctgtttccacctaagttggtcaaagaaaaaaatcgggaaggctatcgaccgttgtctgatcgttttgccgctttctattcccagtacgtctacaggcgtatcaaggattgttggaacttacccatttgcagcgtaccaggggatgaagtcgtacttaaagataggattacgagagatcattgctggacctttgaatttacggggtccaaaacgaaatgcataaatttggcttcctacaactacttggggttcgcagaagccacaggtccctgcgcagaacatgcgattcggacgatttacacggatggcattagtaccggaagtaccagacaacagtacggaacgtgtgcactccatgacgaactggagcagctgatagccgaattcgtaggtgccgaagattccatcacctttggaatgggtttcgcgacgaactcactcaacattccaacactcgcatcgcctggttgtctgatattgagtgacgaaaagaatcatgccagcttgatattgggtatcaaacttaatcatcccaccgttagagtatttaaacacaataatgttaagcatctagaaaaactcctccaagaagccatctactacggccaacccggccaacccaacaacgagtacaaaccttggaagaaaatcattatttttatcgaaggcgtgtatagtatggaaggaaccataggccgccttccggaaattatagctcttaagaaaaagtacaaagcttatttatatttggacgaggcccacagcataggggccatgggcaagcacggcaaaggtgttgtagattatttcaactgtgatcccaaagatatcgacattttgatgggtacgtttacgaagagttttggaggcgcgggaggatacattgcaggttcaaaggaattcatatctttcattcgcgaacatagtcacgcgtctggtcacgcttgggcgatgtcgccgccagtcgcagcacagatcatatcagttctaaagataatcatgggcaaagatggtacaaacgaaggacaaaagagaatcgaaaggttagctaggaattccagatacgtcaggttgcgtctcgaacagatgggtttgatcgtacacggtaaccaagattctccagtagttcccattttagtttatcgttactcaaacgtagcggtagtggtaagaactttaattaaagaaaaaatagcaacagtaggcgtaggatatcctgcaacgccgcttgcggaatgcagaataagaatctgcatatcggcgggccacacgaaagagcagctggattatgccttatcagttatagaaaaagtagcagatgaaataggtattaagtattctagaaaaccgagagatccaaaaccgattgattacaataaaatcaaaatatatcaggatttgttttagagagagacttttagatgaagcttcaagagaacaccagcctgcgataggaggttttgttgtttttataaattttataaatgcatttaatatttgatttcaaaagctatttattaagaatcgtttttggctctgttttattttaatactttgcaaaataaaatataaaaacag

SEQ ID NO: 6768 - DNA, 2071 bp, Diabrotica virgifera
  SmartBlast Evalue=2E-63; Info=E74 n=1 Tax=Apis mellifera RepID= Q65YY5_APIME
tgccttgttatatgagtcagtgggccagtattcactgcgatacgtgaaggtttagaacagtgcggcatatctgctatcagccactttcagaatacgcgcggagttcaaatagtgtgaattttgtcggaactctaaagtgtcaaatgcttttgtaatgacaatgatacttgttaaacaacccaaaatgcctctgctcggtgaactccccttgttaaaatcgctggtgcacgttaaagaagaaatcgtcaaagaagagtgtgaggactatgtatgcagcagtagttctagtgttgaggacgaaggcccattggacttaagggtgcattgtggcagggttagtcctgcgagagactcaggaactgagagtgatgatactgaggataagatgatcgtggaggatgggggagattataagccgttcaagaagagtttaattaaacgatttgataaggaacagaacaactataatcaactccaccaactactgtcacgacaaaggaccgacttgcaacatcctagcttatgtgaatatggaagacgaaaatctgtttacccaacaacaactggttctctcccacctagtcccgcagactccggagtatcggacgtcgacagttcatcttcagggcacacttcaactgacgagctgaaagccagactgcaaccttccatacactcaccagtaggcactctctttccaagacatcccttctcgtggaacaacacacaccatggacagaggccgcccaatcacatgtcacaacagttttaccaaccttttgcaacaaatttggacccttacaacagctaccttctacagcaacaccaagtccagcagagtcaccatatgcaccaccacactcagtcccccttcaccactccctccccgccctctcccccatcaggcactcaataccaacctccgtaatccaggcagctaccagtagtatgtacgacgacccttatatgctaggattttccccaagaaagctaaaaaaagtaaagaaacaaaaattgggtgaaaccggaacggtgaagaggaagtcaagggaaggatctacaacgtacctttgggagttcttactcaagttattacaagatagagaatactgccctaggtatataaaatggacgaatagggaaaagggcgtcttcaagttagtcgattccaaagctgtttcaaggttgtggggtatgcacaagaacaaacctgatatgaattacgaaaccatgggtagagccttaagatattattaccagaggggcattttagctaaagtagatggtcagaggctagtttaccaatttgtagaggtacctaaggatatagtcgaaatagactgcacaggtgcagcgtaatctgttttttttcctcaaagagtaaaactcaacatcagccggtggtgaaagccggttgtgtctcgaaaaagtacaacaaatcacaaattatttatttagaaatattcaatttctagattgtatatattagctatgactcaaaagatagtaacaacgaatttttgcagtttgtagcattcttaaagatctcataaagaagtcattttgtggtaaaagcaaagacaaactagcgattcgaagagagacagagagccgtaatcttgctatttgatttttacagttgactttccaacagtaaaagtacaaagaggtgccactattagttaccgtgtaactgcgagtaaagcacataagtatagtagaaacggaattcggtcagaatgcgtaaaaaagtggcggtatcaatgtttggtataaatctacaagaaattcgaatagctgctgtaacgacaagcacttgccagtattttgaacatcccattaatcattgtaaattagtcattttagaacttgcagcaaaaacttgcatactagtacagttaaaataattagacgataaacattaagcaagagaaattaaacttttttttacttctaaggacaaaaacattatttggttaaaacatctcgtttttgttggtaatatattaatttttctggactaaattaccgttctgttgataacaatgttgccagactgaattttgttatg

SEQ ID NO: 6769 - DNA, 2073 bp, Diabrotica virgifera
  SmartBlast Evalue=1E-141; Info=Macrophage MHC class I receptor 2 n=1 Tax=Harpegnathos saltator RepID=E2C1J9_9HYME
gccacccaccatacgattaaaaagttttaaacgaagtgcgaggtcattggcccccctaagacataccacaggggggcacgtttaaaaatataatgccgcagtgataatagttcaagttcaacttttgaaaacggaaaaattaaagactgaatttattatttcccgacaccaagctacttaagtcagtctaatcgactaagtggggcttggcgcgtctcaaacaggttgttgagtaaatgttgtacataactgaataaatattcaatgcaattgaatagaagcaaacacagatgtgtaagggaatcagtgttgttttattatcatatctgtacgtgatgataatatgactttgtataaattatttcatttagtcattttgtttgtgacaaatcgttgttgagtatgtgaaaataatacaaaagaaaaaaatgatgcagatcaacaggaagctgcttcccattaaggcccattacttcttttttatggcagcaatgggcccaatccttccacagctcaacgtcatcggtaaagaattgggagtatcttcctttgtgatgggtataataacgggtattcttccagtgttgtttctcctggctaaaccagtattcgggctgatcgtggatatatttagggactacaggaaatcaatttttatcgcattaatcgttgcaaccacagttagcttctggctcctggattacgttccccaacaacctggactgcaaatagcgttaaatggaaccgacattcaacattttaaaaaatgtgatattagcaaaattaatactgaagcaaaatgtagcaatgtcaccaaacgtgtgacctgcacttctaattgttacgaatatccacaaccatttttggtagaaacttcaaactcttcgtcattcaagcaagaacagttgtgccctttggacaccctaaccgtctttagtgagccgaatattgaaaacagtaccgacaattcgtgtcatctcaagtgccaccaagactttgaaaatggacacgactgtctttataagacggtcaccttttggttgtacattattttcatgtgtgttgggtccgttggattcaacgtggtcaattctatcagtgacgccatatgctttgatgtaattggcgacgaatatgattacggaaagcagagagtatggggtacaataggctttggaatttccgctctcatagctggatatgcagtagattatttttctggtacttcaatatcttacaccccagctttaattgtgatgattatttgctccgtggttgatcttttggcttgcactaaattacagttgcccataatggaagcacccgagaacattttcaaggaccttagggaactgatgaaagacaagaaagtcgtcgttttcttagccttcactatatttgctggagttgtggacagttttcacatttattatttattttggtatctggaggaccttgccgaagcatcgcagacaacaaatattaaactattggaagggataatagtcgccgctgagacgttaggtggagaagttatttttttctctatatcaggtgtcatcttagaacgttttggacacgtccactgcttcagcatgtgcttcattaactatgctctacgcttgggattactatctgtagctcctagtccatggtgggtggttccgatagagttcatttttcaaggaccaacgtatgctcttacttatacaacaatagtggcgtatgccaacgaattagcaccacctggagcctctgctaccatgcaaggaatagctgctggaatggacgatggatttggttatgctattggtagtcttttgggaggaactctatacaaatactttggaggaaaaccaactatacaaatttttagtttcatcgctgtcatctgcagtattttacatttggttctgcacaaaaccattcttaaagatggagagtctgcggattcttcagtggagtacaaatcaccagaagatgcaattaaaataaagttagagaaagaaagtgactgaataaattagtttttaaaattgtatatatgtaatattagaataggcattacattgt

SEQ ID NO: 6770 - DNA, 2070 bp, Diabrotica virgifera
  SmartBlast Evalue=0; Info=Low-density lipoprotein receptor- related protein 6 n=1 Tax=Harpegnathos saltator RepID=E2B7S9_ 9HYME
gacagtgagaccaatcatattgaggtagctaccatagaaggaaaatacaggaaggttttattttggactgatattgatcaacctagggctattgctctggtgccttctgaaggttttatgttctggaccgattggggagaattaccaaaaattgaacgagccagcatggatggagctccaaaatcaagaaaaaccatagtatcggataatatcttctggcccaatggtctaacaattgattacaaaaccaaacatgtatattgggctgatggaaaattaaaatttattaagaggatggattatgacggcaaaagtttagtaacagttttagataaagcatcgtactatccatttgctttgactcagttggaaacaaaaatgtattggactgattgggaaacaggggctatccactactatgatacatctggtcaacagaaacaacctttggaattgttgtcggtgcagaatccaatggatatacatgtttgggatccccagcatcaacctaacattaccagtccatgccaagtaagcaatggaggatgttctcatttgtgccttctatctcaggatccattaaagtttacctgtgcttgcccgatggggtttaaacttatagataataaaacatgttatgataaacctcaggaactattgttattagcgaaaagaccggaaattcggttgatttatctagattccccagaatacagttctaaggctctacctctcgatgtaaaatattctatagctgtagatttcgatccagtcgacaattatatttactggtcagacgatgaagttaagacgatacagaaggccaaaattgatggcacagaacaacaggatgtgatttgggctgaaattcaacaccctgatggtatcgcgcttgactggattgctagaaacatttactggactgatgcagggactgatagaatagaagtctctacactaaccggaggataccgaaaagttattattatggataaattacatgaccctagaggtattgcagttgcgccagaattaggttggcttttttggtcagattggaatgaaaaagagcctaaaattgaaaggtgcaatcttgatggctctgaaagggttcaaatagttactgaaaatttaggttggccgaacggtattactttggatcataagaaaacgagaatatactggggagacgccaaattagacaaaattgaatatgcggatatggatgggtctaacaggagagagcttattgatgacaatgtaccacatgtatttggatttactttgatgggagactacatttactggactgactggcaaagaagagctatcgacaaagctaataaagaaacagggggcgaaagagaagtgatagttgaccaaatggaaaatgtaatgggtctcaaagcaataaatttaaacggagccgttgggtggaatttatgtaaagaaaataatggtaactgctcacaattgtgcctttataaacacaacaaggaacgagtttgtgcttgccaaattgaccacgaattaaagagggacggacaaacttgtatcaaaccaaaagccttcttgttgtattccaaaagagccaatattggaagaattgggattgaaaatgaaaattatgaagttactgttcctatagctggtattaagcatgctagtgccatagattttgatacaaacacaatgcgtatatactggagtgacagtaagcttcggacaataatgagagcatttctcaatggctcagatatacagcgggtgatagatctcggtttaacatcacctgaaggtattgctgtagattggttaggactgaatatttattggactgatccagtgtcacaccgaattgaagtttccagattaatgggaagaagtagacgaactttattatggaacgaagcttatgagccacacagtattgttgtggatcctggagagggatatctttattggtctgaatggggcacaaccaactttataaaaaaggcagctatggatggaaaaaatcaatcaaaactaatttctaccgttaatcctgctaatagccttactttagat

SEQ ID NO: 6771 - DNA, 2070 bp, Diabrotica virgifera
  SmartBlast Evalue=1E-105; Info=Abhydrolase domain-containing protein 4 n=1 Tax=Harpegnathos saltator RepID=E2BMM4_9HYME
gcgaatggactgatactgaaaacggcgtttttgcgtgttgctattaatttgctctcccacatgcagcgacaagtttatacttgcaaaaagtactcggaaaatgtactcgtataataaacgcgagaaacgggtattttacccatatgctacgggtacgagtaccgagtattttattgaaaatgtactcgggtaccgggtacccaaaatgtactcagggtacaaaattctggtacctgtacccgggtattgcccagctctgatcctaggctgcaaaattaaaaatctttaaaaatttcaaatttaacaagtgaaaaacgtcataaataataaagtgcacaaaatttttggttacattttagtagaagacattcctggcatcgtccttacaacaccttacaggtttcaaaaattcctgaattatatcctgaaatcgacctactcttcacccacagcttggactagtagccttacgacacatgtaagacgaataaagcatttttaaacatttacagacatcataaaatacttttaggcagaagattcgtatattttatctaaggtttccatttacagtctcgtgtttattatttgcataccactgaaatcgtcgtcttctactagtccctctattttcttatcccattcgttttcattatcacaatttttgttatcttctttttcttcggaactaaacgtatcagaattatcacattgcttacatactttacagacgagtttgttaaacaatactgattgatctgcattgatgtgatgtccagcattaggtaaaatctctgctttgacatacgattcaggtctttgatttttcaaatcatcttctggaatcttccttacccaagacttttcaccataaataactgtaagcggcacgtctttgcttaatgaatgatacctgcgtatcattggatttttagcccatgctaagccttctttcattgagttaaaagcagattctccagatggattttggcaattacattggtaaatatattctgttataagatttgtattgtcaattgctgggctatatttgtcagatatgtcgtgccttactttaccaacaagccatggacctatcggtccagcagccctaatactagccaacggattaaaccaagtgaaaggatatgcagcaaaaattataagtttaaaccaaaatggcgcctctaactttgctggacgttccgtgaatccccaaggatcggctaagattaaatgttttaccctatcgggatagtttatagcgtaacttgttgccaggtatccaccaaagctatgccccaggaggatcatattttctagtttcatttgttttctccatgcctctagggaatctaccatttgtttctctgcttcttcaggatcaccgctgaattttggtcgtgatgatcttccaaatcctaatagatctatcgcatatactggcctatcctttgacaattcatcaaaattaagaatccagaagcacagtccggcagcgaaaccatgtagcataactagcggagtctttttggattgttcgtttaaagcgatggtccatattttgtcttctttgccgagttggcttccaattggtacgaaccaagtacgataagcagtttttaatacattcaaaatagttttttctacttgtgccagtcgtttttctgaaaatttggtccaacaaccgttcttcccaccatttattaactcagattccacttgttcagtttccatctccattgtgattattgtcgtattatttgaattatgcgtgatactgaacgagtttatctatggtgtatgtacaataattaatgattaagttcaactgtaatttaacacacgactcatgaactgacactgaatgaaaaataaaaactagccaaacgtataaattgtgcacttaacaacgagtggtaaacaaataacgtgtttaataacctaacattattaaagctaaacttgaatcttgaatgttgaccttgcccacgagaggtatcctttcttgattgcttaattatgaatcatcgaaaattttggtaattatttataaactgatgaaatcca

SEQ ID NO: 6772 - DNA, 2067 bp, Diabrotica virgifera
  SmartBlast Evalue=1E-117; Info=Probable exonuclease mut-7-like protein n=1 Tax=Camponotus floridanus RepID=E2AKG3_9HYME
ggtacgaacatatccaaacatgacaataactgctgctcagaaataactttttctcttgaacttgatgaattcagccaaagcttcttcacggaattaaaaaatatatggaatatgttgaagaagagccctccagttgtaagcaaacttcacatacactttaacaatacagataacccatatatacaagtattacggctgctctacaattgtcaggaatttcataatgccaaaaataaatctctaccaatgtttatcattgaagagttcaaaatttggagtacaatgaatagggataatattaaacatcttttagtaccccagactaaaactgatgcctttaaattatctttaagacaaaatactttggcgttgaataagttgcttatagatgcgtttgagatgaagcaggagcgagagatatttttgagtattattaggtgcctaattgacaagaaacagtataaagaggcttgtcaatatactacaatgctaaaccttcacgactgtttcgacattgacgatttcttaatacctctcatattacaagatagactttacggagttgatgattttttaaaaaataatccgaaacatcagacagaacttgtgaaatggatggatggaatattagcgaatacgtctgttagggagacattgggagaatatgtagcagaccgagccataccagatttaaagtataacaaaatgcatgcaaaaccttggaaaaaattaatagctagaatggtgaagatgtttaaattaccagctgatttgactcccaatttaaacagaagaagaaacgaaggtgctctaaatttcctcttgcacaagaggtatattgaaaatagttttggggatgaaagttggaaagaaatggcacaagaagctgtcggggatgaggaggagttacaaaaggaattagtttaccaggttgctcaatatggtgattttgcagaagcgcttcgatgggcgcatttttataatattgacaggaacgagtggccgcacgcagtgagaatgcttgaagaaaatccggatggcaatagggaacaacagaaaatagtacagcaggacatcatctggaatgacgacgaaatcgagcaaccgtctgaacaaatcgagtatcataaaatgacattgccaatgagtgcaatatgtttaatagacgatccattaaaatttgaaaattttttagacatggcttctcaggaggtagatataattggcatcgattgtgagtggaaacctagttttggtggtcagctaaacgagttggctttgatgcaaattgctaccaggaaaaatgtgttcatattagatattatcaatattggcaacaaatgtccacatttgtggcaagaacttggaaagttcttttttaacaattgtgatatattgaaagtaggttttagtttaactggtgatattcatatgataaggcacgcattgcctaatcttaatttttctacaaatcgagtaggagtattggatctgtgttcattctggaaacatttggaaaaacatccggaagtaaaactaccatttgaagtacaaaaagggggccctagcctaagcaccttagtccattgctgtttgggttctcctctagataagtccgaccaattttccaattgggagaagaggcctttaagggacagtcaaataacatatgcagccttggatgcttattgtttgatacaatgttacgacgtgctacgtaagagctgtgaagaagttgggtttaactttgaggacgcgtgtttccaactcatgacgaatccaaaaataacgaagaaaatgaacaagaaaactgtaaaaaagaaggaagcggctaaacccaaagaagaactcattcagcctccgtctcctcatagtgaccaagtacctgccgaacaaatgaaagtcgtctgtgatacaatgctgcaaggtcttggcaagaaattaaggagttgcggtatcgacactgccattctggaaaatcatcaggaccacactgagtgcgttaagtatgccatcgatgaacgaagatatatcttgacgaaaggatatgaaacattcaagctgtta

SEQ ID NO: 6773 - DNA, 2066 bp, Diabrotica virgifera
  SmartBlast Evalue=0; Info=5-aminolevulinic acid synthase n=2 Tax=Culicini RepID=Q170W7_AEDAE
tggccgttagtacaggaagtcgttaacacaggttttactgtattatacatggcttacaaaatctactgatttctactgattttttgaaagcaaaaccactgaagaaataaaaactaacctggcaaccctgctcactgcatatatttccgcaatgtatgttatacctatgcgatttctgtaggacactgctttggtgtacgagtccgctaaggcttgtacaccagatatgattccacagagaaaaggaagctcgacacagccaaaaacgacgcggtctaacccaggatctgagtaatttggatatttgcgacgacgatgaagcaatttcttaaggtttttatttccttgtctcagtacgtttgattttatttaaagaatgtaattataaccattaacaaccgttacacccaaccaacaccatatcatagtgatcttcttttcttgtgttaaatggtgatagccacaagttgtggacagttggggatatcacagtgaatatcggctgcacatcttcggttttctctcgactcgtagtagtcaaaaagcagtggtttttgacaaaacttgcattgctgtccacattgttgccccgttagtggaagctccaggtcgtgccacacttcctttaaatctcgaactaacgtgtccatcaattctttggaatgatgcggtgtgggggctaatctcaatttctcctctcctctagcaacggtagggtaattaatggcttgaatgtagtggcctttttctttcaataaggtatcacaaacggcgccgcatcgtaaagggtttccgatttttattgggatgatatgactgggggtgtgttctacagggaaaccgttctctaacaatgaatttctgagatatttgacgttagcttgatgttggtctcttagttttcttccttcctccgatgctaatatttcaatagatttacacgctcctgccagaaccgtcggtggtagtgatgtagtgaatataaagcccgctgcgtaggatctcaccatatcgatcaaagcagaggtactagccacataaccaccaacatttccaaaagccttgcccagtgttcccgatatcatatccattttgtgcatcacgtgatccctttctccaattcctgcgccatgctcgccgtacaaaccaaccgcatggacttcgtccacgaatgttaacgctccatatttatgggaaatatcacaaagttcctctagcgggcacacagctcctgacatggaatgcacagtttcaaatgctacaattttgggaacgtttcgatcaactccttggagaagttcttctaaatgtgctggatcattgtgcctgaatatatgcttaggaacacggctatttctgatcccttgaatcattgatgcgtgattcccagcgtcagaaaatatatgacaacctggtaaagctttagccaaagtgtataaagttgagtcgttagcgacaaagcacgaagtaaacagcaaggcagcatctttattgtgtagctcagcaagattggactccaacttttcgtgcagagttgaattgccagaaatgtttcgagttcctcctgctccagttccgtatttttctagtgcatctcgtacggcagcttttacttcaggatgagacgacattcctagataatcatttgaacaccagacagttattggtgcttgtccccatgaatgttctacagcttttggaaattctccaggtcctgccaaccgattgactttcttaaaaactctgtaggaatgttccttcttcttcttcatgatttgctgatggaagaactgatcgtaggcaaacacgtcatcttgagttttaacttcagccttactggcaacattattcatgcttctggatatcacaggacattggttaccatacattttgaccaaaagagaagcataattcttcaaataagcttggcttaattttgaaaggaatggacaagacatctttcaagacttatgtatttgaaagtgaaatttaatttaaattatttgacgtcagtattcagtaggtcaaatcctctccactaccgcgcgctgtctttcctctttccc

SEQ ID NO: 6774 - DNA, 2068 bp, Diabrotica virgifera
gtatggttttttcgcaactattgctattttgaaactagggtgactatttttttggtttttggccaattttatattttagtaagttgaattgcgcaacttttgtgtcagtacaacttctctcggatatgaatactgttggagttataatcaagaaacgaagaaaaggatcgaatttttccttcaattcttgacattttgattgtgtaaacaatgttccggacctttttgagagggaggacggctcaaatattgttgtttgatttgttttcaagcaatttctgcaaaaagaaatttgagtcacctctcaacgtccatctcaaaacagatccgccctggactataaggtaaacgcgcatttgaccaaatcggctggcaacggaacgcaccgctacagctcagaattaaatgccatacggcgtatttatcgacaaaatcacgtaagctcaatgagtgaatttacgtatttcatagaaaatggatccgaaaattattattgttagtttgttgtgcaaggagtggagaaataacaaagtaaacttccaaaaggaagtgcaataaatagatgtatgaaaattgtgaaaaaagcaaaacacggaaacaaattttatcaatactttagagtgagttacgataaatatcaagtatacataaaccagagaactaagagactcacaaattttcaattcagcgggatgctcttgttccatttgtaaagttaaacacgtagatcccttgtttgtggaatttcataccttgtacaatagtaccccgctcagctgaatataaatgaatctcttagttctctagtttaactatagctagtaaaagctgatgtcacaaaataaaataaaacatctagaatttgtttcattcgaatacacacagatattaaatttccgttccgttgcgaccggtccggacaagtgaggcttgccttttaagcgggctccacactctcggcgaagttacttcgccaaagttgaccgaagtccgaagtacctctctacacactcgttctacttcgcgaggaacacattcaagcgatgcgataccgacaaagatccctttgactcggacgcgccagaccgacagagaacggaagtagaacgaagcgaggcaaagttgcacaaggtgtccgtctacactctcgtacttgttgaacctcgatcgacttcggcgagagtgtggagctcacataacattttttcatagagagtaataatgtaacagtttgtagtttctaccagttgtgatgtaacaggcgtaacgctatgttatttcacaatatggagaaggtctactacttcttcatttgtgacgagatctaccagcgaaatttcaaaaattgtcctcgagatggacatttcaaacttttttaggttctatgatcttaatttaacttccatcaacaataagatttactgtttttgattaaatagttaatctagcaaagatagaccagtaggtacttctttaaatctagtaatggtcagcgtttacatagaccaataatagtttattaagcttttttcggtcaactttttaagtcttgtttttaaaggaatgtttgtataacattttaaacctttgtgaaacatgtaccattaatgttgctcttccactcctttataaaaataattgttaaaataacttataaaattaatcttgtttaatgactcgaaatataaattttaattttcgtataaggttcagatttacagtattagttatattataatttttagaaatttttcaatttcttttctaataactacacatacagcaaaaagtatgcctgtggtaacgttcataaattaagaagttgtcgttgcttgaaacttatgaaaattttgatagtttttgctgtattgtcattattaaatatttaagttatttttttattaataaatattcattcaaatgatttgtgtcaaatatactggtgaaaaaggcagaaagtgcagttactctgtgtataatttggaaaagtgataatatttatatactagatttatctatttttgctcataaatttatgaatctatttatttttaaatatttagtatta

SEQ ID NO: 6775 - DNA, 2066 bp, Diabrotica virgifera
ccgggaaggagaatgctgttccagatgttgcggttccaggaacgaagactgtctttcatgaaggaagagtgctgttctacgagttacgagctgtttgtggttccgggaaagagaatgctgttccagatgtgcgaggttccagggaggaagaatgcagatgtatttttcagagaaagactgcgattccagaggtaggccttgcggttcaagaaggaataatgctgttctaggagtaggagctgtttgcgggtccaagagggagaatggaatttcagatgtacgaggcagaagtaggcgtttgcggtacaaggaagaagaatgctgtgtccgagggacgtggtctttgcaggtgcgggaggaatgctgtttcaggtgtacaaggctgttaggttccagtagaaagatttctgttacagaggcaggaggtgtttggggtttcatgtgtaggaggcggatgcagctcaaggtttgaggcaggtacgaggttccggttccagaagtatgaggtgtttacgattctgagtaaaatgctgtggcaagcggttagggcgtttgcggttccaaaggcagaaaacgcttgttattacagaagcacgaggcgattgaggttccagccttatgacgggtatggcgcttccaggtgtatgagcgatggcagttctagaagtggttctaggagaaataagcgattccttaaggttccaaattgaagttatggcttccaggctagggagtacggcatgagtcatagattttagcatactatttctgttcaatggttttgcgagaatggtgcatcagaagagagagatttgtatgattccaagagaaaaaatattgcagcaggagaaatcagtattctaagcaagataaattgtttaggtatattctacaataagggctatgaaagttgataaccgtcaattaattggaatttgagatgatcctgaataaggatgtgatccattcaactttcgagtacgaaaacagaacattaattagaaatacaacaaagtacgtttcatccaaatagccaaaatttaaaacatgtggatggagattttgaaaggtacttatgccaacattttaatgctttgaatggttatgtttagatcaatacgaagaaaaattatggaagtggaatgagtgtttacacggtttattgaatgggtttgtatgatattgttcataaaattgtgtatgtaaagtgattttgacgagactatggagtgaatctaagattgagtgatacaaaataagtatatgtaccccacagtccaagtgcaagacataatttacaacggttttgtgagtgtttttgcgagaacgatggatgcatcagaagatatttgtatgattctaagagaagtaagaaagatgtagcagatgcagcattgtaaaaatgattgggagatcttagcaggagctagtttgtaatcagagggtgcgagttatcgatcaaatctaaattgtttgatacatctctgaaggtggtacaagattccagtggtggagaattaaatttaaatgaggcgagtgatttgtctacattaggaggtatgaaatgagtatgctaatgtgtgtctaggtgagatgtttgaatgttaagataaaatgttggcaacatataagaaatcagaaaatctattacaaaattataacaaaactatgaaacaaagattggtgaataattcctgcctacgaaaattatggaccttgatagagaaacgtactgaagtaatagcactgatgcatcatcgcacatcactgtgtgacttctgtaaagtagaacagcgagaaaagcttttcagtttcatccaaaatagccctttcagcttttccaaaatttaaaactatataactcatatagactcagaagatagaagaattggcagaatgtttcacaccacttttggaacaaggcaaaaaggcaatttttcctattacaaatttgaactgtgactgatagacacgcagagttagaaattggaaagactgaagatcaacacaggatagtttgttatacaataaagtttttattggcaataaattcattacatactact

SEQ ID NO: 6776 - DNA, 2062 bp, Diabrotica virgifera
  SmartBlast Evalue=6E-12; Info=Myb-like protein X n=1 Tax= Dictyostelium discoideum RepID=MYBX_DICDI
gtagacccacgttacctgttctcgtgctccgcattgacaccgttttgtgaatattttgacgttttacatcctcgtccagtgtgttgaacttgtctatgtgcaatatttgttgtttctgttcggttttcttgtggaattttcacctgtgaaactactgtattcttgctgatagtcttcaagtttattcatcgttagataccttgtccttaacgggttttgaacatgacgatccagtagcccagcaacgatgccaacattatgggagtcaagcttcagttactgctaggattacttttgttgagttcaacatgccgctccgaaagcaacaacacagccacccaagatatttcttcagagaaattggatagcacaaagaatctaatagaaaaattgccaaagactgatacccaaacaaatttagttagaaaagatactcaaaatgcttctggtgatagttccaaatacgcgaagtatcctttagaggatgatactctcaaaaaccaaactcttctccaagaagaaaggaatcatggcagcgacaacgacggaaagggaagacaagataattccagagcgatagatataaataagttccctcctgcagatgtccaaaataacgaatacagcggatcagataatcagaagttcttggataattcaattcgtaaaacttctaccaaagttttctcagattttaactttcagctaactacgccgagaactaaatatttcgatacaaaatatgaagaagctagacaaaaacttgaacaagaatacgaagagaataatccagaacactctgacgatcaccacatggatatcactcaagaagtggaagaagatgaccgtgaacatgatctccacatggatcgactttttggcagtgtcagaaataaccccaattcctctatagattacaaagaaaagactaagatctctcgtaacaataccgtagatgataattcagagcacaatgaaattagagttgagaaacatcaaacgctcaattttgcttccgagtacaatgttacaacgtccgaagaagacgattcaggaaagagagattctttccatgaaacaacgtctccaaaagccttccttactacaagaaaaactatggcattaaccaagccacctaccacacataacaaccatattcttagcaacaaaattgaatcagaaaccattaaggcaataaatttgttaacaacagaagatccaactacaaaaagactgacagacgagaacgatatcgtcccaaaagaacaaagtgtagaagaaaataaaataatacccatagaggctaactattcgcaaaaaacaactacagaacatgtagtaaatgttacaaatagtagagaacaaattgaaacaagtacggggaaattggagaaagaaccttctgtataccgtgagtcacccacaacagacaattacgatcaaactacagtaagtgatgatataaatgttaaagaagcaaccactatggacgatcaagttagacttcaatcaactactgttcaaattcctgaagaaacatcaacaattgttaaagacactactacagataacattgaagaaacaacatatcgcatgagcgaaccaacaacaaataaaggaagaatggtaacaacaaatgttgatctgtattcaacagatgttcctgttacagaaacaactacatcagaaactgccactaaagaagctattctaccttttgaaactacctcaacactcttacccaaagacgaaacaactaccattgttctttcaacagaagtagatattgatacttcaactgttgttgtcacagaagcgacaaataaaatagaaatggaaacaactactacagagactataaccgatgaacaaactactcaagaaaccactactaaagatatggaaagtaccgcaactgaacatggcaatagagtttcaaaatcgtttatttttgaaaacactactgtttcggaaagtacggaatcaagtgtagatgataaactattttcaacgacgatactcgatgaaagtaaaacaacagaaaaacttactactggacaac

SEQ ID NO: 6777 - DNA, 2049 bp, Diabrotica virgifera
tacaatgtttatcacaatattaaaaatagattataattacgattattcatcttgtgctccaagaaaataattaaataaattcactcaatcattcagtatataataaattatttatcaaaattagaactttcagtagtatgaggaaaagttaagaaacatgggaaaatagagagaaagaaaaaacttattagatgacacaaaaatattcgaatcaatatcggcggtcaataactttagtccatttactaacggtttttgctccaaattttaacgaaccagttggagcatagctaacatgtcaaagaaaaaagagatattgtgccgatgggtacttttgccctaggggtgactttcaccccttctcggggtgaaaaaatatacgttcaaaataagtcccgaaatggacaaactgactaattccaagcaacctcattctatagcgcctcttcactaagttaatacttttcgagtcatttgcaagtgaatatgctcatgaaaactcattccaactttttaaagcgtcaaaaaaagctttatttttgttttttaaaaagagtttctagcatcaaaagtaagcaacttacggttaaataatgttagttaccttttgtaaaaaaaaaatcaggaaaatcaacccctaattagcatctcaaataaaattaatcgttaccgcttcacaagttctttatttatatgatatgtaagtgtctggttcaaactgcttatttttgaaaaaattgggttctaaaataaaattttttaatttgaaaaaatgcttttttacaactttgaaatcacttaaaaaattttagtgataccaaaaatctcaaacagtaaaaaaaaatcaaattttgcttttctgaatattttggatttttttgttttcctgtaagacaaaaattggttaagatatggctgttcaaaatgtgcatacactcatgattagtgactccttcaagccctttcaactacagccttttcagaaataaggactttgaaccgaagaaacttacagatcatataaacaatatattcaccagtaaagcggtaacaaacaatttcctttgggatgctaattagggggcgattttcatgatttgtttaccaaaaaaaggaaccaactttattttgggcgaaacttgcccacctttgaagctataagcttctttaaaaaaacaaaaataaagcctttctaaacgcttcaaaaagatgtaatcagttttccccataaagtgcttaagttttttgttgaaaataaatatattcactagcaaataactcgaaaaatattaactagtgaaaaaacgcaatggaataaaagttgtttagaatcagacagtttatccatttcgggacctcattgaacatatatctcttcacaactgacaaggggtgaaaacccgcacacatcggcacaatatcacttttttggcatgttatctatatgtatgccaaatttcatatcgatctaagcggttctttaaaatttggaggttttgcaatatttaccgtcagtaagtggactacttatggttttctattaatgaaggtttattaaataatcattaatatttttctggaaatgatagttactcgttaatctacttttcttaactacagaaagataatatttaatactgttgagataatcctacagtttacagcctacattaatatcacaaaacatcccaagtatggacatttagtttactgttgaatttccctgcattttccccttacatgtacatatcccggaaaacatctaaattgaagaaggtttctcatgtttacttcaatcttaggatggactgtagctttgataaaatgttttctttcttcaatttgccttaacaactcctcaagttcatcaggattccatattctcgagttagtatcacttttacaccccatcactatatttaaaataaaaatcacaacaagcagtttataatgcatactgtctaatcttgatattggtgattttttagatttatggtttctctattttatctaaaatgtagttggtattgaacacagaaatactcgagt

SEQ ID NO: 6778 - DNA, 2056 bp, Diabrotica virgifera
  SmartBlast Evalue=1E-161; Info=Poly(U)-binding-splicing factor half pint (Fragment) n=2 Tax=Formicidae RepID=E2C4P4_9HYME
aactatcacatcgaatcatcgtcttcttctgacttgttttttcgttatatatgattactctttcaaccgacccaaatttgctacattcctcttggatttcctcctgcaacatttcgtctacgtcctcgggaccaaccatattccttaaaataacaactctcgaatccaccttcctcataagtttctgcatcacaaaatgcctggcgttttggccctttatcgacatattttcttgttgctgcaacgtctgtggttcgctttgatccagcaatttcttctgtagttgttcctgttgttttaactgagcttcctggacctttttcatcgattctgctgaactgccagaaggttgttggaccatcggcatcggtgtgaccattgtaggggctgcgatctgtggtggagtgatcaaaggcgtaacaatcgccggctgaatcgtgttgtttggtgtaatttgcggtatggcgataccaggtggaggaatgattgcaggaatgcctgctgtcgtcgttactatcgtcggtcctgctacaactggctgcgttatcactggcataactaccggttgggtcactacgttaggaactgtcggtgctttatttaacgtaggtaatcctagcgctgcggcgttactagcaactgcgtccatagcttgaattttagctgtcgctgctgcagccgcaactgctgctgctgtgggtaatacgctagatccagaagaaggtcctaacaaagcattgggcggagtaattgccctaccgaccctaagatactgtccccccagatcgaacaagttcatactggcaatggcttcgttggcggcttgagctgtttcatattctatgaatccgtagcctttgtgtttgtgtccagtgcttccttgagctagtttgcagtaaatgatgggtccgaatgcttcgaatacgcttttaatgtcttcttctaccaagtcaggatgaatggacgccacgtatattctattatactgtttggcctcttcttgtatctcatctataacgttctgcgcctgcggcatgttgctcggtcttcccacaactttgatgtttctaccaccgatcatgacaccgttcatctgctccagagccaactgagcggcttcagggatttcgtattcgacaaacgcgaaacctttgtgtttctgcgtgatgggatcccatgacatgttgatcgatttgatggggccaaaggggaggaaagccgaacggatggtgtcttccttcaactcgaaactgatacttccgacgtatactctgcacatgagagcgagagcctgctgcctctggattagattcctctgaccagcctcttgctgttgttgataagcaatagtctgtttcatgagaaccattcgaatactttgttccatagcgtatttctttgctttgctgactgcatctgcatcgtccgatgatagtttgggcagcgctcctcctaaaattcctgcaattgtactgctgcgtgcaccaggacctgtaatgacttctccaatttgaatcaaatcatagatatactcgtatccctcacacagtcttgctgggtcaatgggtatctcggggatttcttctgttccaggtgctggaggttcatattccaacatgggatcaggctccatctcaggttgcggtgaaagttctggttcggcgtctaacggagggtccgggtccaccgacatgggaggttgagggatttggtcagagactgtgttcaggggcatgggaggcattggaggaggaggtataccgagggcttgcatgctaggtggtaacatgggcggtaggggcatagattgtgctagaactgaagggggtagaccaggaggtggcagtatgggtggtggagcactaatagtttgagtaggcggatgtgcttttgccgaagcactcatcataagccgctgttgttgaaatgaggtcatcatcttgttatttagatatcaagataaaaacgaacaaattataaaattattaaattaccgcaaaccgaaaatcgataggtgatgcatgtacccacaaacacaatacacaaaatggcgatt

SEQ ID NO: 6779 - DNA, 2055 bp, Diabrotica virgifera
  SmartBlast Evalue=0; Info="ATP-binding cassette subfamily E, member 1 n=3 Tax=Neoptera RepID=E0VD57_PEDHC"
tggttctttaattatactcaagggatacaatttattaaagtagtaaaaagtagctcaatatcctttgcctgcaatcgattattgacacgtacaattaataattataacgaacgttttcctgtctaactggatacaaaaaccaacgaattaatcctccaagaagaaatactgcccggccctcttctgctccacgtccttcaccgactcaagcttgttgatcctaggtcggaaattgttaggatcacgtctgaaagttatgccgaggagttccaggaaccggttcattccggccaataaggtttgaggggcgtgggctgtcgtcttcactgagggagacccttcgaatacgatgacacgatcggccaagtaggtcgccattatgaaatcgtgctctactacgaaaccggtcttcttcgcgtgaagtataaaccgttttatgaccttagctgctaccaaacgctgttcagaatccaaataggcactaggttcatcaacaaggtatacatcagcgggttttccaagacaaagcgtcattgccactctctgcaattctcctccagataaattctgtacttcttgatcgatgatgtcttctatcttcaaaggcttcattacatctgctataaattgtggatgaatataggcatccctaattttctcatgaagcaactgtcttaccaatcctgtggatttaggactgatcttttggggcttataacttatatgcaactggggtaattcacctgatccactatcaggctccaaatttccagccaacattctaataaaagtagtctttccggtaccattctctcccaacagcaccaaaatttcagaatcagaaaactgaccctgggcaaccttcaactcaaaactacccatcgttttagtcatagttgggtactcgtagtggttcatacgtttaatttcttcttctgtagccgactctgctactttaaaaactaaagattcatctcggaaacggagattttcggttgggacaaaaccgtccaggaaaatgttgataccttcacggacagagaaaggcatagttactacaccataggcaccaggcactccataaagacagcaaatgaagtctgacaggtagtcaagaacactcaagtcgtgttccaccacaataataaacctagaattgctgggatctatcagggatctgatagttctggcagcatttaagcgctgtttgacatctagatatgatgaaggctcatcgaacatgaatatgtctccattctgaatacataccatggcacaggcaaatctttggagttctcctccagataatgcggcgatttcacgttcttttatgtgcagcagatccaacatcccacaaatttgattcatattgtctagttcattttttctgtctagaagttgtcccacagtgcctttaactgctttgggaatttgatcaacatactggggctttataagagccttcaaatcatcctctagaatcttagtgaagtaattttgcaattcgctacctctgaaatggcttagaatttctgtccaatctggaggatccatatatcttcctagattgggcttttgttttcctgcaagaatcttcagggcagtagatttaccaataccgttagtgcctacgagtccaagtacctcaccaggacgaggtataggtaacctatggagcttgaatgagttcttaccatatctatgagtagtttctttttgcaaattacttggtaaattaataatagcaatggcttcaaaggggcatttcttaacacagataccacaaccaatgcacaattcctcagatatggtagcaattttactgtttggtacaacttcaatgcacagttttccaagccggaccactggacaagatttcttgcattcctgcctacatcttttgggtttgcatttatctgcattgacaatggctatacgggtgagtttgtcagactcttccattccttttcgtttggacattttgctaaaatctgtcctgtttttttcctttaaacagaaatgaagacggcaaacgtcaccttttaataatttgcc

SEQ ID NO: 6780 - DNA, 2053 bp, Diabrotica virgifera
  SmartBlast Evalue=0; Info=Eukaryotic translation initiation factor 3 subunit D n=3 Tax=Aculeata RepID=E2AAA3_9HYME
caacgtatatgcaagttttatttatcaaatagcacatatatagcactacatgtgcctattgcgtatctaatatttaatttcattttcattaaaaattccaatataaccaaatacagataccacagcagaaattccataaaaacagataaaccttttgatttttgttgttatttgtgtatgtaccattcttcgtttccccaaattggttatttatgttatgatttatatgtttggtttatggtttatctctttttatcgaattaatacctaacactgcaattttcttaacgtttggaactagaactgtaggaatacaatggaaatgctgtagagctttctgggacatcgtcgtcagattcagtttccccgtcggattcaaaagtgttatcgggaatatcatagagacggatcatgggcttatttggatccttcatgatcaaatattttccatctttctgcttcatgacaatatccacgatgcacctcaaaataccccaagcgttatccatgttcaagttaatctgtgtagcgaattcgtgtggtttatattgttgcgttcctagaataacatgtttgctgttatctctgacgtgggcacgagatacataaccgaacttaatttgatcgcttccagccagaagtgcctggacggtccatttagccagtttgcaagcgttgttgcggagctcgttagctagaacggcacctcgttgggtatccagtttttggcgccattcgacgccgttggccagtttggaatcccattcgtttagggccttaatggtaaggaattggagttcaccgttgggagattggactacggcatcatgttcacaacgggcaaccaatgtaattcctcctccaagatcccacttgcggtatctataagcaacactagcaatttctccctcctcttcttctgatatgaatgggtttggatcatcaaacttgtaccgtggttcatttgcacctattttcagtacttgttggctgaaattgtggttaatgaatgtagcttccagagccaaatttcttggtgaatttaaggagttgccatcatcttgagggggctcaaccgatgtctcatttacagtcagtaaatcaaattctgtgttgtctctcttgtcgaaaaatagtttgtcgcctattttttcaataacaatatcccaagaataattggaacgagtacaacacataatggtagccaaaattgcatctgtagcatatacattgccttcagtttttgtcaattttctgataactggatcgtctgtagtagtaacagtatggaaaattctgttgacactttgtagggctttctcatttttaacattgacacgatcgtaagacttatcgtaatattccagttcaccacagcacaaaacatcgtcaccatccttaattcctggcagagacaattttccaagtctggggaagtccatttcttcaatagtactccagtctggtcttacagtaactgatgcatcccttatttttatttgaggacgaccttgcccccatctcttgacttgacttctcttgtatgtgtcccttgtcttaacacccttaccaagagcttgcatgccaccaccttgcacattagctctaccaccccttccgcgcatattacgttgattagcacggaatctacctcgctggtatggaggtttctgaactctggtagtgtccaccaaatggaaagtgctttcatcttcatcatggtaatacgcatactggctacctgagccaaattgggaagcatatttattagcatattttttatcttgaaatgcagctccagtccaatcactaattttgcctagccgatcacctttactaaagggttggtaaggcatatccttaaactgatctggcacttcacaaggtccccatccggcttgattgtcttgaattacaggcgccacaaagtgcggagcctctcctcctgagctataatcggtcatagtcattacttcacctaattaattaaaaacaaccacctaaaatatttcaaagcgttaaacctaaactgccttgaaattggaaaaggttc

SEQ ID NO: 6781 - DNA, 2047 bp, Diabrotica virgifera
  SmartBlast Evalue=0; Info=Active phase-associated protein II n= 1 Tax=Gastrophysa atrocyanea RepID=Q1JUL0_GASAT
atactaataaaggttgaatcggaatcaataacgtcaccattaggatatactccatgtaaaatcttttggaacataaacagattggttgaagtgaatctcaggttgttcttcaactgctattcctagtggcgtacggtgtagattccataaactgtcaagtatttttttagcgagattctttgcttcagcgtgattagccctagcggcataataggataatgttctggccgtagctgccgcaggtcctaccccgtttccatagtaaactaccttacaatgaacattaggaggtactccaacccagtccaaggtactgggtatcctataatcgtccccttcaaagtaagtgtttgcgatgatccaagatacccatttatccaaaatttttttagctttatcatctccagttatataataatattgtgccaaacgatcagtagaccaaggctgcattccaaaccattgatttgatgggggatcgtaggcaacaggtgcccaattataaaacattccatggaaagtattgtccattagttcttctggaggttgctcgtatctaccattccagctattggaaacaccacctgcaaatgcgccttctacagattgtaagtaatcgtataattctaattgtcgatctaaggatatttgccaatcttcaactgcagttgcacctttaggagtcatattaggttcgttaattaaggcatatgctgccataggattttggtaaccaaaatgagcgacaccgtctccaattctccaagaatatccatattctgaagatattgatcctccccatccaaaataccatcctaacaagtaatgagcactatccttgccagtacctcctggacatttataaggatctatacaattaccaattctcttaaaattttgatcgaaaaagcagtaccttaaataatcacccaatttaccagccttttgtaatgtatccgttatttctgataagtggccacttttagttgcccatcttgaagcccaaaatgccgcagcaatggccctagcatctgcatctggagcaacagaatatttccaattaggagcatgatctccagtagaaaataatgggccaaatccttctggaccaccatatttatgagaatcacaagttggttggggaatggttttccaggcattttctctaggacctctttgatatgtattgataaaagatggcccaggctcgttgggaccaagttcacaattaccaggactattaccgaagccataaacgttatcgacatctgtcaaccagtgcatcgcgtaaatatcactagttccgtaagtatctactaattcttgatacaaggggtcgattccaactggagctggaggatcaactggtcctacaggatagtcttctggatattcctgttctggaccataaccagcaggatgcgatggattgtacagattagtgttaggttgactttcatgtacaggaataatatatttctccattatttcccacgcttcgttaaatcttgaaaagttattggtaataccaccatacatagcttctaaccaaatatagtaactgtgtgcttcggatgttgtctcatgaccataatcagacgattctacaactagagtttcaacagcatggtatggtattccttttgaagaaaagtatccattattgggatcgtgcattttattgtactgttccaggaatctttgtttgtaaacactctcgcaacttgcatgattcataataatcaccgcaaggacaagtaaatgcaacggcgtcatgttttttacttatttaactataggtacatatgggtaggtatatttttaaaacaacgctcttaactagaaagtaaaactaaaaatgatcttaaccgatattaaacttaaagtaatttcaagagtgaactgataacactatttaaagaattaaaggaattttaataaaaaaaagttttattttatcaataagcatggaactccaaacgaaaacttttaaacaggcaaatggcacgagctctattaattgaaatttttagtgataacgaaaacc

SEQ ID NO: 6782 - DNA, 2050 bp, Diabrotica virgifera
  SmartBlast Evalue=0; Info=Heat shock protein 68a n=3 Tax= Tenebrionidae RepID=D6WU59_TRICA
cgacgagtaaacaagtgatatcaaagtagtccagcgaattatatttgacaaagtatttgaaagttttgtgtagtaaacgtattatcgtgtgaaattacatcaagaaaatggttaaagttccagcaattggtattgatttgggcaccacgtattcctgcgtgggtgtctggcagcatggaaaagtagaaatcatcgctaacgaccaaggcaacagaacaacacccagctatgttgctttcacagatacagagcgtctcttaggagatgctgcgatgaaccaagtggcgatgaaccccagtaactcagttttcgatgccaaacgtctcatcggcagaaagtttgatgatccaaaaatccaacaagacatccagcactggccatttaaagtcgtcaacgattgtagcaaaccgaaaattcaagttgattataaaggtgaacgaaaaacatttgccccggaagaaattagttcgatggttcttaccaaaatgaaagaaactgcagaagcttatctgggaaccagtgttagagatgccgttatcacagttccagcctactttaacgattcacaaagacaagccactaaagatgcaggtgccatcgctggtcttaacattttgagaattattaatgaaccaacagcagcagccttagcttatggtcttgacaaaaatctgaaaggtgaaaagaatgtactcatcttcgacttgggtggaggtacctttgatgtttctattttgacgattgatgagggctcattgtttgaagtaagatccacagctggtgacactcatcttggtggtgaagattttgacaacaggttagtcaatcattttgctgatgaattcaagagaaaattcaagaaagatctgaaaaataatccaagagccctacgaaggttaagaacagccgcagaaagagccaagcgtactttgtcatccagttcagaagccattatagaaatagacgctcttttcgagggtatcgacttctatactaaaattagcagagcaagatttgaagaattatgttcagatctcttcagaggaacattacaacctgttgagaaagccctgaatgatgccaaattagataaaggacaaatccacgatattgttctggttggtggttctacacgtattcccaaaatccaacagcttcttcaaaattacttcagtggcaaaccattgaatctttccatcaacccagatgaagccgtagcatatggagcagctgtccaagccgcagtattgagtggggaaactgattcgaagatccaagatgtcttactagtcgatgtagctccattatctttgggcattgaaactgcaggaggagttatgaccaacataatttcaagaaattcaagaattccatgcaaacagacccagacatttacaacatacgctgacaagcaaccagctgttactattcaagtatttgaaggtgaaagagctatgacaaaagataacaatcgtctgggaacatttgatctaactggcattcctcctgcgcctcgtggagtcccaaaaattgaagttactttcgacttggatgccaatggtatactcaacgtttccgccaaagatactagttctggtaatacccgcaacatcaccataaagaatgacaaggggcgattgtcacaacaagaaattgaccgaatgttatcagaagctgaaaagtacaaggaagaagatgaacgacagaaagagaaaatagcagcaagaaaccaacttgaagggtacgtcttccaattaaaacaagctgtacaggattgcgaagacaaattatcatctgaagacaagtcggcaatcgagagagcatgtgagagctgtctaaaatggttagatagcaacactttagctgacaaagaagaatatgaagacaaacagaaagaattgacgagagtatgcagtcctatcatgaccaaattgtaccaaggaagtcaaaataacaatcagtacagtggtggaatgcctggtggctgcggacaacagtatggaggatttggcggacaacaaagcggtcccacagtagaagaagttgatta

SEQ ID NO: 6783 - DNA, 2047 bp, Diabrotica virgifera
attatcagttcccacttcgccatacgattttgtttgattttgattcttgattcaattcagtgtgatttcaaggcggctgtgcttcgcgggcagtccgaagtgtgcggtgaatatttgccggcaaaattgtttttacatacggacaatttaagctctgaatagtttgtgatatttttttataaagaagtgaccctacaagacataagttactatacatcatatgtgacgccactttcattttccaaggaatcgaatgaggaacagtacacctggtaataagagaagaatgataagctttcaagtactctgcgaattccatttgtgtatttaatggtcttcgcttaatataaagtctgatacagctgccatttcctgttgctgattcgaagaaaaagttaaaaaagttgatctatacattcaccgcgacaagatgatgagactggtacttttagctgcacttttatcaatttcttcaagtgaagatgcagtttccctgaacccattcaaacaaagctacgtatgcccaccgaagttcatcagacagggccacagatgttatttcttcagtaaagaggctatcacgtggtcggaagcactatttcaatgtcgagaaatgcacagtaatctcgccattatacaaaacagaaatcaagataaactcataagaagcttcctgagtaaaaagacgctagatcctttagaacgatggttgggaggagtctacgattggggtaaaatggcttggaagtgggcagctccggaaaaccactcgcttataatggattttcaaaagaagttaatcctcaggatcccgaaactttaagatggcattgcattatcatggatcctacacaacagtacttctggagctcacgtagttgcgtggaacgaaaacactacatctgtcaaactagacttaaaaccgttaacaacagggataagaagagacttcaacgccaatacaaggccagcaaagacaaccgactaaatgaaatcccagtgccatatattcccgattttccaaataatactactgccctgaagtacaacgccttgccgatcacctatcacttcgaacctaacgacaaactcagcgataacgctatgttcgcctacaagagccctgaatacaagaagccagtcagaagaaacggacaaaggaaaaagaaatccaatagcttgaggccaatgagaccattgagattagccaatggtactgttatagaaagacccagaaaacgagtgactcaccgaagaaggaaacaaagaaaacctgaagatttaggaaaacccactttaatcaaaaacatcaggtggaagacatacaaaaagaatggaaatctacccaacccgctttatccaagacctatagtcgaagaatataactatgtaaagggtggatgaacatagcttcatatttaaaattttgtattaactaattattattgttgagcctgcctgttacattttaacagataagacaactgaagcaactttgaaatttcaaaagatgctattcggataacaaaagtattgttcgtatttatttggaattaatgtgacttactctctagctatagttgataatatttttattttaactgaaagttttaagtatagggcttttcattcacagtcatttgtttcgagcttctgtcatgtgtcacataatattaatatatctacgtcatacgttattggcatataccttaccttagaatataaaataaccaggaaggagtaaatacaaaatgaccttgagccgggaaggaggtcgcaaatggcgaccagatgtcagatttgctttccatctccacgtgacgtacctttgaaagagggaagaaaagaaattcttaacgattttattacatcttcgatgttaaacatgatgtttattttatattctaaggcatataccaatgatacaaaccaagggcgtatgacgtagatatattaatattagaccttttcgcgctgtataacctgaacgtacccagagggagagcgcctgcgcattacaaaattggacgttcaataagattgaata

SEQ ID NO: 6784 - DNA, 2050 bp, Diabrotica virgifera
  SmartBlast Evalue=1E-125; Info="Amidotransferase subunit A, putative n=1 Tax=Pediculus humanus corporis RepID=E0VE66_PEDHC"
gacagccttcgaaagtatttccatacaactctctctcaataccaaataaaatttagatgattaataattaattaatagactttatttcctacaacattattattttaaattgaaaccggttaataaataattagacctaagatgtttcgaagggtggtacgtaaccgccgaatgctttttctaattcttttgctacggctatacataagtgatcctggtagggtgctgctactacttgaataccaactggtaatccttctttattgagacccatgggtacctgcgtaacaggaaatttaagtacgttccaaatcacaaagtaatggaaattccatggtcgtagataagcagcgtggtgataactggctggaaatggagcagatggatataaaagaacgccattatcaccaagcttggccaataattgttcccttaatttctcagtctcttttatggcccaggtttcattcggtgaaggcagtagtctattaataaaattatagatggttgatgtggtgtactcactgccaacagtgaaatgttttaaagtatcaactatgggatttgcctctcccgtgcggtcagtaatatctttcataaaattaacacctgattctttactcatccaatacttccataacttgccagcaaatttggtaccttcaatattttttaattcttcggggggagtagttgagatttccttgaaatgtttaaccgcacgtaacatagtttgcttcatgtcttccctataggggctaattaaggcatctttcgcatttacaatataactcatatttaggtttttaacgtcaacaggatcattcaattttaactctttgacacgttccccaactaaaaccttcaatacgggtgctagatcttcggcgtgtctagtcaagggtcccgtgttcaccatagtaacctcttcgtcgccttttctaaatccgattccagctgttgaaattaagtgagaagtaggtttgtgaccgaaaacaccacacataaatgcaggaatcctaactgagcctcctatatcagtaccaatactcaaaggtgtaccacccgcagccaacaaactggcttctccacctgaagaacctcccacatttcttgtagaattataaggattatttgtaataccaaataatgggttgtgtgtttcttgccataaattcaactgtggtatatttgtcacccctaaacatatcgctcctgcgtttttaataagggttatatactctgcatcaaatacagctcttcttcctcttctctttactatacctaaggtaaatgacattccttctacagctgttgattccttggttgtaaatggtacgcccaaaaatggtttttcttgaaaatcaacatctaaaattgttccatttgctatatctctatcgatttttctagcatcttctaaagcagcttcatatctagaatctaccaaagcatttaaaacgggatttacttctttaattctgtcaacaaatgcttgtactatttcttctgatgttaattctctctttcttattttttgtgcaagagatgtagcactttcaagaattattggattagtacattttttaattggaactctctttgagtcattaaaatatccaaatataacgtctataagaatatcaatgtagtatcttgtgaagagaaaaactttgagcagcattgttctaacataactacaaaaacctctatttctatgactatgtttcttatgttctttaatatcttttatggattccactgaagacattttgattgcagtattgcagtgtgttgttgacctttgttaatattagaaaattagaaggtaaaccgctgtgtcattaaaaatcagtaaattaatatattcctcaatatataccaccagtgtatgtcaaattagcaactaatgaataacaaattatcacatacactaaattaaaaataatatgcacatgtctgtctaagtaataaatgaattagcgagtttggagtatctaacaaaacaagacagtaattattatttctgtctctaactgtaaattatttt

SEQ ID NO: 6785 - DNA, 2046 bp, Diabrotica virgifera
  SmartBlast Evalue=1E-142; Info=Threonine dehydratase/deaminase n=1 Tax=Aedes aegypti RepID=Q17F44_AEDAE
attacaataattatacgtcctattttatatttgaatagtcatacacattttgttattcaaataaaaatttgaataacgaattttaagtgtgaacatactaaaccgatatgtaatatatgtagttgactagttcagaaacaaaaacctcacaaataataacacagtattatgttatattataataaacgcaatgaaagtttcttcgtatttaaaaacatacattaaaggctgatttatgttaggacgggacgtgcacgatacttgccgtagaacaatagaaaacgcacgtcgtagcacgtctccggagtcgccccgttccgttgtatgataaactagtcaatgtttttcacaccagacgattcttcaacgtgccgtccacgtcccagttctaacataaatcagcctttatgctgatgtttctaataatcagttgacgatgatacttgctctctttttggaaggttatcaaaaaccaccttcttatattttgagttcaaacgatctcttagttctatggtgtggttgtaatccctggtttcacatactacttttacctctacactgaaaatgtctgatgctacccacgctctttcgtgcataatatccttaatggaaactccaactgatgatataatcttgcaaagttctgagataccgccaggcctgtcgctgactttaactttaaactttactaaacgaccatcagctgctaaacctcgttctatgcagcgacctaagagagttgtgtcgatgttacctccagttaaataagtacaacccgttttcctttgaattcctcaagagttccacttattatggctgccaagccgcacgctcccgctccttcaacaacacatttttctttttcaataaaccttaaaatggccacagctatccattcttccttaacaactaccatcttatctactaaatttttagaagtcaaccaagcgttatatcctacttgagggactgcaaggccatcggctaatgtggcttctatttcagtatgtattgggctggtatgttctattgctttcgtgtaacttgcacatctttccgactctactccaatgactttaatactaggatttagtgtcttgactgctacggccactccagctaaaagtcctcctccacctgttggtactaccacagcgtctatatcatctacttgttccataatttctagtccgatggttccttgggcagctatgacccgaggattgtcgtatccattaataaaagtccatctattttccgtcgccagttgcattgcttttttcttggcttctgccatattccgtccttccataatgacattagcattatattctttacatttttgtattttcattatcggggctgttattggcattactactgttactggaatttccaactggtatccatgataactaagagcttgagcgtgatttcccaaagaagcggcaatgactcctcgttttttctcctcgggcgttagctgtattaaggcgtaccgagctccacgttccttaaaacttccagtttgctgtagaaagtctttttttaaatatatatccatcccagtcatactagacatatgcgatctcacgcatggggtgtatgctattccgctccttattttgtaagcagctgacgttatttcctcgaatgggaccattactggttttttagggttgcacattgggtctaatgtgtctaaatcataatctatttctagttcaccttcggattcttccgagtaatctggggattttgtgtaattttccatgtttttctattctggtgaaaagttaaaaaataactcacagtacaacaacaaaacaggtctaactcacttatatgcactagttagttcgacttaaaatatgtcttcttgacccctcgcagagttatcacttgttttgtttaagataaagttttatttttattccgaattgaataaatgccaggcactaacataatagttttataattattgtagggactattaacgcgttttaatgtgtatttggatgagtttctcgataatttgataat

SEQ ID NO: 6786 - DNA, 2043 bp, Diabrotica virgifera
  SmartBlast Evalue=0; Info=Inositol hexakisphosphate and diphosphoinositol-pentakisphosphate kinase n=1 Tax=Harpegnathos saltator RepID=E2C3I7_9HYME
ctgttgagggtgcattctacgttccggcacgatctgaagatatacgcttctgacgaggggagagttcaaatgacggctgcggcttttgccaaaggtctcttagctttagagggagagcttactccgattttagtgcaaatggttaaaagtgcaaatacgaatggacttttagataatgactgtgatagtagcaagtatcaaaatatgtgtaagactaggttacacgaacttatgcaaatagatcgggactttacacaagaggacagagaaaaaattaaatccgtgcaattccactagtatagcagatgctatagaattcataaaaaatcctgtaaaatgttgtaaacacgtccacgaattaattaaaaatttattaggaatagtgcaaattaaaaaagaagatccgaaaagcagagatgctgttttgtatcatggagaaacttgggaattaatgggaagaagatgggggaaaatagaaaaagacttttttacgaaaaacaaaacttttgatattagtaaaatacccgatatctacgactgtattaagtacgatttacaacataaccaacatactctgcagtttgatcaagctgaagaattgtatacgtatgctaaatacttagctgatattgtcataccccagaaaaggaatatggcctgacatcccaagagaaattgaccatcggccagggtatctgtactccgctgctgaaaaagatcaaggcggacctgcagaggaacatcgaggaaactggtgaagagaacgtaaatcgattgaatccgaggtattcgcatggtgtgtccagtcctggaagacacgttagaacacgactgtattttaccagtgagagtcatattcactcgttgattactgtcttacgacacggaggattagtcgatgttaaaaaagacgaacagtggcgcagagctatggagtatgtttcgtgcgtctcagaactgaattatatgtcacagattgttataatgctctacgaagatcctacgaaagatccttgtagcgaagaaagattccacatcgaattacattttagtcccggcgtcaattgttgtgtacagaaaaaccttcctccaggtcctggttttcgacctcattcgagaaacgagtctgctgccagtaagaacgctagtttaaatacatccgaaacggcaactccagaagaaggaaaaagtaggtgttcgcccagaatcgacgaagaagccgaaatgtgtatagaggaagagaaatatataattaattctccgaaggaatttgaatctccgacagacactcaaaagatgtcgccaccttgttctccggaaatatattaccgaggaaatgtgaaaagtagtaatcccattcctataggaaattctcacactgtatgcggccatgaagccatgcacctagcaaaatgtctcaacgaagaattagctaaccaagctgcccagcagggtagtcgcagttacggactcaacagagcaaccagccccgagttggatcagcagcgatccaggagctacgaccacaagagtccttctaagggtaaagctcagaaattacaccaaagtttggacgctgttaacagcacagactgcagcctcaacgtcgtcaaacgccatcgacacggcgttgtcggacagatgagctattacaagatgttagggttcggttgcggaggtcccttaggtttgaagaagctggtcagcggaagcgccaactccttgttttcgacggcagtcatttccggtagctccagcgcaccgaatctcagggatatgattacgagctcatccaatgcaacagccatcgaaggttttggcggtgtaccttctataagacctttggagacgttacataatgcactttctttaaaacagctagatgcctttttggatagaatgactacggctcctatctttcgaactccatcgtcgacaccgccaaaatatccatctactcctttgcccacgccgacaaatggcaatatattagcatgcggtctatcattggacaagtcacggcctttgaaattacagtccccc

SEQ ID NO: 6787 - DNA, 2040 bp, Diabrotica virgifera
cccaaagcaaggcatctccgaactgtccagtccaaaacatcacggtacttccccgaacgcatccttcagcaacgggttcggggaaacccagtatgtcagctttaaaagagcgccgccaactcaccttcaagtaaaagcagcgattctaaaatctaaacccagtttgaaggacagctcgcgcgacaaagagaaaaaaatcgtcgagtacctttagtgtttcaaaatcaaaaaaaataagagttccttaaacaaagtgaaatcgttggagctgaataccagtgatgtgtcatcagacggtctgccttcgcccagtggtaatagtgactcgtcaaaaagtagttctaatcagttacgtactaatcgtagtaaaggttctttgtcggcaatagtcgataagttaaaagtaaatgctcaacattgtgatagttcaacggacttaagtagcaaatcgagtagtaacaaggataggactacaagtagcagtgctaaatcaaacgaatctagtaaatcggtgcttaaaatcggggatgcaaaaaactcggagtatatggttaagccgagttcggacgggattaaaattacgataaataaaactaggagtaaggataattcttcgagtaaattatcagtttcaactctagcaaataaggttaatacgacgaactcgcctaaaacacacactggcctaaaacccggagtaaacagtggtccagcttcaaagaaacctcaacaagttcaaaaatcatccagctcatctccctctaatactgcaacaacaaattctagtagcggtagtacaaaaagcttttctcctagttctaaatcttcatcatcaagctattctaaaacttcttcgggatcttcttctagcagcaatagtacaaatttgtccaaaagcagttcaaaattgactggttctcctaaaatgaactccacctcaggagatttaaatcgatctaaagataaaaacaagtttaacaagagcaatcctgagaaatcaattctgtcttcgctaaaagaaagtagaaaggctagtccgacacagttacgcgaggaggttgataatgtatacaagatgtcacagtccagtttgatggaagggagaatcaaaacgttggacaagaactttcaaattcctaaactctctgccagaactaatgatgacaaaaagactgttagaaacgatagtttaaacgttaataggagtaaagctgatccgaaattgtatgatatggttacaaagaacgattcaaaatattcgttgggtaatcaaatacttgataattctgtagagaaagttaagaataatattaataatttaccgccaggtatgggatgcaatgatgaggaatccgggaagaaagatatttctcagaacctatctagtatgcaaggtaaagatgacacgagtaagttggatcctctcttaacaccaaaactgtattcagagcctctgagctattcatcgaagaatgtagacttccctccgacaaaatttatcgcacccgcaccgaaggacgaaagaaaagactcaagaaaaaacgacgaagtgttggattttagctcaaagcccttacaaccgttacctcaatctccatccgtcagtgttcatatagtgaaatcgccagcaccgagccctttaatcaatcccagtccccattcggcctcgccgggaatcacagacgacgaattgatggacgaggcgttagtgggaatgggcaaatagttattcgtgaaattaaaacctaaaagggttaaaggataaatatctaactaatattagttctattctttgacttgcggaatgcttgagagatgtgaactggtattggtatctagtcaaaaatttggtattttttggttcgttcgtttgaaaaacatcaagactgatgacagattctagaaaagggcctttttataacataaaacatgaaattaccaatttgatacttgttcgtttaagactcatatttttattatttctggtatagggtatactcatagaaacctgttttatctaataatattaggtaataataa

SEQ ID NO: 6788 - DNA, 2043 bp, Diabrotica virgifera
  SmartBlast Evalue=1E-116; Info="Sug, isoform C n=7 Tax= melanogaster subgroup RepID=Q9VTL9_DROME"
tacattagattggaattgtccacaacgtgtgcataagaaccatcgtaacaattccatattcgtctttataaactgtaaaaatcgagagagaacatgtatatttaaaatattgatcatattttcgaatactagccttaacgtctagcgttttcagacctctccatagctctggttccttcgaaggccaaagaaatacattttaactagtatcactaatatttctttggttgtcatgaatataagtacgtcaattctttttcgtcgtcacgttggaccttttctaaagtttcttctggtgtcgaatactgattctgagatcctcttattaaatactgaatggcaatgtgaatgaagcaaacgattatagctccataaccaaaatatcggaatgttagagggccaccgaagtgtttgtaacagtatcctcctaagtaacttcctgcagagacaccgaccccttcgaatacggctccgaccaaaccctgcatggtggcttccgttcctgaaggcgctactatactggcatacgatgccatacaagcgaagaacagtccaaacgtaagcccgtttgatatttcaataggcaagaaataccatggattgggtatcacagaataaagcagaaatctaatgcccacagcaaacagcaccaacgacatcgtattcacatggcccagtttcttgataataactcctgaaaagaagaaaaacggcgcttctcccagaacggtttggactccttgaagcaggccttccaaggtcttcacgtaaaccattcctgtacagccttggttcttggccaaatcttcgacgagccagaattggaattgccacatcaagcctgtacacatgccaacgcctatacaccaaaatagaaaaactatgatgcggacatcgaacaaaagtaccgccacgtctcggcaaatattagtggagactttcttttgagaataactgattctagtcgatgtaagaaagtcgaaaacaagaaatagggccgccatgtaaaaagctgcggtataatcttttggccttttcctcgactcgacaagtcaatgactattccaacgattgctgcaacaactccccaaccaagagatccccatagtctttgataaccatagtgacttggtttgtcgcctagtaattcgaaacatatggcatctcctacactaactaccacagcctgtccaatccatgcaatcaccataaaaattagcacacaccaaaactggtagagtccatatgctgcatcatcgctaactgacgtttcagtgatcatctcgttcaaactataatcttcacaattaatttgacaagtcgaaagaaacggggtattcgtttcggtacaaggcgggataatgtactgccgttgctcaatgttatgttatctatcttaaatattaacgaatagtttgacaatgttgtctcgtgcttaggcactagagcagtgaacgatatttggttactgtactcaggaaggcagtattcctcaatgctccatatatcacatagtggtgcaggatcaagcacaccacaactcatctcacacttatcccacttccgatctgccttaatgggatccaaaaagcatttatctataggttcagtcgagtgaaaaacaaaagacgtcgtactgttatagcatgacatatctacgttcctcacagtttctattggcggtgaataaaacactgctaaaaaagcggctgctgtcaaaagttgggcgccaagaaataaaattttttgacaatggaatctgtcggctatggatccgaagatcggcttggccagcatcccgctaatcgggaggactgtgtaaatgaagcccaccactacactggacaggcctagttgtctggcatatgaactaagaaatggtgttacgggactggttccagcattccataaaaaataatgagctttcataggcagaagttctttattcatttttggatacttcattatatacgcactaaatatttttgattgattaatccaaattttaaaatttactaaatataacctaatatttacacgtta

SEQ ID NO: 6789 - DNA, 2041 bp, Diabrotica virgifera
  SmartBlast Evalue=2E-81; Info=BEL12_AG transposon polyprotein n= 1 Tax=Anopheles gambiae RepID=Q4JS97_ANOGA
ttccactcgtatagttttcgatccaaacaataaatcgtctacgggaatctccctcagtgacgtcatagacaaaggttatgtcgtccaacatgaactttttgacattctcgctaagtttcgtcagtttaaattcgcactagtaggcgacatcaaggctatgttcctacaaatcgccatttgtcccactgaaacatttctgttaaattttctctttagggacaatattcagcagcctttacggtgctatcaatttcaaagattacccttcgggctcccaagtagcccatttatcgctcaaagagttatcaagcacatcgctgacaacaacaaacatacccacgaacttgctactagtgttctgcaagaatctatctatatggatgacctgatcagcggtgctgacagtcttcatgaattaagttgtcttttcgaacaattaacttctttgctagaaacccatggtttcctcctccacaagtggaactgcagttcttcagaatttctgtctcaacacaatttaaatcccgtctctgaagtcagtcttaacttcacgggatctgataaagtcttaggcatattctgggattcagaacgcgaccacttttcgtttaaaactcctatcttcaaattggctaatgttgttactaaacgtactattctctcctacattgctactttgtatgacccgctaggatggttatcccctgtccttgtgaacgctaagctcttgatacaggaaatatggtcccagaaattggactgggatcaacccattgactcacccatcattatgaaaaattggcaaaacctcttatcgacattcaaaactatagaagaggtcaaggtacctcgatgcttacttttacaaaagaaagttgttgatgttcaattaattattttcaccgacgcatcggaaaaaatatacagcacttgtgtgtatctcaaagcgacatactcagacttttctgtatcgtcgcggcttatcgcttctaaaaacaaaatttctccgctaaaaaataaactcaccatccccaaattggaactttgtggaatagtgttgggagtcactctggctcatagactttttcacatcttcaagaaaaatttgagtatatcttcatctcatctctttgctgactctacaattgccttgtcttggatactttctaaaaaacacatttggaacatttttgtacaaaacagaattcaaaaggtcaattccttgttggaaacttttccttgtgatttccatttcgtcagaagtcacgaaaacatcgctgaccccgcttccagagggataaatgtctttgataatccccagaccaccgaagactggttatgcggacctagctttattagagacaatcccatcgatttttctcttcatcaaattcctcattttcaggatgatcttcctgaattaaggaagttagttgtctcaaacatagcaacaaatcacgaactcaacgacacctttgaaaatctattcgctaaatcttcttcttttcgtaaaattcaaagaattgtcgcttatctttttagattcatcagtaatattaaaaagaaaataaataactctccacgagatacggatatattgacgccacccgaaatggagatcgctgatcacgcgatcatcaggtatatccaaagtatctactttaaaaaagagattcttgaattgaaaaatgctaaactcgtgaccaataaagccattcgtaaactcaaccccttcctacaacataatgatgggctgattcgtgtgggaggacgtctccgacacgcccccatatcgtataatcaaaaacaccccattctacttccttctaaatgtcgagttgtagaactaatcttgactcaagctcatcataagttattacattcaggcgcgcaaacagtactttcgtatgtcaaaatgaagtactggccaattgacggattaagacagattaaacgcttaattcgtaagtgtgtaaactgtttccgattcatgacacccaattctgttcaacagatggcagatatgcatcccgatcgtgta

SEQ ID NO: 6790 - DNA, 2041 bp, Diabrotica virgifera
  SmartBlast Evalue=0; Info=Tyrosine-protein kinase src64b n=3 Tax=Culicidae RepID=Q17CE8_AEDAE
taccgtgcatatttactggattgtggtaaactatcaataatggaaatacaaacaaaatatttacttctgaactaacactatggtataaaaatattcgaaatcttgctgttactgtttttatttgttttatgtttatcaaaaccatgtcaagaattcttttctcgagaaactgatccaaataaaccttttataaaccttaatctgggacttctctataaggaacttcggacgtaacattgaatccttcaaagtaatgggtaatgtcggcctcttttcgggattggcatcccaacagttcaacattatttgataaatttcatcaggaacctgatgtgttgttggcttgggcattctataacctttatctactagatctatgacttctctaccgtgcatggcgggataaggaacttgtccgtaggtgaatagttccatcaggaggataccataggaccagacgtcggacttaatggagaatttactatagattatagcttcgggggctgtccatttcactgggaagctagaaccctgttttggacaatattcattgtcttctattaccctggctaatccaaaatcacatattttggcaatgttgttttcgcctataagtacatttcttgcggcaaggtccctatgaataagttgtttagattccaaatattccattccagaagctacttggaaagcaatataaatcaaatcttcaaactggagatgtcgcccttcatctttcctaaggaaatccagcaaactgcctttactcatatactcttgcacgatgtaaatcggttcttcctcgctacacactccatataatgctacaagcctcttgtgtctaaatttcttcataattcccgcttcttctaagaaagcggcagttgacatagtaccttctcttaaagttttcacagccacttcaatattgttcttccactttccgtagtatacctctccgaagtttcctcgtcccagtcgttgaatgaggactagttcatctctaggaatctcccatttatcacgatatgtgggacccaaatcccacattgtaggttgcggtcgtttacatggtttcgacaatacatgacataaaccgtaagcatttttggtatatgcattaactaaatcacaaagtttgtcaaatgttttgttcgtagaaatgtagaatccaccgttatctaagggctttattttgtaatgtttaatatgatatcccctgtactcttcccagtctttaacagagagagaatatccattgggattatgttcagaaggacggactagaaaagtaccacgtgggttttcttcagcaagaagaagtttttcggcttcttttctggatatgttctcaaagaaccagtcttcactttccacactctgttctggagcaacataattgcctggaatgtaacccttctctttagtaacaagatgtatcactttgagccaatccccttcggaatcgtcgataacctccattctatctccctttctgaaagacacgtcttggctatccctggcttcgtaattgtacatggccaccattataggcctggctttggtcggtgggggtttatataaattctcgggacggttggtgattatcgaacttggttcttggggaaagggactttcgataaatggtgggtgtttcaccactctcactaaatctgcctccatgcctttctgcttagccggaggcaaagcccgactgcggcagcagcaacaattgcccatggtgacgatcttgtcgctgagcagccgacccgcctctttcacctagtgctcctccaccacgtcggcttcttcgacgtcctcttcgtggccgtcgaggtcactcacagtcgttgtatttggtgctctgctttttcctctgcgtgtgttcttgacgatgacaacgatggcgcagagagttcatcaaacataacaaactttcagcttagtttcactaaaatatacactcaacacaaacgtaaaaatattctctggaattagatatgtttttcactctttatgagatggacacaatgctatgaac

SEQ ID NO: 6791 - DNA, 2036 bp, Diabrotica virgifera
  SmartBlast Evalue=0; Info=Protein fem-1-like protein B n=1 Tax= Camponotus floridanus RepID=E2AGL7_9HYME
atatatatacaaattatttacttattcttcctcttaactcctgagccatgtagttcaatgaaggattctaaagcttcgggtacctgccccctataagtaagagcgtacgctttgatagcgttggctgcaatacatcgtaaactgattttcatttgggtttttaagatgatctcggcaactcctgtggcagaaatatccagtgccgtttcattatatttattcacgcaatccaaatgtgcgccgttttcaatcagatctgtaataatcgagtgcattgtgataaaatcagacacagccttgttgtattgtacaattatgtgaagtggagtatttctttcattatccatagcatttacgttagcaccacattgaattaacaatttggttgtttctttgcaaggaaacttgcaaatatctgttatatgaaaatcatcaacaggagtatctgaactacaggccaaatgtagaagggactgtccattgcgtaacgtcatatttaaacggtttatactaaagacgagtttttccatgtcatgttttatttcttctgaaaaattcttcattgtttttgttataattgtaagtaaatacaatatcgtcgtaatgttgttttcaatgttgtccgtgatcacatcgtgaccatcatgtgttactggtttatttagcctctctctattttttactaattcttcgattgcggagcaaagaacctcgtctaagtaattatatggcaaagtaacgccaacgtgtatcatctgacaaaatacctgtgcgaatcgtaacagatctttcgttattgaaacattggtctttttatgtaaccgtaaagcatgtaaccacaactcaatgcatctatcgaagcgagcattatcagcaaaaacggctcctctgtatataaccgaataaggaacttccacgttttgagtacccagtatccgttcgcgaattgtgagtgcctccatgtgaagactgttgtgattttcacttattgccagtagatcttggactgtctgacattcgatccagttttcatatgcagcaataggtttgatgatcttcttttttatgggattatctggatcactgtacctaagtctcatcgataaaagcatatatttgtaggccttattaatatcgtagttttctttatcgttagcaaacgacgcgcctagcagttctagtgcctcgattctatcttcaactgttatatcttccctactaattaaaaattccacaaccctctctttcgttttctctgcagctgatttaatgggcgtcaatccagcttcgtttgttgagaatatagcatcgtacttaagtaattctttgacaactttgacgtgatcagattcagcagcaaaatgtagagctgtgccgccacagagagctctttcgttgacgttagcaccattttctaataaaaattttaccacttctaaatgtcccttgaaagaagctatcatcaaacacgtattattatatttattagctttattaatatcagccttgtggtgtactagatattgcacaatgtctaatcggccatcgaagcaagcggcacggagaggtgtagaatcagttttagttccgtggtttacgtcggaaccggcttttattaaatatttacaaatacttaggtggcctgcaaaggcagcacaccataatgcagtagcaccatctataacatatccgtcaaatctgacgataccttccttttccaaattaggttcgtagtttgttaagagcgatctcacaactttatcatgtcctttttttgcggctatcataagaggagtacatcgttgcccagcatcgtccactgtctcgtttaaaagttcattaactttatttttgtcaagtccaccaattgatgtgtatagggcaattgacataccatccttcgatgcaaaatatatacgatttattagatgatcatccggtatgtattcgtatttaactgtacacattttacttccttaatatttaaatataataatttactttaacaatgtatttgaagtttattccccaacaca

SEQ ID NO: 6792 - DNA, 2034 bp, Diabrotica virgifera
ctgatccaggaaaaatcttaacgcgttgttcaactcttcgatgtgtgcgcacaaatattcctaaatgtgcacatggttttcatacgagtcataccgttttatcaacagttaacagtcatggtagtctttgtactggaaaaaagttaggtacgttttatatgacctaagctgatatggtttacgtgtatgtcgatgtgccagcttctttgtgacattttcgaatgatatgtatcagaattaaaaatccgaatcgaagtgactaaccatatattgctttcctttttttaaatatatttaaaaatatattgactagatatttcaaccaaagatacatatgtacatttgtaataattactaaattattattgctgaatcaggtcaaaattatatgagttacaattgatcaaatatattaataacaccaccaatgtatcttttgctgaaaacattcaaacacgaataaaaatgtccgtttttcgtgagcacaaatcaaactatttggtacgactaaaatacgaccatcccaaaaattaaattaagagaaaactaaaatatcagttagaaaaacttataaattagtttgtaaattaaccgatttctatattttctaaagaagtttcaacgactttaaaagtactagcttgtaggaaatatttgaaggtaatcagaggaaattaaaaaccatgcagtatgcagtttatcgaacatttccagttattacgcatttcttacaaaccaaagcaaaatatataattttacatatattttttaaaacctttactagtatcagcgccaggaaaaactcacatataataaacctcagttaatttacaaaaaaagttttatatctgcacactacatgccccaaactatctaacaaataaatttcaattttcatgtaattgtcatgtagtaaatactatataaaaaggtaacaacttcctttccggtatcttgtacaatatcatacaataaacacattctttaacttaaattctacgaggtaatacataaaaaatcgatattgtttgtaaaaatctattaggatgtataattttctaagacggtaaatactttaattgggtttgtgaccgtgatgtaccatatatgccattaaactttacattaaattagttttattaattctcttttaaactatgatatacaatttaaattaaaaaaacaatgtaccagtaattagaccgatttaatatcatttacattatgcgaatcttagcatttggtataactttattaattataaactaaggaataaataatatgtacacactattatactaattaagaaatataatcttacgtacgcacaaaaggaacataaaatcctttatacatttaaacatttatcacatctaatcaactctgttgttaaacgatctgttcaaaacgcgaatacttcttcgaatttcagttaattgaccaaatgtttgtactgccaaactctcaggattatagacattatttttgtaatgatgaaattgaatttcattaaattactccagtgcaattaactaaaagttccctatcggcgcaatatacagtaatgagcgcgctaacaacaggcaaaacaacgcaaaagatggaaaacacaataagctgcgaaatgaaccgagatgaaccttaaattacttaatacgtctaaaagtacgaaactatcaatatagtctcaatttataggtttctatcactaaattttccaaatctactagtttcatttcgttttctttcacagcgtattatgtcttccatcctttgcgatattctgcctgccatcagcacgctcatcactgtataatcaatcatttgaaaatatctatttgtcgatgctttttaaaaatcagcatatttcaaagaaacagttttaaacatgttaacgttattaaaacaaaacaagtattgcaatatatgaaagtaattaagtagagagtagaaagatgaaagtgtataggtgaaacaaatatactaataacgtctttgaatgagtatgtaagaatacaattaaaattcaagata

SEQ ID NO: 6793 - DNA, 2031 bp, Diabrotica virgifera
gatcttatatactttaaatgggccaatggaacaataaaaatatacagatcaagcccttaataacatacatataattcaatcaaaatagacattttatctttattaataatatagtacataacttaaaaaagcagaatcctatactaaggactcaaaaaatagttacatatatagtaacgtacacttctcgtatcccctcgtaactggcgatctctttatgatatataataaaatacattatatatttattaacctacagaacaactctctcataaaaatacagttacagggtcaatacgaaaagttcacattaaatctttatacccgatcgatcgaaattagagatctttctacgtttgagttgcctctatgtacaggatcgacgtgtcctcaatttcgatcgaactagccctcctctttttatcccctcgctaataagtacttaataggttttatgtttggaggtcaccgaacagtctattacattcctgtgagaatcaaacggagcatgatagttttactacccttataaggtataaaatattgtatcgaaaaaagttatttcggacctaccccgaataacgattccaactcggtatactctagagagttccgccgacgaacagccgacgtgcgagcagcggccagtccatgtgacgctagagatgagcaggtcgttctcgatttttctacaaataatgcattacctacttatggtataaataggcacgctgttgtaagtagagttagttcataagataatgtcgaactgtaagcttgtaaataaaaaatagacttatatacatccgaaccgctagttttatttaaagaacgttacaacaggttatcaaaattttatgaactatttttttatggtgttaaatcgtggaccttcagatatatgcagaagattggaagcatttgagatgtgcctacatcggcaagatcccgtttactgactgagtcacaaatgacaaggtccccagaagaatgtagggtctgaccactattaaatctcgaaagtttggacaatacttcggacagattatgcgaaataaatccagatatgccctcttataagcaaccctgaaaggaaaaatatttctaaagcgaggtccaaagagaagaacatcctggttaaagaaccttagaacctggttcaacacaatctttgtgcttaatagtctgcgttacagagtcatcaaaacttttatactatattaaaatttataggtcctaatatatttgaaaaataaatctccgaattcttgaaaccttttggcaactctgcatttaaatccgtggttaataaaaaaatggaattagaaaagatgtttattagaacatttttttaatatccatttattataacatttgctagtacttacatgtttttgtaatatttacagtattttagacgcattgccagaagaataggtatgatggaaaactgatactcgagggcagagttgaaggaaaaaaacctaggggaagctcttcaattcgttggatggatcaataacaaatactgattaacataggtttacaagaagctaaacagctagctcaggatagagaaggatatagggaaattgtaaaaaaaaaattgatggagtcattatacttctgtaagaaattaggactaaagaggaggaggatctatagatatcaacagaaataagagtcttcatacggaatctaaatcacaggaatatcatctttgtatgcactacgcgaaaactgttggacaacagcctatcttgatcaaccaaatttgaaacttgaaattgaatttggaattgaatattgaaactcaaagcattccgggaaggcaaacaaacttcaccctatcactggatctttgataccgatttgagaaaacgtagatacatttatgcaagattattgtatggagtgtaagcatggagcctggtagcaattaagcaaattgaagccattcaaatggagaagaaagaacgtagaaatagtccatctaagttttgactactttttagtatttaaagtctgaat

SEQ ID NO: 6794 - DNA, 2034 bp, Diabrotica virgifera
  SmartBlast Evalue=2E-71; Info="Sugar transporter, putative n=1 Tax=Pediculus humanus corporis RepID=E0W0A9_PEDHC"
agttataattattgtgttaacaaaatatagtaccaagataacatagtatgtagtatttgatttataatatagcagatttttaaatgtcaaataattacaaaaacttaaaaaagctctaaagtttgattgttgataaaataaaaatggctaattattcattttattagttacagtgtggcacgtatggtgacttgtcagatactagtgtacaatttggcttcaattaccaggtcattttgtagcaaaacctaaagtaaatctagaattatttaaagtagtaaaaattagacaactccaacatccaggcctttaggtagaagttgcaactgtaacaaaacaaatattgaaaagctagatgccttctagatgcgattgtattacagaagtatacttttgtatacttgtatttgtatttagaagaaggcttgatcgtacattttcccatattaaaaatttggaacataacatttgttaatgaaaaattcttcttcaactacgtcatcgatcctttgagtaacatcatcgctttaaaagtatccgtctagtgtacctttaactttactacctacttaattcgtcttggatttcctccaacgttttggcactggtttcgataacatagaagaccacaaataatataaatgcagtacaacaaccagcaaagataaagaacacagctcctattccaattgcttcagatactggattaaaatattgagcaataaagaatcctataatgtagtaaataaatactgagaaggacatagcgaatgtttttacccttgtaacaaatatctcgctgataacaacccagcaaaggggtccgactccaaagttatatgtaaacatgaaaccggctaatgaaacgatgggtaaaaattttaatgaagacgacacttttcctgcatcatctagaacacaatatattcccaaaacggactcacaaataatcattcctgcagctgagagattcaaaagaaatcttctagtaaatctttcagccacaaacggagctatggaaccactagccagattgagggctccgagaataattgagcaaatttcgggggataaatttgagcctgttttattaaatatcgtttggctgtacatagttatgccattaataccagtaaattgttgaaaaatgagcaacatatttgctataataaaactttttataaatgctttagttttaagtacttctattaattttccagagttttgctcttcaatgttctcctttatttctttaatttcttcgtcaacgtttacacctggatttctgtatacttttaaagcatttttcgctttttcggtttgattcttcataaggtagtagtagggagattcttcgcaaaacaagatcgctaccaaaataactagtaatggattgacagctaaaattatatttaaagttgttactggaacatatggtccaatgcaataactggccaaagctcctaccccgagcatcatagctgcaattgtagaaacaaaacctctggtatttttactcgctatttcacttataaaggttatttgtataacgtatccacctcctaagcctatgcctgttatgaatctagcgacataatataccggaatgcttctaaatattgccatcaataagtaactagtgagtatgggaactcctacggtacacatggtaactcttcttcctaacacattggccatatacgcaaatatccaacaacccacgcagcatccaagtaccatcaaagatgtcatccaggaaatttcattcgtagtcgctatcctaccgaacggattatcgtcagtcagtttttgtagttttggaacgactggtgaagaccaactgatagcagtgccgaacataaaagccatcattcccactgcagttactgccccaacgaaattgttaaatacaccaaccttaataatcatcttgtatcacttggatcttctcaagtcaataaatacatgtctggaaaaatgctgtatttggtacaaatactcgcctatccatcttatcgaatcaacactatctga

SEQ ID NO: 6795 - DNA, 2034 bp, Diabrotica virgifera
  SmartBlast Evalue=0; Info=Nuclear protein localization n=1 Tax= Aedes aegypti RepID=Q177R9_AEDAE
tgacaattaaaatcaaaattgtactgacgaagctataaaaatatacatggatattttttcataatgtcgagaaacaaacctatgttgctgagagtacaatctccagaaggaacaaaaagagttgaaatcagcgcttcttccacaacttgtcaattgttcgaaacagttcatgacgcctttgaatttaacagttttgcttttgctttatacaaagaaaaaaacaagaaaagtgagatacctagcagcaagtctaaaactgtgctttccttgggtttgcgtcatggggatatgatatatttagctcctgttaatggagcagtattgtttagtaataactctccttctggggaaccagtggatgatgccaccccttcgactagtgctatgccttccacaagcgctacttcatattcaaaaaatagaattcgaagtggctctgcaaacattaaagaggatgaggtagatctacagttaatgaaaattgatggaaaggtgcagaggaatagggatgacaaactctgccgtcacaatgccaactcccgctgtgttcattgctcaccactagaaccttatgatgaagcgtatttgaaagaacacaatattaaacatctgtcctttcactcatatttacgcaaaatgatgtctggagtggaccgtgggaagtttttagccctagaagacatctcttgtcgcatcaaagaaggctgcaaggatcatccaccatggcctagaggtatctgttctaagtgccagcctaacgctatcacactgaatatgcaggcttacaggcatgttgacaacgtggcttttgaaaacacaaatttagttgaaagatttttgaactattggagggttactggccaccaaagaattggttttctttatggaaattacgaagtacaccctgatgttcccctaggaataaaagccaacgtcgtagcaatatacgaacctccacaagaaagttcgaaagactcgatccatctccttcccgatgacagagaggaaatcgtggaacaaatggcagcatctttaggtttaagacgtgtcggttggatatttaccgatcttctcgctaaggacgttcaaaccggcaccgtcaaatacattcgaaacatcgatagtcacttgttttcttctcaagagtgcataatggctggccattatcaaaatatgtaccccaatcccaccagatacgcatccaaagggacttttgggtcgaagttcgttacggtgtgtgtaacaggtgataagaccaatcaagtccacatggaaggataccaggtgtccaatcagtgcatggcgttagtacgagacaattgccttctgcccactaaggattgtccagaattaggttacgtcagagaatcgtcagataagcagtacgttccggacgtgtattataaggaaaaagattcatacggaaacgaagtatctcgactagctcgtccactgccagtagaataccttttacttgacgttcccgcctcgacacccgtctcccctcaaagaacgttcaacatcgatcccaacaagcagcccttccccgtggaaaacagactggttgaaggccacattcaggacttcaacgctctttccacatatctatctcaattcgcatttaacgagttctttaccgctatcaatgatttccatttgctgctctatatctccaccatggagatgctgcctatgcgcgagtttatagaacctctgctcaaagctcttagaaacaaggacagggaagccgctgaggaatggtcgaggtcggagcattgggctacgttagaacagctgattgccgctagttctccaccaccttcaaggccaggaagtgttgcttcaggtagcataacgtcatcgcctggtgcctcgagtggaccaaaatggacctgccccttttgtacttttcttaataatgctgacgtacagaactgtgaaatgtgcaatctgcctaggtctagcagaccacaataaggtgtgcagatgggattaagaagaaaatcttgtgatttgctgcatgttttctcgttt

SEQ ID NO: 6796 - DNA, 2029 bp, Diabrotica virgifera
  SmartBlast Evalue=2E-28; Info=Endonuclease-reverse transcriptase n=1 Tax=Bombyx mori RepID=D7F163_BOMMO
acttcagatagatatacaaatggattcatatctcttaaatttataatttaaaaatattcagatgtggtgatcgagatgaccgtgcaatgaccagcactctggtgaaagaactagaaacaaattttctattcgcagacgtttccattttattaattattcatccttacggtcgtttttgcgtttttaccgaaaattaaacagctacaattccttcgatggtggatctattgaaaatatgttcgaactgtgggatctgactggaataaaagttaaatttgatgtggagtgcctcaatacgcgatttatttttatgaaactcttttactgtaaaaaactagacaaggatattccaaaacaccgttttttacgtaaacaaattttgttaaggtcatttttcacaaaacgtgtcactgtacagtcaaataactgacaagattttcgcactggaatcgatatctggttaagagtaataagcatttggcaattttttagtacaaattaacgataaaattattataaaaaagtttccgaaatgtatgtgtacagatttcaaaacgtttgctactgttggttttgacaaaatgtgaaaataagcatgcgataaagatttttagtaagttttctcaaagtatttttgtattagctggatatttagatcaagaaaaaaccatcattgcacgtatcgatcaattttgcaacacaattaccattagagaaaagtaatgttcaatccaaaccccaaatattcaaagaaataacaaactattacgaattcctgaagtacataggacagaatggcccaaatctcaaatttaagaaatacttgacggtatagaactaattataggcggaaaaaaaatcaaaggaaaaacatacgtcgtacacattcaaattgtgtgaggaaaactgtacaaaatggtttatagtatagtgtagtaaatcagataactatctctctctgtctcttgtcgtttccccattatcgaggatcgtgatttcctccgatactccctgttcagactttactattttgtaaaaggcaaccatggcttccctgtgctttggtccttcgagtcggatatgaaccagcgaccaggatgtagaggtaatggattttgacaagagctatgaccctgtaaatatcacgttaactcgtgtactgctttgccttgacttatagctcttgtcaaaatttatttctagtacaacaaattttctccattggtctctattttcagatactttaagggtttcgcagaatgagtagcccattgaattctgaatttgatgggaccatttggttggttatcgccccttttggtcttctacccggaacatttctagaaacaattaaattatcgccacctttgcgaaccacgtgaccaaaaaactgtagaattcgtcgcagacatgttgtggacagccttttttaatgtcatgtggttaagaatggaaacgtttgtccgaggtaagcgcagcatttttctctaacgccacaactcaagagcatacatttttttggcgttcttgtgcgcgaacagtgcaaacaaaagtttctatacggggcagaaacaaaagttatagaaatattgaaaatacaagtgcattcgccaatctcatcttgatcttttagagataactctgtcttttccaaatcttaggcgattgatcgcattatttgtaaaaccaatgcgtcttcgaacttctgcttcgcagttaccatcgttagttatactagattcgagatagttgaatctgtttactatctggtattcctgcaagtggttgctcagcgattagtgttgaatctgtcttatcaccattattttcatcttgtctttattaattttaagaccaactataatgttttccaactctactcttggcagaagatctagtatttattgttcatttgctaagtggagtgtcatcggcaaattttaaattgaagatttttccaccaccttcgttccgtaccaccattattgctaaagccatctcatgacatatttaccataaatattgaaaa

SEQ ID NO: 6797 - DNA, 2032 bp, Diabrotica virgifera
  SmartBlast Evalue=1E-134; Info=Pyridine nucleotide-disulfide oxidoreductase domain-containing protein 1 n=1 Tax=Camponotus floridanus RepID=E2A5Q5_9HYME
ttcctatttattttattaatgctactgtacaaaattagattaaaatgcaaaacagtacctttcaatcaaaataatcttcaatgtctatatcaggatttaaaatatcatccccataaggtgacaaatctatttgatttagtataagattttcagccatttcctccaagtctgtatcaccaattagaacagcaccttgtaatttattatcttccaaaacgaattttatatactcatgaccttttgtcattctaataaggatttcgtagtttcttcccaatttttgtccattgaataatccaagaagaataaacttatatccaaatagttttgttgaatgagcaaacatttcaaaacaaaaatcttgcaagacctcttccttgtttaagtgtccaacaatggatttggctgcatacgaccccatctgtcttgcttgtgtccacagcttcatttgaaaccaatgttttgctaggtcccaattggcactacagacatcaccagctgcatatatatttggaagattggtttgcatatattgattcacttttatttcaccattttctgataattcaagtgaattaagtgacttaaaagacattcttggagttacaccagtggcagaaataattaaatcacaatcaagtttctcaccattggataaagttacttccaaagcatgtttagcgtctttcgatctctcaactagtgttatttcagtttcgtaatggacttttacagtagatggcatacttaaacccccagccccttgtataataagatttttgtaccaatcaggacctaacgcagcaccagatttatggaaatcttcttcttggtacctcattctcttactaacaggttcttgtttaacatcatcttgacttaaagagggaaggaaaaactcggctgcacctggttcaacaaaagtagcagaaatgtgacgatccttaattacccaatgcacctgcatgttttttattttgtaaaccagttcagaagcaataccaccattacccacaactatgacattagtggctttacttattttttcaaaaacgtatctacggaatctgtatctcttataccaaggatttcttcaaactgttgagcttgtggtataagcttgggcttagctccagtacacaaacataaatattgatacttaatcattttattttctgtagttatgatgtatttctcactgtcatggatttcagcaagagtatcatgaataactttaatatttggatgctttgacgaaaattcagaagacgccatctcttgaatattaaactcagttaatgttcttgtaatagcatgaagattaatcactgtcttaattaaggatgattcactaagaagtacaatagatttttctggttcgaagaaagctaaagtctctgcgcaactaacaccagctatccctcctcctacaataacaaatgtggcctccattatttacttttctgaataatactctgagtaatcgtattttctgaaaggcacatcaaatgtaaggagacctctgtcatacgctcttgtaatagcaactattaactgttgatgtttcttctgacacaatccagttttactataacttaaaatacttcctgtctggggtgaaacaaactgctttaacaggtccacattttgttcatgtaatatcagatattcatctctacagattggacatgggttacctgtggaaatttggccacctcttacgcacgttttccttgtctttctaggagggaaaagtcctttgtgatttcttctgtataaaacccacactggttgcccttcgtaggtttgttggtatgccgcacttttaagatatctgatgctagtttctactggaatttgctgggtacggtctttagtgatttctctggtctctataactcgttgatcttcctttgattgttgataaacgactgatgtaaataaatttcgaggtaaatttgatttcgttaaacttaaattctgtcgcaaaaagggaatagaaaacattttccagctctaacctattttccac

SEQ ID NO: 6798 - DNA, 2030 bp, Diabrotica virgifera
ttaaatgcaaaggaataagcaaaacactaagttacacccattatcacatttttttctttaatttcttgcccataaaactcaaaatatcccagcgaaaaaccgctagaccaattatttcagaatcttaaccttactattagacaactaaagtctcacgtggagataccgaacctttccaaataaacgccttacaacgcacgtaaaaattcttctattctctttcagtttttttatgtttgttaaattttacgatataactttgtatattggcagcatgtatccaacaattattttccaaaaaccatgtacaacgtattttgtttaatacattttgaagataaaagttttattttaatataatttcttgcaaaaaatataaagtgtgagtcattagaaaaaatttaaatgtagtatgattcacatattattttggataaatgcctaatcaggctatataaaaagtcaacctaaataaaaaattaatctgtgaaccccacataccaaatgtcatgacaaaattcgcacttcagcctcttcattatttgtagtcatgagatgaccctaaatgggctgtccagagatgcaacatctccggacttgcatctcgggacagatcatttagggtcctgactacaaaataatgaagaaactaaaagtaagaattttgtcatgaaatctggtatgtggggatagaatatttggaacaactttttcaaataacttttttcgatatctctaacgccaagcaaaatatcgaaaatttaccctgtttgtggagtcgcagtaggtttgcgtttaaaatttaaatttcagttgactatcttaaaaaaagtaagcattcaacctgtatgactgcaaaacttcaaatctttatttattttgatagccgaaatatagggctgtcttcatcttaaatccgacacactgtacattttacacgtgactttatttttggaaggttcgacagttccatgcctctgtaataatacgtatcgactttaatagtccaaagtgttggtaacaaaaaaattatttaacctaagataacaatcaatcaatctaaaatatagttaatataatagatctgtggaaaacagaatggttatcggtgataaaataaaaaaactaaacagtcgaagttttaacagtataaaaagtgaaaataaagataactttcaatagttgttgtgaaacagtcacttttgtgttatttagtcttagtttgaagacaccggccatttctgtattgatcgggcaaaaaattattttatgattatataaataattttatgctaacacacaaaattaaaaatagtttttaacagataactataaggcccctttggtccgcaactgggcaaggaggactaaaactaataataaaacataatagagtatcttaaaacaaaaaaaaagaaaaacatgaaatttaaaacaaagaaaaagctatttacgctcctttagtgctgaaaattttgtaaaaacaggttaatttaaacaattaggaatattttcataagactcgaggtacttttgttaagtagagaaatacttgaaatgaagtattcattattattcctatttgcagaagtcaatactaaaatgaaactatgtatacgacatttttattataacgtaaaataaattttaaatgacatagaataactaatattatttgacgcatgtgaaaatggttggaacgcttttataagtttggcttatcatttcgctatatccacattttcttcagaagtatatcgcgaaaataattcacgtactcaacatatccagaggtgacaactactaacgaaaactttcgtccatggagacgttgagttactagattactaatgctaactattatactgttcaaattaattgtgacaaacatgtttctctggtctgagttagtatgtgattaccagtgagtaccggtctcgaaccgcctcaaactggttatatctgcctagaggcaatgtgatagatcgatattgactataatttgctcatttgactacttttgcttattc

SEQ ID NO: 6799 - DNA, 2028 bp, Diabrotica virgifera
  SmartBlast Evalue=0; Info=calpain-B n=1 Tax=Apis mellifera RepID=UPI0001A48FD8
ctgtgcattagaatattcaaaaccttattgtttagcctgaatcctgcggagtttagagcgtctctcaattcaaagccactaaatgttccagacttgtcggtgtcgtacatcagccagacgttcttccattgccttatagctccccataattccttaaattcttggaagcccagttttccagatctgtctgcgtctaacatggcaaccatacttcggcaaatgtctttcgaaaatccttgtagttttaattctgatttcagtgaataatctaaaatatctttcagttccatccaatctacttccttatcttcaccagccaattttaagaagaactggtaaacttgactaaattcttgcttctcttcttctgtaggtggtgctgcaactttcgaatctacttcaccatatcctacttcttcgtcgtgctcctccataacgttttgtttttctgtgaaaattcgaagtatgaattctccctcttcgttggggtcgaatgtggaaggtacgatgcagtatgttccaggaggtagcttgaatcgacagctgacttcacgtaaattgacaaaggacggagagcgtgccactgatgcattgtatttgaagaaattaatatctaatggttttggaagcctgtctggatatttcaaatgatatatagcaaaaccgacggtaagtagttcggcgccactttgacgtagagctcttcgatttttctgcattagcgctacgattattgtacatttgttttcatcgtcgtcgtcgtcaacgtcagtcaaagtaactctgtattgtggattatgccagaaagaatcaaggaaatttctgcaaccgccggctgttacacccctgacccattcaccttcaaagacagacatttcccattttttcttatgcgtttcgtgtaattcgttttctgagagagaatcaggatttaaattacaaatttctaatctgctgaagtatttcataaaatctttgaacgaaatccagaattcaccatctttgtcaaatgtaagacctagctcttccttttcttcttgtgaaatataccgccattctggagcttcgtcactccaagcgccattccactcatcctcattgccccaaggatttcgaagcctcagaagaggtattttaccggaaacatttggggtatgaatttctacgtattttattctagttatactgtatgcatggcctctaataagtccttgtggtgtgtgagcctctagaacacgtgggtctggctcaatcgaacaagccataagggaactcctttcataggccttaaccatgatttggaaaagatttggaggactggattccatttcgtacatttcagaaacgccaccagtaaaatcttccatggcttcgcatgttgaacctcctttcaatgtttcataggaaccatttaattttgcgtaggccttttctaacagagcactccagaattcattatcttcagcagaatgtaaaaatactaattctcctctatatgtgggtaatcgatcatcaattactatgtctatccattttccatattgccaaaatctaaaatggaatatgccagcgtatttatcatcgaactcttgatcatctggcactatttggaagaacaagcggctgttaagggttaagtttgctgtagctgccaaaagccagcaatctccaagtattccttgttgtacgtcgaatcgggaaaatccttcgacaaaaaatttggggtcgttacaaatttcatttggtcgtttccactcataattcctatcaggtctttgactgaagaacaacgatgaatcattgcaagggaattctggatcctcaaatagtgttccatttgctaaacattcatcacgtagcgcataaaaatcttgagaatctccactttttgatcgtgtaccagatcctttttcaccgaaccatgcattctgtttggtaactttctcagccataacaaggggctcctcgacacagaagcaccagattctgcagcatctggtggtgcacactgccatgcgctgggactcc

SEQ ID NO: 6800 - DNA, 2029 bp, Diabrotica virgifera
  SmartBlast Evalue=0; Info=E3 ubiquitin-protein ligase UBR5 n=2 Tax=Formicidae RepID=E2BNB5_9HYME
gtgtgccttgagggacaatgccttcgataaggatgctgatcacaagaaaaaggacaacgcttgtcctctatggatctcggatgacgtggagttctggccggaacccgcgcccaaatttatccaaatcgcaactctctacagtgaattaatcgccctgtcgtcaaacgggcaactttatcaatggaaatggaacgaacacgagacgtacaaacatccagaaaatcccaatattcaccacccgaaaactgtgccattgggccttgctggagagaaagtcactcagttgtcagcctgctccatgcgatgttcggtcgctacggaatcgggaaaagtggccacgtggctcgacgagctgttagcacccgcttctagtaaattggagcatgctgcacaagcgtacaccgaattccagacggataaaatcattgccttgcacacttgtcctttgtacacagtcgccagattggagagtggtagtttatactggtggggtgtattgccgttcactcaaagaaaacgcctctgggaaaagtaccgcacaaaatgcagaaaacaacgaccttccaacaaccaatcggaaatagtcactgggtctcaggtctgcatgaaaaattgtccgatgtatcaacctggtgctatcggcttttgcgtcgctagtggcattccgaaagtcggtcagttacaaaatgccgcctgggccttaagcgactcgtgcactttcaaaatcatgaatgttgctaccactactacagagaagagaagcgatattccgacagctagttcattggcaaatttgggcagcaagacgacaacaaacaaagaaaatactgataggttggatatgccccctccaccatcaccggcctcgagcacttgtagtgacacaggcagtgtcaacagccacaagcgtcaaaagaggacagtagtggcaagttcggaattaggcaacgaccaaaagaaagacgaggaagagtggttgcttcgtgacgtggttttcgttgaagatgtcagaagtgtcccgacgggtagagtattaaaagtggacggtgcctatgctgcagtcagattcccctctgcgcacacgagagattctaaagacgtcgacgaaatccttcaagattgccgattaatgagaaaggacgacttacaagtgatcaaatcgtcgtcgaattccagagttcccgattgtttccagagaactccgagacgcatacagattccagaaaacggcggccagattttaacagtcgccgtagatggccagggcatacacgccatcgtaaggaatggccccaaactgagctacgtcatttataacatcagcagcggacgcgtggaacaagataaccaatttcctagcgaaactgctgctttcatgggactgtatccttcctacatcaatctcacgtgcgctggagaaagcgcagaatcaatcctcattttgcgcgacggcaacaacacgatctacccgctggcaaaagattgcgcggacgccatcagagacccgcagtttttggacttgccccccgtcaaatgtctaaccactggcactttggctctctccggcaccggtaacaatctgaagaaccaggtagccatcgtcgtctttgccttagaacaacagttgttaatgccgaaaatcttgaggtgcgatttggacggcgtgagacaagttttggcccaactggacagcgatctcaaatcgcataacgtcacaaccaaatcgtttttgagcgaaagatgcgatggcaacagaaacattttccatgctgtcgtcaacatgtgcactcctacttctaacaaagaccccgaaacagagcaacccacttttgtgcaagaagaacagattcctggtcctacttggcctccagagtcgttcgatgtgacttcgggagacgaggatagtataatgagtttgggcagtagcgccgctaacaaaggaagtaacaatcctaatccaccatcgaacaatatggtcatagatcccgttgagagaagatcgaatgccatgcagatcctgcacgccctt

SEQ ID NO: 6801 - DNA, 2031 bp, Diabrotica virgifera
  SmartBlast Evalue=8E-84; Info=Cathepsin L-like cysteine proteinase CAL1 (Fragment) n=1 Tax=Diabrotica virgifera virgifera RepID=Q9GU62_DIAVI
tattaaccaccaaagaaccctcatttgaaaaaaaatttgaaaggcgtgcatttatttttacaatatctagttattgcgaaattaattcttttgccatttcgaccttttttcgcaattatattaacactaaatgagtgtattaaactttgtaatacgccattttaaagctttttccattctttcgaagatgtctgtactaagaaaaccataagtcttactgttttacattaatttgaaataaaaaaaaaataggcaaaaaggccgttttttgacaccaaattgtttataaataaaaaatggccgccagatcctacgcagaaaatagttacaatttgttcttagtataagtattatttgttaaaaaaaacgcttcactaccctagctattgaagtgtcacgaatagggtatatttttgtcttattaccctggcctagtattttgtgtgtcgtttgtaataaaaaccgtgctcgaaatacctggagacgggattgactgtaaaattgtaattgtaccacgattatttaagggtgtacctatattatagggtaattgtacctaaattatacaggataccctttaatctatttctcctgtctataagtgaaaagtttcatgcgccactgtcgccgggactaaaacttgacagcacagtgttcatacgttttcttttaggtatgtactactaattaagttatagactcttatcgtgcctaaaatgattggcaaatttcacttatcccggttcttaatatattaaggtcactagatggcacctgatatttattataaaatctctaagaacgccagtcgaatataaatagttgtaactttctactttaaacaaagtatgaaaataatgtgtaaatattatatgctaatcataatatacttaatataataatacactatatgctaaaaacaattttttaaagtttttattttagacaaatcttaaaatatgtattgatatacaatgaaatattcattaaactgtaggaaaactagcgtcgcaggtgatacaacatgtggttggatgtctttgaattctaaagaaaccttcttcaccccaagaagttccccaggaatttttgacaatccaataatgttggtcattttcttgtccatagccaacagctaatacaccatgatttatagctcccacccaattagaacaactaggatcgcccagtactccgcccttataaagctgaagattttctgtagcttgcatcgcaatggatataggaccaaccgtcgcaatagcacgtctcaatgaatcatcatcttttgagaccgtttggaaaccttttattttaaaaacaatattgctcgcatttcgtctacaagactcatctactcctgcgtacggatatgctgcttcacttgatatacctttagatttaacatacttaaaaccgtattgcatatttcctccattgcaaccagcgttaccgtatagtgccgtacagtctacaagttcttgttcacttagaggaagtgttacgttatttgctaagaaattaagtccttctaatgctccagtaacactaaacgaccaacaagatccacaactgccttggtccttaacttccaaaactgcacctgatcctctccaatcaaaggaatcaggtattggatcatcggacaattgtgcaagtataccttgaatatttggctttgtacttatttgtttattaagcatagacataaattcaacagctgttaaatctgcaaatttggttacacccatataataagaaacttcgcctttctggtatctggcattatgttcttcaattttctttagatttaaacgaaaaacagacaagcgatagttttcttctagaacatgtgcatatgatttattatggttacgcttaaagctttcccattgttgtttcgttgacaaagcattgactaccacgatggtcccaatgagggtcaataaaattttcattctgagtcttattttctgttcaaacgaaatataagtttttaaactatgattttatcttaatgaagtatttact

SEQ ID NO: 6802 - DNA, 2031 bp, Diabrotica virgifera
  SmartBlast Evalue=1E-153; Info=Putative glucose-methanol- choline (GMC) oxidoreductase n=1 Tax=Chrysomela tremulae RepID= B4F336_9CUCU
aaatatttaagataagattaattgttctaatctaaaagactagtgttgattaccaaatgaatagtgaatagacaactagtgagtttagatagtaaacgcagatatcttatatatgtataatggatattggggctcttttgcaggatacatgccctggaaacctacagggcatgtcaggatatttttttctgactttattgaacagtttaatgaactccaagtgcaagttaggtaacactaacgactatacagaagactatgctcccagattgaaagatggagatgagtttgactttatagtggtaggttctggttcagctggagcggtggtagcgaataagctaagtgaaaatccgaactggaaagtgttggtactggaagctggaggatatccatcagcaactagtgacataccagcacttctatttggtgcttcaggaggagaagaagactggcagtaccgaacggaaccctctccactaaattgtctaggattcaaggacgaacagtgtatatggccaaggggcaaaggtcttggaggtagcagcattttaaatgccatgatgtatatcaaaggaaataaaagagattacgatacatgggaggaactgggaaatactggatgggcttggaacactgttaaagaatattttaagaagttggaaaatatgcaaactaaaggagttagtgatcagtatggaagggatggttatatgacgcttaatagatatccttcagatcaaccaattgccagtgcattagaagaagccttcaaagaaatgaagttacctctactcaacgaggaaaatcccgtgaatcctctaggagcactgacagcttttcaatgtattaaagatggaattagatttaatacaggaagagcatttttgggtcaagttaaaagcagatcaaaccttatgactgctttgcactcttttgctaagaaagtaataatagaccgaaagagcaaatcagccaccggagtgcaagtcgaaattggaggaaaaattataaacttaaaagctaagaaagaggtgatagtttccggtggaactatcaactcaccacagctgttgatgctatctggtgtaggccccaaacgctgtcttgaaaaagtgaaagtcgatctcattaaaaatctgcccgttggtgaacacttagaagatcatgtattgcatgtcggatttttcgtgaagtttaatcccgaaatacaatcaaaagaaaatcagttagatacgatatacaagtactttgcccaccaacaaggagatttaggaactatcatgatcaccaacatcatggattttataaacaccaaaaatgattcgcagtatccaaacattcaacatcattatttactctttcccatgaacgacagttttgtagcatcaggttttccatcatcatgtggactaaaagatgagatcttggcaaatataaatgacgcggttgaacaaaaatcagtcctggcaattacctctactgtacttaatccaaaatctcacggaaaaattctgttaaaaaccaacaatgccaaagataaaccgttaatttatcctgaatacttatcagatcaaaatgatgaggatatggcatccatgctggaatctttaagattcttggaaaatcttatagaaacttcccccctgaaaaagtatgatccagaaataatccagttcaatcttccagaatgcaaaaaatttgagttccgttcagatgactactggaagtgctccctaagacatctcacgacaacactctaccatcccacaggaacctgcaagatgggaccttcagacgatggaacttctgtggttgatccagagttgagggtgttcggaatcggtaacttaagagtggccgacgctagtattatgccgaatatagtcagtgctaatacgcatgcgcccaccatgatgattggttataaagcgggactaatgattagcaaattctggagcgataaacatactgaactatagtatattattaatttgtgtttaagttaaaataaagaatgtatttttgttc

SEQ ID NO: 6803 - DNA, 2027 bp, Diabrotica virgifera
  SmartBlast Evalue=9E-48; Info=RING and PHD-finger domain- containing protein KIAA1542 n=1 Tax=Harpegnathos saltator RepID= E2BW47_9HYME
gataaatgaaacttgtcaactctctttgtaaagttgttaagattgtagaaacatataaatatactctaaaattaaacatccctaagataaatgaagttctaaaagtgtaaattaccaattgaaattattaatataggtgtgctaatgactgttgtatatacgtagaaatgagcagcagtgaagacagtgatgccggaccaaaacgtaagaggaaagtgcgacaattggaagacagtccaagtgcaagtacatccagcggtagtccaattttagccaattcttcccattcccagagagtcaagaggaagtccaaaagatacaggatagattctagtgaggacagtgatggcagtcccatacttactaactctaggaaaaggatgaggagagtcagcagtggtagtgaatcagacagttcttctgatggttcagatatagcacagactcgtcatggaaggtccaggcaattaatgtcagattcggaaagtagtcagtgggaaacagatttttctgaccaagaagacagtaaggcgcctaaaaatgatacacaggcgaaaactaaactggactctgactcagagcttagcgatgggcaatctgaaaaatgtcctatctgcctggtgtcatttaaattacaggaaattggtactcctgaatcttgtgaccacacattttgtctggaatgtattcaagaatggtctaaaaatatgaatacttgtcctgttgataggcaggaatataggttgattttggtacgagaccatctaaatggcaaagttaccagacagatcccagtagagcatactgtactttcaaatggaatcgaattagtagatgatctaacttactgtgaaatatgcggttctggagataatgaagacagaatgctactttgtgatggatgtgatcttggtttccatttgtactgtttgacacctcctctcacagatgttcccgctggctactggtattgcaatggatgcacatacgaagaagatttgttggagctttcagatgaacttatagaactggaacatctggatttttttagaagaagaacaagagcttcatcggcgccgagaacacctagaataatgccacgtaccagacaaacagaacgaatcagacggcgagtcgaaaccaaccgatatcagtcgtcagcaagtcaaccacttagagaaaattccagcaacagtaaccaagtaacaaccagagaaaattccaaccgcagcaacagagtaacaagcactactacctcaagaacccgccgaagaagacgaagaaaagttaaagtcagaacagtttatgtaatagacgaagtaactggtgaaaccgtggcagtacaaaaacgtatgaaaaggaaaagcagaaagaaatccagaaaatccgtaccgaaacccaaaacagttaagacacggttagcacagcagcttggcatgtgcggtcctagaagtgtacctcagaatttaccagatgttaaaattccaaacagagcaagcacagcttcttcgaatattagtggtatcagatatagcgccggaataccgacattggatctattcggacataatgacgatttagactattttactgacgaagaaaactacagcgtaggttcgcagtttttaacccgcagagctccaactcggtccgacgcggctacaatgcgtcgtacgattaggcaaaagaacgtactagtacctgaagttgtcagcagtacttcagacttgctagacagcattttaacatcccaagaacaactctacgcgagaaatgcttcgtattctatagattcgacaggaaagttcaagatcgaggctaagtcgaaatctaacaattacattgatgttacaaaagaacaagttaaaggaaaagaaacgccttactataaccctaacaggaatcgttataaccaaaatcagaattacagaccttataatcgctaccaacgaccagggaacaattactacaatagtaataatcaaaataattattacaatgctgaagcatcttcatctatgaattat

SEQ ID NO: 6804 - DNA, 2025 bp, Diabrotica virgifera
  SmartBlast Evalue=1E-107; Info="Dolichol-phosphate mannosyltransferase, putative n=1 Tax=Pediculus humanus corporis RepID=E0VUV7_PEDHC"
aaactcaatcttatttattatgtcacaaaaaccaactttatttctttttatacaatttcttaactttttgcaagacgttacatcacttcaagtatgtaattattaaactatcattcatcatctattaccaacttgtaatattattgtagaaaaatattttaatgttttaaaacaacttgagttaaagtatatgaatatagtaattgcaccacaaaccatacatactctagaccagtttttcccaacctttttgtgtcatgtaccaccttaaacattccaaaaattcttacgcccccgtctatgtacatattatataattttgaatattaaaaaattaaattattcacttagaaacttaaatgacaggttttaaaaagaaatcattaggaaattgttaaagaaacactaaataaaattatattttcaaaacatacctacataacataatgaaatactcaaattcaggttcgaaataattttcatatattatatttttctatattaatttattattttaatttagcgagatccttgctcttgattattgcggcatcttccttcttctttgtgtgccctgcttgttttcaagcgttggctatcgtcgtattagcaagttgatgaaatatttctcggtcgacagctatatgaaacaattcctcgaccgttcgatctgtccgttgcgttgtctaatattacgcagccaggacaattgttttattccaacccagcgttttctttcgattttgccctgtgcttcctaaaaaacagtgttttcacatgacacttggcagtagtgtttagcattttggaaacaaattggaatatttgaagttttcagtaaaactatgatttttgtttatattggtattttagccacgattacaacactacctactagcataactttagagagaatttaagattttgtaaaacattgaattgtctttctgttgttttaatttcctgcgaaatatcatcaaaaatcccgcaaaaatttatagtttgaaattcccaggtaaaactataatttgtcaatttagttgtcttcccaatcaacagatggcgttaattcgatccgaaagattaacatggtcgtggaacgtctagagtatgtatggtttgtgaattgcactaataataatttctatgtagtagcaaaaagatacaacaatgctctaacaaactgaacaatttctgaccctcctaacttcgattccccatagactctatctacgaaagtaattggcacttcacccactgagtagtttaactccctggctctaactatcatttccatctgaaagacataacctttagacacacaactgttgataagtttttcaagaacatcttttttgtagagacggaatgatcctgttagatcagacgcaccgggtcttaataaaagctgagttaggaagtttgctccacgagacactagttttcttttaaaatcccatccggatactcctccatctcctatgtagcgagtaccagaaactacgtcataatcttgtgactgttgtttttcgataaactgggatataaattttggatggtgacttaagtcagcatccattataatgataaagttgcctgtagcatgattgataccatgaatataagctgttcccaagcctagctttttttctctaggtcttaaaaaaattttatcttcaccatatattttttggagctgctttgctgcttcaagtgtgccatctggacttccgtcatctattactattatctcgtaatcacagttgcttcgattcatgtattttactataagataaagaataattggaagattttccacctcattgtaagttggtaagagtattgagtatttgtttttggaattaactgcttgtttttccttagacatattgtattgagcaatgattaattttacaaagcttgtataaattacaatcaagataattgccttcaacttatttatcatacgcaaattttttcaaaagttgcaatacataattattgataaatatggataaattccac

SEQ ID NO: 6805 - DNA, 2014 bp, Diabrotica virgifera
  SmartBlast Evalue=1E-174; Info=Innexin 2 n=4 Tax=Obtectomera RepID=A2TEZ0_BOMMA
ttgtaagaaaaaattcaacatcccataggaaacgaagcatttgtggacatatgtttataaagcaaacggtcaccatccctcatgaagagtcacccttcaaagtttgtcgcacctatcctagaaacaccctgcattgatgaatagcatggctagttggtaaagtatttacctaactcctttattatcccacataagcgaatgaatcaaaaagcaaaatgttatgcaaggccaaggctacagttgagttttaatattttatattcgctagaatatttcccagggtattccaaactttgaggaaaaaacacactatcattgtacacccggcatacaatgaaaccacctgtttagcaccaatattattacatacatcgatattcctgaagagcaaagctacaatataccaaaaaatcactaaaatcagacaacaggtccagaaaaaatacgagacataaaaaatgtcccattttctaaggtggtgcgtaattttatgcttagtgtatgtttcagttatagacagagtcttttgaaatggagcattgtttttgtacacgagaatctcatctgaatgaggataaaaatatgataaagaattttgttcgattttatatgtaaatattatgagacttagaaattctagatagtcttttaaaataggaaagttatatacagtaaaattaaacattccaatcagaaaaatgtatgtattgtacctcaacgaacctaccgaataccagcagtacggcgttacaccgatacagactccttaccttcgagttttttcgatagatcattgatgacttctttgaagataagaggatctatgtttttgctcaattggtaaagaacgaaccaatctccaatctcgcacttgttacctatcgtttccacctggtcgtaggcggcgatacggcatttggttctaagcagatacagcctgatcttgggtgcgaatatgacagcaacgcgatacagcaaagatattccagagaggacgctgagaaggatgaaccagaaccagaggaagacgtagattttttcgttgacgatgttgagtggaaggacacacaacccatcgaatcgctgcacggtacccgaaggaccgtatttgttgaaggtgcacttggttactttaggaaataccctggccattgggtcgactctctgctcgggctccatttcggtgaaagagagtacatcgctaccgtatgtactgaattcaccgtcgaggaaaaagtccatgaagaatatttgcccgaccacgttggcgaagttgaggacttcgcatatgaagaatctgtacgcatagaaattttgcaaatgtaaatttgttgtgaaatagtccactaataattgctttctgtctttcttacagtcttctgagacgatgggacagttgagatcgagcactagcattttaacacggccaccctcccaggttttccataaatatctgggcacgtagaagagcatggcttggaagaacaacgcaaagcagacccactggtaatacttatgatacttaacttcgtctttgccatcgacgtggctagctactcctggctggacgatgtctttgcctatgtgtccagttaatctgtcgggaacggtaaacgtggagtaaatccaacaatatgtgtccataacatttaaaggaatttcgtcaactatgcagtctatagggtctcctatgtattgtcggcttgttactaataaagaaaaggacactaggatgatcacggttgctttgtaatgcaagcggaatatgttgttgtctatgcatacttggtcgatcttcaggagacctttcactgaaccgaaaacatcaaacattttgacgaactacactggcacacacgcactcgcggacaaatcaatcaggccgtcgtacgacctaacatgtattactgtttttttattattgttgtaatatttgttgtgtgtacgcaaccgatcacacaaacttctacggtccccaatgtgttcactccaaactgaaactacattcaccgcc

SEQ ID NO: 6806 - DNA, 2020 bp, Diabrotica virgifera
  SmartBlast Evalue=0; Info=DNA-directed RNA polymerase III subunit RPC1 n=8 Tax=Euteleostomi RepID=RPC1_CHICK
gctggcaacaccggcaaagtggaaagttttcaacgtcatctgcgtacctggctctcctatactttgagctgccagcgcacctactgcagtacctggttctatgatagatctcgtgtacttctgcccacacgtttctaaaaatgtgaccaactgactgcacgttaagcgttcgatttctttcgctatgggactactgccgaacttgttctgtacgttttctactcttcttgcaatgatatccataaaattaactaattctgccctaaaatcttcactgcactcttcaagtgcattcgtagagatgaaagctttagtcgcccttcgaatttgatccccatctagagccacttcttgtctataaggacacttcgccttgatatgatccaaaactctctcaaagtccacgggacaatcttttccttccatatacgtcggatccagcccgtcgcaaccgtaattcaactgtattatatccccttcagcgttcctcactgaaccatcataatgaaccaccaaatcctccaacgccttcaccaatcttctctgcatgtatccagtttcggcggttttgacagcggtatctaccaatccctctcttccgcccatggtgtggaagaagaactcggtgggggtaagcccggtgtagaaactattctcgacgaaacctttggcttctggtgttctagagtagtgttcgaaatgtggaagagaccgatcatcgaacccattgggtactctttttccgttcagggcttgctgacccacgcaagcgatcatctgagaaatgttgatgaaggaacctttggatccagacagagccataatgagaggactattcgtcgaatgcagttcggccacacaagcctggcctgcatgttctctgatgacggacaattcttttagaattactgcttctagggattcttcgacggtgcaacctggttgagtagggagttttccttcgttcatttgtttaatgaagtcctgacatttggcatacccttcacttaaaagtttgttctttcgtctgattaagttttctcctggagtaacatcccctattcctatggagaatcccgtattcatcaagtaatttgaagccaaccgggctaacctccacatcgatctaatggcaaactcctttccgaaatccctcaaaataacatagaatatatttccaccttttcctccattaccaagatgccctttgtccaaggtaccagcaatcagctctgagttccttatcagtacatacgaatccttaacacacatctccctatttttcgtgtaagctttacctttggattccaagttggccttcaccgggtatttcttattgggtcggaatattaaactacatatttgtttgccggaccatagtgcaacaggctttattatgcaaggtggaggtaaatcgatgttcatatggctatcatttccagctaacaatgtcgctgccagttgtgtagcatgcgcgaagtccagaaacgtatccttcttcgttagtaaataacctccagtcaagaaatcctgggtagcagcgatcaaaagttctccgttcctgggcgtcaccaagttgcttttgttccccattagtataagcgcctccgctttggcctcctcggtctgaggcaaatgtaaattcatctcatctccgtcaaaatctgcgttatagggattacaaacacattcattgaacctaaaagtcctatggttatgaattttcgccctatgtgccatgatagacagcttatgcaaacttggctgacgattgaaaagaacgacatcattgtcgtgcagatgtctttcaaccatatcacccaacttcaactcttgcgcaagtttttctctattaccgtacttcaagaatctcttgaattgcgaccccttctgttgaacatagttggcaccaggccacttatcagggccgttaataactaacgtcctcatgacatctatattggcgtggatcaccttctctggaaaggttaggattttagctatgtgtttcgggacaccc

SEQ ID NO: 6807 - DNA, 2014 bp, Diabrotica virgifera
tgcgacagaaggttcaaatttgtttgaatagacaccaaatcacactgtaaaatcgcataaaataaaatttttacgtcccgcagaagctatataccaatttaccatggaatgtaccatataatattatgtctctctgggccgacttatccgtggtccatacagtatagcagtcactgcgaagtgtgattcgcgcggccctgtaagtaaaataagcgtgaatcatatatgattcgcgcggcgttcaacgtgttaatataagtatagtgttctgttgtgcaaccataatactaaatttaaacatgccacaagaaaacagttttagaaccttgctaatttgtagtacttttttatggcttttctaatttttagttatctgaatcacttcctcagtgttgcttcttgctactattgctatatgatcagcgaacaacagacattgttgctttttatgatatataattcctttcctatctatattggcctcctgcagcatgttttccaggaaaagagatataaccgttaaatgctttaatggctataaataatatcttgaacagtttctaatattaatagctttcgtctagttcagcaagaaaatctgttctcttgtgctttttccttgtctaaaacccgcttgatattgaccaattatatctttactttttcttttttttagtatgcatttccaatattttgtattcgacaattagcaatgttatgcctctctaatttttgcattcgctcatctccttttttgtaaatgggatatattcttgcttttagcgattcttttggtaattatgctttattccatactttttcttacatgatcatgtaatgttaatctacagcaccttcgccaaaaaatgttctctactgcatttattcgattctgcattttcttacttatcgtccaggcttctgagccgtgtgtaactgtactttcaatcagtgttgtataaagtttttttttttgtatttctactcatagtaatgagtttatctgactgtgatggctcttcctctacctaatttttgttgtatatttgttttgttgtttccatcttccttcaatttaagttccaggtatttatattcttcagtgttccttattatttttccttctaagtctatgtatttgcctctgtagcctattgccatgtattctgttctatttatttccagacctcactctttatactcctgcaccagttttcgaaccatataagcagcatcctccgctagaaccacctgatcgtcagcaaataacaaagtagtcagattaccctcctttaaccttactcccattttagttttacattttcttaaataattctttcaaagcatccctgtccgagacccttataaacctgaaagtattcttaatgtccaactcttcgtttttatacaactgctgtttccttggtaaaatctcttcaccgctttgttgtacattgttctctgtcagggatagcgtaacatatgtactaattaaaaatatagatgaacagaaccgcatcaatgtatgtcgtatttctgtggtgctaagaccaaacccgatatgtcaaaaaacgtgattttgcagaagatgagtttaaaaggtcgcggtgttgctgcaatagtggacatatccaaaactaattttatcatctactggtaacatgaatgcgtttagccatgtagggttttgtcatcatattcttcatagctaaatgtacatattggctttaaaacccaaaaatcgaaaatttttgacatatctggttttgccttagtaccacagatttaaaatttgcgtttttgtttgaatttaagtcattatgtaagtaatactgaaaaatgcttcaaatttaacatttctttagatacacacttagattaggctgtttatgtagactgtagtagacctctccaagaaccaaaaccctgtatagtaaatttaaaaggttaatttcaattaaatgcattaaattctagagaagtttaaagatttggggttgttttgacacaatta

SEQ ID NO: 6808 - DNA, 2019 bp, Diabrotica virgifera
gttcttatatactttttgataaaatcggtcgggtcatcttgtcccatagagtatcgagggacagcaccagtgttggaggtagaactttttgttggttggttaattcatacaatgataacaattagaacacaacgtctttagaattaccacgacatggaccacaccagttgtagtgtagccaatttcgaagagccctggtcagcttctgattttcttattttccaaattacgctcatttaccgacaaacgattggacagtccaagccaccacgcacttgccataaatgaccataaatggtttcctctttgtccaagcatcgtaaatcacaaattctgagcaaaattacgctatttcaccttgcgctgattgccgtcttcagattttatctttttctgttacatatcttccatttcgcaaggcgtgccacgttacgttccgttggatgccgcttttacacaaaatatcaaattacaagaacaagattttttacgtaaaacgatcatatatcaacagattattggctaatttggtatacattacctacatatttcattagattatattttagcatcattaaccatttgaaaccgatatctttggtttctgatttagatttcaggataaaattacttaaaaacacatttcatttgtatgtgtataccaaatttttgttttctacctttgtaataacattgttattatttaaaaagtaataatagtgtataattattttgaattacttttgtgcaaggaaaaaatcaagaaaatctacctcaatatatcagtggtgtcttttttactagattttcgatttgctgatgaaaattccatagaaaacacacacacatgtacctactttatatacctaatttttcctttttggcagttttccctattcttacagctgtgattggtccaaaatatgtatgcgttatatactttattggattctatattcagctttattatctatttattataaaaacacatactgatcgacttttgccatactctgtatatacatttctaatatagatcatccttaacacatttgctgccacctggcaccaaaaggtgttttgcgtgcgtgagtcaggcgccaccgacgccttttggcgtgcataacctgtggaattaaatagggttcttttcatgtggctgaatatatagtggcagagaatgtgttaaaagtcattccaaatcattagatagctttcaataaagcgttatgatctaggcagattcctaatctcacagaataatttaaatctttagatgttatgaatattactggctgatatctgtcacacccgtagataaactttatgcattcctgaataaaattatcgactgaatttttataaaagtaaaatttgtcatatgaagctcacaatttttaaattgtttaaaagtacgatgtatttgtaattattgtaacttactagtgtattgtttttatactcgtttttatgtatttttagatatatcgatacattggaagaagaatgccatcttacaaaaataaaattcagaaaactgagaatttaaaggctcttttaatttgaactcaaaataccttcagaaatatttcatatttccttcaaatttcagttaaacgagctatattataatatgaaggataaattgcaaaatttatcttcgaaataatttatacacattgtttcaaatgaaacataaattggaatatttgtaatatgcccagtttacctgatcttttcgaccagaaagtacccagtcaatccgtctaaaattgaccatggtcccgaatttaagctgaagtcagacataaaactaataccacagagtaagatactgaaatgataccatattcatttatggttaatatgattgacaatttataatttgcgtatagtcaaaatttggaaaatgacgatccaatgtagagatataccatttgtgcgtttactgatttggtgattgttttcttagaactatgtatgtatttgtttcgtttaaatttttttaaagtgttcaaa

SEQ ID NO: 6809 - DNA, 2019 bp, Diabrotica virgifera
  SmartBlast Evalue=3E-52; Info=Ctl transporter n=1 Tax=Aedes aegypti RepID=Q17E88_AEDAE
ccttatatcaatttcccaacatttattaaaaaaaaacataattcacacaaacacgtaaaatttacgacacacgccctctcatgacaaattaagagacgcgcccgctaaaaggataaaaaaaggtttggtgaggtagaaatgtcaaaaaattagtcggtttatgcttcgcttatgggggcacaccccatatccataccctgcattatgggggcaaaccgctcgtcttgcttccagaccctcatggagtggtcaacaaattccattaggtcacgagacatagcgtatggacgttccatcccgttattcaagaggctgtcttcacagaagcagaggaagatcgtatctactgccgcctcaaatattgaaaagcaagtaaaggcaacgaagaacgatacgaagaccacaattgagtaaacaacaacaaggaaaaaccatggggcatcagcactaaaaccagtaagtatcaaggtgatcaagacagataattgtactatcgttccttgtgctattcccaatatgaaatcgccaacaaagttaatagaaagaatgctgctagcattctgggacacaactttagctgcttttttaccagatttgtagaaaggtgtaccatgcatagcgattaatacgtaagcatttttggacacgatccttagacaaaatccaaaggctcctatgaacatattgatggggagagcaatgagtgttatcaaagattcgaacacaacactaccaagatgatatttgaagaccaatctagcactggagcaaattggactctccaagctcctcttgtttttcgaccagtaccatttcgtaacagctccagagataaccatgtactgtactccaaagatagacattataatccagacagcaatgaaaatgttaaaaatcattgcgcattgcatcgcggtattttgtttgtagtacaaaaagtctggtttcagttcggttaaaacacctgatgagtacatgaagtatgtagtgaaagctaaaagtcccagagtaaggaacgccatgaggaatgtaattattggaataaaaaacaattgtggcatatcagaagcggcctttgtagcttcctttattaacttaatgactaattgtatcttttggttacggaatacagtcagaaaccactgtatcgatatgtaactagtataaactagagcggcaaatagaaacacctctttcaggtacttcacgttaccaatcctttcttccattacatggtgaaaattgaaataaacgtaccatgtccgcagtacaaaaatggttccagaaaatagagctcctactagaccgacccaaacaactacatctgtagcggatttaaacaggaacaacattatcaatccaacacctagtgatagaaaacatgcgaatacaattgtcccagcatgtttgtttaagtaatcagataggccatccccaaaatcatcacttgatgtaatcttagtacagtacgcaccgttacctggataatctccatcttcgcatctttcaacacattttctttctccttctaaattatgaacactggtgtagtacagtaaatacggtttgtttgtattatcttctccactacaagcccaattatcatacttcttatttttctgtccacatacgttaccacattggtcatagcctttataatggtcaagatcagagtacaccaatgtatatataaggaacggaagcagaataatcactgcaacggcaaatgcaatcaggaatttttgatctgtgggttttcggttttcaggcctttctggaatttcggtgttgcacgagaaattgttcgttgacggatttttcatccctataaactcgtctggttgaccccatttacttaaactcccttccatcgtgccaggaattagaggttctggatcactgtttagttcaatatattggaaagtcattatactgttaaattactgacttaaaactcgaaactcggaacaaataatgataaactattcaaaaacaagaaaaatattattggcatcggct

SEQ ID NO: 6810 - DNA, 2015 bp, Diabrotica virgifera
  SmartBlast Evalue=2E-80; Info=Adenylate cyclase type 2 n=1 Tax= Camponotus floridanus RepID=E1ZWP3_9HYME
atcacttgctctttggttttgaatttttactttttctgaacattctctcctcactgtggcgatatttctgatcatctataaaaattttaacactactagttttcggcgaatcttcttctatcacagaagggactctttgaagctgctgtaacagagttaaattgcttggataggaccgttgcttcttaaatatggacggtctgcctggagttgtggttggactgcttggacaactttctgatgtcggtgatggaagtgggtccttttctatgttaggtctaatcaaaaatgttttaagtccgcaatttttgaactgtggtacagtttcccccttgtcagttggctcaattaaatatttttttgttagtaagtcctttgttatgttggtaatgtggaccatccctgctcgtccttcactttccattttattggcgatatcaacgtccttggaccatatatcaaactgatatttgacagttcctatgattccgctaagtattttcccgctatgaatcccaatccgcatgttgacattgagattgcgctttttccgtactgatgcaattatagcgatcatatctaatcctaaatcgacacatgcctctgctgaatttgtagcagcgtctggaggaaggccagcgacgcaataatagcagtcacctaagaattttatcctcgtcacctgccgcttatctgaacaatcatcgaatagtccaaatagttcgttcaaagtatctaacagctcagttattttcaatgtgccagtcatttctgtgtaatttactatatcggcaaatagaatcgatacgttttcatgttcgtcaagcaaggagttgtcaaaaggattttgcaagacgtgtcccgtttttataaaatgcttcgtagtctctatatacctctccttcactttgtttatcacatattcaggtataatactctgcataagatggtccacctgctttttttcatgttttaataaaaatgttgacataatgctatcccttctatctaggaaactcctccttatcacaatttcattcatgtatctgtagtaaacacctaagcaattcataaaaaatgcaaatatggcgtcagaagttatctttttccaaatcatgtggtctaaattcgagtaagtcacaaaatataatgttgcaatatgaaaagcagacaccgacacccccatcataactgccatcgtcaaattatttatggcaaagaagagatagcaggcgatgatgaggtacggcgaataagccggccggaagtgttcatgtcccctataatagtacggtatgaatccattgacgaaaaatataaggcagaaagctgctccggtggcgtactgtagtctgttgtatttctctgccactctgtctattatatacaaacatattagagatagtaatatcgtacttatatagagaataatatctgggagaacgggtagagggtcgtccacattcttactcaatacaaacgagaaatgcgtaatagttaaaagcgtttgcaatattaaatataatgagaaatatccatgattcactttctttgtgtacagtttaaaaagatcttgtaactgataagattcaaattgactccttaaataggaaagcctccattttctttcgtcgttaactacaatactttttctctgtgctctatcgagaggatcgtcatcacttaccgtagatatttctttaaggctaatcctagatagaattacgtgatctacgttttcaacgtcatcagcatacataatggtttagacctgaaaatattgagatgtctcttgttaaatatattaaaaaatcacctattaatattgtccaaataacgcacaaaaattacgtaaattcatcatcatcactttaaattttgtccaaatttactgcaattatgcacttgtccaaattgtccaaattcattgttcaaattcactgtggtctatttaatttactatttcgaaaaatccagatttttacgtacaaacatcgtatttgtaccgaacattt

SEQ ID NO: 6811 - DNA, 2011 bp, Diabrotica virgifera
  SmartBlast Evalue=0; Info=Ras opposite n=2 Tax=Tribolium castaneum RepID=D6X469_TRICA
gcggaggtcaattttttatatcggaagacaattttatccaaatttttgaaaaatctccaattctgtcactgaattaggacttaagtggaacaccatggcgttaaagaaccaagttggtcaaaaaatcatgaatgaagtcatcaagcacaagcccaccaagaagaatgggccaactccaggacagcaagcccatggggtagaatggaggatccttgtggtggaccagcttgccatgaggatggtttcagcatgctgtaaaatgcatgatatatcagcagaaggcattacattggttgaagatattatgaagaaaagggaaccgcttggtaccatggaagctgtgtacttgataacaccttcagaaaagtcagttcatgctcttatgaatgactttgaaccaccaagacagatgtacagaggggcacacgtgttttttacagaagcgtgtccagaccaattatttagtaccttgtgccaccaccccgtagcaaagtttattaaaaccctaaaagaaatcaacatagcattcattccgactgagtcacaggtgttctcattggattcaccagacacgttccagtgtagctacgatccatcattttccgctgctagaaacgccaacatggaaagaatggcagaacaaattgcgacactctgtgcgactctaggggaatacccacacgtcagatatagaactgattgggaaagaaatgttgagctggctcaactaattcagcagaaattggacgcctataaagccgacgaacctaccatgggagaggggccggaaaaggcgagatcacaattaattatcctcgaccgaggtttcgactgtgtatctccccttcttcacgaacttactttccaagcaatggcctatgacttactacccatagaaaatgatgtatataagtacgaagcatcggctggtgttatgaaagaagtccttctagacgaaaacgacgagctttgggtcgatctacgccaccaacacatcgcggtggtgtctcagagcgtcaccaagaatctgaagaaattcaccgactccaaacgcatgacccagagcgacaagcagtcgatgaaggatctctcaaccatgatcaaaaagatgccgcaatatcagaaagaattgtccaagtatgctacgcatcttcatctcgctgaagactgcatgaaggcctatcaggggtatatagacaagttgtgtaaagttgagcaggatttggcaatgggaactgatgccgaaggcgagaaaatcaaggatcacatgcgcaacatcgtccccatcttgctagatcccaaaatcaccaatgaatacgataagatgcgtattatagcattgtacgccatgacgaaaaacggcatcacagatgaaaatctctccaaattggctacccatgcccaaatcaaggacaaacagaccatcgccaaccttcagttacttggagtcaacgttattaatgatggaggaccaagaaaaaaacaatatacagtaccgcgcaaagaaagaattacagaacaaacgtaccaaatgtcaagatggacacctatcattaaggatataatggaggattgcatagacgacaaactggatcagaaacactacccgtatttgagcggacgagcacagtctacgggataccatgcagcgccctctagtgcccgttatggccagtggcacaaagacagaggtcaacaagccgtgaagaacgttcctcgactgctcgtcttcgtcgtgggtggaatcagtttttcagagatcaggtgcgcctacgaagtgaccaacgcgcagaagaactgggaagtcatcatcggctcgtcgcacatactcactcccgaggacttcctaagcaatctggcaacgttggccggctagaatcagatgaaaaaggttacttttaatgtacccgagtaaacagtttcgctgtcgtagtttaaaataatgtaatgagtctttttaatcccaatttaaacatatttatatagaatgactttcgatcagtatcgaacc

SEQ ID NO: 6812 - DNA, 1995 bp, Diabrotica virgifera
gataatgtaagccgtgaaatgtttgtatcatttaatctactattttacaaatgtgacagatcgtttctcgtgaatattaaaaaagtgaaacgatgggtttatttagagggttcaaggcgaaatttacaagaaattctaaacctaaaaacaaaagtggggaagtagttgtgcctttaaatttccgaataaagactgagtttgattctccgaaacctccagatcctgtaccaaatctaagaccagctcttcggactaccaattctaggtacaacaggcctattcctagatcacaatatttcgaggagacctccagagcaatccaattaaagttacagagtacgtctttaacaaatctaccagcagcaacagctgaagaaaaaaaaatcaaataataaaaaatcctccattgagcacgaatacgaagagccaatatcgccacctcccgttccacattcgccacctccggttctaaattcgccgcctccaaatgcaaatccaaggataaataacgtaaatccgcttgcaaattcaagaataaataatgtaaaagaaaaacgtctaacgccacctactgagaatgaatactataaatcgaactctatgtataccccaactaaatcatttaatataccatacgcagacgatgattacgaagaagtaacaccgacagaagagccctccactttgatacttatgactcagcattctgattcgtcattagcttcttacgtgaagactcccaatacgccagaaaattatttcaaaaatcagtcgaaagtattcgactttccttcagaaactgaagaagattttaaggtaaacgttgttaaccacgatttatctaactacgtgtcagaagacgaacttactcaagatgaagaagaatatcaaacacgagaagaatccgcgtctcaatacccgcgagcatcatacagcagtcaagcgacgaatttattttttggcgaatcggaacctgttatacaaaggccaagaaaattacgtttgagagatgtgacagaaaccgatgaagatgactgttaacaatagctataaggagattttcgtactaaattcatttttcttcatccatcatctgttcattatgtggtcacagtgtggtaaataaaggcagaggttggtatttaaactgcctttttgatatttagtttaataaattcatatcaacatcttcggtttaacattatatttgtaactataaaacggtggcgaaccacaactacagtcggaaaagtgaaggaatacccatgagcgatcgcatcagtcacttattttgtgtttgctgtctttttctataaataacgtttgtttgttatagaaaaggatagcaatgcagaatgggtgattgatgtgatcgttcatgggtcttctttaatttttccgactgtataaacaataacagcactggtctatctaacaatatttcgacatacacacgtctgctagcaaatacgagcgtgaatgtcttacacctgcttctggtcaatgttttatacgcatgatcacgaacctttcacggccaagttatgttttatgttttacttttggttagtggctttgaatgagtttaataacattattattcagaattaggtgtggaacatatttgatattaaatgtattaagggtgattaataatttaccacaacagctgtaaagaaatctactagtagaggagtattgtaatctttaaaatattgtaatgaaaaaaagatacctcgacaccgtaaggtataagaggacggcttaagtaaggaagtaatattgtattgatgaatatataagttaactgcaatgaccattagtattttgtacgtagggactttcagaacttcataaacctctgaaatacgcatgacagaaaaaacgaatcctaaaaacattaactacacatgttttggggttgtgcatcgcccctcgtattcacgatgtttgtgcttttatgaatccgcgtctttgtcacatgttcaatgggcc

SEQ ID NO: 6813 - DNA, 2010 bp, Diabrotica virgifera
  SmartBlast Evalue=0; Info=Exosome complex exonuclease RRP44 n=1 Tax=Harpegnathos saltator RepID=E2BW43_9HYME
tgatgctcttcctgcatattgggccattctgtttctgtagttcaagttctgacataaattgccggttttctgtttatccaataagtctggataagtagcatctgatccacaagacactgcaagtagcctgtgaactataatatcagcatatcttctgatcggagaagtaaaatgtgtataaagtggcaccgctaaaccgtaatgaaagaattcatttttctgtagagttccactagcaaaatacacggcttgtaacatgcatcgtgtagctagtatccttagcatagtgttcatatagatgttgtctgattttacagcggcatctaaagattctgctaattttttgccggtctctatattaatgtcgaaaccgagatgttttccagctttgattaatggatcaaaattagtactaggtggagtcggatgtcttctaagcattgcacattcgggaaaatcttctaaaattttttctgccacgctaatattcgccaacaacatgaactcttctaccatcgaattagtttcgaaaagttttttcacttctacatctagtggttccatcgtttcagagtccatatgaattttcacttctggagacgccaaaacaagggctcctttttctaatcttcgtttctttaaaattttagcaagcatattgagacctcgcaaagaaaatgcaacggtgtcgtttttgctcttatcatcaataataatttgcgcctcttcatacgtcattgccgctttagatttaatgatacttttatggaaacgagtattcaaaatatttgcttctttatccatttcccaaatacacgaaaaagcaaatcgttcttctccacctctcaatgaacacaagttagaactaagaagttcaggtaccatatcaattcttttattgactaagtatacagtagtagctcttgaagcagcttctatgtctatagcggtaccgggtcttataaagtgtgatacatcggctatgtgaacgcctacttccagtttatcgtcatcaatctgacggcaatgtagggcgtcgtcaatatcagtgcaaccgggtggatccacggagcaaatatctatgtgacggatatctacccttcgtttttcatcttcttctgtaataatccaaggtaaagtgggcaaacaactaagaacctcttctgagaactgactgtgtggcacatcgtgttctagcaaaactacttcattttctgtattctgatctccaattttacctaaggctctaacaaagtgaccatgaggataccttgaatatctaggccacgaatctatcgttacaattaatttctgagttctcaaaaattcagcctgtcttgtttctatcctaattttaggtatgcttctatcagatggcacgaacaattgataaactccatccattccgccttgcaaaatcccgcaatattgtcgccattttcttcttatgattccgacgacctttcctgttggccttacctctccccgtttttgttttgcgcctgttttaattcgcgctctttaatttcaacttcatcgatgctagcttcagcggcaccttcgtcttctaatacgatatcgctgggagctacccaattttcttcttgaaacacttctactactacgatatctccgtccaccgcgcggttgagaccacttcttccttgcaataataccgaatctttaaaagcatcaacgttcacgaatccttccaaaaaagttatccctagaagcccgaaaagtaccttgatacagttttccttctttaacaccggttagcagtgccacatttgataaatgcggaggaaatacatcttttgtgtaactatcaatagcgatttcttttttagaaagtttgtcttgtaagattgagttatctggtacatttgtgatataatcctttattgtacatgctggtattccttcttcaagtgctatatttctgttatttgcatcgtcactaagaaatacaaatttctctttaggcagatgttgaatataccatgaaca

SEQ ID NO: 6814 - DNA, 2010 bp, Diabrotica virgifera
  SmartBlast Evalue=0; Info=Serine/threonine-protein kinase SRPK1 n=2 Tax=Formicidae RepID=E2A1X4_9HYME
aaggaggacatttatattgtctataaaacacatacatcacaatttttctattacaaatgctatgtacatcaaatgaaggccctgtcgaaccaatcaataaattaaaaagattttggacatatttgcattaaataagaaaccaaatttttcgaaacggtactaaaaatgcactatacgtcaaaaataagcagaaattaatcgaatcagtcacctagagagcaaacggctcactgttgtgttaaccatgggtgcttcaagcattctgcggcagtcgcgcgtttatcgggttcgaaatcgagcatgggcttcaggaaagcagcgaaatcttcggcgtcttgccggccccaatcgtatttctccattaagacgtcttctagaccccaaggtttcaagttggttatgtgacgaagttcgttctttttgttgaaaaattgtttcgaattctttccgccctgggcgattttcctgggtatgtttcctaataattctattatatgagctagatgatcttcgtccctgcaaaaatcttctccggagtggggctcaaatagataatcgcctgtagcgagttcgaatgccatacaagcagtactccaaatatcagccgaggtgttgtatcctgatcctaataatacctcaagagatctgtactgcctagtttgaatatcttctgtaaagtgtttatcaacccaacaggcattgccaagatcagcaattttcacatcaaattcacattccacaaatgctggatcaattgcatcaactttatccatattggaatttagttgattcgagtcatcctctgacatgtgttccattacagaatccatatttggagcctcaccacctccaagatcctcaatacagccattctctagtttaacttcagtttctggtgttgtctcaggactgtgacttggtgaagtttcatgaaaatcagtatcaccattcacactaacatcaccattttctttaacttttttcaattcctcaatttcaaatatttgctccatctgttttttcaatagctcggtttgtcttttagcttttttcttcagtttcttctttttatttttactcatttttgtctctatgactggagctgtactgattaaggaagttggtaattttatgcctagctgggagagttcggctgctttacaagccaatgttctaatcgcatcctccgatatacagagtagtacattttcaggtttaatatccgtgtggatgattctgcatttgctgtggaggtaatccagaccttctaaaacttgtttcattatagtgcgcacatttgctaatggaattcctctataattggattttataattaattttaataaatgatgacctagcacttcaaagaccatacaaacgtgtaccccattgatcccgctgatcttaaaatcatttaaaagttgaacagttttattacgttttggatctgttggatcagactctctaactgatttcaaaatttttatttcatcaagagcagtttctgtgaagtgatctgctgacttgacaatctttagggcaacaaatctcttctcctcgagatcccaacacaaccacacagtcgagaaatgaccccaacctaattttctagttacatgatacctggaaagaaagaggtcgccaattctgacaggatggtaacctcctttgcggtaatcagagctgtcttcttgctcttcctcttcactagtgtaaggatcctcatcaccgatggtttcattactcgagctatgagaaggttcagttttagaattatgccgattttctccaccatgtccgttcatatcgtttttacctttctttttggcaggcttgtgtcttttctttttagcttgaatagctaagacacgtcgatttacgtccaatttagcgctcatctgtatacctttttataacaatcgccactaaaattacttaaaaacgttattaaggcgtcaaatgtccttcattttaataaaaacacttttgtttgattatggccgcctcacc

SEQ ID NO: 6815 - DNA, 2006 bp, Diabrotica virgifera
  SmartBlast Evalue=0; Info=FACT complex subunit spt16 n=2 Tax= Aculeata RepID=E2BWZ8_9HYME
ttatatgtggaccagaagtatgaaactgttattttacctatttatggaattgcggtacctttccatatttctacaatcaaaaatatttctcaatctattgagggagactacacctatttgcgtattaactttttccatcccggtacaactatgggcagaaatgaaggtaatgtctggtctcagcctgaagcaactttccttaaagaattaacatataggagtaccaatacaaaagaaccaggagtagtaactgctccctcgtctaaccttaatacagcctttcgtctaattaaagaagttcaaaggaaatttaagacacgagaagctgaagaaaaagaaaaagaggatttggttaaacaggacacattagtactttcacagaataaaggaaatcctaaattaaaagatctgtatattaggccaaatattgtttcaaaacgtatgacaggatcattagaagctcacactaatggttttaggtatacttctgtgaggggtgataaagtagacattctttacaacaacatcaagaatgccttctttcaaccgtgtgatggagaaatgataattctgttacattttcacctaaaacatgctatcatgttcggaaaaaagaaacatgttgacgttcaattctatacggaagtcggagaaattaccacagatttgggcaaacatcaacacatgcacgatcgagatgatctggctgctgagcagtcggaaagagagctcagacaaaaattgaaaactgcattcaaaagtttttgtgaaaaggttgaatctatgacaaaacaagaaattgaatttgatacaccattccgggagttgggatttccaggagcccccttccgctctacagtccttctccagcctacatctggttgtttggttaacctgactgaatggcctccatttgttgtcaccctagaagatgtagagttagtacattttgaacgtgtacaattccacctgaagaacttcgatatggtgtttgtttttaaggagtatcttaaaaagactgtcatggtaaatgctataccaatgaatatgctggatcatgtaaaagaatggttaaattcttgtgacattagatattctgaaggagttcagtctcttaattgggtcaaaattatgaaaaccattacagatgatccagaaggtttctttgacagtggtggttggactttccttgacccagaatctgacgaagaacaagctaaagaagaagaatcagaagaagaagatgaagcgtatcaaccgtctgatttagaagaagtaggatctgattggagcgaagaagactctgaatattcggaaggtgatactgaagatgatgacgatgatgaagatgcttctgaagatctaggatctgacgaagaatcgggaaaagactggtctgatcttgaacgtgaagcggaagaagaggatagagaaaaagtttatactgctgaagacgaaggtgacagaagaaataaacatcgcagcaagggtcatgataaattttcatccaaaggtggcaaatcatcaaaagataaaagcagacatagcagtagcagtcataagagccctagcaaacataactcctcttcaagcagtagtaaacattcaccttcaaaagataaggaccgaaacagcagttcaaaaagtagggacaaagatagacactcatcatcgaaccataaatcttctagccactcatcctcatctagagataaggacaaggacagaaaaaagagctcgtcttctcacaaaagcagcagttctggcgataaaaagagacaaagaagtcccagcggtgacaaacaccactcgaagaaatctagaaagtgaagtctatgttagatttattgttttgtgtaatgttcaaacacttttataatatagtttgcaagtttccggatgtatgtgaagactagccttaccaacagtttttttaacttcctataatttttttatatcaatatttgtattacttcatttcattgttcaataaaacaaagtgtaat

SEQ ID NO: 6816 - DNA, 2009 bp, Diabrotica virgifera
  SmartBlast Evalue=7E-72; Info="Transcription elongation regulator, putative n=1 Tax=Pediculus humanus corporis RepID= E0VMQ9_PEDHC"
gcttgctgctgcccagggaatttctacaaagccagctggagagactgcaggagaaacaggtaagacactaagtacaccaaatggtgcgttgactaaagaagaacaggataaggggaacgaggagaagatcaagaaactacaggaggagatcaaaaggaagaaagaggaggatgagaaagccaaagaagctaaagctgctgataaatcgaggcctatttccagtacccctgtaccaggtacaccctggtgtgttgtatggactggagatggtagagtgtttttctataatccttcttcgaggatatcagtttgggaacgtcctgaagagttaatcaaaagaactgatgtggataaaatggtcgcaacacaaccggacgtactttccactgccaataaacctgaggtaactaaatcgcctgccaaaaacatgcatctgaggatagtgaaagtgaggaagaaattccatccaaaaaacctaaacttgaggaagtcagtcccgtaacaataagcaacagtaatggagcagttccaccaacgaaaaaattgacattggtaaagaagctgccatagaagccgaagtacgagcggcaaaagaaagagctgtcattccactagatacaagaataaaattatttaaagaaatgttgacggagaagcaagtatctgcttttagtacttgggagaaggaattacacaaaatcgtgtttgatcatagatatttgctacttacttctaaagaacgaaaacaagtttttgagaaatatgtcaaggaaagagcagaggaagaacggcgggagaaaagaaataagcttcgggagaaaaaggatgcatttagaaaactattaagcgaatctaatctcagtggcaagtcatcatttagtgactttgcccaaaagtacgcgaaagatgaaagattcaaaggagttgaaaagatgcgcgaacgtgagagcttatataatgaatacctaattgaagtaagaaaacgagagaaagaacgagaaaaatcaacgtcgtgaacaggtgcggaaagacttcatagcaatgctcagagaacattcagacatcgaccgccactcgcattggtcggacgtcaaaagaaaagtagacagcgattccaggtacaaggcagttgactcacacaacttacgcgaggactggtttagagattactgcaagatgttaaaggaagaaaagaagagggccaaagaaaaggatcgcgaacacaagagagaaaaagagaagcacaagaagaaggacaaagacagggatcgagataaggaaaagaaatcgaaagacaaggataaggataaggacaaagaaaaggataaagataaagagaaggagaaagaaaaagacgattctaaaatggacgaagatcttaacgacgattccattaaggaagtggaggaaggagaaaaagaaggcgaaacagaagagcagacccaagatcagaaagatcgtcaagcaagagcccaggctagtttacgtgaaagagagaaggaagttcaacgtacattagctacccacatgcgcgacagagacaaagaaagggaacagcataaaagggatgaagctattcagcatttcaatgcattgctaagcgatttggtaagaaattctgatcttagttggcgagaagtgaagagaattttgagaaaagatcatagatgggacttagctgacagtcttaacagagaagataaagaaaaattgtttaatgatcacgttgaacaattggtgaaacgaaaacgccaaaatttcagagaacttttggacgaaacagttgaagttacattggtaagcgcgtggaaggagattaagaaaatcattagagatgacccaaggtatacgaagttcacatctagtgaaagatgtgaacgcgaattcaaagattatttaaaagacaaactgatactggcaaagggacagtttaaggagctacttcacgaaaccaaactaatcacacacaaatctttgcaaacactgcgcgaaaaccaagcgcacatgca

SEQ ID NO: 6817 - DNA, 2009 bp, Diabrotica virgifera
  SmartBlast Evalue=1E-136; Info=Cystathionine beta-synthase n=1 Tax=Camponotus floridanus RepID=E2ATA4_9HYME
ttagtaccaagttaaaatacaagcttatgattgaaaataaaggagcaggaaaaatccaagccaagaaacaaaagtgctgcaggaaaaatagttgaatagattaccaaaaatggactaaaaacattaaattgttcacgtgactggactcttaattactaatcagtcttacatttttgattggttcttttgatttccatttatatatcgactgatttgttctaaacattttcgaaggttaaaataattgatgtgtaaaaaagatataaaattaattcagaaatgttgtttgttcattgtttatttctgctgaatatattgtagtaaatccatagcagttactattcccaagggcttttcaacagctcctttggaatcgagaactacaacataagattctttttccaaaattcttgagataagaccgatgcttgctgttttttgaactttaggataaattcgcaccacacatcgttccaccgtttcgttagattttatggtacctctaagtaggccctgcatcaaattctgtaacgttaacatccccaccatatttcctgcactatcaacgacaggtgtttgatctatcccagcctttttcatcatatttaaaatcctttcgcaagtcatactctcagtagctacgtgcaatgtaggcagatctagctccaaaatatttttgtcccaccaccaatggttcatagtgttgacaggcgtcattagatctctagcttccatccattggtcagaggcaaatttcgttatataatttctgatactatctggcatgattaccaccactttttttcctgcttctagatttttcgctgctttaattgtagctgctattgctgcaccacaacttgaacctactaataacccctcttcttttataagccttctagccaaaggcagcgactcctggtcggttgtcttcacccacacgtcgaccacatctcgatctaaaacggtaggtatgaagtcgtatcctataccttccacctcgtagaagccagcatctgtgttattcaaagactctggttgagctaagatcgatcctactgggtcagctccaacgatcgttgtttggggagatatttctttgaattttcttccaatacctgctatggtgccccctgtgcctgcgcctataacaatcatgtcaacgtttttgtcgcactggaagtaaatttcttccgctgtggtgtcgtagtgtgctaaagggtttcctggatttgaatactgatccaaaattatagaattgggtatttctttcctaagtctatgagtaactccaaacatcccttcagcagaatttgaatcggcatttaccggtgtacgaacgatttcagctccaagtgcagacaaaacagacactttctcgtttgacattttttcagacatcactattatgcatctataacctttgatagctgccgctaaagctagacctattccagtatttccagaagatggttcgatgatggtgtagcctggtttgagcagaccctgcttttcagcatcttcgataagtcttttgccaattctgtctttaaccgagcctcctggattgaaaaattcgcattttacatagacatcgcatttcagtccttcagcttgtggaatcctatttaattttatgagaggggtatttccaattgcttccagtgcgttaggcagaattttggtcgtgcgtttccagtcttgtgttgtatgaggtgttgactccctgctagcatttttatgccaactgcaccttgattttttattaggggggttaaaactatcgtttaaaggcgaccaaaaagataggttactttttgattttttaatagtatcttcaatatttacgttactcatattgttgcgttaaattaaaggttaggaatattttaataacaacacaataaatctttattgcaatgaaactaccactatttgatcgactttttacgactgaactagaataacataaaaatacaaaaagaaagcacagaaagctacacgtggat

SEQ ID NO: 6818 - DNA, 2006 bp, Diabrotica virgifera
  SmartBlast Evalue=1E-175; Info=Diacylglycerol O-acyltransferase 1 (Fragment) n=1 Tax=Camponotus floridanus RepID=E1ZXI0_9HYME
gttgtggttagatgttttgtggatgttttgtctgaagttcaaaatatcaaaaaaggtgcgccaaggaaataagtataaaagtgttttttggattgtctcgatagataaaacctgataatgatattaaaggtcagaagccatcgaatctgctagttcgtaacacgcgcatactaacagaaaactgaaagatttgtatagtaccaaataattgtttttgaaagaaattttgtattattatttagaaaaaatgtcacaaccagatggacttcgtagaagaactaaaagtgtaactagagccgaggaaattcaagccgaaaataaaaaagccaggaaaaaccaacccgacaaaccgattcacagaccaagagactcactgttttcatggacgtcaggttttgataacttcactggttttataaactgggcatttttgttgctttctataggaggcataagacttttgcttgagaattttataaaatatggtattagaatagacccagttcaatggttctacatgcttaccggccaggatgattcgggatctgaacatccttccttagtgttaatagcttattcttgtgtgcctataattttgtgccttttaaacgagaagggtttggctgtggaaattattcccaatgcggctggtctaattgtccatataataaatttattggtgctaattttacttcctatggctgtaatccatgttaaagatggttttagtttagttggtgcctcagttgtaactaccctctacagcgtcttgtttcttaagctgtggtcatacgttcaagtcaacatgtggtgcaggatcgccagatataatggaaaaggtactatgaggagacagtcgatgtcttacaacaatttaagaaacactaaaggtagcgcaaacggcaaaaacgacacagctgacgaactggtccaatatcccgacaacttaaaccttaaagatttatactacttcctttgcgcaccaacgttatgttacgaactgaacttccctaaaacggaacggatacgaaagagattccttttgaagaggatcctggaagtgatgttgggtgtccagctgatattttgtgttatccagcagtacatgataccatccgtcaaaaactctttgattccatttagcaatatggactacaccaaggcgactgaaaggctgttaaaattagctattcccaaccatcttgcgtggttatgtatgttttacataatgttccattcttggttgaatctactgggtgaagttttacatttcgccgataggagcttctacggagactggtggaattgcaacaacattgatagtttctggagaaactggaacctgccggtccataggtgggctttgcgacatttgtatttgccgatgatcgagatgggttatggaaagacaacagccagtgttgctgtattcttcatcagtgcctttttccatgagtatatggtgagtgtacctttgaaaacgtacaaaatctgggcttttatgggtatgatgggccaaattcctttatcctttatgtctaaggccgtagaaaaggcgtacggaccgcgatttggcaacttggtcttttgggcatcgattattttaggtcaacccttatgtattatgatgtactaccacgactatattgttttaagatacggcgaatcattactagaagattattcgcatgtttaagcaaatattttgttctctaaggttacattttgggctacatattagatctatctatactccgtctaatatacttaccgttgcacgtcatccgcgtcatagcccgtgacgtcacatgataccaacacgaaatatttaggcggccggtgtgttcttttttaaaatcattttgcccagtacactggaattacagccactacacatattctattatatatgcttagaaataatatttaaagatttctattaatgttaacttaaagaaatacacaataatatgtttcatttaatttgtataaatggattatacagc

SEQ ID NO: 6819 - DNA, 2003 bp, Diabrotica virgifera
  SmartBlast Evalue=1E-131; Info=Luciferin 4-monooxygenase n=1 Tax=Camponotus floridanus RepID=E2AA43_9HYME
gacacaaactttaaaaacatttattattcatcacatatttggtatataaaatctacatactacgtaatgaaaacatttacagttttgatgtatatttcacagctcgctctctcaaaactcttctaagaatttttcctgatggatttcttggaatttcatttaagaagataacccctccccgtaacctcttttgaggtgacacattatcctctatgaacttttcaacttcccgttctgttatgtctttacctaccttcttcacaataaaagccataggtaactcaccagcttcttcatttggtaaaccaataactgcagcatcctgaatagcagaatttgttaacaataaagcctctaattctgccggagcaacttggaaggctttatatttaataagttcttttatcctatcaactatgaagaaataaccatcactatcataatatgctacatcacctgtatgcaaccacccgtctttatctatggtgctatgagtagattttggatctcctatataccctttcattatcaaaggacctttaaagcacacttcaccttctccataagcaggtagagggacaccattgtcgtctattactttagccatcattcctggtactattttcccacatgatccaatcttgccttttccatgtggagaaacaagcactcctaaggttgtttctgtcattccatacgcttgagaaacatgtttaacattaaatctttcttttaattctttttccatatctttacccataggagcagctccgctacgcatttcttttatgcaagataggtcataattttgagtcataggactttttaataaaaatagtagcacaggtggtggtacaatcatcctagctactttatatttaactacagactctaggaatatctttggcttaaatctgcctaaaaccaccatgcatttaccccgtaacaggttcagaaacattagcataaatccaaacgaatggaaaaatggaataagacccatcatggcatcacttggatcatcattttcaaccatatcacccataattgcacgagatatatctacataagccgtcatattgtcatgtgtacacatgacacctttaggtaaaccagttgtaccagaagaacacaaaatagttgccacactatctactggatctaagggaacactgtgaaaatcgtcatctaattcttcggactctactcctcttacaatatcggcatatcttataacattttggtatttacacgcttcattgccaaataatattaatttttgaatgtatggatgctcgggcaacacagataccattttgtcaatagttttattggagcagaatatgaattttggtttcgagagactaagtacatgtttaagttcaagtggagtataatctggattaagaggagcaaatgtggctccagataatagagtgccaactggaactatacaaaattctaatcgattttcactatttattgaaatgttatcacctactttaatgccttggcttgttaaccattttgacaatctaatacttctctttaacaacaaattggctggtaattcttctccggtttctccatctacctgaatcacattatcttcaaaagtttttagaactaatagtaataattctccaagggatgtatctattattctttctaattcaggtccaaccactatattttttaaactctccagtgccatttttcactttaagtataaaataatactgtaaaaatcaatactttactactggataacactttagactagagtagatgagtatggtaataatacactttgtttgaaataatgctcgtgatatattttgataacgacgtagaaatgaacctttcaacattctatagaaaagctcaaagtttaagtgaaattaaaatattgatgtatcaatttttccttttaacacccaatgggattgggcgaattttgttttggtgcgatcatacgatattgatcaacacatcacaccatg

SEQ ID NO: 6820 - DNA, 1994 bp, Diabrotica virgifera
  SmartBlast Evalue=1E-157; Info=Monocarboxylate transporter 14 n= 1 Tax=Harpegnathos saltator RepID=E2BIZ7_9HYME
gttttcatcactcttagtctcgatgatagcagatggagttagtttatcgttcggcctactattctcagagttcctcatagagttcaaagcttctagttccgatactgcttggatcggtagtttattcttggctgttcctttaattcagggcctattatgagcgccttagtggataagtatggatgcagaatgatgacctgtgtaggcggcactattgctgccgctggatttattcttagttgcagagcgaataccatttctattatgtaccttacgtttggcatattagcaggacttggtcttggactgtgttatgttacagctgttgtatcaatagctttctggttcgataagaagaggacgttggctgttggaattagcgcctcagggactggagttgggacgtttattttctctccgttaaccaatattcttattttcgagttcggatggagaggaactaccttgattctaggaggactcttcttaaatatgtgtgtctgtggagccttaatgagggaccccgactggataaccgaacaaaataagttgaatccgaaattgtcaaaatcgagtaaatctagcaaaacaagtttagtttcattatcatcaacgaattttatgaaagatttggatattgacgaattgaaagatgttttgaagagcggaaagaacgtagaatatcttctgcaaggtttggaaacatctatcgattcaaatgctgccgctaagtcgactttaaaaaataaccataattctgtattaaatcttccaacgtatattcgtcaaaatgagaaagtgcctgttgaagtattagaacaacttagttcaaatagaaaattatataacataattttagaaaactttcctagtttacttttaagtaggagtacatccgataaaggtctaaatatattagctggagacgcttctcttgtggaacgagtgcccgtaacagtttgtatgacactaaaaaaggaggaaaaagaagatcatggattaaacggcaaggaattagtacaacataaagataaggatgtggaagcacaggaaccattattggccgaaaaacgtagttaaaaaacctggaatcctaaaagttccaactgttccaaaaatcaaggcacaatagcccaagcacaaaggcaaaaactattttaaaaaatcttaaagtgcacagacagtcactgatacaccgtggagccatatttaatactcacaaatatagattcaaagcttccagttgtccgaatatatacagagtgtctactctaaccttaaagaaagatgagaacgagaaatggtacgatgaacttctagaattggtgaagggaatgtgcgatttttccttgttcttagaactacattttttcttgctgtccctctcaactataaccctttttgtttggtttatagtgccgtatttttatttggtggaacacatgacaaaacacgattattccaacgaagatgcttcactcacaatatcaaacataggtatcacaaataccatagggatgatttttctgggttgggcaggtgatcaaccgtggatgagtattacaaaaacatacgcaatgtgcttagtactcaccggagtctcttgtgctggtttgatgtttttcacgaacagttttataatgatcgaattatgtgcagcgttatttggagtttttgtggccagcacatactccttcaccccgggaattattgtggagctggttcccttagatcggtttacaactgcatatggtttgcagttaatgtgtatgggcattggtcttttgttgggtcctccatacgccggtcatctatatgatgtcaccaacagttggcaacaagccttttaccaggcggcaatttggatggtaatctcagggttaatgataggcatcattccctacaccaaaaatagaaagattttcggcaaaggaccagtggaaaaagtagttgaagattctgaagatagactttggattactacctctattatt

SEQ ID NO: 6821 - DNA, 2000 bp, Diabrotica virgifera
  SmartBlast Evalue=1E-163; Info=Fragile site-associated protein n=1 Tax=Culex quinquefasciatus RepID=B0W2V8_CULQU
ttttccttttctttttctttatttccgtctccttttactacttgcaccatcctcaaggttaagccagctaatattgcatccagcggatccataaaacctctttgcatccactttggaatcgtagttcttgcgtgggaaaatcccaatttttgtagaatgtaatcgatgccataaggttctatgtattttccggctacacttagcagtcgcactgttggttccagatgccacgttttacaattgtagttacgccagtctttagcgaaaatgtctacatcgatagaacctttctttggtgtttcacttagagattttggcttttcttggtcgatggcggaacgtctatctacaccacccagcacccgttctttctctttaacatacgaagttattaaatcgtgcaaaaagaaaaatgcttcagcgtcaacagttacaaaaatatgatcttcaaattccgttataaaactgcagtcgaccattggtttatcacccaaaatatccggaatgtcagcagtttgcaaatgttcagttttaagatgaaactgtaagctgggaagagcaaaaataacctctctggtatgattgtgatctgccaacttgggagaagaagtagctcctcttgctcgctccatcgaaccgtccattttttctttttccaacgaaggaaacctgtcgacttcatctatttgactgttggaaaacgtataatggaaccattcttgtaaacttttaaactggggaggaaatatgacagttcttgaaactttgcacactgtagccattgacaaatgtgttttatatgtgcttaagcccaaactgcacgtcaatgtttgcaccacatgcacatcttgcttagggatctcatctggagatacatttgcaggaatctcttggctctctgtattgaaattgatacaaggctctttcaaactgaacaaagcccacgacttgcttttgaaattaattccatggaagcaagccaacgaaatgttatttccttgtaactccattgtaccaccgagaacagtgccaaatgaaggcaaaggaagaggcatagttttcaattgaagtcctgctacgtgtgccaagactttctgccaatgcctgtggtgtctggcatccgtagttggagctgcaggaagttggggaggtactgacgattctcgatttttttgtggagttactctcgaaggtcttccggatccagcaaaactactaaatgctcttttgctgctgttaaactgctgggaaaagaattcttctagtttgttaaacattttgagcagatcggcagttgtagatttggaaataatcatttgcagttgatcccaaccaagtactccgtgcatgaagatatttgcgggtcttcttgtgggcataaaagaatctcttgacgtgttaaccttgttcaatttccattcgtctcttagattgacatttaaatcactaactctgcacattagcaccgacgttgccatataatctagccttaactcaagagcgtgtagccgtaagcatactttgtgatctggttctacattcgcttcttctctgatgtaaatataggtatttattcgagatatctcgatgtttccaccaactataccacctttagcatctaatccagaacctcccaaacctaacgcaatatacaagttcttatgtcccgtcgagccaatactcaatctgccatcacttctaaattctctcgttaaccaagaaacatttcccatgacgtttcccatattcatgtgaacattcaatttcttgaaattgacagcaaatagcaccagagtttcccaagctgaagaatttttatgctccaatacgttgggtgtatcagatgggtacgaatctgaactcaaagtttttcctgtgtccttcaatttgtggtgcgcatgatcagaatccaatcccatcttgtggcggtcactggtattgagatgtggcgatttgtcggtttgctggacctctcttgacctcgtgataaattcggagaa

SEQ ID NO: 6822 - DNA, 1994 bp, Diabrotica virgifera
  SmartBlast Evalue=1E-159; Info=Short-chain acyl-CoA dehydrogenase n=1 Tax=Glossina morsitans morsitans RepID=D3TRT6_ GLOMM
ctcagattacaaaagaaattagtgacaccagacgaccagaccagctgaagccggaaatcatcgtacaagtaacacaagaaacatgaattcactaaccagacagttatttaggactgcgaaaaaggcaggagcgcgcaacttgagcgtttcaggagtaaggagacaggaaccacagcccgctgaattgggtgcgcaatttggcagggcaccattgacacatttgactgaagatgaacaggtcatgaaagacacagttgcccgcctggcacaggatcaaatcgcccctttggtccgagaaatggaaaatgaaggaaaagtgaaagattccgtgttgaaaatgttgttcgaaaatgggcttatgggtatagaaattgattcggactatggcggtgcaggatgcaatttcatgaccacggtactcacagtcgaagaaatttcaaaagtcgatcctgccgtagctgcccttgtagacatccacaacaccctcgtgaacactgtgataataaaattaggtaacaaacagcaaaaggaacaatatctaccaaggctagccacagatatggttgcaagttttgccctctcagaaccatcctcaggatcggacgccttcgccctcaaaacaacagccaaaaaagacggatctgattatattttgaacggctccaaaatgtggatctcgaattcagacatagctggagtgttcctgatcatggctaacgctaatccttctgcgggatacaaaggaatcacatgctttatcgtagacagagacacccccggcttcagcgtagccaaaccagagaacaaacttggaatcgtagcttcagggacctgcatgttaaacatggacaacgtccgagtaccagaaacagcaattttgggtgaattagggcaaggttacaaaatagcggcttccattttgaatgaaggaagggttggaatcgctgctcagatgatcggattggcacaaggatgttacgatcacacgataccgtatactttggagagacaacagtttggaaagcccattttcagcttccagggtatgcagtaccaaatagccgaagtagctacccaaatcgaagcggctcgtcttctcacctacaacgcagctcgtatggtggaagctaaagtaccattcatgaaagaagccgccatggctaagttctatgctgctgacattgcccagaacgtcaccgtcaagtgcatagactggatgggcggagttggcttcaccaaggacttcatccaagaaaaatactacagggacgtcaaaatcggcagcatctacgaaggtactgctaatatgcaactgagcaccatcgctaagtgcatcgagagggagttcaagcaataaattcgacgatactgaactgaccatttcatcttgacaataaattgaatataattgagcttacataattgagtacacattaaaaataaacacaaacatggcaaataggtgtccaaatcccatattggcaacccaactctactgccaatgcattttggatattttatcaagcactgtcctaacgaaacaatccataaaatcacattttcaaacgaccacgctaattacagacatattgtaggagagctatttcctatatagtaggaaaaaatagtatacttggcaacaatgatgcgtggtagcaaaagtacgacaaaacttttaggcctgctaacaggtggcgctagtactaactaggattgaattttattaatattataaatgtaaaggatttctggactcaaatactcaattatagtatttttagacacatctttatatagacatgtgccaaaataaagcatttcataacttttgtaaatataaattcatcgttcacgcggtattttcggtatatgtattttaattttttagtaattttaatataagcgtctactgtaattcgttaaatgaattatctttgtatatattgatatatttttataattatacaagtatttgtcaataaataattgttctc

SEQ ID NO: 6823 - DNA, 1996 bp, Diabrotica virgifera
aaataagtcgtcggtttgtgggagggatttcagcaccgcctatctcgagaacgagacatttgcggacatgcgtttgtgaggcaaactgtcattgtgttttcatgcagaattgcccctaaagtttgccatacttgtttgaaaacacctcgtattgatgaggaacagggttagttgttaaagtacctaactttttattatctaacataagcgaattaataaaaagaaacagaatgttgagaggacatggggctgtatttgggttctaattttggtattttatagatgctggaatattccacagggtgacgcgaactttgagaaaaaatcacagtttgattggtacatccggtgtacaatgacaatttacctgtctagcagcgatattattacagcgatattgttcatgaataaggctacatgttagaaaatcatttaaatcgaacagcgggtttggtaaattcgagacatcggaagtgatccgtttttgaggtggtgcgttaatttcttggagaagtatatttagatataacccaaattttttgacttttaaattgtagggcgttgttgaaaattgtctaaaaatctttgacttatcgggcaaagtgcgttcccctgttctggcgactactataattattctcggggcgcatgtgcctattcgttgatagtcttatttttatattataaacggctaagcggtttgttccccgtcttacgccgtatttaaatgttttttatctactgaattaaaacgagcggtctaatgtattccaaggtgtcacatcactgcgtcatttcgttttctttaatataaatatgtcaattttattatttaatttttattatatagtttgaattcgttaataactgataaaagcatgggtttggcactgaggcactttggcgacagtctattgttccttgtttgttttggagaatcgactgttctaactggcatagagggactctactcggttcatgctaaatgcaggacagattaaaacggcgagcacttgctggttgtgtggaaacgtatataaatataaattttcagatgtatcggaaggcattaaatgatttgcaatctattttagtctctcctgcatcgttaatatcgttcctcatggacagagtaagttttattgtatgtataatataattatatattttattcttggtaatgcatttttgcattgtgatgattgtattttagcagtaatttatggagttcaaagcatatacttctgttttccggcacagttagtaacgttaactaataaagttaaaatagcgatattgcttgaagtaaagtagttcccattttggtctttttttatatcttcttttattaagcaaagcaatagtaatgtgtaggtaacaacgggacaaaataggagctacttatttcacctttttttttatattgtcatgtagtttattttttgtaagcggtcgcaggctccgatgaggattacagctaagacattcatttgcaatcatagaatcatttatgacgataattattatattaatttaattctggttttacatccatttttgcttaagctttttggtattttgtccctctccgatacattaatactaagaaactttcagttatattattttttcgattttagtgtgaagtagctaatctttcaatatttgtaccataaatgcctaaatagtaacacgtttttgcaattttaatacaacacaaaaccatactactgtaaagagtccaagcattcgcagaagacactcgtgtttaagaagttttctaaaatcgggcgcaaaattacatctggacaaaaaatgaatcctttttgggtacgagtggtgctctttgaatgtgttcctgagatgcgttttatgcaatttcatactgtactgtatttcattattggtataatttagtcgaagccccttgcctgcttcagacattttgttatttgtatcatctatcaattatgagaggactgatgatttataatgt

SEQ ID NO: 6824 - DNA, 1998 bp, Diabrotica virgifera
attttaggaaaaaacaaaaaaaaacgtttgaggaatttttgaccaacttttggtcctggcaacatgcagatttgttgaagggggtcctttttgagtacgattgtgccaaacatccgagtcggaatgtttttcctagcggatgcgcagttgctttctggactatgcgaattctttctctgcggcatacttcaactcattttttaaaaatgtttatttcgaaagtctccagttgtcttccacattttgtcttaagtgatggatatttcgaaaggccattcgacattgactacgtggcgcatatgatattgcgcatgcgcagtcaatattctactaaaatcgcctcttacaagttactgttgtgttttttctaattgttctatactcgttggatattttgcagacttttccagctaaaaccctactatacacattgtaaatatcaataatgtaaaaatatatcacaggggatttacaaaaatttaacaaagtcttcctctggattaatagttcttttttgtaaatcgactttcgcaaaaaatttatgtacagtggcacattagctaaaaaaatattttcagatttagaccttcccttgattgttacgtataataagtagcttaccattttatactgtagtagtgataggatgttgtgtttggagttcgtgttctctccttttcagtgtgtgcctttatagtctccatcgagataagacagtccaatatttttgtatgggtaaatataatatgagtaaatatctttggcagaaaaaaagtgaggtcaagtaaatgaataaacagataaaaacatcgaaaaaaaaaaacaagtgctacaaaaatgaaataaactgatttaacatatcacttagtgtttcatgatcttgttgtaaatatgtatagcacaaatgttaaaatgaagatattcaaaaaagtttttattttagtatgaaaaaagtttttaaatctagaagttcatctgtttgtttgaaaaaatatttaaatacttgacaacactgaaaaactcatgatactaggaccttcttctagttgatgatacaagtacaactgaactattctctctattgtctactcttgacaacgtgtaactgatttttaggggctacttactcgcttgtctgattatataactaagtacaatttgcttatatccagtcattgttggtaccagcaatacaaattttgtagataaaggtatcgtttggtctcctttacacttctacactgtgactttgaagattttctgggtataccttgccttacatttttgtttgcttgtacctttcgggatagactttgacgcctagtgtcgtgtctcacttgacttatttgaacacatgctcaaactttttcctctaatcatcacaaatgctcatttttttaaacattgtttagttcatgttgttctagtgttgagagtgactaccggaatacgcgcacatgcttgagaaggctaaagaaacctaattgaccacaaatgctcagtctttggatatttttcggtccatgttgagctgtatcgtggtttttttgtttgttcctagtctatttttaccatacaagacatgactaggacatgaatatccactaccagcatgcctacatgcgcttgagaaggctaaaaaacctaggtggtgctacctgataccaggaattgtgataaatctccatctatatttgtttgcgcctgtcagatagactttaaggcctagtgtagagtctcgtttggcttatttcaacaagtactcaaatattctctactaagcaccacaaatgcacatcctttggacatttttcggtccatattgagctctattaggtttttgttgtttgttcctagtctattcttgcctcagaagaagctagaatagggatagtcactacgggcataattgcacaagcttgagaaggctaaagaaacctaactggtgtcgcctgataccaggaattgtgataaatctccatctatatttgtttgcgc

SEQ ID NO: 6825 - DNA, 2001 bp, Diabrotica virgifera
  SmartBlast Evalue=0; Info=Vacuolar protein sorting 4 n=1 Tax= Bombyx mori RepID=D0FH76_BOMMO
tgccaatgtcaaaagtgtaatttttaggtgtgattataaaattattcttagacattacaatatttcatataaagtatttatttaaaagatgtatttgtgactggaaaaggaaattagagccctatacttacagttaaacgcttataaatttgtagcaagtattttatctttacaaaagaaagtttatttcttaacattgtagttttatatttttattacaaatggcaactggaactactttgcaaaaagccattgagttagtcaccaaagccaccgaagaagacagaaacaagaattatgaagaagcccttcgtctatatgaacatggagtagagtactttctacatgccattaaatatgaagctcagggtgacaaagctaaggagagcattagggccaaatgtgtacagtatctagaaagggcagaaaaaattaaagaatctgtaaggaaagggaagaagaagccagttttagatggaggttcttcaaaggaagacaaaaagagtgatagtgatgaaggtgacgaagatgatcctgacaaaaagaagttacaaagcaaactggaaggggccatagttgtagaaaaaccacatgtcaaatggagtgatgtggcagggctggaagctgccaaggaggctttgaaagaagctgttatattacctattaggtttccccatttgttcagtggaaagagagtaccttggaaagggattttgttatttgggcctcccggtactggtaaatcgtacttagccaaggctgtagctacagaagcaaacaattcaacatttttttctgtttcgtcgtccgatctcgtttccaaatggttgggagagtcagaaaaattagtcaagaatcttttcgaattggctagagcccacaaacctagtattatattcattgatgaaatcgattctttatgctcatcccgttccgacaacgaatcagagtcagccaggagaatcaaaaccgagtttttggttcagatgcaaggtgtgggccacgatactgaaggtatccttgtcctcggtgctacgaatattccgtgggtattggattctgctattcgaagaagatttgagaagagaatttacatacctctaccagaagaacctgccagagccgttatgtttaaattgcatttaggaaatactcatacagagctaacagatgaagatattaaagagttggcatctaaaaccgaagggtattccggagctgatataagtatcgtagttcgtgacgctcttatgcaacccgtccgaaaagtccaaactgcaactcacttcaagaaggtcagaggtccgtcgccgcttgatcctaataccatcgtagatgatttgttgcttccatgttctcccggagatccgggagctgtggaaatgtcttggatggatatctccagtgataaattagctgagcctcctgttacagtgaatgacatgctgagatcaatcgcaacctccaaaccaaccgtcaacgacgaagatctcacgaaactcaaaaagtttatggaagacttcggccaagaaggataaaatttaggtatacaccagatttactatttaaaagagagattcttgtataatatttgtattcttttaatgcatatatagatcgtaaaaaccacacaaaactttcaacattttgcattaagtgttattagaaaacaaaagattaatgttgttatactgttgctttaatattatttttttaataaattgaatttttcttttttatattacggccttattatacagtaagatagtatatatttgtattcttaatgataaatgaagttaatgaaacatgtttttagaatattcacttgttctttgtatataaaataataaaacaccgattggtttaaatacttgtattggcttaaagcaagttatctataagcttcaaagacatactcagtgtcttatccgatttctgttactataaacgatctgattcatttatttatctgttgtaattaaaatctgaaataaaatg

SEQ ID NO: 6826 - DNA, 1997 bp, Diabrotica virgifera
  SmartBlast Evalue=0; Info=Coronin-6 n=3 Tax=Aculeata RepID= E1ZX07_9HYME
tatttataacaagaaccacatgacatccagtgttagagatcgtaacaagtggtggcgaatgaataacatttctttctatctttctttttggcttaagacaatctttaaaaaagatttacaaaagttcttttgatttcgaactaattaaaacaactttcaaatagtagttatataagagcacttggcgaatatgatgatatgggtagttaataaaatatatttgaatgataaaaaaataaataaaatgatgggacttaaattatatattatgtataaaaagcagagcaattgcaaaaccaaaacgtgtgcaacacctttataagtattagttgagcagtagtcgttgtgcgcgttggtaaaatgtggcacatcacacttcgtccgaagccatttcagctggcgtcgcgttaagtccatcaccgcctcctggaccgtcgtcgtcgtcagcagtgacggtttttttcagcgctacctccgcttcgagggctcgaatcctattctcgtgctttactatcatagctttgagttttctaatttcatcggcaaactcttgaagagctttattctccgccgccgcatttgcagcctgactgctagcctttccgccttttggtggaattttgtccaacaaatttcgtttagataaggatagagaagattttgattctggcggtttgtatccgtcttttaatgatattaagattggctctgcgtcttgaccaccgatccattcttctgcgctttgtgctgctgtatctcctatagtatccgggtataagtcttcttggaaaagctctgattttctaggcactgtcatggttattacttggcataaaccggagttgttgagtctatagaaacgactaatttcacatgatgtgacatcacatcctctctttggcatcatcccgattcctctttgtggatcaggtgtttggaaggtattaatataatgaacgaatggtggttctgccgttatttcaaaatacctaatcacagagtcgcctttaccgcaaaggtaaactaaatttgcatctgggtcgtacagtggaaacataacaccgttcgatgtgtctaattctaccattacgattggttctcccaagcaatccggtgtacgcagactgtattgtctttcggacatcttcgagaagcctgttgtgaatactagaccgtgccttaaaaatattgctcttgtcgctttagaaccttcatgtgctagatcttcagcttcgacttctccagttcggggattaattattctgattttcttatctttacacgttgttaataatttcgatccgtcccaattaaagcaggcactgtaaacaatatcaggatggcagtcaatttcaactaaggattctccggttccaacgttccaaataactacatgattgtcactgccagcagtaagaagcacgtttaacgctgtcggatgccataatacgagaccgaccctacgttggtgataaactaaatcgacgactggttctgttagtgttttgtgaaggccatgatctggtatatgccatactttgacgacgcaatcttcggacccgctagctatcacattatcgttatgaggacaccaggcgatgtccaggacaggacctttatgaccacctaccagcggatgatcagcagcgatacgccctgtcttatttatacttgataggggtaagacaatgaaggcacctcctccagcactttctacaattatagccaaaaatttggggttcacagcacaaaacgttgaatcccatgaactcttagaaacacgaatattatcgtagcattgttccctttttaaagcttgaccatagacatggcggaatttggaactgcgcaccacacggaaagacatcttgggtttttataaataatatcctataaatatacgtttacaacgattaattacatttaaattttattcggaaattaaaaaaagaatatttttaacagacacttcatatctagttcacattagcttcgaa

SEQ ID NO: 6827 - DNA, 1997 bp, Diabrotica virgifera
  SmartBlast Evalue=5E-79; Info=CG7120 n=3 Tax=melanogaster subgroup RepID=Q9VSJ3_DROME
atatattttattatatcaggtacaaaaacagtataattttaacttataatctgaaacacaagcactttgttcgccgtataaatttaaccggctgattgaacctacaatactgtagcttttagactttgacatatatcttacggtagcttcaaataaaccatttcctggaactgttgtaaaacttaacatgtaatctgatacttgataatctcctgtaatttcttgactatgctccataactcttgcacttgatatgcgatataactttaaatctgcacatttagaatgtgcagactagtagatcgtttatatggttaacacagaaatcagctacagccttaattgttttattattgacattaagttctacactcttttggcatgtacaccagtgactgacaatgcccgtatcttcgcaagttctatattcactaattcctcttagtaaacttatccctctggatgtattagtactattattactattattatcgatattttctatatttaataaatcaacaaaagtctcgtataaatcgaagggtgttgttagaagtaacgaatttttttgtaaattattataatgttgctgatatttctgtctgtaccattctggaagatatacatgtaaaaacggcaacctttcttccatcattccttgaaaagtgcttcttattcctccccatctgatcccatggtcgctcataacgaatagggctgtattattaagatgatccttttcttgtaaatatttaaacaaagagtagtaatcatcatcgcctactctaggtaaatttagattatcatgagatatggtattttcccagaaaaaaccgaaatactttaatgacctatctttcattgtttgaatgaaattggtcatatattttatatggtctttatacacccatcttgctcctagacaaagtttaacgtttccatagttaacatttcctatctcgttcgtagcctctctgtcaaaatagctgtaaccataatctgtcggttgttttttaaaacctcttttttgatagttaaaaattcccatccatgatgagtcctcgtcaaaaaccgttacataacctttttgtttgtagcgcttccaaacgaaagagcaattatcaaagtagtgattatcagttggccagcaatccttctggatttcctctatatgtttacctgttaacactggtattacattgggaaatgtattgtctccaactttattgtatcctataatttcaacggcaccaatttgtttcaaataatttacagtctttggcatctgtctatgaaaatttaatctcgaaatggcatctaggcctatcactaaaatatttaaattagaatcgtcttcattcagatctttttttacgtgtgacatattttttgtaggaacgaaaacaaacatatcagtataaatatcacgattattgtagctgcacgtaacttttataaactcttcttttacttcagttttattcacaaatgtttggcagcctttactgtagcttattttattgtctgcagcactatcagcaggatcttctctccaaaatattttgtaacaacatgtcagattatttatattggttacattatagaaaggtaaagaatcttctataattttgatagaatctctatctgactcaaataacgctggtgtaccattattacaaacatgtgtgcctggttgctctaaataatccaaaatatttttatcaaaaggctgaaaatatggtattttacaaccaggagtatttatcgtaaagactcctaaatcgagttttttctctactattgctaagtttccgccaatctcgattcgagaaaatatattatcttgttgatatacacataccaatattgtaatacatattaacacaagtataaaatacttgaagtccacctgtttccctaataacattttagaaatatcaaattaatttgagggtatgtttcttttcgcttctacatcgtccactgcacaattttga

SEQ ID NO: 6828 - DNA, 1994 bp, Diabrotica virgifera
  SmartBlast Evalue=0; Info=Cytochrome P450 n=1 Tax=Leptinotarsa decemlineata RepID=Q3I414_LEPDE
atgataaaagttgtcctccggtgatgtgtgtttacttgaattaatacggtgtttttgtggaattaaattctaatttgattagataataaattcgccgttatattataaattgtggttgctgttacaataggactataggtgaaaagccatcaaaatgtccatcataaccggcgtaatattgtatgatgtaataggcgttgccattggtcttgtgactcttgcttggatttattctaaatgggccttgcagtactggaagaacaaaggagtaccttatttcgaaccagcagttttctggggaaatttacgtccaccccacagaagagacaaatcaattggtgatgaaatagccgagatatatcaaaaagcacgagataacggatggaaacatcttggattatacaatatggtttctccagtatacatgccattggatttagatattattaaacttattttaactaaagatttcaatcatttcgtcgatagaggaatttatgtgaatgaaaaagatgaaccaatcagtgcacatctttttgctattggaggaaagaagtggagaaacctacgaacaaaatttacgccaactttcacctctggtaaaatgagagccatgttccaaactatagctcagtgcggaactcaacttaacaaatatttagttgaagagatatcccaccatgagcctattgatataaaaaatatattaggtaattttgcaactgacgtcattggttcctgtgcgtttggattagaatgtaatagtttcaaggatccaaacaacccattcagagtaaatggaagacaaatcttccaaagaactaacttcgaaaatttgaaatttatgacagctactatcttcccaaatttagcacgtcggtttggtgtgaagatgttgcgtaaagaagtttctgatttctttagcaaagttgttacggatacagttaattatagagaaaagaatcaagttcatcgcaatgattttatgcaactgttgattgatattaagaataataaagaaggagaacatactccaggcgatggaacttcacttactctggacgaaatgatagctcaaagcttcgtattctttattgctggttttgaaaccagttcaactaccatgactttcgctttgtacgaacttggcaaaaatcaatctgtccaggatacactcagggacgaaattaatcacgtacttaaaaaatataatggacaaattacttacgatgccataaatgagatgaaatatatgaatcaagttattgatgagacactaaggatgtatccaccagttccatttattacaagacagtgtgttgaagactacgtaataccagatcaagacattaaaattgaaaaaggaatacgggtattcataccaataaagggaatccattatgatgaagagtattatccatccgctaaagttttcgatccggaaagattttcagacgagaacaaacatgatagaaatcaatacgcacatattcctttcggagaaggaccaagactgtgtataggtatgaggtttggtataatgcaaaccaaagttggattaacaaatattttgaaaaactacaaagttggcataaataaaaagactaaacaacctttgaagctagtgactaccagtttcataccagaagttgaaggtggagtttggttagacctgaaaaaaatataaataaagaaaccatgagagtatttaatcatgaagtatttgatcatttataatacttacaagtttttatttttttagatatttaatattggtgtttaagtacctttttaacttacgccataataatgaaaaccaacaaaaaatatttattaaaactttaaaaaaaaattataggtataaatattttgtatttttgatgttaaaaataaagggtaccaatttttatacgttgctggagagtaggtacccttatatgattttattttaaaagggcaaacattgtactaaaaataaaatattttaagccaaa

SEQ ID NO: 6829 - DNA, 1992 bp, Diabrotica virgifera
  SmartBlast Evalue=0; Info=Glycoside hydrolase family 31 n=1 Tax= Chrysomela tremulae RepID=D3YHE2_9CUCU
aatttgtgaatatgatactaaaatatttattagccattgcaatagcaataaattttgctactgccaaatatacatataagctaggagacacagaaatagattttacagcaactagcaatggaatagaaatatacatccgagacgctgaaataggaagccaactctacggtacaattggcgttggtaaaaatgccagttgtatcgattttccccgatgcaaagtaggagataatgatgtcgcttttagattcctgcctggtacttcactgtcagtcatatcgaccaccaacaacacgcaagaggtgcttaaagactgtttcttcacggcgtttccaagtgcctccacacaatggtatggagggccagaaaggagggtccaaacgtggccgttacagcacatgaggatttctcaatcaagtccttatatcagcagaaaggacgacaatcatgctgtagctgagagatactggttaaattctttgggtatttatatttatttaagtgaagagaatccgttgtttgtgagtcaaaatgaggacgattcaaaagatcaagtgtgttttatatcaaaagttcaatcgccgtatatcaatagagatcagaacattttggaatatgtgatatattttagtgacgatcctaaaacagcccatttaaatgctgtaaatacttatttaggaaaaccaaatggctatccaaatccaaaaatgatcaaggaaccaatctggactacttgggctaaatataaagctccaatcacagatgacatagtgatcgagtttgcaaaaagcatcagagaaaatgggttcgaaaatggacagcttgagatagacgatgcatgggagaaatgttacggtgcccaagaattttcagaagaaaaattttccaaaatttctgacactgttaaacaactgaaagatatggactttagagtgacattatgggttcatccattcgttaacgaagactgcaagtatcgatctgatgagggcatccaaggcgatttcttcgttaaaggagttaacggtctaaacaatgctacttggtggaatggaaatgggaatggccaccaaatcgattttacaaatccaaaagctgctgagtggtacacagatagactaaaaaaattacaaaccaatcctggaattgatagttttaaatttgacgcaggtgaagcagactacgctgaacagccagctgttttcccctacgtatcacgagccgaacaaaatctcttgccaaatttactcaccactgaatacataaaaacttgtgctaattttggagatttgattgaagttagatcagcatttagaaatcaaaattcttccaattttgtgcggatgttggacaaggatagcagatgggacatgcagaatggtttaccaacgttggttaccactttgtttcagttgaacttaaatggttatccattggtactacctgatatgataggaggcaatggatatggggggaacgtaccaactgctgaattaattgtaagatggacgcaggccaatacgtttatgccatcaatgcagtttagttatttaccatgggagtttaattcagatgagttcaacacgttagaaatcgtgaaaaaatatgtaagccttcatgaacaatattccgatgttataatcaaagcaatggaaaggagcgtcagtgacggtagtcctgtaaatcctccaatatggtggattgatccaactgatcctgtagctttggcttgtaatgatgaatacttggtaggggaagatatattggtggctccagtattggaggaaaagagtaggtccagaaacgtttacctgccacgtggtagatggcgtgatggtcagaatggaacggtttacgaaggtcctttatccttcgactatccagctgatattgacattttaccttattttattaaagaagattcttaaatagtagctatttgtaattgttgttatgtttaaaaatataaatatatgatgtgaaattggaaaa

SEQ ID NO: 6830 - DNA, 1992 bp, Diabrotica virgifera
  SmartBlast Evalue=0; Info=Transketolase n=1 Tax=Bombyx mori RepID=Q2F645_BOMMO
gttagaaaaatgtgcatttattaacttaaaaatctacttcttgagtaattcatcaacatggtttacaatattcttagcatcaatcttatagtagttcaacaaatctgctggtctaccggatctaggaactcttggaatggctacgtgtttaacaataatatttctctcttcagctaaagcagataaaactgcctctccgataccaccttctgggtaatggtcctcaaccaccaatattctgttaccggcttggtgggcgttgttgatgattccttgtttgtcgatgggtttgatggtgaatggatccataactctgacgtgaattcctgctttggccatatcctttgctgcgatcagagattcgtggagggtgattcctgctgctatgatcagtgcttggtctttgttgctggagattggtacaagggcttttccaacttcgaagacctggtcgttggggtagacaacagcagttggggctctagctgtacggatgaaagtaattcctttggtgttagcagctaattctactgctctttctactgatacaacatcggatgggtagaatacagtgcttccaggaacagatctgaacatagcgagatcttcaagagccatctgactgggaccatcttcaccaatggaaacaccacagtgagaaccgcagatgttaatgttggactgagaaatggcggccatacggatttgatcaaaagctcttgtgaagaaagcagcgaaggtggacacgaaagcaatggtacggtctctgcagctaattcccatagctacaccaacaagattttgttcagcaataaagcactcaatgaagttctttggtccgaacttcttcatggcttcggagaaggttgagttgctcatatcgccatcgagagctactactctggggttggtttctgctagcttgaccaaagcgttaccgtaggctgctcttgtggccatcatctgtccttgtttgtagtttggtggggaggagagtcttacgttgttaatgcttactggtgcgacttctgcgaggggtggtggaatgttgtatttcagtttaccttggtttctgataagacctttgagatgcttgaggattttttcggtttctcctccaaggggcttaccgtgccagttttctttatcttcgatgtctggaaaatctcttcccttataagttttagcaatgatagctgttggccttcctttaacggaagcagcagcatcgaaggcctgcaccaaagcacctatatcgtgtccatcgactgcaatggtgttgaaatcgaatgcttcgagtcttctcttgtagatgtcgatctggtgtccgaccatggtgggttgagtttgtccaagtctgttagcatccaaaataagtaccaagttgtcgagaccgtagtggctagcgaagttgactgactcccagatagatccctctgcgctttctccatcgccaattagacagtaaaccctgtaaggggcttcctcgatgtatttgccaagataagccataccagcagctacagcgagaccttgtcctagggatccagtaccaacatcgatgaagttcaaacgaggtgtaggatgaccttcgaggtcacatcccaattgtctcagcttctttaagtcagcagcggctacaacgccgttctcgacccatgctccgtaaagagctggagcagcgtgacctttggaaagaacgaaacggtcgctggatgggtctctgggagctgaaactttgtagcgcatggttctgaagaagaggactgagagaatgtcggcaattgaggaggatgtagtgggatggccggaacctgcaagtgtagtggattccacgctatgtatcctgatgcgtgtagccaggtccttcaaagtttgcaaatctgttgctgttcccgccatttttagtcagtcacgtcgacactcggcactactaaactggtggaatattcgaagaacattcacttaaatacaccttatcagtgtcggaac

SEQ ID NO: 6831 - DNA, 1992 bp, Diabrotica virgifera
  SmartBlast Evalue=0; Info=cathepsin L precursor n=1 Tax= Tribolium castaneum RepID=UPI0001C0B393
taaacgcattactttacttttaaatcacaacacaatatcaattttggaaaaatgttaaactatcataattttcaatgtaacctacacaattttatacctaataagataaataatatcaaaaaatatttcgaactgagaattataaggcatatgtatgattctaattttatttcctatactattctattcgaaatactaaaaaagagaagaattcatgttaaaaattaaatatgtttacatggtaacgtatgttggagtggtcattactccgcaattattatttttggatgacattagaacgtatccgtcgtttccccaataagttgaccaactatttttgactaaccagtatttatttccatttataattccatatcctacagccaatacagcgtgatctaaatcctcctccttatttccacattgagggtcataataaactccattggaatagaaactaaacgttttgtgactggcatctatagcaacactgatgggtccatgacgaaccaaagccattcttaaagcattttcatcaccactcgtcacattcacccatcctgtaatgtgagctaccttcggaacggtgtttgagtgacagtagccatcttgtcccaaatatggaccataatcttcttcagttggaattccgccatgtttaagcatccactgataggctctaaagtcttcaccaccatcgcaaccattgtttccatatccccatgaacaatcgatcaaagcttgttgagataacctcactagatttccaccatttttcaaaaagtatgctccttcaatagctccaactgtaccaaatgaccaacacgatccacagacagattgatcttttactggtgaaactgcaccaaatattctccaatcatacgagtctggaagattgtccatttcgtttttcttgtaggggaatggcgctccaccattgtatacaccggtatatttctttccacgcagtgcttttagttccaagtcggttttatcagctaagtggttaacagttaaagtataacctttgttttgtcgatttacggcgtgtataaatctgatattttggctgaatatgtatttgcggttttcatgttcgtttttatcagcgtactgccttctatgcttattaacaaacttattaaattcgaaatcaagatggccggtcttttctggtctgataaactcagccattgggttaaaagtataaatatgtttgtctccaggcccagggaaggcgctgcattctagatcggcaggaactctaaatgtatcatctgaaatgggacttgggtcgtaagtataatagtccagataatagtgatcgtagtggctacccaataaagaattaaatcctttcatttcatatctcactggtattcctccatctttgatccacatggaatatctatttactttgtgtccaactatattaactaaggtccatttttcagtttcaaatccatttactacttcttttccatcagatttaaatccagtcaaatctggcaaaatggcttgcggagtaatgctaatttcttccgtgccattaaccataaggcaacttctaacattttcttcagtttctgttgtaactggagtaacttttaaacttacaccataacctggtgtgcccagttgatatgtcttgaccatatctccataataatcgattcgcgatcgttttgatggttcatcataccaagcagagaatggttcttgaatctcagcatatggaatggataagagtcctgtgacgctgtaggtttgcttccaagttggagtttgatctttgccattcactgatgaggcaataaaacaaaacaataacacaatagtaaaggaccccataattatgtcaacttaaactaactgcattggtgttcttctaagaactaaactgtatagtttctctaatgctgataacacaaaattaataattattatttatttgatctttgctactgtcagccggtattaaaattaaaa

SEQ ID NO: 6832 - DNA, 1991 bp, Diabrotica virgifera
catgtcgtatcactaatatcatcatcgatcattaggtctagttagttgtatctccgttatgagattccactatcttatatattatccgaaaacacagttacattttattctcaaaattattcgttatttttcaatacaactcatttagtctatttactgagtttgttattatgagttatatttgtattcaccaaaaatttcgacttcttatgaattaaagcttccacgtaaattattgttacgttgtcccctttttcctgaaccaaaagctgcccttctagtagtcgttaagcttgttgatgtcgcaattatgacattgtctattatttgtaaatggtggagaagatgtttattcatagacttatttaatctcgtttccgcccagtgcttggtttaagttatgccttcatgtatactatctatatcgaaataatctatagcgaaatatctgttctgtatatattgatacccttaagttttattattagcgtgcttgatagttttgtttattgcaattttttcatgaattgttgtcaattctaggagtctggtatataacacagcgattatacatatagtctgtccgctataagttttcccatgcagtacaacattttcaatcaaattaagtccaaacagaaagggaaacatacgccgatgtgtgtagtatatagtatacagtatacaaaatgtatatacacatcgacgttcgtttcaatttatgttttgacttgatttgattgaaaatgtaccgcatgggaggacttatagcggacggactatatgtgctacatactactgtttcaaatatgttatgaaatttggtcatttttcgataaagtttgcacaacgctttatacaacagaatcctggagactggtctcgtattgattcttctaagtactgtacatattttcagatttttcgattttttttttctagactgtatagttcgattagtttatatgaactctgaaatgatactatataataaaaatgtggaatagttaactagtattgtaactaaaatttctcgcaattatcgaggaagctaaatatcgtttatgtatttttttagaacaagctttggagaattctgtcgagaagatgtatgcatctaatatcaaaaatagtgtaatacccagttggattaatagtaattaatattcgatagtgtagtactagcctaaaagacaagacgcatattgagatacgagtaatgcttctaaggagacattttgacgaataaaatggcatttatcaccaagataacttgttggccatacctattacaatagttgcagctttctagagaaaaagtttcgtatatcataaagtcaaagatacagcaaatcaaggttatcattataatgtatacggggtttacaaatgtcacaccaaaagtgctacttgcgtctcaataagcagcttgccaaagacttgttgcgtatggcttgttttatcgacttaatgagtaatgccaagttatatctgttattaaataccaaaaataagcaagaaaactaataaaatcttcaataataacattgtttgatgtttattatataaatctaatgttattaaaccatctgttaactttaataaagagctccgttaatttgacacaattgtattgtcgatgtcttcttaagtctaacaactctgccatttatcaattaatgtatgaatatttcgggcaaacaataatattaataaaaatacaatacactgtatcaatatttaaatacacattattttcttgaaccattagtttttttttcttctctttttccagtggttttactatcctcctattccatatatctctaaaattaatttgtgagcctgttagagcccacacaagtacagatcgaccattgcaacgcagccggcgagagaaacgtatatgcgcgaagttaacacatgtaaagtgaacacgcaacatgaagagagttactacaactagttaatcatattagacagagaggcag

SEQ ID NO: 6833 - DNA, 1986 bp, Diabrotica virgifera
  SmartBlast Evalue=0; Info=Tripeptidyl-peptidase 2 n=1 Tax= Camponotus floridanus RepID=E2AEX0_9HYME
gtgctggaacctacctcaagagtttaaaaactgtggctcaacactaattttaaacgactgagactgagtatgtacctttgaccgaatatatattccttttgaattattcgaaccgcattgcacttgaaacctaatatttctgtcattttctccatggaagttcataaggtaatcatacgctttttctgtctgtattagcccactcccttgagcaggtatttcaattccatctaaatgtttcgctgtattttccaatgctctgcgaacaatgtagggagaaaatggtattttttgttgtgttaatcctgacaacagaacacaaactactccagctgcatgcggtgaggccatggaagtaccattcattagttgggagtaccgtaaagtacagttcggtacggaagtgattgcaccaccaggtgcacaaacatgaactcctattcctccatcaatggttggacctctggaagaccaagtataaggagtacctggcaatttctgcctcatagcgtattctgctaacatcatatcaggtgatacataagcacctacactgataattggttcattgagcacatctgagggcgtactaattgtatttaaagctggaccatggttgccagctgatgaaacccacgtaattccgtatttgtttactatttcattgattaaatcaccgattcgtcctgcatccacccaatgtgcatgttctccgtaactcatattaataacctgtatatttagattctttgtttgctttagctcaataactttgatcatagatctaataagagctgtacctgtttccattgagcctagcctgccatctcctattgttaaagatataacttgtgcacctggggcaatgccattttcttcaggagaatctgggaaataggctgttgctattgaagctacgtgagttccatggcttgaacaaacccctactaactccaatacatctccattttcatggacatttacactaaaatttaaattatctgtctctgttaatggtgcgaattcatgagtgacactgtattcaccaagtagaggacattttgataaatcaccatcgtctgatgtatctacacaacacatccaatgttggccattatggaaaagaatgcagtcatagacaggtcctacatcattgtattttttatcaaaattaactagaatatcttgcatggtttctatattttctttttctagtttttcaacatcgatgagtgtcttattttgatgttttgcttcaaatgaagacaagtttctggaaacctcacttaatacttctctatggtgtaattcccaactctttttcttatattctgcttttacacgatcttttagtctgtcaggataaagatcgaatgcatgttttactcctattctgtatgtattatcaggatttgtccatgttgcaggaatctgtaatttttttcctgtgagtcccgtaatgaaaccatcaatcggggtaacttttgtagtggtatttacatccccacagccactacaatcgaacctttctacaatcttaactttaccatcagatgttacctttaatccaggtgctccaggatcaattcctgaatccaatattgcaattacaattcctctgccatcataattggatattttgaaagaaaagatgtcagcccagtttctttttttggtaaaagactcacagtgggaaaatcgctgctagccatttccatcatatcacttttattgatataattaaattttagttcagaaaattagtttcttgtgtgcaattaccagcagtgaaattaaatgtttccttcctacagaacaaaggggttaaaatagtatattttcactcttacctacactatcattccttgttattatagttgaatgtttaatttaaaattattataaatttgcagtttattataacctactataataacaattaaataaaaatttgtcttaaattttgcaggtcatgttaccacttat

SEQ ID NO: 6834 - DNA, 1988 bp, Diabrotica virgifera
  SmartBlast Evalue=0; Info=Glycoside hydrolase family 31 n=1 Tax= Chrysomela tremulae RepID=D3YHE2_9CUCU
tttatcatttctagaatgtcaagaatgataacataattattttgttttcccatttatctactaaagcatatttttgctgcggtactgggttaagtggacaatttagttgatataattagtagtttacctaaaatagtgatgtcgaaaggatgccataaattgtttacttttttaatattcttgacaacactacacagtataagaggaatcgtagttaaaaatggtaacatcaccttgcaactcgagccaaaatcaaatgggattagttttgctgcatacgatggcaaaataaagaagttggaaggcatcttaggccgcggtattaacttttctaacgtggactgtattggtacacaagtctgtgtaattaatgactccaattttagtgttgagcctatttcagctggatttaggctgaagtggaaaacgtttaacacacgaagagctttccaagactgttacgatcttactgaaggtgttcaatggtatggaggaccaacaatattttctctaatttggccaatacaaacgaatgaaattgatggatcttctccatacgttcttgacaatggtaaaggcatgccatacgccgaaagatactggttaaattcgaaaggctcatacattttcttagacgacgatgttccactttatgttgatcaaaataaattgagaaataatagcgtttgcttcaaatcatatatccgtgatccattccatgcgtactttaatagaacaaggaatgtacttcagtattaccttatttttaaagatgatgtaaaacaggctcatctccatgccgtaaacaaatttctaggaaaacctaaagaccatcccaatgaagctatggtagctgaacccatatggacaacttgggcaaaatataaaacgaagataaatgattctgtcgtactaaaatttgctaaagacatacggaaccatgggtatgaaaaagggcagatagaaattgatgacaattgggaaagatgttatggcgcagagcagttttcacataatttcaccaacatcaaggatacggtgaagatactaaaaagtattaattttcgtgtaacgctgtggattcatccatttgtaaatgataattgcaacaacaattctcagataggtttagagaaaggatatttcgtaattgacaaatatgggcgtcatacaggatggtggtggaatagcaacgatgcatatgttatagattttacaaacccacaagcaactgaatggtggctacaaagggttaaaaaacttcaaaaagattttggctttgacagttttaaatttgatgctggagagactgacttctgtccacagcctgctgtctataaaactgttgatcaggaactgattccaaacatcttttctggaaagtacctacgaacttgtgccacatttggaaatttgatagaagtgaggactggctggaggactcaagacctgcccatattcacgcgtatgttggataaaacatctaattgggcttatcgcaatgggttaaaaagtttggtgaccacacttatacaaatgaacatggtgggttatacaatggtgctcccggatatgataggaggtaatggatatggcgtgcaaccagacgcagaactttttgtaagatggacacaagcaaacacgtttatgccagcaatgcaatttagcttccttccttgggactttaacgaaacaaagtttgatgtgccggctatcgcgaaaagttgtgtaaaactgcataaagaatactcacatattataatcgatgcgatgaaaaagagcgtactctatggatctccggtcaatccgccaatttggtggatagatccaacagaccaaaaagctttgaagtgtgacgatgaatttttagttggtgaaaaaattttagtagcaccagtattaacacaaggggcaacagaaagggatgtatatttaccaaaaggaaagtggaaagatggtaacaacggaacttattaccaaggaccaat

SEQ ID NO: 6835 - DNA, 1985 bp, Diabrotica virgifera
cagttatggtccgccagctattggagttactgtagtgaacaattatgatccattcgcaaccacacattaccattcaatttacccaacttaccattactctacttacgatactggaagtacctcacttggtttcttcttagggtaccaattaggaagaattaatcgaccaagttattactaccacagtacaacctacgtaaacgacgaatacgttcccagatatgatcattatacagttcatcactattaccataacagtgaatcaataccaaaagtagcaccaattcaacctaatgcagttgtgatttgtccaggtgatagcaacagcttatgtcctcccggtaccatgtcactctgtacaaacaacggtgcagttatgtgcgttgttaacgctaaggatacatctccttgttctacacacaaagacgttaattgtgtcagcagtactataccatgtgaaaacaattcttcaccagaatgtaaacagaagacatcggcatctgtgtctataccatgcgtttctactgctaacataccagcaaatgttggcttcataaacaacagtgtcattgtaacagacgcaaatgactcaacagttcaatctttttgtgtgacagttttagccttaccatcaaaaaatgaaacaaatgagagcaaaaatcaatcaaaacaagatgaaaaactactggaaaacagtgtaccattccagtatacgacaaatcaaactggcgttgatattttgggttattacttagcccacaaagttcagaatctggttcaagcaactttcagttttctaaattatgatcaaaactacaattacgtagaaaagttcgaccactacgacgtgttccaatattaccacggcgctaatgtcttgccaaaagaagtagaagttaaatcagatcagttcatgaactgcgctggagatagtgctactgtctgtccccaaaatactgcatctttatgcctcaatgatggagcagttatttgtgcaagtgaaaaatcatctacagtcttcagtgatgaacttcacacaaactatctaaatggtagtataccgtgcgataaccttaaggctccattttgtgtacataacagaaacacaacagttcctatacaaattccatgcttttctactgccaaagtctacggtgatataactatagtagaaaaagtctttggaataggcaatgatactcaacgttacaaaacttttggatattccaacacaactcttaactcaacagctcagaataaaacaactgagctttgtgtaactgttttgcttttaccagcagaaaaaactattgctcctgtaccaaaaatgataaaagtaacaggagtaccccatacaggcaatcaactagacttaccaaaatatagttaccgagacttggggaacaatgaaataggactatatttacttgaaacattaccaaagctgtcttttccatcctactattttatcaacgcttatttatatgctcaaaatggcacagtacaaaagtatgatcattattcagtacaccaccaagagcatggtagggaaataatacctgctgatttagagttccaagcttttgacttgcgagaatgtgaaggagatagtggtgttatttgtcccgttaacacctcagcaatttgtctcaacgacggtggagtgatgtgtctcacagatgtgttattaacgaaatcatgtggtaaaaattctagttctacctgcgtacaatcgaattttggttgtggaaaccgtaaacattgtagaagtttgaagactatagagatcccgtgtatttcaacagcgacgatttacggagatattatggcagtagaccacaatatctacgttaatgacacaagcttagctaaacaatacaccgatattcaaatgattcctggcacaaacgtaaacaacacaccagtatatcacaaggcacagcagttttgtgtaacaatagttgctttaccagaggtcagagaat

SEQ ID NO: 6836 - DNA, 1983 bp, Diabrotica virgifera
  SmartBlast Evalue=0; Info=Glycoside hydrolase family 31 n=1 Tax= Chrysomela tremulae RepID=D3YHE2_9CUCU
catgtaaataatatatttatttatttatagttaatcagttttaacaaaataaggtagtacatcaataggcgcatcatagttggttacatttagaggaccaacgaaagtttccccactgtttccatctttccagttaccttttggtaaataaatgtttcttgaagtggctccttccactaagacaggagcaactaagacatcttccccaaggagaaactcatcataaatagtatacgaaaatgagtctgttgggtcgacccaccaaattggaggatttacgggcgttcctttatccatgcttgctttcatagcttcaataattttgtcaccgtattcctcatgaaagttggtgtactttctcactatttctgtagtatcgaatttatcactaggataatcccaaggtagaaatccaaactgtaatgctggcattaatgcattagcttgtgtccatcggattattaattcagctgttggtgcttgtctataagaattacctccaaccatatccggtaaaactaaaggatatccgttcagattcatctgtataagtgttgttacaagagattccagtccatcatccatggtccaaagagaatctttgtcaatcattctaagaaaaacagggagattctgtgtcctccatgcagatctaacttcaataagatctccaaactgcgcacaagtttcaacatattttttggtgaatatattgggaacttcttcttgatcttcgacatgatcaaactggtgtggcggcattgcgtaatctgtttctcctgcatcaaacttgaaaccatctaggccaggatcgtcagctagtgctttgattttgtcggaaaaccatttggcggcatctggatttgtaaaatctacctgatgagcattatcactttcccaccaaatagctctagtatcaccattgacatctttaacaaagtatcctttgtcaagtccctcgttagaataattctgacaatcattgttaacaaacggattaatccacagggcagttttaaagccttgggattttatggaatctattaaaccatttggatctggaaatttgtccttgttaaatacgtgggacccaaagcatacttcccagttctcatcgatttctatctgtcctcccaaaaagttatggtcgacaatacttttcacaaactcatttactttgttttgatcgacaggctgtttatatttaggccaagtggtccatattggttttcttatcatattttcatttgggtatcctgttggttttcctaggtagttgttgacggcatggaggtgagcttctttggcgtttttcttcgtaacaagatcatactttagaatgttcctctgacgattcacatagggatttatacacttagctatcagaagtagtgctccgttttcgttattattttggtcaatgaatagcggtactttatcatcaataaaaataaaggtacccttactatttaaccagtatctttcagctacagcaaaattgtctgcctttttgattacatacggatcatttccatttaatactaacttctccaacgggttctgtaggtacctttctggaccgccaaaccagtaactgtttcctgaattcagttgaaatttatccacaaactcaccatctgtataaacagaattccagacgatttggtaaccactatcgacctcatttattgatagtgaggatccgttaaaagcgcattgagtatagtggttctggcagtcacttactgtaaaatctatgccaaaaccaattgttccttgcaacgttacttcattgtcatcattaaaaacagaaatgctcaagccattagttgttggcttaagatcaatcttagcttcaccaaaactaaaaactaataaagttaaaacattaaaacatatttttagttccattatgaagtatactacacgaatctgatggctgcaaatctatttataaacacttgatttttatcgataacagca

SEQ ID NO: 6837 - DNA, 1982 bp, Diabrotica virgifera
  SmartBlast Evalue=1E-124; Info=Cysteine synthase n=1 Tax=Culex quinquefasciatus RepID=B0X072_CULQU
cttaagtagtagtagtatgcggtatgagagtcatcatcgggtttctcggctatactaaaaactaaagtaaacttaaagtacttaagtctcataacaataacaaacaaaccccccaccttgcgtttgtagttctctttagcaacttcatcatagcaattggtccggtcaatagttcatagatttgatcaagtgatagtgatatcagtttatcatatggaataaaagcccggcattttcacactcctgcacagtattagtgaatctttggtattcgtaataaccagtgtaaacgtgttgtgagtttggatagttgattgttaatttaatattcatccaccatgtctcagctaataaaagaacaagatgcaggatttctttttagatcgcctctagaagaaaaagctgttattcccgataaaatccccaagtgtccatggacgaaggatctttataaaacggaaaaatctccacacagcaaatgggattggaagccctatccatccaaagtacttccaaatatagccaaagctgtaggaaatacacctatggtaaaattaaatggtattccaaaagctgagaatttagagtgcgaaatctatggaaaatgcgaatttctaaacccagttggatcaataaaagaccgtatgctgattcgatgcattgaagacggcgaaagaagtggaatcctgaaacctggtgcaacaattattgaagtttcttctggtaacacaggcgtcgcattagcttgggcatcatcaattaaaggttacaaatgcatcgtggtattaccggacaagtattcaatggagaaggaatttctcattaaagcgtttggtggacaagtcgtaagagtaccaatgggagcaccatatacaagtgaaaatggaatgtatggaaaagctcatgctcttcataaacaaataccaaattccattctactagatcaattttccaatccgtctaatccattagcacattatgacaccaccgccgaggaaatataccaccagtgtgatggacaagttgatatgattgtaatgggatgtggcacaggaggaactctgactggtataagcagaaagtttaaagaaatttctcccaatacaataattataggtgctgatccttatgggtcacaatacgctcaaccagctgaactcaataaaactgatgtgaaggcttttgatatcgaaggtataggatatgaaattgctcctacagtatgtgatagatcgatggtcagtaaatggtacaaattccatgacaaagagtctctgaacatgtgtagaagattaataagagaagaaggattattagttggaacaagcagtggcgtaataatggcaggtgctttaaaagcaattaaagattttaacatgggaaagggcaagaaagtggtagttctacttccagacggcgccaaaaattatctgaccaaattctgctgtgatcaatggatggaacaaagaaatttattacctgctgttaacactcataatcattggtggtgggacgtaaacgttatggagctgtcatttaaaccatgtcaaactgtggaaaaatcagcatcgcccaaggatgttttagctcttatggataaacttaatgtagattatttacctgctgtaagcgaaggactgattgttggattggctacaagaagaaatactctgaatcgtatgatagcggatgagtcaccaaatgatgaaatcaataactgcttggtacggatgttttctaaactacccaaagctagttctcttggacttgcatcaagagtcttagaagtagagaattatgttgtgatcctggatagtgacagcggagttgatgaaacagtaggagtagtaacatcagatgatattcttcattacattcaaacccataaaaaagaattgattcaaaataaacttaccataccatataacggattaacatcttttaatgaactgaattttgtttttttttaatattgtgtcttc

SEQ ID NO: 6838 - DNA, 1981 bp, Diabrotica virgifera
  SmartBlast Evalue=1E-103; Info=Sodium-dependent phosphate transporter n=1 Tax=Culex quinquefasciatus RepID=B0WB17_CULQU
ttttgatcgtattttaataaaaatattttcagttagtacagttggtattttaaaaaataaaacaatatttaaaaataaaatataacaaataattttatatatctttcaaattttattattttgctggtaatattgtttgctactgagttaccagtatgcttctataaactttttatctcgtgcaaagaaaaattaaaatatatcacagatacacttttagtaccattgaagtgaactaaagatgttcaatcgttaattttgattgttcagactttttctttatttttttcttctttttcgttgttctgctctttgtcattccaaggttgaacttcggctgacccaaagatgataaaaataatggcggctgcagtgtagacacaggctgctacgataaaaattatcctccaaagcgatttatcagtctcaggaacaaccacaaattgaacagctaggggagctagaattgaacatatattggaagatccattgccaatacccatgagtactcctgagtacttgggtgccaaatcaacaggattaatttggaatcctacaaaagctgcagaatttatacctacagcaatgaccaacatgataatgctgagagtactctgggagtctggaagaaaacttagaactactaatgcaatcgcaggaccaagtattccaactgtgttaaagaattttcgtgcaaatactcttgaaaagtatcttctattaattaagaaatctgagatagctccaaatacaaaacttaataagaagctagttgcatatggtgcagctgataaaagactgttcgacttcatttcaaaatgcataatattgctcaagtagtttggtatctctgtcagtagtgtcgagtaaccccaattttggccaaacatagtaataacaaaagcccatacaggtacggaggtaaatatatccttccaaggtgtaggcgcaaccacttgcgtcttaacactaagactattttctatataatctttttctgctttggatatattcggatgtaaggcaggggtattcgctgcaaggaatgcccacggtagcatccaaacataacccagccctccaaatatgtagaatgcatacggccaccctgcccaagaagatgctattgctccgctagcaattagtgacacaattgtaccgaatgatggtcctgcaaaagctatcatcgaaagaaacgctctctcttccaatggggcccattttcccaaaatattatgcaccgaagggaaaaagaaaccctgtgataatccttgtaccacacgacatgctataactccagaagatcccagccattcagccatgaatgggataatgaaacaagctgttgaattgacggccattgaaacgaaagccaaccatttagtaccataagtttgaccaagttgtccagcaaatatttgcaaacaaatgtagccccagaaaaacgaagaaagaactacacttttattttccattcgtaccacggtacatcaggattttctgttgtggttccattagtcatcgcaacgatgcctaccgataaatttactctcatggcgtaaccaatggcaagcattaaaaataataatcctatttgtatatgtctatatccgaatcctggaactttatttgtgctagtagcattttctgtattttcatcttcaggaattattttggcactactattccaatattcggattcgtttacttgatcatctccaactttgtgctgttgaccttttgtttcggggtacttagtttctaccatcttgttgccacgaaagactactcacaactaggagatgtgcgaattaggttcgttaattggctatttgaacattcaaagatgcacttatcctaaactggaacaatacacatatttgtgtaaaaaaataacatattaacaccgatgatatttttgtagtcgaacgcaattatgcagaacttatcttaaacttgacacatcatactcatatcacac

SEQ ID NO: 6839 - DNA, 1982 bp, Diabrotica virgifera
  SmartBlast Evalue=0; Info=Protein Malvolio n=1 Tax=Harpegnathos saltator RepID=E2C3I4_9HYME
cttaaataaatgtatttatcttcctacgtgatagtttctactcttttatatggtaccataatgtccagaatcggaaaaactggcataaccgatgggactaatatccaaagtggcgtctacggggcccatgatatatttgttcacgaagttataccttaataagttagtgcttcccatagatatgctcatgtgtatcacgagataaaaacagaacaacaaataaaagatgccaacgattacgactacgaccaaaaggggccaggttagttgcaattcatccactgtgtttataacgaagtacgtgtttatcataattactacgatgctcagcagaatggcagctactttgttcggaattccatttacgaattctcccataatctgtggattgctggtgaacgcaatggttgggatggtggcgaaaggtaactgaagactcatgatggcgtttagtatatcgttcatgtttgtcaaatcgttaatattactgaaaaatgccaaacagaatgttggaataatggctatggtacgagtaaacagaaccctcttccatctagcccattgtaggtttaaaaagccttccatggcaaactgaccggcgtatgtacctgtcattgtggagctctgtcctgcagctaggattcctacagcccatatatacatggctagaacgccgtacatacaacccaagaatattccaccgcgatatagatctgcgtctacatactcatcgtttgctggaaatacagttgaattgagtgtcggatgattggcacaaaggtcacgcacttgctgattcgttgttttgaacaatccatgagcaaaaacggctacgacgaatacattgataacgaaactaacaagcaatgctatacatgtttctattaagtaatatttattagcgtctctaattttctccgattttgttcgatcgatggctcgcgacttaacaagtgctgaatgaaggtagaggttgtggggcattataacagcacctataattccaacaccttgtaacaatgccctactatcacagtctttacaccagggtacaaacataccctctaaaacacccacggcgttgggttttgaggttgcgtattcgaatccaaaggtaactcccattattgttattaaaaggccaaagaacgattccaactttctcaggccgtacttatcgaggaacaaaaatgtaaatgtatctattattgtaatgagaactcctccccaaattggtattactctatttgaaagaaggtatatagccactgccgtaccaatcacttcctgcatatcactacctataatcgctatctctatcattatccacaatatcagtcgcggtactttcctatattgtctataacacatctctgctaaatgtagacccgtcacaacgcccagtctggccgacaatcgctgcattaaaagtcctaaaagagttgcactaagaagtacccatagtaacctatattgggcgacggttccactttgtagatcgctttcgatattgccgggatctaagtaggcgatggacatcagaaaccctggtcctgtgaacgcccataattttctaaagctgaaccccgtcccttcgacttctggtatcctaattctttggtctgcaaaatatgtctgtttagaagccaactgggtggattcgtttggcctcgagtttgtttttgggctataagttactgaagatgtacctgaatcttgttcttgagctgcatcaccgtctccgccatccggcgttatatttgatttgatggccattttagttcgttaagtagttatatcaccaaaatatacgctaaaatcactggcaattataagggtaaacacgtttattttcgatttcagcgtctcacttatatggttaattcatttctgttaacaacactcgtttcaaacaccgaaatttaagaaaaataaaagttcatgtggctatctgattataattaacccccctcatttgacag

SEQ ID NO: 6840 - DNA, 1983 bp, Diabrotica virgifera
  SmartBlast Evalue=6E-35; Info=NAD-dependent aldehyde dehydrogenase protein n=1 Tax=Herbaspirillum seropedicae SmR1 RepID=D8J0Y4_HERSS
cctaaactttcttaaaaatggaacctgccaaagttaagaacaagattggtgacatttttaataatatggcttatggacctaactttgaagatacaaaacttgcaattgaatggttaaagactaaaaaatcttcctttttcgcatatataaaaaaaccaacagaggaattgaatgggacaccattacctttattaagtacaattaatcaagaacaactttgtacaataaatgtgccagatattgatactgttaaaaaaattttggaacaagaagaaaaatcatggaaaggggtaaatccattggagaaaataaaaataatcaacaaaattggattagggattgaaaaaaaggccgaactttttgcccagttggagatattaactagaggaattctatcaaaacataccaaaagtaaagctgtaaccctgttagctcaatactttcaatattattcagcatttgcacttcgctgtgaagcagaatgtaaagagcgtggtattgcagttggagtcatatcaaatgaaaattatttagctcatttaggtctattcgtcgcccctgctttggctgctggacataatgttgttttacaaattggatctctattagcacctgctgcttttttgcttcaagagattgcattatcagttggcctaccagagggtactttgaaaatcattccgtccgacgatggagaacttgtaccatatttcaccatggataatgttaaagttatttcattatttgtggatttaaataatgataaatatcgtggatgtcataatcataacaaacatctaattgtcttatcaacatataagacacccgctgtaatttttgatagtgctgatttagatgcagcatctgagggtataatagattcatcgtggagttaccagagtatgttgccatggtcaacgaatactatcttagtacaagaaaatatttttccaacatttctagccaaactaaaatcaaaacttaaaacattagaagtatctactgcagataacaagtcagcacgtatatctatcaatttaaataatacgtcacagttgaatgacttgaataatagtataaaacaagcaagacttcaaggaattgaagtttttcaatccacagataagtctgacgtctggaatccaactgtctttgtaggaggcaaaattaaccataatgctctgggttctaaagacggccaatctaatgttatcactgtcgtggcatttaggtctattgacgaggccgttagtttagcgaataattccaaccaaggattatgggcttcagtttggtctgataatgcaaacctcattaatgaagtaacaagaaaactaaaggttagcaatatatctgtaaatggtagctatgaactttcaccagaagttgttatatctcctactaaggacagcggaatgggattcttcggaggaagagaaggtttcatggagtatttatcaggaccaattgtgccgacatgttgtactaaattagaacgtagcgactcagttgctaatgttgattcaattgttaatactgctaaaaaagcacaagagagttggcaaaagataccaagtattcagaaacaaaaaatactacaagattttgctgaaaatttatctacgttaaaaagtagcgaatgggtaaatgatttactgaaatgcgtttataaatcaatccataattcatcaagcaacaatgtcacatctactatttgtggatataacttaacttcaattagagaaccccgaggacttattgttatcgacgtttgtcaatgtaaaaatgccgaactaattatggcttccatatatgaagggaatgcattaatcattttacatgatgatagcagcgattcagaaataaaactacttagcagcaaactgccaaatggagtcctcaacataataccacatggtacaaatatcttggaaaaattgtcaaaaaatgaaaaaataaattgttattttggagacgattgtc

SEQ ID NO: 6841 - DNA, 1981 bp, Diabrotica virgifera
  SmartBlast Evalue=1E-64; Info="Nhl repeat-containing protein, putative n=1 Tax=Ixodes scapularis RepID=B7P1F2_IXOSC"
gatttagtattttatatgttagttttggttacttttaccattattactgttacgaagtttattttaagggaagaatgagtaattttaagaaagttgtaaagagagcagaaagttcaagagtgcagaaagggaattccagagcagccagacctaacagcttgataagtgaaaatagaaatgcagggataaaggacggctctttggcagtactagaagaattggtacaatgtggaatttgcttggagaaaatgaaggagcctcgcatgcttacatgccaacatacattttgcaaatcgtgtctaaaaaatctggtcacagcaaaaaatcttgttttaaaaagtggtccaagttcaaaagtaactctttccagcgaattaaaaaatgcaaaatgcccagtttgccaaactgaaatagtattgcgtaatggtttggaatctctagaggagttaccaaaaaattttcacatagaaacgttgttgaagttattggaaggtgacccaactgttcctactcccgtcgtaaaggctcccgctgattacagatgtgttaagtgtcaaactatatgtgaagagcaggcgcatgtctgtcaacactgcatgcaggtatattgttctatatgttggatagatcacatggcagaattagactcaaacttatctttgttaatcaaacaagtagaggaatccagagatagattaaatcacaaagcacaaaatttttctggccgatgtgatcaacttgaagaaacaattaaaaagagtatcgagaaaaaaattcaaaaaattaagaaaatggaacatgatgtcttacttgatgtaacttctatcaaagaacaaaattcagttgtaaaagatatgataaacaacagaatcgacctagttaaagaaaaagttgaaggtattattaacgacaataagcacagcaaaaataagataagtaactatatgaatattcatcgagaaacggcaaaactcttcgaagaaatttaccaatttggcgaagctcgcataatgtatgatgctgatagaattcgtattgatcaggtcaaagagggagtctataacgacgtccacgatgaacaagtaaaatctgaaaaagtagaaaatccatttgaaaatgtagcttcaatggtaaaacattataaatccagatcttttaaagcaagacttgtatggaagaaatgtccaagacctgggggtgtaggcatacctccttgggataataacaaaatctacgttgcagctactgacacccacaatatcctaattctagatcgctccaaatttaagctccttggacgaatcaacaatccagaaatgttatgtccaatgaatctagcgttttcgagaaagtatgacgaaatttatgtgacagacaaatggaagcactgtgttcatgttttttccaatgatggagtatacatgaaaaactttagtgaacttcgacttaaaggtcctgatggaatagctattgggcaaaatgaggaagttattgtttgcgatactggcaataatagagttatagctattaatatcgaaactggagatatactttatactttgggtcaaggagaactccacattcccactagcgtagctattcatggagaaaaaatcatagtggctgatacaggcaataacagaataaaaattttcaacaaggatggattgcttttgaacgagattggagcgtttgggaagaataagggggagtttagatcggcagaagttgtagctgtagatagtttgggctttatattagttggagatgcaggaaatgcacgcatccaagtctttcagcccgacgggaagttggtaaaaatatttggaagtaaagaaggatttgcttggatatctggtatacatattactcaacaacttgatattatttgtacagataataaaaatagatgtctaacaatattttaaataattttgtatatataaaggtacctataacatgaaataaaaaagtagtaagt

SEQ ID NO: 6842 - DNA, 1980 bp, Diabrotica virgifera
  SmartBlast Evalue=1E-130; Info=Plexin domain-containing protein 2 n=1 Tax=Harpegnathos saltator RepID=E2BAU8_9HYME
agaaacttgacagaggttagatgctggtgattttgttagttatctcgcgtcgtgtttattataatttaagtctttgaaagcgcgtggtgtggaataaacatggcgaagtggttctttacatgccaacagacattaattattgtgtgtttgtgtttaatctttccggcaccggtgattttaggcgaaatagaattagatgatagactagtatacgaggtagttggccgtaatatcattaaaagagataccaataacgccacaatggttaaaccatcggaagtgactggtagttccgaaaaaccaacgacgtcaccaccaaaaaaggtggtgagcataccagtgaaaccagcgtttgagccagtcgtaaaaaactttactaaaaacctcggcgagaacggccacggcatcaggctgaacataacctctaccacgcggccacctctagtagatccaattatcaagccaaacgaaaaatctggtaccaccgtaagcgtaaacaagagcattgtaacagacgctcataacgattcagatgatcctgacgctttcgctgtcgccaacccgagtgatttggatactgaagagggaggtaaaaagttcaatgagtcgctatcgaagcataacgtgactagttccaaaacggacccgaatttgttctacaatacatcaatctatgacgacccgaatattgggcatttctattgggtggacatggacaatcgtaccgatgtcaaagtcaacgaacttctgtctcagtctcatcgaagagcggctaccgtaaagttgtcatttaacttcccattctacggccacttgatcaagaacgtgaccatagcaacgggaggtttcctctacactggcgactacgttcattcctggctagcagctacccaatatatagcacctttgatggcgaacttcgacaccagcttatccaatgaaagtttcataaaatacgtcgacaacggcaccgcctttaccgtcgaatgggaaaaggtgacgttgcaggataaaccagacgatggagaatttaccttccaggttactttgttcaataacggagatatagtgttcgtctataagcatgtacccctgctcgtcgatcagattcaagagttgcatcatcctgttaaagttggactctctgatgcctacattatggaccagactgtattcttggttcgaagaaaaacaatatacgaatacgatagagttcacttcaacaagacgtacatcaaaaactggacaactattgtgttgagagctctgcctacatgtctggatgcgactgattgtaatacatgtctgaccaggaagttaaattttaagtgcttctggtgtcccgctatgtccaagtgttcccaaggctacgacaggcaccgccagaattggttagctaacgcatgcgacaaaaacagctttaacaacgtctctgtctgctcagcggtatatcaaaccgataataccgcctacgtcttcgatcataatgatgcagaccagttacctccgaataaaatgtcgttggcccataaaatggtaaacccgaatcctccaaatgaggtaggaatgtccggtgttgtagctatactgttcttggttgcaatggtatctggattgtcattttgggtgttctacgcttataggaatccacacacgtttagtggacaaattttaattagataccgacccagccaatggagatggagaagaggcgaagccagatacacggcagctacgattcatatgtgatttaaccaattttaattcttaggcattttttaacgtatcagacaattgaaaggaaaggcaactgagcgttctctaaagccgtagtaaaacgatgaactgatagttaaccaaattttagagaacaacatttacagtgttgtgcaacaagattttctgtgataaataaaaggatggaattgacgaggctcttgaagtacaataaataattgattttgcgattaaaatatatta

SEQ ID NO: 6843 - DNA, 1976 bp, Diabrotica virgifera
  SmartBlast Evalue=1E-131; Info="Ubiquilin 1,2 n=1 Tax=Aedes aegypti RepID=Q173F1_AEDAE"
aatactgaacttatcccattgaagataactgcccttgtgaaagtaacttttcgatagctgcgtttatatctccaaagcaggaaatcaatgcttgcagatttatttctcgattaaggaaacccatcgcagccaactgttctaactgagcttgataccgctgctcgggtggcaatgtgttgtttgtgttggctgccatactgcctaccattctactcatgaattctgagaaagcatctctaggggcgccagcaggaggattttgtgtggaagtttctgtttgcgaagcaggagtacctgtattaaggggttgaggtgctggtgggggaaatgtgtgtattaaagtgggagcagcttgtcttaagctctccatgccttgttgaatttgcatgatagcgtctaatgcttgggtgtttgtcataaggttttgtatttcaggattttgcatctgctggaccaattgtggcatcatagctctcatttgttcctgtaacgtggggttgtctgaaatcagaggattctgagctagaagagcatttgctacacttggatcggcgctaagagcttctaatactgactgggtatatggagcttgaagcatattttgtataatagtaggattctctgacatttgttggagcaaactggctaagggaggtggatttaaaacaccacgacctggattggtttgtgctccagcttgatactgagccgctaaggacgacagcattggttcttgaagattttgaaacaagtttggaacaggattactagtagggatgggagagctaggatccaggcccatggcacgctcatgacttctcattaattcttgcagcattgaaggatttcttgccagttccgctgtttgttgcaatagttctggattattgagagtttggtgtatttctgggtacctttgcaccagattttgcatctggggatttctcatcaaaagatttcgcataacttccggattactcatcaactgggttaccatggggttgtctagaagatttcttaacatgttagggttggaaagcaattcactctgcatctgattctgcagctccatgaatgtaggggaactcaatcctaactggttaagtccagccaaacctcctaatgatcccagttgaaatggagtagctcctatgtcagctggtcgtctattagcttgttcagataatctgggtgcagcacgtatgaccaaatgaatcgtcaagccgtcttttatgttgtgttgtagtagatgatcctcatcctgcattatttttccagcgaaaattagacataattgatctggttcagcattgaacttaggagctatcacagcttttaaatctttaactccagcattctcctctacttcaaacgtttctctttcttgtggagtttttatgtgaatacttatcatttttgcaggaggcttttctggaactacttcttctggaggtttttcttgtacgatctcttcaggtgcaacagctacctgctcagtttcacttattggcacttccggtactatctgttgttcaactggaggctgttctggttgaacagattgttcctgtacaggaagttgaacaggaagttccgaaggaagctgaacaggaagttctgaagaaagttctggcaccagttccaagtttttaatgacagcttccgagtctgttggtggtggtggaagtggtagttcaggagatggttcttcgacttccatgtgcattggagggacttggggtgtgtttagagaaacgtcaggtatagtttcggaattattgggcatgtcgtccgccattgtgacaatcaaataaaaattttagtctactttaaattctgctctgtcactgtcatccacaatgtccctgtagaagtttaactcggcacttaaaatgcagaattacagaaataaattttgttgaactataaaaaatcacaatggcgtcagaaagaagctgatcagaaatgttttaccc

SEQ ID NO: 6844 - DNA, 1975 bp, Diabrotica virgifera
ctctgatgtgattggtagtgtaagtcagaaatgttccaggtcgaaagttcattttgatttcaatttcaaactaaacagaattaaccgtcttataatcagaaaggttttgtctttacaagttggtggacgtaaaaattcaaggcggttaaacgttataatttgcataaaaatatagtgattcaagtttcaagtattgttatactaatatagttccttggcgttggcgtgtgttacattttagtccactctcccttttgtagaagaaatctagacggttgtgagtcatccggcattcagacaatagctaaaggccacattgagatttttttaaaaatcgacaagaacatatattaagaatgacttccacaagttttaatattggtttagctgaagctaaaaattcgagccgggttcttaaaccaccaggtggtggacacaccgatatttttggcattactggaggcagtgaaataactacaccaagcaaaaagaaaaatgtacctccaacgacaatcagtagctgctttttccaggaggatgaaaaacccagagctatagatcaacttgataatctagacaatgaatctaatggccagacaaatggcaatggaaatataattgatgaaaatacagcacctgcccaggaaattaaagaagatgaaaagaaaaatgaagcagagcctccaagaagagtaagagttcctccaggtggcttttcttctggtttgtggtaaattttctcagtatgtatcatatattgtattcttctatttttaaacgttttaactaggatatagatattaacagaggcagtttatacctattcatcttcaatgcttggggactatcttattccagattattcaaattaagtacactttttcataaatttttaatgagtatgctatgataattatatattacagtggaacctcaattatccgtcagggcaccggaccaagggtatgacggataatcgaaaagacagttaacagaacattaaaaaaattgaaaattgatagtacaactctcaaattgtatttacatgctttgttttataagataagaggaatttttgttcatacaaacgaatcaatttggtttaaaatattctgaaatctttgtttgttttactgatgcttcacatttttcttaatccgtgtaagatcatgcaatctactttattggcttcttgtcaagaataccactcgatgaattgttgcatgtgcaatgcagcttctttacccaaatcttggtcagttcaatcagttgcaataacatcaacatcgtcaccattaaattccgagtctgtgtcagcttgtgaatctgtttcgtccgcctcttttgccatttcaattatttcatcatctgtcagccatcgtccttgtcacaaattaacgatttgtttatgtcctcttagtcaacaaaaaaaaccagttgattcagccctaacttcatttgttagctcaatgctcaaacaaaatgaattgatgacccaatttttgcttatgtagtcaatacaatttacgtacagaccctgacggttaacagaggtgactgttaatagagagacggataatcgaggttccactgtatatggtatatatatggatgagtactgaacctatagtggaatgtgaaagcaaatatgtggatacaaagataccgaattaaataaatgtaagtatttatccatttatgtaggatattaaattaagactgtttttcgccaaatgtatgttttgtgataaagtcaactgaattttgaatctgttcacaagcttaacaatgctctgaaccaaatatttcaatttaatgataattataaaatttttaacagcaatttttcattatgtattcttgtaataattttctgttttgaatattaaaaaatatttttgtaataggaactgtgccattgtttaacaaacctgaacataaaaaaaatacctttgaaatgaattgacctatacta

SEQ ID NO: 6845 - DNA, 1973 bp, Diabrotica virgifera
  SmartBlast Evalue=1E-113; Info=Cortactin n=1 Tax=Aedes aegypti RepID=Q16NH5_AEDAE
ttaaacttaatatctttataacatataaaaatcttctggataaaataaagattaaaaatgaagataattacaatgtatacaacggattgatattccgaatagttcctggaaaatatacatcctatatcctaccgcatcttttaactggaagcaaataagtacgtaggccacttaaaataccaaatcctattcatcacactgtacgtagtttgcagggaatagcccgtatctatttttgcacagtcctctccaccatcctgcatcaatcttgtcaatgtgcgtaataacatcgtcaggatcgaatgatatttcgtcttctgcggcagcttgatagtcgtacagggccacagcagtaataccagtatcaacaatttcctcttgatactcttcttcagtctcttgcggtgttgcagcaggttctggttctgtaggagtcatttcttcagctggagcagtactggcactaggtttgcccctttttatcgttgacacatcaaaattttcgtatatatcatcagagtccgaatcatctggcttttgttgctgtaattgtcttaataactccaattcttcttgcatcatactttgttgtttttcattttcagtctcttcattctgagcaaaattcattttggcctgatccaagcgtttcggctccacagtcatcttctcctcgggctcgctattttggttttgctgtgttaaaaacgcagttttcgattgatctaacttcttcggtggtgcctccatggtggttgtgtttccgttctccttttctttatcttcgcgaatggtttgagtcaaaaacgctgttttagagtggtcgagttgtttgggagagacgactttttctggtgacgaaggaactggaggttccttcttgacattagcgaataaagcggctttagcgtgaacgtttttccggggggcggtagaaggtcctgttgtttcgggcttgctttgttgtgccatagtctcaaacttagctcttagatctgaaggtttagcaccacctatatcaggtttgactttagtataattggttcctacttttgcgggggggtcgaaattggaagcagacttatcgaaacggtcagtttgcacaccaaatttgcctccaaagcctttcttgtggtccaactgactttcgtgcttttgtggactctcgtggtggtcccatcccactgccgatttgtcttgtctatctgcctgtactccaaacttgcctccaaaaccggttttgtaatctttttgcgattcatgtttttctactttttcaacatggtcccaaccaacggcagacttatcctgtctatcactttgtacaccaaatttccctccaaatccagacacgtaatctttctgcgaggcgtgtttttctattttctccttatgatcccacgttactgcactcttatctattctatcggattgtattccaaacttcccaccaaatcctgtagaataatccttttgggaagcgtgtttttctactttaccaacataatcgtggcctacagcgttttggtccattctatctttttcaattccaaatttacctccatacccgtatgagggattgtgctctccctcttccaattccttcttcttctttttcgcatcggattcttcagtttctttccttagtttatccatatctatggccccagccgtcctccctgagccctccaccgtcgttgagccccatctttgctgttgttcgtccacatcattaacaaaatcaggatcagtttcccattcatcgtcctcattattgtcgttactgatgtttatttgatgacctgcggcggctttccacattgtaatttgagaaaaatttatttataggaacaaaattatctacaattgttacttatcagataaaattaatcaacatttactactatttaaactacgtgaactgtcgatttttgattgtaacttcattatctagattctagataaaggccaac

SEQ ID NO: 6846 - DNA, 1971 bp, Diabrotica virgifera
  SmartBlast Evalue=8E-73; Info=Serine-arginine protein 55 n=1 Tax=Harpegnathos saltator RepID=E2C8V1_9HYME
gggcgccaaagctacaagaattgtcagttgtcattctcgcgtccttttccccaagagatcgtgacgaaaataactgtttgttgaatttctccaattatttgtgtaattttgccattaatcgcgttaaaatggcaacccgagtgtttgtgggtggtcttacttacaaaattcgcgaacgtgacttagaaaagttcttcagaaagtatggaagaatcaaggaggtttccatgaagaatggttatgcatttgtggaattcgacgatcacagagacgccgacgacgcttgctatgagctaaacggtaaggacttaatgggggaaagaattactgtagaaagagcccgtggtacgccccgcggaagtgatcaatggcggggaagcggtcgagatagaggttattcaggttatagcggtccacgcggtagaaacgataattctagagctcgtgacaaatatgggcccccgacgcgtacagaatacagagttattgttgaaaacttgtctagccgttgtagctggcaagatttgaaggattacatgcgtaaagccggtgaggtaacctttgctgatgctcataaactagttccaaacgagggagtcgtcgaatttgtttcatacagcgatatgaaaaatgctattgaaaagcttgatgatactgaaattaacggacgcagaattagagttttcgaagacagaagaggtggacgaaaaaacaacagatctgtaagtcgcagccgatcacgatcaaggcgtcgttccaagtcaagaagtgccagccgtaataagagccattctaagtcaagatctagatcacattccaaagataataagaggaggtcaaattctagatctgaagacagaatttaaagaagtcgttccattgattttcacaatgtatgttgtgtaaacagtacctttaagtttaataacataatctaacttgtatcatggtttatcataatatgtttgatattgtgtgaacattcttttattttcctaaacttttgttatctttgtaggtgtctttattaaactggaataattaactttgcctttatttaaatgtacagggaatatagtaccacgattagatctcattttcaatttgatttattttaatcataattaaaattgtttattttggtattttcaaatactattcaaaactacattatttggtaaaagtttatcccaaatagaaaatcatttcaaaacatttttgtaatcagtttgcttctaaattctaacatttaatctttcattaataaatttacagcatgaccgaattcactttgtattttagacttgaatgtgcactggtgttgatgtttggtttttccaaatttctgaattttattttggtaaacgtctctccaagtaaaatacctgtacggtaccaaaataaaattcagaaaatgtgtaaaaaccaaacatcaaccacagtgctcattggagtctcaaatacaaagtgaatttctttgtgctgtatatcagctcataaagagttctgcattttccgtggaattgtttttatgcacatagtcatttatttatttttactattgactagcttttactggatattgtatttgatcattattctgaaatttcacttttttcattttttgttttgctaaaatttgccataatccctgaatatatttttgtgagatattaactactttctaacaaactaacttccatgtttaaaataataaaaaaattatttgttcacacattcaacttgtaggtttgatactttattttactgtaagagtcttatttgtagattttccatacattttttttaaatattaactctgattgtaagattatgcttgaaataaattacctaagtataaagacaaaagagttttctcaaaattatgtacactcttttgagtagctaagtgggttttggtattgtaatgttttcaatgtattattttttattttaaagtaaaactataat

SEQ ID NO: 6847 - DNA, 1973 bp, Diabrotica virgifera
  SmartBlast Evalue=0; Info=Phosphoglucomutase n=2 Tax=Aedes aegypti RepID=Q17L34_AEDAE
tataaattggaaacagtttaatacttaggtgattaataatcagttagcaactgcttggtagctgttaagtagccaaaaatgtgtgacatcgacacaggttgtgctgccttggaccaaaaggtagctgaatggttggccctggacaaaaatgaaacaacttctaacgctatgcgaactctgctacatgaaaagaaattccaggaaataaataaaattctcaccaaaagacttggttttggtaccgctggtttaagaggaaaaatgggtgtaggatacgcttgcatgaacgatctagtcatcatccaaactgcgcagggattttttaattatttagtgaagcttgatgagaagttattaaagtcaaatgggattgttattggttatgacggaagacataatagcagaagatgggcggagctaacagcctcagtatttcttcacgctggatatccagtgaaattgttcagcacgatatgtcctactccattcattccatatgctattagacaatttggttgcgctagcggcgtgatggtgacagcatctcacaatccaaaggaagataacggttacaaagtgtatggttcaaacggcgcgcaaatagtctcccccgtggacgaacacatccaaaattcaattttacagaatctacaacccttggaaagctcttgggacacctcgataataagcagcagtcctctaatatcggaccccagaagcgacgtattttgccgttacatgaacgtaatcgacagggacaattcggaagaatgtaaggagttgaatagaaaaatgaatttgacgtttacgtacacaccgatgcatggggtggcgtacgagtatattaaaaaagtgtttgaaattgtaaatgccaagtttgtggtggttcccgaacagagagatcctcatccggattttcctaccgttaagtttccaaatcctgaggaagggaaaagtagtttggatttatcgttcaaatgtgctgatgaaaacaatagttcaataattctagcaaatgatccagatgctgatagactagctatggcagaaaaaagtcccaaaacaggcgaatggagaatatttaacggcaacgagacgggagccctcattggctggtggatgttaactacgtttaaaaaaagaaacccttcatttcccctcagtaaggtgtacatgctttcaagcaccgtcagttcgatgattctcaacacaatgagcaaaaaagaaggctttaaatttgtagacactctcactggatttaagtggttaggaaataaagctctagaattagaaaaagaaggtaataaggtaattttcgctttcgaagaagccattggttttatgtgtagcaccgaagtactcgacaaagatggagtatctgcagctgcccaacttgcttcgatggtttcgtatgtatatagtcaaaagaaaacagtagctgatcaactaaatgagatttatgacacttatggactgcatatttctttgaattcatattatatttgcactgaaccgccaattattaaagagatattcacacagataagaactaaaagaggagtaaatacctacccagaatctattttaaatggaaaatacaagatcacatccgtcagagacttaacaaccggatatgataataatcagccagataataaagcagttttaccagtttctgcagataccgagatgatcacattctattttgaaaacggcttagtatgcactttaagaaccagtggcaccgaacctaagattaagtactatacagagctatgtgcaagtcctgaaattagagacagaagtcagcttacgagtcttttaaaggaaatggttgatgctatatgcgaagaaatgttccagcctacgaagtataatcttaaacctcaaggggcttaataagtacaaattgggctctcccttgaatatgatatgtgtacacaagataggatgcaataaacaattcaccaagc

SEQ ID NO: 6848 - DNA, 1971 bp, Diabrotica virgifera
  SmartBlast Evalue=0; Info="Aldehyde dehydrogenase, mitochondrial n=1 Tax=Camponotus floridanus RepID=E2AFW0_9HYME"
aacattcgcggcaagtcgcattccgctggtggataggtattaaggtatttggtattttagtttgttgtgaaactctgtgggaggttaacgttaaataaaaacgactgaaccggtaaaacgtaaaaattaaaaatgttgcgagccattagaaatacgattaacgttgtacaaaaatgtaattacagtgcatatgctctacctaaacctcaaccaaacccaaatgtcctgtattctgggattttcatcaataacgaatggcacaaatccaaatctggaaaaaccttcgagagcataaatccctcgacggggcaggtaattacggaaattcaacagggatccaagcaagacgtcgatttggcggtggaagctgccaatgaagccttcagattcggctcgacttggagaacaaccgatgcatcggaaagaggacgtttgttgaataaattggcggatcttatggaaagggatggcgcttatttggcaagtttggagacattggacaatggcaaaccattcacacaagcttgggctgatgtagttggcagtctcaaagtgattcgctacatggccggttatgccgataaagtttgtggcaaatacatccccatggacggaaaatacatgtgttacacccgccacgaacccgtaggagtttgcggacaaatcatcccgtggaacttcccgcttatgatgatggcgtggaaaattggacccgccttgagtatgggaaacacagtcgttctgaagcctgccgaacagacgcctttgtcgtgtttgtacgttgctgaattggccaaggaagctgaaattcctccaggtgttttgaacatcgttcccggatttggagatgctggacaagctttggtcgagaatccaaacgttgataaaatcgccttcactggatcaacggaggttggaaagctgattcaggccaatgctggaaaaaacaacttgaagagaacaactctagaattggggggcaaaagccccaatatcattttagccgatgccgacatcgaacacgctgtcgaacattctcaccaaggagtcttctacaaccagggccaggtttgctgtgctgggaccagatgtttcatcgatgacaaaatttatgacgaatttgtcgagagatctgttgaaagggccaagaaacgtgttgtaggcgatccattcgacttaaagactgaacaaggaccccaagttgacgagacacaatttaacaaaattttgggattaattaaagaaggccaaaatcagggcgccaagttggtacatggtggtgaaaggcatggagacaagggatactttattcaaccaactgtgtttgctgatgtacaagacgaccatgtcattgccaaggaagagatctttggacctgtacaacaacttctccgatttaaagacctggacgaattgatcgaaagagctaacaggacaaactatggtctagcttctgccattttctcgaatgatgtcaacaaaattaactacatttctcaaggtttgaaagctggcaccgtatgggtcaactgctacaacgttttctctccccaagttccattcggtggtttcaaagattctggctatggtagagaattgggagaatacggattgcaacaatacacagaggtcaaggctattattaccgctctccccgccaaaaactcgtaaatttcatttttgaagtttatctattgtaaatgattttcattttctagattatagttttctaatttacatttagaacgtacaggaaaagtgatttgtgcacaattgttcacgcacaaaacggttctaaatttataactctaatttatgaaatgttttgaatcaaaattaatcttgttcgaaagattatttttggttttcagctgacgttattgttcgaacatttgtatttaagttagtattaggtctattggtgcttaccaatgtatgttttatattgaataatatatattttttcatttg

SEQ ID NO: 6849 - DNA, 1967 bp, Diabrotica virgifera
  SmartBlast Evalue=1E-88; Info=Monocarboxylate transporter n=1 Tax=Culex quinquefasciatus RepID=B0XG66_CULQU
aattgtcggtattgacgttaatgtctttgcaaatatcttatgtttggtctcaagtaaattaaataatatagaataagaagattcccgttgtttggaatgtgattaggattgaaaagaactaactttgtacttataatatcacctcttaagataagaactttaattgtttgttgtattaaacgaccctgttcactttgtgctattgttcgatagtgtaatgttatttcaatagctgcggaaaatggccaaagcaaaaatttccaagaaagaagaggctcgccttagggaggaactccaaacagctgagaatcaaaattcagttccagcacctccagatggtggttatggatgggttattgtattcgcctcatttattagtaatatggtagtagatggtattggattatcttttgggcttattttaccatatttagttgaagaatacggtacaacaaaaggggttgcagcatgggttgggtcagttatggtaggtttccagatgggtgctggaccactcgttagtgccgtggcaaataaattcagttgtaggacagccagtatattcggctgccttttagcctcatcatgtatggctctttccactttttgtccatctataccaataatgatggtaatttatggtgtcttgggtggtactggatatagttttatatatttaccagcagtggtgatggttggatattatttcgagtcaaaacgatctttggcaactggtatagcagtttgtggaacaggtgtgggagcattcgcttttgctcctttggtaaattttttggttaactcatatggatggaaaaaaactaacttatttctggcaggaattacattggcatgtgcactttttggggcattaatgaaacctttaacgtacgaagaagtgacagaagaagtcgttcagcaggtccctgcaaaaccaggtgttatgagaacccgaacgagtgagggaaacatctcaactccgggtgtatataactctacactttcaatgaccaaaagaaaaggaagtcttcaacctatggccagaaaagatgttttatattcaggatccattcagaatctcaaagaatttcaatcgagaagttcacttgctgagtatagaaatagcgtccacagtatccaaaaacctaaaaatctcaaacgtgtagaaaagagtggctgcaacctttcggagtttttgggagatttggtggatatgagcctgcttagaagtccggttttcttggtattggcctttgcttcggtattcgctatgatatctttttatataccatttgtatacttagtagaactagctaagtcaaagggaatcgaagaatctcagggatccatattaatttccataattggagtaactaatattgttagtcgtttagctgttggttacctagcagatttcccagctgtaaataactttctagttaataactgctgccttatgttagcagccgtttctacagcagcaatgccattattttctagcttcactgctttggcatttttgtctgtattattcggcgtaggcatcgctggttacatctcgttaacttctatcattctagtggaatttttgggactggataaactgacaaacgcttttggtctaatgatactcttcagaggagcagccgcattgtttggtaccccactagctggtacgatatatgacttgacaaagtcttacactatacctttcttcgtgtgtgcagcgggattcgggattgcatcaattattagcatgagtactccttgttttaataaaaaggttaaagaagtagacggtgaagtattagctccaatgaatgtcaccgaagaaaaagatcagaatatagtgtaattttttattaaactgcttttattacagtatttatatttttgttccaaaaagtaacaataacaatacatcaacggaagactaatgacgtgtgatttttaataaaatatttatt

SEQ ID NO: 6850 - DNA, 1959 bp, Diabrotica virgifera
  SmartBlast Evalue=1E-175; Info=RNA polymerase II-associated factor 1-like protein n=1 Tax=Camponotus floridanus RepID= E2ARV4_9HYME
ataattatttatttcctaatacaatttatactgtaaaattcttacaatagctggtttatttatgttcaatttaaaaaatctgaaatatgtctaatgaaacttaaaattttagtcactttcagatccagacccagattctgagcctgatcctgatcgagatcctgatctggaccttgatcccgatttggaagaagctttggaagacgatctagatctggaagcagatttagaacctgatctagacctagatctggaccttgacttggatttggaaggagacctggatctggaaccagatggtgatctagagcctgaagcagatctggatctcgactttgacttagaacgagaccttgatcttgatctcgaaggcgatttggattgggattttgatcgggaccgggatttagatttagactttgatttagagcgggatctggacttggaacgggattttgatcttgatcgtgatcttgaatgggatctggaacgagatttagacctagatctggatctagattgtgacttagacttggatcttttttgatctagacttggaccttgattttgatctagacttggatctagacttggatcttgatttggacctagatctgcttctgttagatgagtttgatctagatctagagcgagatggtgatttctcccccttctcttgttcctgttcttcttgagtagcttcttcttcttgtggttcatcaacctccatttcctcatcatcttcacctggtggttccagctgtttctctcggtacctctgcattctgaactcattagcatccatgggtctgtgtttgacaataagccttgtgttactaggtggagcaccagctttgacccttctcttactcagccttactctggtctccagttcattgtaataaattccatctggtcttgccacaaagaagtagttttcttcataccctttgcttgccttgctctttacattccagttgtactctcttgccatcttatactcatattcctcatcatcttgatatggtatctggttgacaaaatcatcccttcgtttctgaagagtgtcttctgtgggcaaaaagtaggcaacaaattgttctccactttcgtccatcacacctctgatcatagcctgagacatctcttcaatctgagctggtacttgcttgccaacaggagctggatcggaatcaaaaataacttgggcacaagggtacttccaaaggctgaaatctggatacacaggcaaaatatccacagctacgacatttggtttgctgtaatgcttctcgatgacattcttagagtcttcaaaggtcttttcaatagccttaatctgagaatctctgtccatgtacaacgtttcattgttaagggatttcttaatactataaccgaccttagcttcaactttgtccatagtctgaggctggaatctggtctgttccgttgaaatgtactcagttcttcgcaaccaggatactgacttggcatgatggcgagatctttttgagtcctgaggtgttaaaatgtcttcttctagtaatttttcatcggcaggatctagagtagctcctggctcaatagcatatatatctttgtttataagatcaatactaacacctaaatcatgctctgttagcacttcatatttgtaattacgctctagggatgttgggttgtattgaataaaccttatgggttcaaaaggatatgctataaacttcaaatcgaaaggaatatcaggtaaagtgttacagtacttcactttacatattaaatccgaccttttttctacagtttttactggtcttttttcaacgccattggctgttccgttctggttgttttgctgtattgtaggtgccattttcgaaattacaacacaatcttccacattttacaaaaataaagcagtaaatataaatttttgtatttctggtacatacaaactgc

SEQ ID NO: 6851 - DNA, 1961 bp, Diabrotica virgifera
  SmartBlast Evalue=1E-144; Info="Acetyl-coenzyme A synthetase, putative n=1 Tax=Pediculus humanus corporis RepID=E0W0C8_PEDHC"
cttattgactttgcccatggcattttttggtatactagcaacaggtttaacaacacttggtatccaataaggaggcattttatcttttgcccactctctaagttcctctaaagttaattcctttccttcatgtaataccacggcagctacaactctttggccccatttatcatcgtctagccctacaacgacgcattccaaaatatgtggatgtagtaatagtttggtttctatttctaatgcgctcagcttgtatccgcctgatttgattatgtctacagattttcttcctagtattttgaattctttatcttccaaggagtattctgaaacgtcgccggttttgaaccaaccgtcactggtaaactcttttcgggtggcttctggtctgttgaagtactctttgaagataccgtctcctttcaagagtaattcacctttgtgattttcagcttgatttgtttttttagtgaattctaattctccgtcaacattggtacattccaaaacagtatgggtttcaccagtttcttcgttttcatcaacaattctagcagatactcctggcagtggtatgcccacatagccgggtttccttggtgaatcatataattgtgatagaaccattccacattcggtcattccatacctttgtaataattgatgaccagatatctcctgccatctttggtgcatcgaagccggcataggtgccgatccacttatcatcagtctcattttcgtctttaacgtattctttacatattctaccatcttcgggtcgtccttaaatatcctttcgaactcttcaataagtttgtaatagatcgtcggtaccgccatatatacagatatctttctgtcttctggttttgcattgatacccagcaggtatgaccaaacggtgttggcgttgaatttcttcaacatgatggctttggccccaatgtacagagggcacagaagagcgttgactatgccgtggatgtgattgagcggtagtgtgtggagtattacgtcgtttggggaccatttccaagcgtctattaaggtcgttgtttgatactgaatgttcttgtgagaaatgacaacacctttcggagatccagttgttccactcgtgtataaaatcaacgcattgcttgaatcatagaactgagtgggcaatcctccctccagatcgctctgtgtataatttgttttctgggcacagttcagtttcattttctcgtccaatacgtggagcttactgttcgtgttgattgagacgactttttgcatgagttcagagtattctggagctgatattaacagtttagagttggaatcgttagcgtagtagagaaggacgttcttcgggtggagaggacttaaaggcacagcgatttgtcctgacatccatatagcaaacatagtaatcacataattaacatcattgggacacatgaacataactctttcgccagtacgtccattgcagagacttgtgatttcttttgaaagctcattagcactcataaaaatgttggcatacgtataactggcaatcctatctcgaatcgctattctatctggaaagtgggtggaatttctgaagactggtccagtgggcaagctgggtggagttacttttgcttggacttgttggtatcttcttaagatttttaagactgatgttcttacgggagaactcagtagaggcatttttattgataatcaaaaaccttaagaatagttctaatttaaagcatatgatcaagttgaatgatattctaatgtgaacttgaaaatgacagggttactttcactatatgagtaagaattatccgatatgttcacctaatgtaaaatatgtatcactaatattccacacgcaatttttcaatgaaatggtttaatcgacactcaaatactcttatctagtccttttatgtaaaaatgtcggcgtaactgaatcaaat

SEQ ID NO: 6852 - DNA, 1958 bp, Diabrotica virgifera
  SmartBlast Evalue=3E-49; Info=Zinc finger protein 318 n=1 Tax= Camponotus floridanus RepID=E2A789_9HYME
aggactacgtgaaaaaagcttcggtgcttaaaaatgagctcgatcagttgcagaacagcaacaggacatgtatgaaaaccacataaacatcaagagtttgaaactattttgcttcagaattccaagttacaggacgaagttcaaggcaagctcaaggccatacaaaatgttattcagatgttgtcagatatcataaaagacggtaaaactctgaacgacctcgaatctgagctgtcgaacaacagtaaacctcaacctgtaactcaaacgatagtgccgtcaagtagatactcggaaagtaatgcatctacagtcacgacatctgaatcattggtagtcgataaatattcagacgagaagatttgttacacacactacgacactggtttgcattggtgtcgaacgtgtgacgaatttccacaaacggctaaagactttttgctgcatctgcaagataataaacaccaacagaggaagaaactcgataaggtggacagtacgccttggcataagcttccgcctgaaccgttgctgccatctgatgaaaatgcgccaaagaaacgtatccctatcaaaggtctgcaattcttcgtagcagccccgtcgtggtactgccgattgtgcgatgtttggatcggagatctgcattgtgcttctcatcatttaaaatcaaaagtccatcatcaaaactttgagatattcacgactcagaacccacattgggaaatggagtggctgaaagatcgggaaaagtccatgaccagaaaagagacgaagcttcttcttctgattccgacgattcagattctgaccgaaaacacaaaaagaaatccagcgaaagctcatcagccaaagataaaaagaagaaaaagaagtcgaagaagaagaaaaaagcaaagtcttcggattccagttccagttcttcgagctcagatagttcggatactgatcgtagtaagagtatcagagtggcgatgcgcaatatgaatgagaaatggagcgcgttagagaggatagtcgaggagcacaaaaagaaggaattaggcgaaaaggaggaaaaggaaaaggttcctgatacgtcggatgatcagctgatcaaccagtggatggcagtggctgagcctccagctaaggaaaaactgttattgatgtctttaaaagatagaatgcgcgaaaagaaagaacaagaacagatgcgaatcacagagcgagagaaatcacgacgacagcaagagcaagacgaactcgagcgttcagaacggaaaaaagagacgacagacgtgccctagtcgaagccgagatactgaaaaaacaaagagagcaggaagagatccagaagatgaaggacattcaccttaggtttaaagcaaacaattaccgcaagagaaaatctcaatcgcccagcgaagatgttgagagttacgaaaagaaggagagactttcccacaaaagtcgaagtagaagcagggagccagaaatcgaagaaagtaaacacgacagaaacgatgaaagaaaacctcctggaccgccgagttacaaaaagttgccctttataggacgcatgcctttgttcaagaaaaaacagtctcatgaagaaaaagaggagccgaaagaaattaagaaacgatcctacgaaccgcaaagaaaaacccgcttcgaacccggcaaccttccaaaagcttacatccccaaacccgaagtcgtctgttttccgaaattatcttctatccctcccttgacgcttccccctccacctccgaccgtggaagagtacgtcgtcataccaaaaccgccgaaaatcagtgcggtggccaaaaagccgaaacctaaaaagccgccatctccaccaaaaatcgtggaacacttcagtgacgacgacggtctgtacgaaacagcaatgccacattcaaatatggtgaaccaattctatggcaattatggaaacaaccgatacgagc

SEQ ID NO: 6853 - DNA, 1959 bp, Diabrotica virgifera
agtcagttacaaaggtttttgtaagctctacaagatatataaattctggtaaaaatatttaaaaaaaaaaatttttttttttgagttgtgacactatacagataaaataatgaaatattcacgaaatattatctatcaaaagtgactcttgcagtagataacagtacagtagcctattatcatcattacatattatctggttaaccgtgacccgtcaaaatgacccggtcaaaaaagccccgtcaaaatagcccggatacaaaatagcctcgaaaaaatagcccataaacaaaatagccccgacaaaatagatcgcgcacaaaatatccccggtcaagacaggcccggctaaaacagccccgactaaaacagccccggcgaaaacacccccaataaaagttttaccttttaacggagtaccatttattttaaatcactattctaattgggatatcaaccacaatttaacttaaaaaaatgattttatcaacgtttcgacttccacttcggacgtcgttatcaaaatacaaaatattaataaattaaacaaaaatgattttgcttagtaaaaagttcttctaataatttaatttaatctgactctttcatatcggcaattcagacatatattaggtatacattttatttttttcttttagttgtgacactgtttgagcggaggtgcgatatggattttgtcgatttaaagcgtgcgtttgacagcttatctcatgctgctatatggaaaattttagagctgaaaaacatcctgcaaaaaataattttcatcataaagtcactgcacactgaggcgaaattcaatgtgacacaaaatgggatcaacagtgacgaatttaacatatttactggagtcagacggggatccatgctttctccgtttttttaacatagctgtagacaatgctctctcaaaactagaccccgacacaagaggtatacaatggacgcttaccacacgcctaagcgattgagatgaagaatgaatcggtaatgaatcggaatcactcaaaaaatgcaaaaatagtagttattctggaagccaaaacatcaaataaatattgtattttaataccgtggtctactcatgagatgcgtggtgcataaataaacaaaggagtcatttttcctaataactctcagtcaaaacaataatatatcaatcaaaattattgaactagaaaaaggtgcaaggcaccacaacacaaattgattgtacaagatattaaaaaaatatcacccacattatttgttaataaattattataaagatcctaaataactttaaatattagtctctagatgtttatacctttgtgttgtaaatttattatggatctccttaatttcaatggctagaataaaagcagtgatcagcaaaattgaaataaacgttatttttaaataaaagtagtttaaaattatatattcggttccatcaacttcaaaaattattcgaatatctctaggatctgactttggtatcagaactagcgaagtaacatccaagacgtatttattgtgaagtgccctgatggtgatgaatcctccgaagggttgattgctgaagccttttgtcttcatgaatataagcggaaacatcagtgtgcaatcggagctgacgttgagcgcgtgttcacctggtattggtacataatcggatttgcttgtgtctacatcaaaaatagtatcaatcgaatcacagttatccaatacaattggatctacgagctcaaaacttattccatcgactctaacagtataaactttttttgaaaaagtgggttttggtcctgtatatcccagacttttatagtattcctggtcgacaacgtattcctctacagctgtacacatattaacaactaaacatatagaacacaaaactcgtacgaacatttcggacattttcgacaactgctaatggagaactgaacaatt

SEQ ID NO: 6854 - DNA, 1959 bp, Diabrotica virgifera
  SmartBlast Evalue=1E-137; Info=Uncharacterized peptidase C1- like protein F26E4.3 n=2 Tax=Formicidae RepID=E2ALE8_9HYME
ggcgaaggctagaggtggtggtactttggctcaatctcagtaagctctgcatcatattgcgtttgatagtgaaacgtggtagacggtgaggcgatagtgataaggaagacggcggacacgctaagtaaagatgataagacattatatcttgggctgcgttttagcaagctccttaatccttttggtaagctccttcagaggtgacgactttgctgatctcccaggtccttattgtgaaaacattggatgctgcaacaatagattagattcttgctcagtgcctattttgggtacattatgttactgcgacgagttttgtaactctagtagagtggatgactgttgcccagattactggtcgcactgtagaggtataactttcccaactacagaacgaacacgtccaacacccccacaacccccagagaacataaccggatgtcagtggggcgacagaaccctcttccttaaccaaaaagttaaggataactgcaatgaatgtacatgtgccagacaatccgaactcttgtgcgaaagaaatgtatgtcttgttgaccaaaacatcattgaaactgtaaacagaaatccagatgagtttggatggacggctcaaaactattccgaattttggggaagaactttagacgatggagtccaattcagattagggacacttccacctcagcgttttgtaatgacaatgaatcccgtcaaaagaatttacgatccaaactcactccccagagatttcgactccaattcagtctggcgtggtttaatcactggcattcaagatcagggatggtgtggatcgtcttgggctatctcaacagctgctgttgcatctgacaggtatggtatcgtgtctaaaggaaaagaagcagttacgctcagtgctcaaaacttagtctcctgtgatactcaaggacaacaaagctgcactggtggtcatcttgatagagcgtggtcatttactaaagcttacggtcttgtagatgaagactgtttcccctacgtggccagaaacgaaagatgcacaatcaaacgaagaggaactctagaggcggctggctgccggcaacaacgatttgctgaaagaagaggaagatacaccgtaggacctgcctacagattaggaaacgagactgatatcatgtatgaaattactagatctggtccagttcaagctacaatgaaagtttatcacgatctgtttacatacagcggaggaatatacaaacactcagatttggctgtcaaccacaaacaaggttaccattctgtaaggattgttggatggggtgaagaatataactacagaggagttcaaaagtactggaaagtagccaacagttggggtgccaactggggagaagacggatatttcagaatcgtaagaggaaccaacgaatgtgaaattgagtcgtttgttatcgcttcctggccacacgtatctagaaagattttattgtcaaacgaattgggaacaaactcagtatattaagcaaaaatatgttgtagaccgttttaatatctcatgacgaatatcatcacaacgatgtttgcattcatgtttttattgtacaccaaaaatctttgtaaattccgtgagattcataaactgatctacttttattcaagctttactgttatttgtgaaaatttatacttaccaaatatttttagtgttactaaaatgccatacaaaccattataacaaagtacttaagcaacgatggtgaaattgttttatttcattcattacttttattataagatttataagttcgtagtacctaatgtatttgtcaaaaaattgttatgccaaaagatcttacagctcgtactgttacacagtattgtgatttttgacagtttgttcgaatattaggattaggtttcttatctgatttttgtatgtagtgtcattttgtattattaataaatgctataagcgtc

SEQ ID NO: 6855 - DNA, 1957 bp, Diabrotica virgifera
  SmartBlast Evalue=0; Info=GTP-binding protein 1 n=2 Tax= Aculeata RepID=E2B9X0_9HYME
tttatcatgagaaaagtgatgtggaatccttatttgcattcaaatcttacagggtcctcagtgctctagaaagatatttctaaaaatatagtatgatattaagacatcctacaggacacagtgttatagagatttttgtaacgtaattctgataggaagattataaaaacaaaatataatgagtgacaacagggaatcattgagttcatttgtggagaaacaagaacgacctccagagtatgacaaaatcttaggaagaaaggtgttggtggctccttcagaagaacagtatgatcttttactgaagaggcttaagcagcagctgggagaagggagaggagaagttattttggagataggtggatcagatgacggatctgaaaatggattactagatgatgaattagaagctgcagtagcaaccctacaatcattggcaaatactttggagtgcagttgcgtaagactcagagaacgtaaagaaactaggggagttgtagtacagtacctcattaggagagttcttgatcagtcagattttttggaaatacgagttgcagttgttggtaacgtagatgctggtaaatcaactttacttggagttttaacacacggcgaattggataatggcagaggacacgctagacagagactatttaggcacaagcatgaaatggaatcaggaaggacaagttctgtaggaaatgatattttgggttttgacgaagaaggaaatattgtgaataaaccagaacatggctcacttgattgggtaaagatttgcgaaagaagttcgaaagtgataacttttattgatcttgcgggacatgaaagatatttaaaaactacagtttttggtatgactggacatgcaccagattttggaatgttaatggtaggcgccaatgctggaataatcggaatgacaaaagaacatttaggtcttgctctagctctctcagtacctgtcttcgtagtagttaccaaaattgatatgtgtcctgccaacgtccttcaggataatctcaagatgttagtaaggatactgaaatcgcctggttgtcgaaaggtaccagttatggtcaaaacttccgatgatgtggttttaagtgccacaaactttgtatctgaaaggctatgtccaattttccaagtttccaatgtcagtggagaaaatttggagttattgaaaacgttccttaatttacttacaactagaatggagtatcatgaaaacgaacctgccgaattccaaatagatgacacatattctgttccaggcgttggtactgtggtttctggtactacattaaaaggtgtgataaaactaaacgatatcctcatgctaggtccagatccgttgggacgttttcaacaaattgctgtaaaaagtattcataggaagaggatggctgtcaaagaagttcgagcaggacaaactgctagtttcgcacttaagaagatcaaaagatcacaaatcaggaaaggtatggttatggtatctccagtgttaaaccctcaagcctgttgggaatttgaaggagaaattttagttttacaccacccaacaactataagttcgagatatcaagcgatggtccactgcggaagtataagacaaactgctagtataattagcatgtccaaggattgtcttaggacgggagacaaagcattaatccacttcagatttattaaacatccggaatatgttacaccaggacaacgaatggtattcagagagggacgaacgaaagcagtgggtaacgtaatacgaattttgtcccattctacaccgacgcatcaaggaaaccgggcgaagcagtcgaagcaacagagatacggaagcggacaacagagaagcgagaagacacacggaaagaacgaaaatataaaagaagtagtagatcaggaaatggctgacaacggactagaagaaacgatagagaaacgagag

SEQ ID NO: 6856 - DNA, 1955 bp, Diabrotica virgifera
  SmartBlast Evalue=0; Info=Proline dehydrogenase isoform 1 n=3 Tax=Leptinotarsa decemlineata RepID=D3XKA8_LEPDE
cttaaaccggaaggtggctgaaaccttaagttatttcattggcatttcacgaaaaaatataaataaaatcgttttgccgtgtgatggcttttctgcgttcggtaactaagcaaagtgtctataaaaaatacggtttatttttcgattcgtttcaaaatttcggaaaaaccaatttaaatatcggtcaaaccgcattaaaatcaacagcgcaagtagtaccttagtgcgaaatgcaacaaacgccgtcgaaagccagtctccaaaagatccccttgacattagtttttccgaccctaaggcagctttcaaaagcaagaccaactgggaacttattagggcatacctggtttatgcactatgttccgtcgagtatttggttacccacaatatgaagttgatgaagttcgcagagaaggtattaggggagaagctattcataatgttgatgaaaggaacattttatgggcattttgttgctggtgaggaccagattaaaataaaaccaacactacagcgactaagatcatttggagttaaacccatccttgactactcagtcgaagaggatttgtctcaagaagaggcagagaaacgtgaacttgagtcctcagttcccgaagcaggagaagaaaaggtcgagggacctctaaagcagtaccatgtggataagacattcgccgacagaagatacaaagtacagtcagcgaggacatacttctacctcaatgaagcccagtgcgagaagaacacggaaacattcatcaaatgcttggaaaccatagcaggctctacttatggcaccgggatcgcagctgttaaattcactgctttgggcagaccacaactgttgcttcaactttctgaagtaattatgagagcaagacagtacatgaccgaaattgttggaggtgaaggtaacgttttgtgtcatcacatgaagtatgaagatttagaggcgaaattcgaaaaaattcaagataaagaatccttacgaaaattcttgaagcaagttacatacgataaacaaggtgttctccacttattcccctggtcgggtattattgacgagaaccaagagttgagtgcttccttcagagttccagacttaaaatcaggaaggatgatcaggctattaacacagctatcaccaaaggaggaggagatgttcagaaatatggttaggagatttaataccattgtgaaagcagcacaggaaatggatgttaggataatggttgatgcagaacaaacttacttccaaccagcaattacccgaattactctggaatatatgagaaagtacaacaaacaaaaagcgatagtatttaatacttaccaatgttatttgaaaaatgcttttgatgaagtttcgactgatttggaacaagcaaaacgtcaagacttctattttggagctaaactcgttcggggagcatatctcgaacaggaacgagccagggcagccgcgatgggctatcctgacccaaccaatccagattacgaagctacgtctgagatgtatcataaaactctttcagaatgtttgaggaggataaaggccttcaagcaaaaaggagaagacaagaaaattgctataatggtagcttctcacaatgaagataccgtgcgatttgctattaaaaaaatggaggaatttgggatagaacccaaagataaagtgatatgttttggacaattgtttgctatgtgtgattatattactttcccattaggtcaatctggatattcatcttataaatacatcccctatggacctgtaaaagaagtattaccgtatttatctcgaagagctcacgaaaataaaggagtattaaagaaaattaagaaagaaaagaaattacttgcaagcgaaattttcaggcgcttatctagaggtcaattatggtatacacctaaaggaaattatgttcccgtataaacactagatctcaaac

SEQ ID NO: 6857 - DNA, 1954 bp, Diabrotica virgifera
actaaacccaacaaacaccgccttcaacatgaaacgatcccagcaagttaccgtcactgaaaccaccccaggatattcagtggaaaagatgtattataaagaatacaaatatgaaaccgctttctccacttcgcagttatcgaaactggagaatttcgttttacctcctagaactactatcttagcattatctcagaacggaggagacaaggaagaagacaaaaagtatgtcgtcaagaatcacggaaaagctgatctttttgttgaggtaatacatctcaataaccaagatgatgctccacaatggtttgtagtccagccagaccaaaccactgagatagatattgaggacaatcttgaacaaagcgtgttgaaagtaagcaacaacagttacgaacaggaagtatcattttctgctaaaggtggtcacgttattgacgacttggaaaacaacatggaagaacttcttgactcagacgaaacagaaactgaaatggtcgttctggaaaacttttctttaagcccaagaactgctgtcactgttttgagtcaaaatgttgaaggaagcaatgaacatcctggaaagtatactgtaactaaccttggtaaagctgctttcgatattgagttgaagcgtacctcacccgttcaaactctagagctccatcgcaaaaccgttcagcctaatacatctgagtcttttgaactcacagctcaattccaatctaccgttttggaagttatcaacacaagccagactgaagatgcagtttttagagctgaaggaggagatgttattgaagatcttgaggatttgattagaaatattgatgagaaagaagaaactggtgttactcatattctaacaaatttagagagcttgcatttgaactcacgttcatccgtccctgctttgatgtatgatcctaaggatgataccatttccgaacatcataacttcactgttaccaaccacggaaaatctgatatagaagttgaggttacatacactgacagcgatgaccgtgccaatgatcaatacaaggtagtcaaaccaaatgaaactgtaaaacttgaacataagaaagacgctggagtagctctgttaaatatattgaacagacattacacagacgctgctattatcaccgccaagggtggaagagtagttcgagacattgaaagaaaaatcaaacaacttgtgtctgatgaaaaatcaataatgatggtgaatgatttccatctggcacctgcatcatctgtagttgtcatgcatcaagttggtagatataaccgaagacccgtgtacccagctggacatcgcaaactccaacatgttgtagttcgtagacttaaacaccatcctggacttacatcaggacgttttgcacgtaaaccagcagtatcccgtcctcgtaaacaatcaggtagcccagcaggtttaggacgtcgtccattccgtcgtccatcttgcaggccaatgatacgaccagcccatctttcaggtcaaggtggtcaacatccagcgcaacaagagcaccacctagctcaacaacagcaccaccaagctcaacaacagcaccaacaaggtcctcaagctcgacaatgcagaccagcgcgcagaccaagaattgttatgcgccccgctgcccaacgtaaatccgttgctcatgatagatacacagttgctaatcatggaactcatgcttttaccgctcagatcgttcacgttaaaggaggaaagcaggagatagtacgcagtcaagttgtccaacccaacgaaaccgaagagcttcttcttaaagacgtaaatggatcgtctttgaaaatcgtcaacgaaaacgagactgattacgcaatcttctcagctgaaggaggtgaagtagttgatggattaagatatatggtaagaccactgcgtcgctgtcctggtgcaagaaaaatgttctatgga

SEQ ID NO: 6858 - DNA, 1955 bp, Diabrotica virgifera
  SmartBlast Evalue=1E-136; Info=ATP-binding cassette sub-family G member 4 n=1 Tax=Camponotus floridanus RepID=E2A2I6_9HYME
gctatacgataggagtaatgtgtttatctttaataaactgctcaggatatacgtaaagacagaaatccttggactcgcagggtagttttcctctgtcatagccgaatatcgttagtaccaacccttcaagcgcatatctggggaaagaaatgtcaaacatccatttaagttggtgcggacaatcacgaagttgaacgaagtatccggaaaacatgatgaatggtagaagaaagaagggacctattactacgccgttcgttacactcaaacaggagcccacaaccaatgcccaactttgggagataaccgagaccaaaatgcatataaacaaaaacgaagatactctactccattccataggttgttgtgtacataaataggttattgtggcatacaaaacggtagccaaaatttggacggttatatctgaaatagatactgctgcataatacgatcgtatggcataccatttattaaagtgttccttaattattataggtaattctgaaggaaatgtggtaactacacagttgaacgccgtcatcataaggaacataaccgtaaaaaacataaaactaaaattgtcattaatattagcggcatccagcccaacaccgaagtacaaaattcctaaaaatagcgctatggcagaatgagtccccaatctgaagtacgtcaaagttctgtctctagagagcattagaaaagatctcttcgtcagcaccacaaactggtttatcgttgaagttggataagaatttaagccgcactcatcccaagtatattcgatttcgtttacgattgttctttttgttgctgcaagaaaatcttctccaatattgggttcttttattgaatttagtttcattgtactagcacttaatttcgcataactttcattgattccattattcgacttagttgagagagcatgtgtaaaatccccataatctcctgaagctacttccaataagaagtcagctggattatgttgagtagggcaaatcaaatcaaaatcttcaaaatatggtaagagattattcggtgatccttggtatatacatttaccacttgatacaacatacaggtgatcgaacaatttaaatatcgtggcactgggttgatgaatcgtacaaataatggttttaccgctttcggacatttctttcagcaattttacaagacgaattgaatttaaactatctaatccactagtaggttcatcaaaaaacataacttgtggatctctaagcagctctaatgctacagaaagacgtttcttctgtcccccagatagggcgtctgtcctggtgtgttttatttcccaaagagtgacggatttcaaaatggatgctatctttttatctttgtcagtcttagacgccgtaagcattaaatcagcagccactctcatggattctaataccgttagtaaaggttggagatcatcattttgcattatataacacgattgtttcctaaaagcaacattgtttcttggttcatcattgactaaaacttcacccagtatgcctgtagtcgcatagcctgataaaatattcattagacatgtctttccagcacctgaaggtcccattatagccgtcaattgccctcctggaaaatttcctgtgatatcatccagcagtttccttttcgttcttgaaaataatattccgtcataaacactgtaagatatatgtctaaatcctacatttattagagacgctggatcattaacttgattttctggtagttccaaagaatgcaaacggaagtcttcgtcatgtatcttattgctctcttgaggtggatccgcagttcctaaggtatcacaaactgtattttcacccattttagttctgttgcatcgtttttattgaatattctagcacaatccacaaactgttcaaatatacatcgacacaatcattgaatttgtctatccaaccggc

SEQ ID NO: 6859 - DNA, 1949 bp, Diabrotica virgifera
  SmartBlast Evalue=1E-177; Info=Beta-galactosidase-like protein n=1 Tax=Tribolium castaneum RepID=D6WCM8_TRICA
aatttattaagtatggcattagagacttcgctacctacattatacgaatactataccggaaatggtatttcagaggggttgtctgataaacaaccatatttcaccctcaacaataaaaatatcacgatatacagcggagcttttcactattttcgaatgccgagaggacactggagagacagattgagaaaaatgagagcagctggactgaatgctgttgagacatacgtcccttggaatctgcatgaatcacaacagggtgtattcgattttggtaatggtggaacggatttcgaagactttcttcacttagaggaatttcttaaaacagcccaagaggaggatctctttgccttggttcgagctggaccatacattaacagcgaattcgattttggcggtcttcctagctggttaaccaaacggtaaaatatatgagaagatcagcagaccaatatttcttgaatcatgtcagaaattactttaacgtgttattacctatgctggcgttgcttcagttccagaaaggtggtcctatcataggagtacaggtagaaaatgaatttgggagcaagcatttcaacgacactacgtatttggttgccttaaaagatatgatgttggaacatggaataatagaacttctttacacggcagatcctcctcgaaatggaaagttcggtgctatacctggtgttttacaaactgctaatttcaacggagttccaaaggagatgtttgatctgcttaacactttccaacacggcaaaccgaatatggcgatggaatcatacactggatggtttgatcactggactgagagccaccgtcataagaaaccgagtgaatataaaactcaactggaaggaatattagattatccaggttcagtgaacatgtatatgtttattggtagtacaagttacggttttactaatggagcgacattgtccaaagataatgataactctggataccaaccagacaccacaagctatgactatgattcaccaatcactgaacatggcacatccacattaaaatacgacctaatcaaagaagtaatagcagcgcgcaacaaggttcaaactcgtctgccagattttcctgatcttaaacctctcgtagcctatcccgacataaaaccagtaggacaactatcgctttctcaggcaataaatcaagtacaaaccaaagttcaaagtacagatattttaccaatggagaaacttgatattaataatggtaacggacagagttttggatatattgtatataggaaaacaaatatcgatattccagctaacgcagtactaaaaatttctgggtacgtacgggataccgtcttggtactaataaacggaaagctagtttcacctactccaaaaagtgctgctgatatagatggctttggcttttggaggaaacctgattcaacccttactcttactaatacagctattcaagccgctacactcgagttggttgtcgaaaattttggaagaagcacgttagctgtttattcattcaagggcttaactgaagatgtctccattaataacaataagctcactaattgggagataattcctttagaatttaaaaagagctacaacctagctttgtccaactggcagtcagtacaacagcgagaaaacaacccttcgttgtacaaatttaacctccatgttgatggcgaacctagtgacacctatatagatatgcgtgaatggaggaaaggaataactatagttaatggatttgttcttggaaggcatttcttcgttgggcctcaacagagtctctacttggctggacctttattgagatctggagataatgagattgttgtgtttgaacactatactgctccgtctgtcttgaagttttcagatgtacaaatattcggaaattagttgtattatttactaaaaatatatcgtttcagc

SEQ ID NO: 6860 - DNA, 1952 bp, Diabrotica virgifera
  SmartBlast Evalue=9E-50; Info=Large proline-rich protein BAT2 n= 1 Tax=Camponotus floridanus RepID=E2AK75_9HYME
ggatggggaggaggagcggcggtgggcaaatatacgctctgtgtcgaatatgggctatttgccgtctggccgagactgtgataattgggatattgggagaattgggagcgtccctgaccgcccaattgatctatttggaacgccccgtatagaccagcggtctgtgcagcagcagcttgaatctgttgcgtggaattatacactagcggaactgtgggaggggaggggatggctgagatgccgtattgtgtgtttcctgagagactggcctggtagctaatatgctgattggctgtatactgaggccccataccaacactggcgcctaaaaccggtggtatgggtgggggagatagggggttgcccatcaagcctgtagcaacaattccagaatggggctggtgaccggaagagcttaatacagtctgtccgcttccagatacctgctgtgtaggcttcaccttacatacattagtagttgctgcgctctgattgggcgaaggactataaccttcgtgattatcatctggcgtgtcttttccttggttgaagacgttagtatcgagtggcgggccaccaaaactgatctgactgtcttcgccctcctgctccgaggtctcccagactttcttaactgaggcaattttgatgtccaaactatcgaccgtgttgtttccgctggttatcgcatggagagacttcgacacgaagttcttcgccgctttatcatcggcaaattgaagatccgcactgaaaaagtccaacttcatatctggggggtcctctttgaacaggggcagttgtatagcgtctgttttttcggctttctgtggcaggagttcgttcatgttaggtttgttgaaaccggacattaccgacgggtccatgttgccttcttccattttaggacggggcttatcgtttcgcacctggcgagctcccggagccgacttaaagtttgtattttcaaagatgattgtgttcaccggcggagtactaccatctaggagggctttctcttggatttgggttgtcttcccaattaccttttcaccaccagggctaacaccttgagtgggagaatgcgttgactccaatcctttgactccatctatggttacacctagcatagcgtcgtgttccacgtttctcaattgggaacccaaaggtttatcccacgcgcacgtcggcaccgcaggcggcacactggcctctttcatactgtaaacgttcatgttttggttcattttgtttatatcattgacgtctcccaagccatgatgttgctgttgttgttgctgctgtttctgttgttgctgcttctgcaacttctgtttagcgaatctcggcgggagattggtctgtcttggtcgatcaaattgagctttggcctgaggtagaaccggcgggggattcactggtgtggccatcaaaggtggaatgttactgatttgctgctgagtcaattgctgcgtaggtggactgatcttcttgcgatcccggtctcgttccctatcgcgatctctttccctttccctttctctttcaggtttgacatctttaacgttttcggttttaagcggtttggatgatttttcgtcgaacgatttttgacgctcctttacgtttttcttgctcttaacctcttggaatccttccgcatcgccattcacagacaccctttcttctttttcttcggcgtgatcaggttcatcgcgattcttgggcgcgatatccgctagagcattagcaaacaagttatgttcgacgggcttatcgtcttttttaagagagttgtttgaattttgtctcatgtgttctccacggccgccttcgtacctcttctctcctcccatacgcggaggattattccttccgcggttagaattagacgaagatctgttaccttgaagtttaagcggattcttacgattatctttgtttttgtcatc

SEQ ID NO: 6861 - DNA, 1952 bp, Diabrotica virgifera
  SmartBlast Evalue=0; Info=Phosphoglucose isomerase (Fragment) n= 34 Tax=Melitaeini RepID=C6FF82_MELCN
tttacaatttacacattgtttttattaaaaacaacgccaacatgtcaatatatatttcatttctaacacataaatattacatcctgatatcagcgtataaaaattaggagctgttagctttaatgaagttgataagcccgtttgtggatccatcgtgagaagatactggtctagagtcttgcaattcgggctcgattgccttcgccaactgtttacccaattctactccccattgatcgtaggagttaatatcccagataattccttgggtgaagattttttgttcatataaagcaattaaagctccaagaataaatggagtaacctttttaacaacaatactgttagttggtctatttcccagaaaaactttgtgtggtaatattttctggagagcttctccttgcaaaccttgcttctccaactcggctttagcaacttctggagtttttccggccattaaagcctcggtttgagccaagaaattggccaaaaggatcttgtgatgcgttccaccgctaattgggttgtgtgtggtggccggggcgataaagtccgctggaatggttttggtaccttgatggataagttgatagaaagcgtgttgtccattagtaccaggctctccccacactattggaccagtttggaagttaacctgttgaccactgcgcgttatatattttccattactttccatgtcaccttgttggaagtaggcagcaaacctatgtaggtattggtcgtagggaagaagagcatgtgtctcggatccaaagaagttaccataccaaactcccaagagagccaaaataacgggtgcgttttgctctaaagaagctgactggaaatgttgatccatgaagaatcctccatcaagcaattggctgaagttatcaaatccaatcgataatgagatactcagaccaatggctgaccacagggaatatctacctcctacccaatcccagaatccaaacatattggcagtatcaattccaaattcggaaactttttcagcatttgtactaagagctacaaagtgtttggccacagcagcaggatcttgagctgttgccaagaaccaatcttttgctgatttagcgtttgtgcaggtttcctgagtggtaaatgtcttggatgcaattatgaacagaacagtttcggggttgactttttttagcacttctgcgagatgggtaccatcaatatttgaaacaaaatgtaggttgagtcctttgctgtaaggttttaaagcttctgtaaccattaatggtcctaaatctgatcctccaataccaatgttgacaacgtcagtgatttttttgccagagtatcctttccatgcaccagataacacttgttctgtaaagcttttcatgtgattaagaacagcatttacatcaggcattacatctttaccatcaactaaaataggtcgatttgatctatttcttaaagcgatgtgtaatacagctctgttttcggtgaagttgattttggatccattaaacatagcatctcgtgcagcttctactttccttgaacgagccaagtcaagcaatagcttcaaaccttcttcatcaatgcggttttttgagaaatcaatgagtatgtcgccatcattaggagtagcaatttttaaacttaatttatcgaatcttgcaggatcacttgcgaaaaggtccttgatgactaatttattgcctttactatcataatattgttgaagtttttgccaagaaggttcagtagttaaaagtggtttcggctccatttctaccgcaagactgactaatgttctgcctataccgcggcatattgcacttgttttcggacaatttggatccattgtgcattgtaattcgaaaggaatttcctcgtcgtgttccctgaaactccagaaagtaattttacgtcttgaaaaattttgaaaaaacatttttgacagg

SEQ ID NO: 6862 - DNA, 1949 bp, Diabrotica virgifera
  SmartBlast Evalue=1E-144; Info="Probable isocitrate dehydrogenase [NAD] subunit beta, mitochondrial n=3 Tax= Aculeata RepID=E2B128_9HYME"
attgttaacttaattttaataatttaaaatctcacaacaaatgtacatatcgtaaaataaataatacttatctcgaactgatctacaagtatttaaaatcgcgactagaccgtcatttaatcacaacagataaaactaagcaactttttttagtaacaatgtaattatattacaaaatttaaacatcaataagtaacgaggtagtaaaattttatactaacttcaatagttttctacattttccaggttaactgtatcgtgtctttagataacattgggtttattgtattcattacgatatctggaatcatttactacttatcctagttcatcctttcatagctagcaagacggctctcaagcactattataagaccgacttcataaacaatttaataaatactgacgcttcaaaaaactttaatttttgatccacttcgttcattccactatatggtatctgaagatacataattttaacttccgtatcctaatatgtattaatataataactaattcctctaacaatccaatgacattcgatcaaaaagtgatgttgatgagctgttctgccaccaaattgctcgtcctcattggatgataaaaaactacagcaaacaaaatgaccttcctcgaactatcataaaaatctgccttgttattatctacaatgattaaatttcgccacaaaattgcaatggttcttctaagcagtttttggtatttccaggttgctaataactgcataggtaaactgctgggtagtagattgtcccccaacatcctttgtcttgatcttgccgtctttcagaactttctcgatggcagcgcggatcatttcgccgtagagtggaagatttacgtgcctgagcattttagatgcgcatagtaacatggctgttggatttgcgacgtttttgcccacagcttcagaataggtgtgacgcgcacccggttcaaagacaacgcagtttgcagaataggaagcaccagcaactactcccgctcctcctactagtccagaagccaaattatcaacaatgttaccatagagattgggagtaaccattacgtcgaattgctgaggattggataccatctgcatggtacagttatcgacaatcattctttcaaattctatttttggatataatttagccatctcctcacaacttcttaagaataacccgtctcccaatttcataatattagctttatggacagctgtaaccttcttcctgttgtttttagtggcatagtcaaatgcaaatttagcaattctttgggacttcttggcagtaacaatttttaaacattctactacgccttttacgccttcatgttcaagagcagagtattctccttctgtctgttctcttataataacacagtcaatattgctgtgtcgtgatttgaccccaggtaaagatcttacatgaacaacattggcgtataaatcaagggcatttctgagcttcatgttaagagtttgcaattcccctgtatgactgtaatctggtgtagccaaaattcctttcaagcaaactctgtttctcgaaatactatcagctactttttctaatggagcactaagggtgggatttacttctgaaaagaaatatgtgtcaaaatccacgggtattcctgcagccttaaacacttctgtgactgaatacattaattctggacccacaccatctccagggatcaaggtacatgttgttcttgcatcaggtcgttcagccattccagatgataggcctctcgtacttgttcttggtaagatttgtagtgcctgcactagtaatcgcggtacatttcttgttgttacagccatatttattgtaggttattaaatataaatggtttattgtcaattaaaagtacaaattatttttttgtacttatttttttacacccaaatctttgggtcacaagagaggttaggc

SEQ ID NO: 6863 - DNA, 1949 bp, Diabrotica virgifera
  SmartBlast Evalue=1E-87; Info=Myelin expression factor 2 n=1 Tax=Camponotus floridanus RepID=E2B106_9HYME
tttccatcggcggaaaataggtgtagtaatttgtgaaatcgtgaaaaaccatttaaagaagtagatagtaaagtttcagaaaatgagtgagtctccaaaagaccgtagaggtcgcgatcgagatcgtccccggaataaccgagataaccggaataacaaaggcgataacagcagagagaggagcaatgataggggtccccgtgaacctagaagcatgaggccctcccaaaacagagtgtacgtatccaacatcccatatgaataccgctggcaggatatcaaagatctgttccgtagcaaaatcggtgatgtaactttcgtggagctttttgttgatgataacgataagccgaggggtagtggcattgtcgaatttaatgattctgatcttgttggtaaatgtctcgagcttatgcagcgttatgaggttaagggccgtaaattggtggtaaaagatgatcaaggcattacaagagataaatttggggctattgttagtaaccagggaggtggtaaaagaagagagtacaatcgtttcaatgataacatgaacagcatgaatattgatttgggcaatactttgaatcttggtaatgataagtggggcaacacttatggattgagtccacagtttcttgaatctttgaaaatcgatccccctcttaataataaggtgtttgtggccaatttggattacaacattgataagaaaaaaataaaagatgtctttaaactagcaggtagagtcatcaatgttgacatgcctctagataaggatggcaaagttcgaggtttcgccgttgttgagtatgatcaccctgtagaagcagttcaggctatctctatgttgcaaggccaagttttgaatgatagaacattggccgtacgtatggatagagtcaacgataactccaaattaccagaaggattaagatctgtgggcatgggtctgggacctaatggggaagcgttgaaaaacgtggctcacaatttaccttcgttgggtagcggctcacaaggtgggacaactggttctgggcttttgggggctgtacctaatagttctttacagttggccaatgctctctcaggccttggcaatgttggtaacttagcaggtttgaaccaaaatttttccgggctagccagcactttgttgggaaacggattgggggctactgaactttcgtcgctggttcagaatcccctttcagcccaaaattcagcgacccagcaactctccggtttgaacaaccaaaactcaacttccggaaacctaggcaacttcaacagaggttcttcaggagataattatggtaatcagaattcaaacaactggagttcaaacaacaattcaagcaatggaggaggcaggaacttccagagcggaaataataattatggaggaaatgacagaatgagctttaacggaacaagacaagatggcggaggcaaaagcttttcaagaaaagtgttgatctcaaatctccctacttctgcaagttacaagctattacacgagaaattcacagaattcggagatgtccatggattcgaagaaaagatgcatggaagcgttcttgtaacttacggctctgattggcaggcagaaagggccatcaaaaacttggataaagcccgtatcgacggcagaatgattgacgcgagattgtttttctaaactgattagcattaaatgtttagcctttaagaccagatttttagttagataatcattataatctgtgtgtatcaaacatctcaagaggtgtttgaaaaataaaagtatttgtatttatattcagtaatattatgtagtgtcggtacactattgattgcaagtctgtttaggtatttatgttttacggttgtaacattggaaattttccaaattccattttatgttaaattttttatggagtcataataaacacttgtcgtgaaaaaaa

SEQ ID NO: 6864 - DNA, 1945 bp, Diabrotica virgifera
  SmartBlast Evalue=1E-68; Info=Reverse transcriptase n=1 Tax= Anopheles gambiae RepID=Q76IN5_ANOGA
aacagatgattgagcttcgctaccacagtattattgcttttaatgctaaaacctgagtcagtggagtttaatagctgggaaagggggttcaaagctaaacagaaccacaatggactcaacgagtctccttgaaatagtccccggttgattgcgatattttcggtttcgatattgttttcaccaggtatttggaggtgaattttagtcttccaatctctcattatatgccttaaaaaggtcactatgttatcatcgactttgtatattttcaatatatctattaagccattcatgcggtactgaatcaaaggcctttttatagtcaataaaagcagtaaaaaggttccttttttagtgaatgcctggttagaaatgactgagtcgatgataagctgttctttgcaacccatggaacccttagcgcatcctttctgttgaggctctatgatattgtttagagcacagtgttggtagatacgccgggttacacaggatgtgaccaatttatacaaagttggaagacaagtaattgggcggtacttggatggatcttgggtgttattttgatccttcggtattaaataagtagttccctgagttagaaatgatggtattcctgcggattagaaataacatgattaattaatgttgataagcatcatgaataccccaaaacttcttaagccagaagttctgaactccgtctggtccaggagatttccagttatgaagctctttgatgacatttgagacttcttcagtcgtgaatggttcgtagttagcagtgacgtagtggtgacagttgtgcgtcgtatcttctatccagccagcattgttgttaaaagcagctggtgtggaaagttgatttccccaaaactcatgaatttcttcttggcttgggtaagacttgtcgacactttctacggtggaattgagttttcggtagaacgccttctcagagttctcaaaaagtgcattgtcacattttcggttgttactaactttataccttcttaatcgtcctgaatagacggagagtttttgttttaatgtatccagacactgttgggctgtgttattttccggatcgtatctcgagtgtcttgcagtgctccgcattatttcttcagctctcttaatgacttttctacttgttacacctcttatatattctgtgacttgaccaatatccctacgcagtaattcaatttttccgagaagtcttttttcccagggtgcaattctgttaccagtcttcgttattagtaccccgtcgtgttctgatcttaacgcccattacattagcaattgctgttgctgcacagtagattagcatatgcagatattccaatgtgtgggcttctacgacataattgggtaggacttcagtgttcacaatttgtaacagcgcacctagtttcttacaagagtttattcgtggtagcggtggtctgctaagtggatttgttccattaaactcttgtacggcacgagccatttcgtttctagactatcgcgcaactcgttgttttcctgctgtgtattgtcaggttgagtttctggtatgggaatctcaggaatctgctcatcaaggatttcattagggacttgatctaaaactagctcttggttattaatctcccgttcgacttcgcttttgatcgtattgcgtctagtctctgggataaggttgtttcttacgattacccggtattgatctgatactctttgctccgatacttgaatatctgggtactccctgcaaaattcggcatacagctgttgtctgtagccgatcgtttcttgaccgaggtttgtcaccttataatagaagcgcaaaatgctttcgttaatggacacagtccatttcatgcgctgcctcggtcgtcccgcttgagtgagcgccggctgatgttccggcgcagcaccttcagcgagtggagct

SEQ ID NO: 6865 - DNA, 1947 bp, Diabrotica virgifera
  SmartBlast Evalue=0; Info=ATP synthase n=1 Tax=Bombyx mori RepID=Q2F5T3_BOMMO
ctcgttcagtgttcgtcacttaattttcagtactggggcgactggcaaaaaaatgtctttgctttccgcacgattagctgcctcattggcaagaaatgcccctaaaaatgtaacacagattgcgggagctgtcttccctgctgcatccgtcgcagcccggaacttccatgctactccacaaaacaaaggtgctgaaatttcatccatccttgaagagcgcatccttggtgctgcaccaaaagccaacctcgatgaaacaggacgagtcttaagtattggtgacggtatcgcccgtgtatatgggttgaacaacatccaagccgatgagatggtggaattctcctccggtctcaaaggtatggcccttaacttggaacctgacaacgttggtgttgtagtatttggtaacgacaaactcattaaggaaggtgacattgtcaagagaactggtgccattgtagatgtgcctgtaggtgaccaaattttgggacgtgtagttgatgccttaggtaacccaattgatggcaaaggaccattgaacaccaaacaacgtttccgtgtaggtatcaaagcccctggtatcattccacgtatctctgtaagagaacctatgcagtctggaattaaggctgtagattctcttgtaccaattggtcgtggtcagcgtgagttgatcattggtgatcgtcaaactggtaaaactgctttggctattgatacaatcatcaaccaaaaacgattcaacgatgctgaagacgaaaagaagaaattgtactgcatttacgtcgccatcggtcaaaagagatctactgtggctcaaatcttgaagcgtctcacagacactggtgccatcaactacacaatcattgtatcagctactgcatctgatgctgcacctttgcaatacctcgccccatactccggatgtgctatgggtgaatttttcagagataatggcaaacatgccctcatcatctatgatgatttgtccaaacaagccgtagcctaccgtcagatgtctctgttgcttcgtcgtcctccagggcgtgaagcctaccctggtgatgtattctaccttcactcccgtcttttggaacgtgccgccaagatgtctgaagcccacggtggtggttcattgactgccttgcccgtaattgaaacccaagctggtgatgtatcagcctacattccaaccaatgtcatttccatcactgatggacaaatcttcttggaaactgaattgttctacaaaggtatcagacctgccattaacgtaggtttgtctgtatccagagtaggatcagctgctcaaaccaaggccatgaaacaggttgctggttccatgaaactggaattggcccaataccgtgaagtagctgcttttgcccaattcggttccgatcttgatgctgctactcagcaattgttgaacagaggtgtacgtcttactgaattgttgaaacaaggtcaatacgtacccatggctattgaagaacaagtagccatcatctactgtggtgtcagaggacatttggacaaagttgatccatcaaagattacagtatttgaaaaacaattctcagaacacattaagactagccacaaaaacatcttgcagagcattgccaaggaaggaaaaatcacagacgatactgatgcccaactcaagaaagtcgttcaagatttcttggccagcttctctggttaaatataaataatacaattattattaatacctaaatcgtcacttttgttgatgtgatctgtaaacgtttaagaacttcatgagctgtaatcctttcaaattagaataattaggcaggactcctatgttatccaataaggcacgtgaaagaattttcttttctccattttacaatatttatcgatcattgttttttaaggatatcttatttgtaaaaataaaaaataaactttatatttttt

SEQ ID NO: 6866 - DNA, 1945 bp, Diabrotica virgifera
  SmartBlast Evalue=1E-56; Info=Protein SMG5 n=1 Tax=Camponotus floridanus RepID=E2ASX0_9HYME
gcttatagacatttggtattttcaacaaaaaagttcctaaagtgtatgatctttgtcatcagacctataaaaacttggaagaatgtttaacatttgttaaattgacaaacagtgagtcaggagatggacctacagatggagattctgtagaaactgattctgtagcttcccatataagtggagacatgattttcaaaattgtagtcatttctttactatgcatatccaaattgaagtcatcaaattcatctcaactatcgacagcagtggctttcctgttgggtatctattcccagttgataaagaatgttaccaatcatttacaagaaggtattttaaattttccccaaaatgaaagcaaaggaaagtctttgaatgggattttaaaagaactgatgactggtaggaagagatcaagatcgaaattgagaagaaggaaggtattaaagaatgaaagtgatgatgaatctgaggctagtggtaatgaagaagatgactttagcagttctgatgattctttcatttctgatgatgaagatgtgttagatatatcttcagatgaggagtcagatattattaaggtatccgacgaatcaaactgtggcactccgaaggattccattcctaacggtctccccaacggtataaagactaacccgctcaatcacgagaaaactaaagaagacttgatcagaagcgttcagtttatggacgtcaacgacatcctggagatcgtcactgaagaagcgactttacaaagcatcaaaacactcagcgattggcttctcagcgatctggacgttctgaaatcgtgcggatcgaattccgccagtcttttaaggcagataacttatttgttaaatttgatcaatataaatttggctagtccgaagatgattggagtgcgtctgaagtcatcggaggttattagcaagggaattaagatcccgttatctgaggatactgtgcttaaaggtatggaaatactgaaaggttctcaggaaacattagactggactctcgtagagaaaaaaggcttaagtctgaaggaagaggctgttattagggtagtgaaactgttatcgtttggaaaatttctaaccactgtatctgagactggaattatttatgaagaagacggcaatatcttcgtttgtaacctaaaggagacaaacgtggatgacgcaaagaagtctaccactctaatggaagaattggacatacaagactccctggcaactacaacgttcaacggcacctccaagcgtacgttctcccccaactttgatgatgattcgtcaagtaaatcgccaaacgatggtgtagggcaactcaacaagatgaagcacatgggtcaactgtggctagcagccgaggttcgagcactagaaaatagagtgggcgccggtaagaccaccgccctttctccttatttggtcttagacgccgatgcgttgatcaagtacacgttcatggtgaagcagttggtgcattctaggaaatttatagtgctggttcctacagcagttgtgtcggccttggatgatctaaagcgagaaaagatagaagcaagggacgccatcagatggctcgagtcccagttccaccgcggcaaccgtttctttcgcgcccagcgccctcaagaacgagctcccattccatttatcaaataccccaagaagaaagacaaagagatgcacatatatatccagataatcgaatgttgccatttccttgccgagcagcaaaagggcgcgtcaaacgtcgtcacgctgcttattggaaaccaaaacgtactgtcgaatggcgaaaacaaagaattcagttacgtcggattggcgcagtcggtaggaatcgccatcgaatccatcactagtttctacggaaaatggaagaagaccaagggcaaaaggtgatgagactgtctacgagaatgataactgga

SEQ ID NO: 6867 - DNA, 1942 bp, Diabrotica virgifera
gtcagaatatgaggatgtggagtgcagataacccgcattatttgattgagatataatcccttatatccacaaaaacttggagtttgggctgctattagcaagcgacatattgtaggacctatatttttcgaagggattttttctaaatgctgacagatatcgtcaaaaaatgtttaactccatctataaatcaattgatggatgattcactaatataaggatcttttcagcaagacggggctccaattcatacaaaatttgaattttgagaggggctgcaaaatttgaattttattatggtctttttcgacaataagtttaaatatgcccattatattccctgcatttttttgtgtggccacatttaaaaaattcgttttttagaactgctctagcggatttgaaagatcttagacaaagaatgagagaaacatattgaagaactacataatactccgtagatcctaaacaatgttatagactcaataagaagaagagttacgttatgtagagatgttggtggtggacatattcagcatcttctttgattgtatttattattgttacctacttataattttatttttttcgatttttgattaaagttcttttggcaaattttggttttacaatgttaatcaaaatgcaatgatacaaattcagattaaaacaagacataggtaattttttgctcggatagctttgatgaaaataattgtgaatcgctcgtttccttttaactatttttttgtgtttttcatttgaaattagttctaaccctcttgataaaggtagagttcatatatcagtagatcaacctacatgttgtaaaaagacagtcagtaaacatttaatgtcgaattgtatgttgtaggacagacaaaaaatagtccaatagacattttttaacaattaatacatcgtctgaacataatcttggaaagaaaagtatttttgtcataaaagtgcacagttcttttttatttttaattgacaaaaagtggactcacagcataaagtctacattaaaaagtacatttacagtttgattcttctctacgaataaaaaacttagaaatgtgcactaaaatttggttttattcaagtttttgatgagctacttacattttgaagtcttatatacgtatatttgtatattactggacctcagaataataaaaaacacagttggtccttcgaaacggatgagtaatgtgtaaaagttacttatctcagtgataagcttcacactgcgttggacaattaagacataaaacgccttcaaactgttgttttttgttgattttattattaaatcaatttcttgtaatttttgtttcgctgtagaggatcaaaaaaataagaaaacgttcgagaatgacgttgatatataaataagtcaaatattgtcatcccaaaacccggaacactaaaaaagtaactgattgatgtgcaaattcgaacacgtttggatatctacatctttatgctctttattaccaacaataaacgcattaaaaagtgttcaccgactataaagttcacagacgtgtaatacaccaggtacacttaattttagactatataaaaaagtttttttttgtggtgaattaggaactttataattggtgtaacttttttttgaaattgttctagttaatcgtagatctatttgtttattattatcattacctcaatagtttttcactatctgaagaaaaattatgttttttcgatggtgaagtttatcaataaacatcatataatttacaagaagttaatagatcctaaaatatcattcctgcttgattttacaatcattttgtagtttttggccataaaaagaagtattttgactccaaatatatgaattcggaaatggtgaacgttataagtggtgaacttcatatctttaaagtttcaaagtaggtttattgtatgt

SEQ ID NO: 6868 - DNA, 1940 bp, Diabrotica virgifera
  SmartBlast Evalue=0; Info=Glutamate synthase n=1 Tax=Bombyx mori RepID=Q0KIX8_BOMMO
agcctttgaacgacaccaaaatgcttataaagtcagtccagattcgtggatcgttagagacattggtaactatcattggagagctggaggagagaaacatttgaatgaacctgctagtattgctgcacttcaggaagcagcagttaataagagcaaaactgcttacgagaaatttaaggaatcaaatatggaatcagtgagaaactgtatgttacgtggtcgcttgaacttaagaactctcgaccagcctctgcctttagatgaaatcgagcctgcttcagagatcgttaaacgatttgctactggagctatgagctttggatctattagtttggagtcacatcagacactcgctatagctatgaataaagttggaggcaaaagtaatacaggagaaggaggtgaggacccggaaagatatctggacccggaaaaacgatcctctatcaagcaagttgcttctggtcgtttcggtgttacatcttcgtatttagcccatgctgatgacttacaaattaagatggctcaaggcgccaaaccaggagaaggaggtgaacttccagggtataaagtatccaccgaaatagcaaagaccagacattcagttccaggtgttggtcttatttctcctcctccccaccacgacatctactccatcgaagatttggcagaattaatttatgatttgaaatgtgccaatccaatagcgagaatctcggtcaagcttgtatcggaagttggagtgggagttgtggcttccggtgtagctaaagggaaagcagaacatatcgtagtttctgggcatgatggtggcactggtgccagctcttggacaggtatcaagagtgctggcttgccatgggaactgggtattgcggagacacatcaagtattggttttgaataatttgagatccaggattgtactccaggctgatggtaatataagaacaggttttgatgtagtggtggctgctttactaggagctgatgagataggtttcagtactgccccgctcattgttatgggttgtaccatgatgagaaagtgccacttaaatacttgccccgttggaattgctacccaagatcctgtgctaagaaagaaattcacaggccaacctgaacacgttataaactacttgtttatgcttgctgaagaagtacgagcgcatatggccaatcttggtatccgcacctaccaagaattagttggccgaaccgaccttctcaaagctgttgaaaacggatcacaaaaagccagatctctaaacctcaatctaattttgcaaaacgctttacatatgcgacctggtgtcaatattaagggaggttctgtggctcaagacttccaattgcaacatagattggataatgaactgatcgccaaagccaaacctataattgatggtacccataaaagggtagatattgaaatgaagattcataacgaagccagagcatttggatctactttgagttaccatatttcacgtaaatataatgaaagtggtttaccagacggcagtgaaattaatatcaaattgacaggctcagctggacaaagttttggagcatttttagccaaaggcgttaaaattaaacttgaaggggacgcaaatgactacgttggtaagggtctatcaggtggaactatcgtaatttaccctcccaaatcatctccatttgaatcccacttgaacgttatcgttggcaatgtatgtctatatggagcaactacaggaaaagctttttatgagaggtatcgcatcagaacgttttgcagtcagaaattctggagcagtagctgtcgtagaaggtgtaggggatcacggttgcgaatatatgaccgggggaatagttttgattttgggtcttactggcagaaatttttccgccggtatgtctggaggtatcgcctacgtatgggacgtcgacggc

SEQ ID NO: 6869 - DNA, 1938 bp, Diabrotica virgifera
  SmartBlast Evalue=1E-109; Info=Endonuclease-reverse transcriptase n=1 Tax=Bombyx mori RepID=D5LB38_BOMMO
tagactacatattaacaaagacttgctagtttgtctgtaaaggtttattgtcacttcccaggttcacatccgtagagtagaacagacatgacatttgactggaatattcggatctttgtctttgtagtatactcctcagacctccaaacaggattcagcatgttgaatgcttgttgatcttttcgtatcctcatacaaattttgtcttctgtacctccgctttctgttatgacacttccaagatacgtaaagttttccacattttcaatctgcatgctgtttatagtaaatacagtgttgtttcttgcatttattttcatggatttggttttactaatatttattttgaaacttattttattggcttcagtgaaaagtgtttccaattggtcagctacatctttgaacttttgtcctaataggcagatgttgacggcgtattctagatcgcttacacgtgtggttatcgcccattgtatcactcttgtgttggagtctagtttggagaaaacatagtctacttcttcttcttcagtgccttattcggtccggatgttggcgatcatcaaggctatcattgttttgttgactgctctgcgaaacagctccgcggagcttatcccaaaccattgtcggaggtttttcaaccacgagatacgacggcgtcccggtcatctcctgcaaaatactttgccctgcatgacgagttgaagaactcgatatttttcttcgtttcgcatcacgtggcgaaggtactaaaggttacgttgttttactaaattgagcacttctttttcttttgtcatgcgctgtaggacctcaatgttggtgacatggtccacataagatatttttagtatcctcctgtagatccacatctcgaaggcttttcagtggcttgcgtcagtgtccaggcttcaactccatacagtagcactggaagaacgtagcacctcactatccgcatcttggttcccaaactgagatcactgcagcacagcaaggatctcagcttgataaatgtagaccgtgccatttcaattctggatctaatctcttgagcgtggtcccattgtgagttgagggtagttccgaggtaagtgaatctgtcgactctctggatctcttcgctatctgccattagtgccccgggatctaaatttacacggctgacaaccatgaatttagttttcttaatattaaggttcagtccgtacgttacgctcacagttctcacacggtctagtaaggcctgtagatcatttaggctggttgctagtaatacagtgtcatcggcgtagcggatattattgatgtatttaccgttcactcggattctcatctctaggtttgtgagggcttagtaaaaatttcctcagagtatatattgaaaagagtcggcgagagcacacagccctgccttactcctcgcatgatcttcacttggtcggtcaactggtcttcgaccttgacttgagcacgctggttccagtataaattcataatgatccgaatgtccttctcatctaatcctactctttgtagggcggtgaccatcttctggtgctggcaagggtcaaatgccttggcgtagtcaataaaacaagcatagacatcacaattaacatcgcggcatctctgaagtagaacttgtaaggtgaaaagtgcttcacgtgtacccatggaatcgcagaatccaaattgcatttcaccgacattttcctcgcatttcttgtaaattctggcatgtatgattttaagaaaaatcttaagtgcatgactctaaggctgatagtccggaagtcttcgcacgttttcgcagatcgttttttttggtattgttacaaacgttgacaatagccattcctctgggatattacctgaatcgttcatggcgttgaacagttcagttaactccttcatgcttacttcactcat

SEQ ID NO: 6870 - DNA, 1931 bp, Diabrotica virgifera
ggcattaaaggtgagaaatttgatctctaagttccggttgcaaaattgcaacccgaaatgccacattaaaaagttttatgtcatttactgttaaaaatgtatgagcggaagtttggcaaaaatttgtgaaaccgtgtattaatcgacgcaaagttagatgaagagttcaaatatcgagtttcagttctacttccggtcacgttgggtcaaaacctaggacttataaaatccaattgcttgttaagtggaaaaataatgaaaaattaggtagcattttttaaattacatcataagattaatgggctgtattagttcaccttaaaatatgttgataaggtctatggtaataggtaatttgctaatcttatagcgtcagctcattgatgttttataaatgtgatttaatttttctctataaactacttggccataccaccgactgttctgatttattaagtcttatcaactttagatgtagcactagaattcttagagacatgctcgtattttctataaaacactatcacacaaactatggtaaattctcttcaattaacaggattcagacactgggaaatgacttagtcaatcttatgatctggtggatataagatctgtaagatttaagcactgcctgactgagtatgttaggaatcgaagatgaatgacctttaccttggagtcttcatttcatttgattttaattgtcagagattttcattttaataatattttcaggaaatttaattttcttaaattataatcatttgtttaacaatatttaatacttagtttagtatttgtgttatggttagaatactttatttttgttatttgtaaaaatggggacatcccgtaataaataaataaataatgttgacatgatgttttaaaaataaggataatgagtgaaaatgacaatgtaagttaaaaaaagttacaaattcatgtgatgcgtgaagcagctacctattattggattatactgctcgttcacatggagtgatactttaatcaagcaatggctgaaatataatattgccacgtttaccgttgtatatgataatgtttttgtattaggaatgaaaacgtaaaggtacgtatgcatatgttggtgctcgctccgtgtagctgctcaaatacatacgacatgcgctctcctacatataaaccgcaaaccggttgaatcgaagaggttgagcgccgaccaggagcaccaacgtatccactatgtggagctgctacacggagcaccaacgtatggatacgtaccttaagacattagtgctcgagagaaagggttacgcatcagatcgagcaatatgtgacatacatatttttatacaaagaataatacgtactttattgcacctttttaatatgcttaggtctaacggcctgaaaacgtaattttttttgcgattgtattttatacaaatccacaagaaaaagttttcttgtatctggctgtacaccatatcaccgtcacctgaatgtaagaactaggtaacttgaatttcagtgtttcgtgataatggccaaaaaccatttattcatttctcttcagcgaaatatcttgaaccatgacacttattatacatcagttttaaaggaaaataatttcgtttctagtcaattcactgatttaaagaaatatacacaaaaatgttggtttttaatatagaaaaaccagagttatccacttattacattaacaaactactaaaataatgtaagagtataaaataggtaactatatttaatttgtaatgaaaactagaaaataataggaaaatatggatattttacaaataaaaagaaaacggccttaaatataataatgaaatattctaatcttcatcctcgtctggttcttttcttccgtgaggtaaatttgaataaaaattgaagtattcactacttagggcagc

SEQ ID NO: 6871 - DNA, 1941 bp, Diabrotica virgifera
  SmartBlast Evalue=2E-29; Info=E3 ubiquitin-protein ligase sina n=2 Tax=Schistosoma mansoni RepID=SINA_SCHMA
accagagaaaacaattgtttaatttgttaattgagcttaaattcaccaaagttaaacaataattaaaatatacattatttgaaaaaagtccctttggcactaaaacagtcatagtaacacatataatatatttgcattcagtaaactctcctaagaatcctaataaaatatgttatttttatcctcacttccacttaaactgatcttcataacagtttaaggaacacacatttccaattattttcctatttttctttgatagctacattgaaagtaaccattccgtgattagaatacgaagacagaacactattgggaaacataatgcattttttgaacagctcatcttcaggcatttcgtttaaacaatagtctgttctgatcaatttcttctctggtcttctcatgtctattattgatacctcgtagataaacgtttttaaatcgtttttgctccccacaatttcagcagccatcagacaatgttcagccactcttcgacaagtaattctaaatatgtgattatacgttataatacactttctatcaaatattttattgtagcagttgttctggtctaagcggaaagaatcagtgtaacttgtactgccgcagtatataactgagtcgaaatgaaaatttataaggtgctgaactataacttcatgatttccatttgatgtacaagttggaaaagggcaattgtaaggtttaaacgaacattcactttcgtgttttacgatatgattggcagatcctatttctaaacatccagaatcgtgatacacacacggatattgaacacctgctgtcaggccttctaaagaatagtttcgggtattaccaaatgctgatctgcatgttggacacttttctagtctaggtctacacatgttgcaaatactgtggcctgaactgcattgaaaaataggtggcttcataaagtttttacacacaggacattcaaaaaagtgtaatattttatcatcgattgtttcccctgaagattcttccaatttgattttaaatatattagtaatagtatcagaaatgtgggagatttgcttaagtgcatctaggtcgatttccacagcaatgttttcattaaactcgttataaatgtgatacgaagaaacaatttttgattttgttttaatgtagttttcactacctcctttgtgcttgactgagtactcacaaaacgaagagtaatcatcatctacactacaaattatgtagaatagcttatttttttgaagattggtctgcatcctaagtataaaagtgtgttgcttcattaccagtaactttaccatgtttgtatcattgagggaggtttctaagaaaaacaagttgttttcaaagttaataacatgatcgccatggcattctttaaagtgttctatgaaatcaatcgtacttccttcccaatcacaaccgaactttaacatggagcatactttggtgcgatatttacaaccactttggtgaaaatctaaatcttcgtacgatacccttacagcacaacctttggctttatatttgcaaggcagttttaataaattcaatatattttccaaagctgagtttttcatactcttccagttcattacttcctgcttttcttcataacattttgtacagacgtttcctacattctccactaacataataggaggttttaaaatatctttacaaactgcacagaagaggcacatgctttctagtaattcatccataaaactcatgagcgattgttctgccattgcacctattttttctgtagatatttgtacagtttactgggaatgcctttttatttcacacatgtaatgaaacttaaaaaactgtaacaatgtgtaagattcttacgtcaggtttttcactatcatcactgttgtgaaatgtataaactgaataacaatcacatcaacatttgaa

SEQ ID NO: 6872 - DNA, 1934 bp, Diabrotica virgifera
  SmartBlast Evalue=9E-38; Info=RNA-directed DNA polymerase from mobile element jockey n=2 Tax=Drosophila melanogaster RepID= RTJK_DROME
cccaaatgtttgtgtacgttccaattgaattgttgttgtgctaccattggttaaacacaatgtttttaaaactttttgcctcttaggtttttttttgatgtcagcttttatcgagatgtggcttctttttcaaaatatacctaaaaatgtaaatgataaataaattttcagattatcaataggtctctataatcgtacttcaccatatacaaatatgtggtgaattcgacaaatattcaaaatatctcgataaacactggcttatcaagaaagtactgagaggcaagaaaggttttggaaacgttgtgtttaactagtggtgtcacaatagtgatttgattggaacgtacacaggagtttgggggggtttaagggagcagaacccccataaaatttttatggggcgatcaagtttcactttattttttttttaagatgctggtgctgtaagaatgccacatgtccgttttcaatggaaagtctctaagagttctcgatgtatggaaagatcgattttcattttgtaacttcaaagggctgtaactttttttgtgtgcactattgtatataggtaagtgaggttgaatcaatctttttttggccctagagtttgtggtataatttgtgaccatcttttcgggacgccctgtataaactctcgaaatttagaaaaatattattttcacgttattttcatcattttatataactcatcctctgattttaagttattatactccaaacataagcaacaggcatcattatttttacctttatccctacgcgaggtcggcttccataattacatttctgcataagtttctatcttgggttatgtcaatataaatccctttaccgacatgtcctgcctaagcgtttgctaccaggtattctttagttttcctctcccaccccttcgccgaaccacagataagaaataaagataaaaacgaatacaagaggatccatgcaatagacagaagataagacacgtgaaatcataatttcatagtaaagaatgttctcgcaggcttttgataaagtctggcacactggcctactatacaaactaagaaaagtccttcctctcaactactttttaatcctcaagtcctatctctccgacctccatttctttgtaaaaataaaagatcagtgcactaacttatatccaatcatagctggactacctcagggtagtgtccatggaccagttctctaccttctcgacacagcagatcttcctacaagccaaaacatcatcaaagccacatatgcagatgacacagcaatcattgcactcaagcccgtacatcgcctggcaacggctccagataaatctcgatagaataaagatctggttacaaacatagcgaattaaagtaaacgaaagcaagtcagtacatataacgttcactaatcgaaaaggtacgtgcccaaccgtcttattaaataatcaagtactacaacaaagggatgatgtaaaatacctaggtatgcacttggaccacagattaacgtggaagaaaacagttgggtctgaaactcaataaaatgtactggctgataggaaaaaggtcacaactgagtttgtacaataaaatcttagtatacaaggcagtgattaagccaatacggagctatgggtacctgcgtcgagatccaatatcgacatcctggagagattccaatcgaagaccttccgcattatcacaaatgcaccgtggtacatgcccaatgaatacatcaactgtgatctgtaaaaaaaaattgccagttacgcccaaaaatgcgacatacgactacaaaaccaccccaacaggctagcgaagaacctaatgagacttcaggcaaacagaaagctaaagcaccacactccaagcgatctatcaacaagattttaaattttaaatttaaaaatattttatgtgtta

SEQ ID NO: 6873 - DNA, 1937 bp, Diabrotica virgifera
tatttgtatgcgcctgtcagataaactttaacgcctagtgtcgagtctcgtgtggcatatttcaacagatactcaaatattgtcatctaagaagctggaacagggatagtcactacgggcataactgcacaagcttgagaaggctaaagaaacctaactggtgtcgcctgataccaggaattgggtatactctccatctatatttgtttgcgcctttcaagtagacttgcacctagtctcgtttggcttctttcaatagatactcaaaccttttcgtctaagcaccacaaatgcacaccctttggacatttttcggccaatgttgagctctaccacggttttctgttctgttcctattctattcttgccccacaagaagctggggaattgatgatctctacggcataccctcacatgcgggaaaaggctaaagagatctatgtggtatcacctgcaagatctttttgtggataccctgcttcttttagaattaaagcgtttatttgaggcttttggatagactttaacgcctctagagcttttttgttttgtttcaacagatactcaaaccttttccaaattgaacttcttagcagtttttttattcgttcctagtctacacatgtcccaggagaagttactgagtcgcccctagcttcaactcgaccgtgcgcaccttataaatggcgcgtatacgtataatcctttcccgggcctaccacatcgaataaaaatgtttcttgattgatcgattacatgtttcttacattgtctgtgtatatgttgtaaatgcttgtttgtttgatgtgcctaaatccgttctatgtataaatacattcctagatacttcttatgagtgatgaaatcatagtgatcgaagttgttaacgtgggtttggttttgaataatgtattgataacactttacctatcacagagtggtattcgattaactcaaatgaaattggttcatagatgacttgcttgtatgttattctgagagggaactgtgaatttcaatctaccaagagctcaatattggataaaattagttgtaactaaaaaaggtggttaaccaacagtacaccaccattatatcgttttatattagcaatatgaaaatattactaattacagtgcctcaagttgaattagtaatacaggaggtttaacaaaggtactccgctgatctttcgtttaataaatttattgtatttcaagaatctgtctattcctgataaaactgcaaatcaggcacataaaccacgtgatagctgtcaaaatggttgtaactgcatacattttacgaacataacctcaaaaatgcatcttgtaatcattatacgttgactgttactgtacaatgttgccagtttttacgtatgtacctaattcaaacgtaacgcactgtaatttagatttccgaggcctatttagtatagaaatgaacatagtcacagctaattttgctggtacgctactgtatttgataattttcccaatttagaaatcatcccaatgtattttaaggctcataaaaagactgatttgtttttaaatcattttgactactcaactgcatcttgttttaacgtttatataaccaactttgcatagcttcgggttttatcattcagtattgccctgtctattatttttattttactttagtatttaactatcatttgttgttctctatattttattatttgcgcgtttacaggttaaatacattatttcttcttgtatttttattagaataagtacgagattattttatgacagaaaatttatgatacatttgttaataaatatgtttttataattaaaaattgtttttgggatgtaaagtgacatgcgctggttgcatatgtacgagttcttcttgttgaagatcagaatgttaatgtttaataaaattgattgattttacaactc

SEQ ID NO: 6874 - DNA, 1937 bp, Diabrotica virgifera
atgagtctatagtattaaacacggctttgctactttttttgttttgtttcttagtatatttagtattagtaaaatgcagcttcagaaacactgaattatattgagaggtcgctgcctataacctaattagaaagatgattcttaaaaaaatgcaagtcattatctatattattctaagtatattcaatattttatgaaaacttatatcgaatttctgcagtcctgtgttgaaccaagttggttcagactgtgtcaagctttcgtccccttctttggggctatcttcgggacttggtgttgtttcgttgctcagtctgctgactttagttcacatcacaggcactagcactattagtgctgttattaagtgtcgtcattatgtcggaaattgctggtgttatgtactttctttaaaagtatagatcccaaaatttcgtgtattatattttcatttttatttatttcctgtagctgtttgtgactgtagcttcatcatagacagtaaagtttagtcatgattgttgaatgtacacatatatattatgtatatttttgtttttgtttttatcacaaatgtgttattgagtatacagtattggaaatcttttttcggaacatagggactttcaatgcaatgggttagattcttgatttgcaattgatcattgtaaatttcaagacaatgtcgcgatgtttcatatttaattcatttgttcgactgcattgaactgaggtgacccatcggattgcatgcatagtttgtgcgatagccagcggtaaagggattacaatctaacaaatgaattaattttaaaacatcgcgacgttgtattgaagtttacactggttaattgtaaatcaagaatctaacgtattgcattgaaggtccctatcttccgaaaaaagatttccattactgtaaaaaattgctctcttttattttaccatttcgttaggcataactatattgacaaatctatctatgaagaagtgttcagttaagatttagatctgtgatataatttggagaatttatcagtttttaataaaattattactattccaagatatttttttaggaaacatcttatttttagtgttttgttaaatagtaaattgatatttttgatgacattcataatagaacaaagtgagcggattaagcacaggcttggtagaaataattagaaaaataaaaaggaattaatatctataatttcttatgctacaatgcttcatatattttaagaatttaggttccttatcatttctgtatatttgcaaattaagggggccagtccaggtagcattactttaaaaataatttagaaccaaatataattctactaagtagattattattttagaatataaataattaagtcatttgtgcctttcgtagttgataatcaacatttccagcgcattatatatgtatatttttggtgggcatatattgttatcctgaattatataaattttagtcttttcagcccttagaaacttgtgaattatatgctgatagatcaagttctacggagctgaagggacaaaataacagcgattaaagtataggtggtatgagagatgtatggcatgtagtggcaaaactaatttctttagtgaaaagttttatcttctactggaagatagagaaagagtacagtttgtcaaatatacggtgatacttggccgtattgatattaagctccacctacgatgcgcagtcaacagaaacacaattctctgaatgcgttcccacttacagtttattcgcatggcttatgcactagatgtaaacagtagttgacagcgatgtcgttaccagcaacgaacgggatggctatttggttaagtgttcgaatatttttggataacagttacttgtataatggcgtaaattattcattaatttaattaataatattatttttcac

SEQ ID NO: 6875 - DNA, 1938 bp, Diabrotica virgifera
tatttatttatttttatttcataaaatctacataaaatatttgctgctcattcgagctgagttctttaagttgtgactaataaccacctttacaagtgtatttttcatgtttttagataattttttaaaaaaataacgtttaaataaagaaactgatttaaaatttcttacaaagtacttgcattacctgcaatttgtataacatcgcctgtttgattcaaagctttgcttataagcaaagctttgtaggctaagagataattttattatgaatggagctgaaatacagctataccaattagatactgtcaagcgatccctaaagcttttacagcgatttttccgaacaatccatccactccattggctaatttttcactttcagtaagttttctctcagcaggcaacgccagaatggtgacacagaagttctgaggagttactggttgtggtgtagtagtaacaggtaatggtgttgaactcgtgttattaggaactgttgtattggtagttggagcgagaacaatggtgttgttaacaaaggtgatatttgctaaaactttggcagtggaaatacaaggtaatgaaacagtagctgacttcacagctcctacacaatccggagatgtactgttcaaacaaggtaccgaacttttcacacaattggtttgtctttccagactacaaggaactgttgaggtagcactggcaacacacatgacggcaccgttgttggtacataaagatgtagtgttagaaggacagaatgaaccagtatccccgacacaaccgactatagcattttcttggatggtggcttcttttggaacggaattgctgttgtgatagtagtgatggacttcgtagtggtcgtatcttggtgtattatcatataaaacggagctgtgatagtggtagcttggagaggttagtcttcctaatgaatatcccaaaaagaaaccaagatggctgcttcctgtatctgctgtagtataatgataagttggtacataagctggataagaataatgatgattattattgttgataatcgttacatgacctccactgggatttgcactgtaagcaggtggtgcatgatatccacctgagctataacctggatggcctgctggactataggcaggtggcgggaaattaaaaccgcctccagcttgtggtgagttgtgtactggtgcggatccatatccagctggattatacgctggtggatgtccgtacccagcagggttgtagttggggttatatgctggtggtttttctccatagtgagctccagaatttcccactcctgcaatagtttttggtggtccaataggctgtgacccggtattgtgtccagtagatcctccagttgcgaatcctatcggtcttgtaatttctggaccatggttcgtattggagctgccaacaccagaaacatgcttaggtggtccaatcggaccagacgaagcatggctgtcgggatgggatcctccaacgttccatcctatcggcctgtaaactggagctgctggaagtggatgatatgctggaattggcgcagatggatgacttactgcagagggatgggaatacgatggcgagggatgagagtaagatggagaaggatgggaataggatggagatggatgagaataggatggagaaggatgagaataggatggagaagggtgagaataggatggagaagggtgagaataggatggggaagggtgagagtaggaaggggaagggtgataggaaggatgggagtatgatggggatgagtagtgatatgatggatgcgaatagctatggctactggaatgactataggaatggctggaagaatggctacttgatcggccaccaccccttccctggatggtgattgtttgtgatattaatatcaatacacatattcctaatattcgc

SEQ ID NO: 6876 - DNA, 1917 bp, Diabrotica virgifera
  SmartBlast Evalue=1E-142; Info=DNA methyltransferase 1- associated protein 1 n=3 Tax=Aculeata RepID=E2A0I5_9HYME
cttacaagtttgttttgttagccagtaaaataaaaaaataaaaacgtgtagaactattttcttaaaaagcattttgaggatttaacagaaacataagtgaataaatacgcaggaatggcagacgttagagatatcatggagttggagagaccctccactccagaagtgacaagagaaacctttttggggaatgataaactgaagaaaagggcttctacgggccccaaggtgtcaaaacgaccagaaggaatgcacagggaagtgtttgcattattgtataatgataataaagatgcccctccgttatttccttctgatacaattggtaacaatggttataaacagacgaaaatcaaattgggaatgaggaagcccagaaagtggaaatggatgccttttactaatccaggtcgatcagataatgcaacgttttaccactggagaaggccatcggatgaaccaaaggaatatccatttgctaagtttaataaggtgatcgaggtagttaagtataccgaacaagaatacaacactcatttaaaatgtgataactggacaaaagaagaaactgatcacttaatagaccttgccaagagattcgatctaagatttattgtcatggctgacagatatgatactgaaaaatacccaaaaagatctgtagaagatttaaaacaaagatactacaaaatctgtggaattttatccaaactgaatggagaaaagaaaatttacacatacgatgcagaccacgaacgaagaagaaaggaacaattgaagaaattgtatgaaaggaaacccgagcagatagaagaagaacagtttctactgggagaactgaaaaagatagaagcgcgcaagaaggagagggaaaggaagactcaggacctacaaaaactcatcagccaggctgacagtcagaacgatactcccagaaggaatgacaagaaactgcccaagaagaaaattgccaatccggcgagaccttccagagtcgatacaaatcatattttgcaggctgtagaaagcgctggcatcaaatttccagattataagaacagcggcgtctcgttgagatctcagcggatgaaattgcccgcgaacgtcgggcagaaaaaatccaaaggggttgaacaaattcttcaagatatgggattagaattaaatcctactccatcagaggagatatgtcagcatttcaatgaactccggagcgacatggttctattaatggaaatcaaaggagctttagcaacgtgtgaatacgaattacagtctctaagacaccaatacgaggccctaaatccaggaaagacgttggccattcctccgcagttgtcgtcaaatagtgaagtcgaagctaaaattagcaccagcgaaatcatcgacgttgtcggatctccagatacgccgtcaaatacttagctagtaaaaataatgagaagcggtaaggggtgtgtgtattatacgtaaattctttctaacattagttaatatccgtgaaaattgaataatttgttgtaagtaggattttacgtttgatagtttgacttaacgggtgtttgttggcaatcgcttctttttcgtctttttttcgtcagcttttcacttcacatcctttcttccccatatatcctactctttatttaccataacacatcaacctttcctctcctagaccttttcaaagatacacagatactccattaagtcttactgcctgctactttattgacagtcgctatactttgttttaacacttataggttctatctgggtaaaataacaaaagttgtgcaaattcatctaaaattttttcgcatacttttaatcattaacaatttaagtgtaaatggctgatttttagaattttcgtctttcacttaaaaccgttaatattttattaaaaaacggaac

SEQ ID NO: 6877 - DNA, 1935 bp, Diabrotica virgifera
aaaactgatatttttattttaaaaatatacaaatcaatctatgacacaaagttgcctaaatatcaacttttattatattcaaagttgaattaaagaaaattgaatacgatacgagacggaaagaaatttctctccgattggcaaaaaaatatggaaaggatatctgagcgtcgcgagtcgatgtggatacaaagcagaacactagcgcagttacacgcgttataacgttatttttgaattagattataaggtaatccattgcttctttgtgcgacttgattatatcccaccgggaatactctaggctgctctatttgtggttggaaagcaagctggctgttttggtcaggaaatacttcaggttgaccgaactgttgaagtcctacttgactattttgaacattggtcatctcaggctgtgaaaactgttgcaaatttagcggagcatccttacctgggtatatttccgattgaggatactgttgaaaatttagctgattattctgaagacggattatgtctgattgagatagctgttgtaaattttgcggagcattcttaactgggtatatttccggttgaggatactgttgaatatttagttgattatgctgaagaggcaatatatctgattgagaaaactgttgtaaatttaaattattttgaaggggaattatgtctggttgacctaattgaatctgattattctgagaccttagttggttcaatgcttgttgaagtattaaaggttgattatttagctgctgagtactagataattctgaacaagggctctgaggtacatgaggtgtacatggagaaggaatataaggaacatatggaatagttggattacacggggttgattggggtcgtagcctgtagatcaacgtatagcctggagtggagcaggaaggtcttggaaggttaggtactggtagaggtacaggatcaatagaaactggcggttgtggctgcattcgcgtgcaaggttgttgtatatattgatagtattcccaaatatttctgtattgaggccaattaggtatgtatataggtctttgaggatttgcagagcacggtcgtggtggtatgattataactggtcttggattcggtggtggcggtattggtcggtgcgtaggttctggtggatatataattacagttggtccttttgtagtcggttctggattcggtggtggcgttggtggtgtatatacaataacaattggtctttctgtagtcggtgctgggctaggttttggttcaactggaagtattccccaacaaatatcagaacactcttttcgtcgaaccattacacaagtatcatttgcgtaacattttctttcacttataaaacaacaattgtcctcctgtactatttctttttcttctttagttctctccacttgattaaaatgtactgttatcgaattttcattgcttggattaagagatataggcatagaaatattgttgactgtgtttatggtattcgtgaaagtcagctccattgtactattatttatattggtgttattgatggtattttcgccacctgagggacttagctgaggctgcggaaatggaaccagaataggcctcacttcgtctcttggttcaggaatatttggtctgtcgttgcaagaaccacaattattgttgttgcatgggctgctattacaattactgttgcaaggcctactgttacagttgttgttacaattgccactattacaattgttatagcaggggctattgttacagttattgttgttattgcatggtgtagaacaagagttgccacaacaatctcgtttgactatcgacttggtccatactgcttggaacacgcagaggaggataaagctaataagcagcttcatcttctctgtgttaggaacgaaccaaagctgaagataccaaatt

SEQ ID NO: 6878 - DNA, 1934 bp, Diabrotica virgifera
  SmartBlast Evalue=0; Info="Carnitine O-palmitoyltransferase I, liver isoform n=1 Tax=Camponotus floridanus RepID=E2A6C2_9HYME"
taaggtctatccattttctaaaaccgtctgtcgtcttatattcattttagcacaggtgtcataagttactaattgattagtcaaaagctaaaagcaaatcaataactcgaaaaattattgccgactcaaatattaacatttaaatatctacttaataaatatttagataaacaatatcgtaaaacaaagagatgatgttatgtaaagttgttttgtagtaaaatatatgtatcggatgggattcccgctaggattcatttcaaaacttctactttttcccgctctgagctttgaaatccaagaaggtttgtcttatgtccgcaagagcacgctcgatgttccttgcgaaacggtgacaatccgtggtcgggcaactctctttgttcgatacatggaagaacagcagatcttctccagctataatgtacgacacaccataaccgtcgtcagcaaccggtccgaaaccacctcctgccgaaatgcatttgggatgtttctttagatcgaagcgagccgtttggccgtgaggagtttgggaggtggacaagtcgccacggctcgcttagcacttcttggaggaagggggagtctacttctagatatttcgagaccacgtacagacagaagaggtgtctgtcgatacctttgccacacatcgcgtcttgggaggtaacttggtggtttttacacgcagtttttaacaatttaaccctctcttctacagacgagtttttattttccatggcttttacccaagccactgagtggatactaagaggtcgaagagtttcagttctgccttccctgtaaagtctagtcatggtggcttcgtacgtcagacagaacttcccggcgtccctaaaataagccaactgcagcgccatctgtatataagcatccggactgacgccgcacgttttcatgaagccttttccgtaactgtcgtggacgaagatgcgcagattgatgtctttgatgaggttgcaggcgacgttgtatgacttgtctatggcgtcttgggattcgaacttcaattcccagttcaaacggatcggcgctggtggaacaatctccggtttgccaatagtgttgccggtttcgtcatatcgaggttcagtttctgaggtcatcacgtactcccacagatgcgccatcactgctgcgtcagcccatgaatgttccgcgttgaatccaattcgaccgttgcttccaacacacaatgtaaacgatttgtcaaaccatctgtcatatcctttgccatgcaatagagctctgccatacttatcgagctgtgatgggtctttaggatcataaatatacggaaaatcatccaacgtcacaacaaaagcagctttttcaatcagatccagcgaggccctattaattcctttgttgaacaactgagctcttacagtagcccagtgggtcctttcgccagctgtcagtgctgccaatttttcttctccagctagaggttctgatgtatcgtccaagatttgctgaatttgtacttgtatttcacatggtttcagaatcctccctttatagataacaaccttgaaatatcttcctttatgataaactactatatgattcgagtccacccagtgaagtatcttatcagtctctttcccaggtatcctagtagtgttgaagatcctttcgtactgccacgcacacaaaggcactagaccttggactagaatcggttccaactcctgcctctcgactaaacgtctgaaacatagcaaagtgtatatggtcgacccggccctagctgcttggtttgtggtaggatggagtaatactgtatcgataccatagaaattagagttgatcatcaacggggatcggcctctgaggtagacgtattcttcccaccaatcggagacgtagttggtggaccaccaagactttaatacgaggtagcgttg

SEQ ID NO: 6879 - DNA, 1931 bp, Diabrotica virgifera
  SmartBlast Evalue=1E-138; Info="Protein BAT5, putative n=1 Tax= Pediculus humanus corporis RepID=E0VXH4_PEDHC"
tgatttcacgtttatcaacaaaagttccaagtaaggacttaaacaattattaacactaaagaaaatgcattgttaagtattaacagaaataatatttaatcactaatgaccttctcggaatagataattacattctattgataaaaatgccttcagtccaacaaattttggcctgcatgtttatgggcaaactcaaaaaaatatatggaggtccagtagagaagctgtacgaaccaaactctcttgaacatattagtgacaagtgcttaaattctctatatgtaatttggaaattaggcatctacacatcaccaattgtggtgggactcttgtatcagaggggatactttgaacctgatggattgttactcctaacaaaatttataacaactgcaggtgtcattgttgttatgtcattttgtttgagggggtatggtagagccaccaatccaacatatgtaaagtattttaaggctgttaagactgcagaaagagatatgacgccaggtgcaaaacaggaattaatgaaatatgattttgactttaaatcttggccagttgagtacaaatgtaccagtgatgcaagggaaatggtacaacaaattcctaaacaaccaaaatactctggattgataaattggctgtggcagttacctttcaaaataatcgcttattttgctattcacacttttggcattagacttatttatccaggaaccattggattccttcaaattatattagatcaaagtcttatgcaaggtagatctaagctagtagaactatacagaggggaaagatataaacttcagacagctgacggcaatcatattgatactatgtttgtcgatagaagaaaaacaacctcaattggtaacacactggtagtctgctgtgaaggaaatgccggtttctacgaaattggggtaatgagtacccccatcgaagcaggatattcagtattgggctggaaccatcctggctttgccaatagtacgggcaaaccatatccttcgcaagaacaaaacgctattcatgcggttatgcagtttgcggaacagaaattgaacttcaaaagggaggatataatattgttcggttggagcatcggtggatacgccgcggcatgggctggtgtgaattatccagaagtaaaaggcatggtattagatgctacttttgacgatgttctgcctctagctgtgaatactatgccctcttggatagaacctatagtcagagtggctattaaagatcatgttgatcttaatataattcagcaactagtagaatatcctggacccattttgttaatcaggagaactgatgacgaagttatatgtttgaggcagggagatgtttcgtcaaacagaataaatattctattaaagaaattactacgttatcgatatccgttcatctacgacgatgtacgaattcagatagtggatggttatttgtctgtttcacaggacgaacaagataacttcttacaaagatatgccatagatgatagattttgctactcatcgttgcagtcctacatatctgaatattcaaagagttacccgatgaagattggagaagactggaacgatcaagataaagcgcaagtggctctttacttggctaaaaaccacatgatggacttcaaggctacccattgcgtaaacttaccccctgacatgttccggaagccatgggatgtaatcgtggaaagcgattttgtatttatgaataactaaataatcaacaaatatttataccattatttaaaaaatgataaacctctttgattcttgttgatttatgtgaccattaaagctgaatttgattagtgatatatttttcatatttgcggtacggcgagtatggcaacatacaaagtatttatatttgtaaatttgagatttgaatgaatttcaataaag

SEQ ID NO: 6880 - DNA, 1934 bp, Diabrotica virgifera
  SmartBlast Evalue=0.000000001; Info=Endonuclease-reverse transcriptase n=1 Tax=Bombyx mori RepID=D7F172_BOMMO
ttaagccacagagtaagacaattacaaataagagacaaacattggttccaaaatacccagaacattttagaagggcattagcaaacactgacctaccagagactatccgagacactgacgaaacgtggggacacacaaggaaatggatcactgaagccatcaacaacataaaccctaaagaaaatatataggaaaaaacatttgatgcttgaagatactctcaatcaaaaataaagacgaaaacttagaagcggcacatcaaattcaatataaaaaaatagagatagacaccataagtacaactataaaatacttgtgcagaagggacaatgtaattatattaaaatcttatgtgctcaactagaaaaacatgctggccgacaagaatctagagaactttgctcaaaagtcaaattatctagcgagagaattcaaaccgcatacatagatcatcaaaaattatagtggaaatatcattacaaaccaaaaaagttatcgcagcggtttgaaaacaatattgcgaaatactgtttctctaaaaacaacccaggcaataatgcaaagaaaactagttatgaaaaagagccacaaatactgaaatcaaaaattgaggcggcgcggcgataaaatagctgaaattcaaaaaagcagaatggtgggaaagatggaacactagctgagacactctacgaaattggaggggtagggatttaagtaatgcttataatcttaaacgaaatcaggaacaccgaaaagtgacaaaatgactggggtaagctcacttttattcccatatataaaaaggttcaccgacagattacaacaattgctgtacagtagcattaatatcccaagcgagcaaagtacctactcctcatcataacgaatggaaaactaaaatcaatactcttaccattatattctccaagaagaattgtgaatttgtcctagataggggcacaagagaacacagttttaatgttcatcaaattgtagaaaaatctcaagagttcaatatagaaatatatttgtgctttgttgactactttaaggtattcgagaatataaaatgggataaataaagtaaaattatttcgaagagcacaaaataaaaacatgaaattaaaaatattaaattttatattaaagttttaattagttttagaggcacctacagatagttctaatttctaaaacttttacaaaatacatagtagcgtgcctatctaatacttttaagtacattttataaaattttatcttacataaatttcagttttaataaaatataaaaatattgctataaaattattaggtacgctactgatgtaaaatatattaatatataaatatatatacccttatataaaaagcttacacttaaggcacagttaaaatgcggaattatggcagcgtataaagtcactaaaacgattacaatgactggtgactggaagtacgtgataaataattgtcttacatagtcaaaaataacgtcaacaagatgcaaaccaataataaaacttgtcgataaaaagggttttaacaaatttaattccttatttaaaaatatgtattatcttttttgtcaattcttttctgatcccctggcatagactgacaaagacaactaacttagacaaggatgtagataaacaaatgtgaaagttcaaaggaaagtatacaataccaaaacataatacatagttgcaaaaaataaaaataaatgaagttctgcattatcattttggtttgggggtttttggaaagtaatttcgtattaattccgagtaatttatcaacaaatagtaatacataataagcttttcataaatcataatatatatagaaaatttgatactttgtaattgtatatggaactacctacagcacttccattaattaataatgggctcaggcctcgtgcccagtcg

SEQ ID NO: 6881 - DNA, 1932 bp, Diabrotica virgifera
  SmartBlast Evalue=0; Info=2-hydroxyphytanoyl-coa lyase n=2 Tax= Aedes aegypti RepID=Q16FM3_AEDAE
gagtgaagagttggcacctgcacctggcacttttaattaaaagatagtagatatcagattttcaaagtgcttgataaaacaatcagtgctattttaaatccatttgttaaagtttgttcttaatacttttaaaatgggagacttagatggaaatacagttctagctcaagctcttaaaaagcaaggcattgaatatgtttttggaatcattggttacccagtcattgaacttagcatggcattacaaatggccgatattcactacattggtatgcgcaatgaacaagctgcttgttatgcagctcaagctataggttacttaactggcaaccctggagctgtattggtagtgtcaggtccaggactgttacatacatttggcggtttggccaatgcacaaataaattgttggccagtacttgttttaggtggatctgctccacaagatcatgaaggaattggaggatttcaggagtgtaatcaggttgaactggctagaccatattgtaaatattcggcgcgtccaccgagcataccattaatacctcttcatgtcgaaaaagcagtgagattagcaaaaacaggtcgaccaggagcagcctatcttgattttcctgcaaatattttatcaggtcgagtttctcaagaaaaaatacctgaccagtatggtccagtgcctatcccgcaagtttttcctgatccaagacaaattgaaaaggtcataactgttctttcgcaagcccagaatcccctgataattgtaggaaaaggtgcagcttattcaagagccgaaaaagaagtcagagacttgatagaatttgctaatttaccatttttagctacaccaatgggaaaaggagtcgtacctgacacttctacaaagtttgttggatcggcaagatcgaccgctttacaacaagctgacgttattctacttctgggagcacgacttaactggattttgcattttggcagacctccaagattttctccaaatgttaaagtaattcaaatcgatattactgccgaagaattgcacaatagtgtaaaatctgaagtagcgatacaaagtgacataaaaagtgcattagaactaataaatgcaggtttaaaaaaacgaaatttcaaatataatgacaacagcgaatggtggagtttattaagaaaaaaatgccgggataatcagaggactgtaaaggctatgtgtgccgatatatcagtaccattaaactactatgctgtttttcaaaacctatttgatcatttacctgaagattgtataattgtaagtgaaggtgctaatacaatggatataggaagaacattattgcttaataatcaacccaggcatagattagatgctggtacttttggaactatgggtgttggtccaggatttgccattgctgctgcattttattgtagacataatcaaccaaataagagagttatttgtgtagaaggagactcggcttttgggttttctggtatggaaatcgaaactatggttagatataaacttcctgttattattgtgatagttaacaattctggcatttattctggaatggaagccactgtattaaatgaaataagagatagtgttggagtagaagaaatcgccaaagtttcacctccaggatgtttaaccagtgtaacgcgttatgacaatatgatgagtctttttggaagaacaggatttttcgttaacacaattccagaactgcacgcagccgttaaggaagccctaaatgttattgacggacctacaataataaatgttattatcgatacaactgctgatagaaaaccacaatcattccattggctgacagagtcaaagttgtaatttttattgttaaatgagaaatgtgatgcattggtgctttttgtaaatttatggataaagatatataaaaacaagtatattct

SEQ ID NO: 6882 - DNA, 1929 bp, Diabrotica virgifera
  SmartBlast Evalue=1E-138; Info=Protein 4.1 homolog n=1 Tax= Drosophila melanogaster RepID=41_DROME
atagtaagagagtccgaattgatcccaagagcaaccaagtttggatttacgattataatgatcctattacaaaggaagaagtttacactactggacatattgatcctgtgaccggttatatagtttctgtttatggtcacgcagatccaaaatcaggctcaatcgctaaattgaacaaagtcgatccacataatattaaagtcgatcctgcatctaatcaagtattcacaaagacagcggaagttgacgagagtggtgaacctttgtattctgcctcagaaattgaccctaagaacggccagatttacaccaaatacggtaagatagaccctaagacaggtaaatttgtaattgtgaggatatatctgataacacaaaacgatccacaaggaaaagctaaagaaattgatcctaaggattgtcagttcgatgaaaaaactggacgtattataaacgtatccacacaaactgtatatatctacagcatggtagatccaaaaacaggaaagattgtacaagtagatccaaatgatcctctggtgaagagtgctagtaccaaagtgactcaagttttaacacttaccggcgaaattgatccagtaaccggaaaatacatacagaatggggtcatattgatcctcaaaccggagatatcgacccaaaaacagccagacgagatccaataactggcgaattagttttgaactacgctcagatagacccaagccactttaaagatctcaaagatacaaaagtaaaggtaaagacgtacaccaaaggtgatgatagttcgtcgggagaaagtagtgatgacgatttgaatgaatacgcagctgataatttgggagacatcgcaaatttgaagataccgaggggcaagaaaggagttagtactcctgtcattgtcaaaacgacgaccaaacaaactgttacaaaggacaaagacggccttacgcataacgtggaagaaagagtagaagatggcagaactggtgaagttacgttttccacacaagtaaataaggcggacgtaccgtccgacgatggcaaatcaccgttcgtgaccgcacgcgcagtcaccaccagaacggctaccacccatgaggatttgggtacgaatgctcgtacccaacaactcgaggagaaaactgtagctcattcgatgacgtcgagtgccacacggcaggaacaaagaacggttacgcaggaggttaaaacgaccagtacggttgttagtggagatcagctgggcagacgagacagcattagttcgactagttcaggtgattcaggcacacccattgatccgcctgacgatcccaatcatccatattacaacagtcctatttacaaggacaacataccagaaggaatagtacaaacggaaagtattgtttaccgtggagatccgaccattattcactctacgacgaacgtcccagtagtagctaccgaagcgcgtaaggtcaacttgacctcagacgatggatcttacagcgccactggcgaaatcgtcagctcacagactatcagttctaaaactagaactgtagaaacgataacgtataaaactgaacgagacggggttgtcgaaacgagagtggaacaaaagataacgatccaatcagatggagatccaatcgatcatgacaaagctctggccgaagctattcaagaagcaacagctatgaatcccgatatgaccgtagaaaagatcgagattcaacaacagaccacacagtaacatgtctgggattattttttatatataaatagtgtacactttacatattttttattccagagcgattagcacaagtaaaggtgttacactggttagctccccacaaactaaatgttaggcatacccccctttgcaaagcttaaatgtaaattatttaacaggtatgttttaacacgtgacaagac

SEQ ID NO: 6883 - DNA, 1923 bp, Diabrotica virgifera
  SmartBlast Evalue=1E-71; Info=Carbon catabolite repressor protein (Fragment) n=1 Tax=Aedes aegypti RepID=Q17H00_AEDAE
ggttggttttcagtttccaccatctccaattttttagatgtaggaaggttgatgagtgtattttttgttaaattctaaatggcgagtgtagatatttccgtgggtatgtgttgaacacgagttacatattgggtttatgagggaaaattgacaatgagatgtaatgagtaaattcttaaaatttgggatatgtggtatagatatatccatagagctctcacatttaattcatgttcaaagaatgtttaatgcttttgcaaataccggcagtggcaaacatttaacattagataaattagtagtatcagttgatgtaaacaaaaacttatctgtactttatgacaataagccagaaaaatatcaagatctagaaaatatttcaaatcagataatacaacttggtttgaactcgtgtgataatagtcagataattattgatgaaaataatttgcattacaaaaatcaagtgcttcgacaagatacccttaaaaatcaagtcaatcaacaatataactacaataacaaagtcgcacagcgttattggtcatctcactatagtccatcattgttttcaaatttatatctacacagctacagtagtaatcaattatatcaaaaaatatccccatcatatttgttggtaaggcaatttcatactcaacaagtacagaggaagaaatataagaaacataaatatatagataactgtgctggtaccaatatcatgtccttaagattgtgggaaaacacatgtgataacgtcagtagaacccctggttttatttttactttaatgtcatacaatgttcttgctcaagatttagtggaactacatccttatctttacaaggagcatgactcagcagcattgtcttggcctacaaggtggaaaaatctatttgaagaaatttctaagtttaaaccagatattctttgccttcaagaagtacaagaatcccacattgctgattattattcaactctgaagattttgggttacgatggtattttcaaaaagagaacaggtggccaaagcgacggttgtgctatctattacaaatcagacaaagttgaaatgctagactatactttggcgcagttttaccagtctgacatagctgtattgaatagagataatgtaggcattgttgcaaaatttgtaccaaaattgcatcccatgagagaatttgttgtggcaaccactcatcttctatacaatcctcgcaggcatgacgtgaggatggcacagatgcatctactcatgaccgatattgagaaaatgagttacaaaaatgatgaagggaacatacattacttacctataatacttaccggtgacttcaactctccaccgcactctgacttatacgaatttattacacacggtaatattaagtatgaacatttagcagagccgcttaaaacacctggtgatcataggaaacagcaacttgttacttcttctttggggatcacagacagtagccaatatttaagagaacttcaacaaaggctcaaagagtgtacgattatagagttaaccaaagataaagatgattcgaaacaatgtgataaatcaatccagaacaataataagtataagaaaagtaaaagcttgtcacacaattttggtttaaaatcggtgtacaagcatggatctggaccaactgcagaaggaactactcatcaagacgaatggttgactgtagactacatattttacagcataaagaagaaagataaggtccaaagtgataaattacaactcctgtcaagatacagattaccctcatgtcaagagttacaaggtgtacgaataccaaactcttatataggatccgatcatttatcccttattgcgaaattcaagttagaattttgaccatatactattttttacgaaatatattttcctggtgatac

SEQ ID NO: 6884 - DNA, 1923 bp, Diabrotica virgifera
  SmartBlast Evalue=2E-55; Info=E3 SUMO-protein ligase RanBP2 n=1 Tax=Camponotus floridanus RepID=E2ARH2_9HYME
gtaatgcgcagagaacaagtgttacaaaatatgtctagaatcataccctcaacgaaagacatagaataccttgaacaaagatgaaaaatctattatgtttgcggctgccgacttttccgaaggcgaaatagtcaatgagaaattctgtgtgagattcaagaacgctgaaattgctgcagacttcaagaaggccattcgtgatgcattggatggaaaacctaccgaagatgaacttacatcaaagaaaactgaagaagacgtagtggttatatcagagacccaagtcacaccggaagaggaacaagaagctataaagttagggcttccgcccaagttcatgtcttataaacaattaccagactgtaagtgcgaacaatgcaaaaaggatgacgagtacttgaaggccctcttcgctacagaagcgccaaagaaaatcgatagctcagccactccgtctagcaaattttcctcctacactactcccaaactaagacagcctaaggctatgacaaaagaggtttctccttctccgaataagtctggttcacttatcaaaccagctattctaactcctcccagtgctaatcaaacatcatctaacgtgtctttgcctgcagtatcaagcactaacatattttcttcatcaaacaactcattcaatactggtggtctattttcgagtaccaatttattcggaggtgaaactccaaataaggaaaataccactgtgtttaataagaatattgcaactgatgttaaaactactcctgtgtctagctcagcattttcttctggctctagtatattcagcttcgattctcaacaaccattcaaaccttttggttctaacgtttccaacatttttggacaaaccacgccatcgactaccagttcgtctgtatttagtcaaaccccaactaccacatcaaacattttcgcacaaaataccccaactacgaatttttttggacaaaatactccaaccacaaatctctttggacaaaacactcccactgcgactcctttgggtcaagctactccaacgactgtttttggtacagtttcaaccaatacaacttccagtatctttggccagaacacattaaccaatacaacttcgaatctgttctcacaaaacacccctactaccaccgtcaatatcttcggaccgaaaaatccgccacaaaccacctcgatgctgtttggacaaagtacaccaaccacatctaccaatatcttcggggcaaatgctgcgtcaaacgtttttggacaaacgtcaacttctgggtctattttcggcaacaagacctttaatgtggctgaagataagagccaaacggcaggttttctgtttggtaatggagctacgcctgctgtttctaccagtaacgtcgcccctaaagttccttctaccacgggcttgaaagagactgatgaagttgtattaaaatgcaattctgacttatcgttcggatcgttggccaaaacgtcgttaaatgcagaaccgcagtttaaaaaagatgaatcattttcgttccttggtaccggagcgccagtatttaaaaacgtcaagaaagctgccgacacctctaaaggcgaatctgacgacgaaaataacacctcgaacgccaacgaagagtatgatcctcactacgaaccaatcatacctcttccagaagccattacagtaaccacgggagaagaaaacgaagccgtcgtgttcaacgagagagccaaactctttagattcgacgcagataccaaagaatggaaagaaagaggagtcgggcagctgaaggttctttggcaccaagagaaaaatacctaccggctggtgttgagacgcgaacaagtactcaaagtagtcctcaaccagctcataacccccaatttcgagctccaaccgatggctaccagcgacaa

SEQ ID NO: 6885 - DNA, 1920 bp, Diabrotica virgifera
  SmartBlast Evalue=1E-116; Info=Probable RNA-directed DNA polymerase from transposon X-element n=1 Tax=Drosophila melanogaster RepID=RTXE_DROME
tgaagaagtcgttgttcgtgactcttggcaaatttttctatggtcttgttaacagtatccatgtctaggtccctatggagatcactgttcctatagtaccatggagcgttgacaatgctccttagcactttgttttggaatcgttgaatgataattaaatttgtattactagcgcagccccatagttggatgccatatgtccatataggttttataatctgtttatacaaaagtattttattgtagattgagagagtggattgtcttcccaatagccaatacatttttttatacttcatgttaagctgttctcgtttctttttaacatgggccttccagcgtagcctagcgtctagtgtaatacccaaatactttgcggtgtcggcatatggtatctgagtattatttaagttaacaggaatgtattgatttttcttgtttgtaaaatttatatgcactgacttcatttcgtttaatttaattcgccagcgtttagtccactcgttaaatctgttaagagatatttgtaattttcttgctgcttcttcatggtcttcacctacggctaagacggcagtgtcatcagcaaaggtagctattgtattatgttgtacttcagggatatcactagtgtataataggtataggaccggtcctatcacactaccttgtggtactcctgcattgatttcctttagttccgagtaggcttcttcttgcttaaccctaaaaactctctctgatatataagattccaataattctctgtattgtcttggcaaaatcctgcttaatttgtacttaagtccttcgtgccataccttatcaaaagcttgcgctacgtcgaggaagacagctgagcaaactttctttccttctagcgacctctctattatatccgttattctatggacttggtcgatagttgaatgactttctcgaaacccaaactggtgtgatggaattagagccttagcatctatgagaggtttcaaccttttcagcaaaagcttctcgtacagctttgaaattacgggtagcaatgaaatcggtctgtacgatgatactgtatttggttgttttccaggtttaaggatcattatgacctcagccactttccatatcttgggaatatatcttaatctgaacgaggcatttatgagatatgtcagttttactatggcttttctaggaagttgttttaagatttccccagtaattaagtcaaacccaggtgctttcctgggattgatgtttgatttaatttcgtcggccacttcttttggggtgactagtttaatttcaccttcttcctgtgtggcattttcccattgcagtgtgttatcaccttcatttggctggaatgtttcctcgagatattcagcaaatttattagccttctctaaattgctttttgcccagcttccatctgtatttcttagtggggaattttgcattatcggtcgttttaatttcttagtggctctccagagggaataatcagttgtgctatcatttgtcaattctcttagatagttactaattgattcgtttttattttttttaatttctcttttaagctgttgtgtagcattatttagttttgttttatcagatggagctctagagcgttgccagatccttctgagttttcttttttcttcgattagctttctaatttctttagggtaattattacctttaactctatgaatcagttcaggtgagttattccaagcggcttgttgaacttgtttaacaaaacattccgtttcttcatcaagttcatatctagtttttagtgaaactttgagattgattgtttcttctaagtgaagctgaaaactccgccaatctgttagtctattagtcagtttaggaggtggctggctttgaataacagtatcgctaactgtgaga

SEQ ID NO: 6886 - DNA, 1924 bp, Diabrotica virgifera
ggttacacctccgtggcttctaaaaatgcaaaccaatcggatgctggagcaaggaatatgagggaattctatgatttgcgattcacgtctcatctgcccagcgcggaaaaatgccaacgaaactggaaaaaaaattaatctaaataaatttaaataaatctaaaatttatttattcgacatttcgatctggcgtttatttgtgtcagccgaaacaaagacttacatctccggacagcaatttagggtcttgatcacaagcgtttatagccgaagtcacgcgttagtttggcatacatatgacattttcatttgcatttttgctgtcccgagattgaagataattcgagatatcgaaatgccgttttcagatttggattcaggatgcaaaatcacatggcgatccatcggtagatcggctccaagtatttacagcagcggtaacgcacaaacgaagagactttgcgaatttataaacaaaaacaaaattttcgttgaaaagatcgaaccggtcgaattagtcagctgcctgttttaatcgcacaagatttttatactagaagacagaatgaacaaaaagccttgctccgtgtgacaacgtaatactataggtcaatttacggatttttgtccgatgagtgaaataatactcaaggcacatttagagttacacctctgtccgatacatttaaccctttgactgcgggaaccgcaatttgcgtaatttcagtagcgcacgagatgtgcgggaaacgcatatatgcaacagggctaactccttcgctgcggttagcgattatttgcgtatagacaaaatataacgtaaacaaaatataaaatatataatgtcatcagatggtttctgaatgaatgggcgtgaaccgcccacctaaagtgcctcgagcgggatgaggttcacgcagtcaaagggttaagttagaattttaaacgtggacttatgtttttaattcagcacctaggtagctgcatcttatttcaccggtaaatagaaaatattcaataaggaagtctttacttaattcacattcctagtagccgtcatgtgcggatagtttttaaatgaattcagtttaaattaaatagcggtattgtctgtttcaagaaaatgaaataagtgttatgtaatggaaaactgggaatagaaattagaactagagtatcgagatgttacgtattctctgtcattttatatggagttgaagcctggacaattgcggacgcaactgaaaaagacttttcagcttaagatgtggtgctgtcgaagaatatggaaaatatcatgaatacaaaacgtaacaaccacggaaacattaaaaaagatgaaaaatttattggcagtttcattttacttcagtggttttcaatataagttgattctttcacggtaaaatattgtaaaatctcagaattttacaaggaaccgcaccaattttaatgaaattatacaagtaaccttaacttatccgtcctgttcaaaagttatatgattgaaaatgtatggtttttgtttttaaggggtgaaaactaccctttttttaccaaaccattgaaaactgcagatttatgcgatatttaaattgtttaagtagttatgttaaataaaggtttgtttatcatgtggtagtgcattttataatatgtatataattatttttcaacccttaaaaactaccctttgagacaaaatatacaaagaatcttgcattttatagtgaattgaaatcaatttgatatccatagttttattttgcaactatgtataatattttcaagtcttataaacgacactgaaatttatataaacatttttcgatgcttcaaacttttaaatgatatatttatggtagaacttgggggaagagataaaataagattgaaataggaacaagaataattgatatacga

SEQ ID NO: 6887 - DNA, 1924 bp, Diabrotica virgifera
  SmartBlast Evalue=5E-66; Info=Monocarboxylate transporter n=1 Tax=Aedes aegypti RepID=Q16Z20_AEDAE
gatcagtgtcagtgttaatcgggtagtgtagctttgcgcgactattatttttttgttttgtagtgctcaaaaaatggagagacaaaattcggtggcgccccccgacgggggttgggggtggatggtggtgtttggcgccgctctcattaacatggtgaaccaagccatgtttgccaacttcggattgatattcggagagtacctaaaagaaatcggcggcggccatgccaccggcatcaccctagttttagctttaagtgtcgtagtgacgaactttgcggggttgatagtgggacctttattaaaaatattggaaattaggacttttactttaattggtatcggttgtgtaggcaccggtatgatcgtttcgagtttcggaactgctacgtggcatattgtcatcggatacagtgtaatgacgggttttggattaggcctgttagcttcggggacatttttaataatcaatgattattttactacaaaaaagagtacggctgtgggaatctctatggcgggtacagctgtaggtcaaatgaccatgccgttatttataggatggctgttaaagaagtatgaatatagtggaacaacctttattttaggatttataagttattctggtgctattggcgctttattttttaagcctattttatgttgcaaaaagtgggcacctgctgagcaagttgctgcaatagagaatggaccagaaaagccagaaaaggagaaaatcaactcagttagtactatacccaagcccgaagaagaaaaactacttaaagtgccaaatggcgagcgtaaagtttctattacagaacgaaatggacatcgtcgtgaaaggaaaatatccagtggagaatgggaaagaaaaagcgcagaacggaaactctcaaaaagtgaaggaggagctagaggaatgataaagtcatacagtcaagctatgattaaagaccacgtagatgtcacgtataaggagtcagctattgaaatggcaagcagtcagttccatataaacaaaggggatgaaaagaaacactggcttcgcaaaatatccaaagcattaggcttcgagcttcttaaagatccaatatatgttcatatagtagtaggtttaggtttagtctatgtttcaacagtctcctttggtgccttctttcctatattcctgcaggatgaagcaaatttgaacatgatacagacaacaacaactatgaccgcgttgtcttccgctgacgtcctgggaagagtaacagcctcagagatttgtagaagactgaagatgagtaataggaaaactttcatgtttggtgctacgctgttggctataatgcgatcagttgaagttttgatgcccagttacctctctttggcaatagtagccttcatcgtaggatatttccgagcgattgctgtgataaaccaaaatttggtaatttccgaatatatcccgaaggaaaagttaccctctgcagtgggacttaatatggtgacgaaagcattgttgcaactcacatttggtcaagcattaggattattaaaagacctctggagttacgctatttgtattcacactttgaatgttataacgattgtcgtaatcgtatcatggtccttcgaaatattcatcactgggttacgaacgaagaacacggaagaagaggacaccaaaccaacggaagtcaacagctaatgtgactaatggacttcttaattattattagtgacttctgtgattacatatacagggagggttaaaagacactctacgataagaagaaaaacttatattttttacctctatgttggttagtagttttttggtggacgatctaattcgacagtctttagtcagttcttgttaattgtaaaatgtttgttatagtggagctcgaactgtataagaatgatattaaacgta

SEQ ID NO: 6888 - DNA, 1924 bp, Diabrotica virgifera
  SmartBlast Evalue=1E-135; Info="Glucose dehydrogenase, putative n=1 Tax=Pediculus humanus corporis RepID=E0VK19_PEDHC"
aaaattctagtttattaagattataaaataatataatatcaataatttcatgtataaagtaatgcttagatattatgtccccacctttggtggataaagttagcgcatctctcggcaatcatgacagttggagcattagtattagagctggtaaccacaggcatagccgaagcgtccgatactctcaaattgtggagacctataaccctaagttcttcatctacaacagaccattcatcatctgtggaccccatacgaagtgtactagcttgatgattttccggaccagtgttgtagaggatagcacagcgccagtaatcatcagagtcaaaggtgtattggtcagcacaggtgccgtgagtgacattttcataaacaaattgccatttgtcttttaaagttgggctgctggtaagcttttgaacgagtcttatggcatcaataagtctatcttgatcttcttttactgttaagtaatttcctaccatatgtggaggtgcaagtggatcgttagacttcaacgtaattctaccacgactcttggtgtgtaaattaacagcactgatagaaacatgttgtggtttttgaggatcagttggatcaattggttcattaacttcgccatctggtgagcaagtagtttgactcacggtgaagaacatttgaatatctggatcatcagcagttgcatatttagatggaagtcgacttgtaacagcaagtcctgagctagccagaggtccagttcttcttagaatgtaatcctgtaaagtttgccatgtaataattctagtatcaactgtactgttaacccagtaattcatactgaaagctacatggttacttaaattttgtcctacaccaggtaagttatgaatctgttcaattccaacagcgtccaaagcgtcttttggtccgactccagattgtaataaaattttaggtgagttcattgttcctgcagataaaatgatttctttgttagctttaactgtgaaggtttggttgttgtaaacaaattcgactgcgtaagctgttttattgccgtcgaataggatgcgggtcgcagtagagttcaacatcacgtgcaagtttggattatttctttgaggtctaaggaaggctttagccatactaactctggaaccatctttaacataagactgcggattagcaaatccggtatagtctttaccatttaaatctttggaaattggaaaaccagcttctgcagctccttcgacaacggcttttgctatgtcgtgtaaataatattgattagacacagtaaccggtccaccgtaaccatggtagtcagagtcatattctgaaggctgtaaattatgttcaaatttcctaaagaatggcaggacgtcgttccaggtccaacctttaatgccttcgccactccacctcttatcaaaatctggtggagttcctcttgtgaacatcattccattaattacagagcatcctcctagtattttagctcttaaccaagtgcagctaccatttttttcttgacatgccacaggttcgtcggaggtacgatagttccagtccacgatcgggttagtgtaatattgcaaaatcagtccaggtacttgataggtttcaggctcgtcaactccagcttctataagtaaaactctagagtcttgatgttctgcgagacgtccagtcacagccgatccaccacttccaccacctattacaataaaatcataagatgggtctggctcgtgtctggcttgaactcttccacagatatctgatatatcacacgtatttcttattatagcatcaactaaactcataaaaacaatgaagttgcctgctccacaattgttacccaaatagggcccatagtatccgggattaatgcaaccacaatccgccattgtagataactgttaagttgcga

SEQ ID NO: 6889 - DNA, 1923 bp, Diabrotica virgifera
  SmartBlast Evalue=2E-67; Info=Endonuclease-reverse transcriptase n=1 Tax=Bombyx mori RepID=D5LB38_BOMMO
tcttcttataaggctgttacagttccagatctacttcatcagatgtactaattctgtccagaagcaagaaataattaccaaaggcagaggaacatctagagaaagtagctcgagaaaaaggactctatataaacgaaactaaacctaaaaacatggaatggacggacgaggaatttgaacagggacaattcttagtgttagcaaatgatgaaggaaaaatagtatataacggtagcaggtaggaactgcttttggatagtcctatcagggaaattgaatcaatccctgccttctgcagattccaggtgttttctgacccgggaatctagtgcctgctaagggtcccctgtccagggtcacggatgaagcccacaacggcatccagggcggagaagaaggtctttacaacggtctggaggacggaggtggcagccccctggttttagggcttgtataaaatcgaacctggaaatcggcagctggtttttcagtatctgtattgagcggaagtcatttaggccagaacggtcaatacagaatagtactcggtgcggtggcaaccacttaaacagcgtgtacacagcggtgtagaaagccaagggaatgactactacactatttttcccaggttaatcaatatggctgaggaaataaacgatggccccgagtacgggcgcttcttaaatggggcaggggtgcgaagaatctcccgcttggccaaatttgatatacagagaagttgtagaataggcacatggaatgtgcggagtttatatgaaccaggaaaaacacacaatgccataaatgagatgaaaaggctgcaaatatcaattctgggtatcagtgaaatgcgatggcccggatctggccaatgccatgtggatgatcatgaagtatattatgcaggagaagagagtaattaccatcgtcatggtgtaggattcatagtctcaaacgaggttagcaaatgtgttagagcggtatgccaggtatctgaacgagtcataatgattcagttgaacgcgaaacccagaaacataaatttaatacaagtgtatgcaccgacagcggaaagtgaactggaagaacttgacaagttctacgccgatgtaaaaactgttaccgaccaactcaagactagagatctcaccattctgatgggtgaccttaatgctaagataggaaaaggcagacaaagtaatattattggctgttatggactgggcgatagaaatgaaaggggagactatttcgcagatgtttgcaaagaacacaatctatgtataatgaatacctttttcaaattacctaaaaggagattatatacgtggaaatctccagcagataccccaataatatcgtaagaaaccaaatcgactacataaccatcagtgagcgttacagaaatgcagtaaagtctgtaaaaacctatcctggcgccgatgtgccatctgatcacaatctattgttagccgaaataaaattaaaacttaaacggataaaacaaccacgatcctctaacaaactggataccgattttattagaaacaacagtcaggggatttcaaacaatttagagagcaattttgagaatagcgaacaacaagaatccatcgaggatcattggaaccaaacaaaaaatcaaaacgattataagcaactcaactccaaacttcaaagagaaaaatcaaaagaagcaacagtggatgaacgatgagattttgaatttgatggaaaaaagacgcaaatttaagaatcaaaacatcgaaatgtataaacgcattaataaaaagataaggactaaaatacgagcggcaaaagaaacatactttgaaaaaaaaatgtttagaaattgaagagttgcagagaaaacatgattcatttaatatgtataaaaaaataaaagaactcaccggtcagaac

SEQ ID NO: 6890 - DNA, 1921 bp, Diabrotica virgifera
  SmartBlast Evalue=7E-37; Info=Nucleoporin 50 kDa n=1 Tax= Camponotus floridanus RepID=E2ABC6_9HYME
caatattgtatattgaccataatacaggagaaataaaaagataaaaaatcaacaactattttttgtatttattcaatgtctccaacaacttatcagcttcttctgaagactttacccttaacaaaacaggaactggtgggggctccgattccggagtgggaacgcataccaacataacgtcttttgtccctagtctcttggtagggatactttccgacaaaatgcaattcaacaataggtttccgaggttggtgtcagctctaactatcatctggactttttcactatctggtatgggtttcaaatataggttacctacacctcgatcgccgaatttgtcttcttttttgacgaatactttgcacctcgttgtgaaacatgatccttttctacaactggtgtaaattcatttgtaggcggctcctcatcttcctctgcatctttatccttattatcagtagaaactggttttactgcatttgcgaatgtgaaaggggtagcagaagagaatggggtaacagatttcccaaaagagaaggatggtatagctgtagttttcgtggtatcatttgctgtggtacctgcagatgtggaactggacatgcttgtaccgaaggaaaatgacggtataggttttgtagcctctttggcactggactccgttcctaaagaaactggtggtacagttgtgcttgcgccagatcctacaggcgatgaaactggtgaagctttactaccaaaactgaaggatggaatttctttggaagcttgttgagctccaaatgaaaaggccggtgtggttgtacttatgctttttgctggttcactggttgtcactgccgtagagatggatggttttgctccaaatgagaatgatggtatggccgctgttgtttttgatgcttcgttatttgtactggcaaaagaaaatgacttatttccagaatctgtgctggccttgcttccaaaactaaatgttggtgtagctgaacttgtgctagaagttccaaaagtcaattttggaatattattttctgaagtcttactggattcatttttggaaatcgattggaatttttcagtggtactatctggaacattagttgtaggcttaaaagcaaaagagctcatagaagagtcggttttattgttcgtatcagggggttttaggtctttctccttttctaattctgcaaagtatttttcataatctcgaaatattggctgcaaatttattagtgggtttgcatctacatgactttttatccattttgacacactctcattcagacctttcaactttgagtaatattcatttgatttctctgaaggtgagttagtaggattgttatctttattaccagtattagctgtgcttgcaccaaaaacatttgttgtcactttttcatttaatttcccactccctgttataggactactactatacttgaatgctgaagcatcattcttagatttttctgaaattccacctgtaccatttacttttggaggggtattaggtttagccagattggatagaaaagaaaaagctgtggatgttggcggtgctgcttttccaaaacctgtaaaactggtgaaggcacttttcttttcaccatcaccaccatccctaactgaagatataggatttctccttcttgcagtttttataactctacttttcaaagaatcctcagaagctctttgaaatgtaccagcatcttcagggggttcttccttgtcccaattttcgtgatttaaatcacttgtggcgccacgttttccagccatcagatcaactaatggaagatttgtatatctcaaaatatgatttacctaaacatttaggtctaaatagaattgttttttaataaaatatgtaaaactaataaaatccgccaaaaacgttactcgttgtcaa

SEQ ID NO: 6891 - DNA, 1917 bp, Diabrotica virgifera
  SmartBlast Evalue=2E-81; Info=Acid sphingomyelinase n=1 Tax= Glossina morsitans morsitans RepID=D3TQ63_GLOMM
tttaattaataactttttttattctgactgcataagaagtaatgaataatattttaataaaaaattattacaagtggttgcacatatcagcttctccctccacagtcaataaaatctgacatcttaaatcccgaccgacatatgtctggttagcctttgaactgccacggtagaaaaatctgttgtatagatccactactgtgtcatttttcattttatttattaccaaatcgctaagatctgctggtgataaactatcaacgtggaaagaatctttaaatgaatagagctttatccagtctattttttggttcttgtttgcttcatctaaatcaaatgtgtaggtttcgaaatctttgacgttaaagctgttagcatcgattgataatatcttgtagttgggattagcttcatcgggcattagggatccaccattaaacgtaaccccaatcggtgtactcatattgttctcattagtgtcattatcataatgtatgaagaattggtccctgtgagtatgaccattgaattgggctgcgattgtgttctggaatctttttaagatttgattgtatgctcgtccccaacttccaatacaagaggatgtttgaatgtgatataaaatatgaacaatctccttatttttttcagcttccagcaaggtatcagctaaccatttgagttgcccgtaaggatcttcgctattatataaattccaccaattttctctcgagcaaacgttattgttcaaaacaataagtcgtagacctctggcggtcttgactgtatagtaaccacctgcaagaatagttttctttacagcttctttatctaaccagtcatgttcggtccaggtatctaaaatcacatcgtataaccagtctgaagatatttcatcttccgatgtatccaatggagcatacagattaacaggatgagcttcatggtttcctagtatgggatacacaggaatatttccaagtttttcagcaaataaacccattgcctttttaattatattcccattaaattcaggactggttccccaaacacgatgactcactaaatctccagtaaagtaaacgaattctggtttctgttgtgcaagttggtctaaagcctcctcaagcaatacttggggcgcatcagcttgtttatatgtaccaaaatgtccgcaagcatcctctccttttgtggcatctgcttgatcattttgacaacataagggttcatgacagtctgcaactttaccctccgtatataaaggatcaaaatgtatatccgttatatgaccaactttaaaggtagtgttaccatctggaactttttcggccggtgtaccatcgggaatatctatggtccaattaaacgtttcgttgccctggtcgcatttcattatgagactacatatttgctgactattaacttcctttttgttgtcgattatatagctaagaacatctacatgagggtatataacaccgtcacagacatttgtagattctaagcctaatatctcacagaaatattcagcttcagatgataattgaatactagtcatatcatagttcttttctaaaagtattccggtgaataataaattgcatgcaacacaagaaagcatatcatcctttaaatattttccagtcagtaccgcaaagagtgtcttatgttccctaaatttttcaattacttcttctggccactgattcgttataaaagaagagtagagaccagttgtcgaatcgaatcccaaaataattttgacattggcacaaattaaaaaaaggcctaaaaatatccacgtagtcttcatttttgcgtgtttcttatccaaagctaaatattctactaataagatcaaaaatcttaagtgtaactcttatccttcgaataaagataaaattaatttacttg

SEQ ID NO: 6892 - DNA, 1915 bp, Diabrotica virgifera
  SmartBlast Evalue=0; Info=Kinesin light chain 1 and n=2 Tax= Culicini RepID=B0X9A9_CULQU
aagagagaggcagaggagcagacagtcaaaaagtcaatcaaaaagcagaaacagaaacaaccactacaatactgtgttctaaaaataattgatgggtgcgtactaatactgtgaattattttttttttaatatataagaaagtattaaaaagctatagtattacttaaagcgacaatagtgcttcataaataatcttaagaatttgatagtttagcttggatttgtacatttgaatttttggtaatggtacaaccggccaatcgtggatgtttaatcaagagaggtttttgaaacatgtctaaaaccatcaatgcgtataggatcaagaagatagaaaattacggcaaaatgacgcagatgacacaagaagaaatcgttgccgctgttaaaacagtagctcagggtttggaagccttaagatcggaacatacaggaattttacatagcctccatgaagcccccgatcctgtagttagcgaacgagctggtttggtgcaacagagtgccgatatgatagaattgggcctcggtgaagcacaggttataatggctttagcagcacacttgcagttagtagaagctgaaaaacaaaagttgcgtacacaagttagaagattgtgtcaagaaaatgcttggttgcgtgacgaattagcctctacccaacagagactgcagtccagcgaacagatggttgctcagttagaagaagataaacgtcatctagagtttatgagttccgttagcaaatacgaccaagatgttaatgaagataatgcttcagaacaatcgaagagtgagaaacctgatccagtagttgatctattcccggatgatgatgctgatgacagacataatatgtctcctacgcctccaaaccagctacagctttctcaacaagtaaacgctggatatgaaattccagcacgtcttagaacacttcacaatttagtcatacagtatgcttcccaaggccgatatgaggtagcagttcctctgtgcaagcaagcgttagaagatttagaaaaaaccagtggtcatgaccacccagatgtggccacaatgttgaatattcttgctcttgtttacagggatcaaaataaatacaaagaagcggcgaacctgctaaatgatgctctagcgataagggaaaaaacgctcggagaaaatcacccagcggtagccgctacgttgaataacttagctgtattatacggaaaacgtggaaaatacaaagaagccgaaccactgtgtaagagagctttggatatacgagaaaaagtgttgggaaaagaacatcccgacgtagccaaacaattaaataatttggctctcctttgccaaaatcagggcaaatacgaagaagtcgaaaaatactatcaacgtgcgttagagatctatgaaaagaggttaggagcagacgacccgaacgtcagcaaaaccatgaacaacttggcttcttgttatttgaaacaaggcaaatacaaggaagccgaagtactctacaagcagatcctcaacagagcacacgagagagaatttggaactattgacggtgaaaacaaacctatttggcaagtagctgaagaacgtgaagaaaacaaggcgaaaaacaaggaaaacgtaccgtatggagaatacggcggatggcacaaagcggcgaaagtagattcccccaccgtaacaacgactcttaaaaatcttggcgccttatatagacgtcaaggcaaatatgaggctgccgaaactttagaagattgtgctctgcgcagtcgaaaagaggctttggatattgtaaaacattctagaaaccttttaaccgacgacagacgaaacccggcagcgcaaaagacaagaactcccgtcgaggatctcgagaatccttagatatgacgtatgacggagacgagacttcga

SEQ ID NO: 6893 - DNA, 1918 bp, Diabrotica virgifera
  SmartBlast Evalue=2E-30; Info=UBX domain-containing protein 2 n= 1 Tax=Camponotus floridanus RepID=E2ASF2_9HYME
attaagtaatatattttacagcaagaaagaataaaatagtattaacatttattaaaacttataaatcagtatgccagcatattcaatagttaaacaattcttaaaacaaattcaatatgcaaaaaattaggtgcttcacatttgctgagtagaatttccattccaagtgttattatcttcgtcgtcgtcttttctgtcactaagtctgtgaacgttcccttgacgtctaatgactgttgttccatcattagctcctttacgcttagtagtaccagtactagaagtcgttggtgttttccctgctggttcatttggtggcggcctagtagtatttccagaactggatccaaacaccagattcttaaagaatcccaagatgctaaatatcggagaccatatgccccaccaaagaattgaaattattccagggtttgaactagtggagacttctccaccattggtaggcaacaccaacagattagcattcggaactaactgcaaatctagcaaagtagtgggataatcctttgatgtatattctcttctaggaaaagtggtagctaagttaaaactactaagggtgatattcaagtctgacctaagaaaagaaacaacgtactctaaagtatcagaaacctcaaacacttgagtaacactcgtgccatcgggtaatttaaattgcagtcttgtggtgtttgaatctagttttggtggggttggtgccttgggagcttcgggggctttagggggactcggttgatgtctcgcctgtctttcggcccgatcttgggctatttgcgccaatacgcgatctcttgctatttgattctcgcgcttctccctatccctttcctcttttaactgtttcaggtcttgatcctcctgccatttttttagttgttgtacattttggcccatcttcctgcgctctagctccttcaaacgttcattctcttcttcttccttctgtttctccttccgtattaaatcgatcagttctttagctctccttactttttcttcccctgacagttctgcttctgcctcttctttagtgtctgtagtttctttttctgttttaacttcttcagattctgtatctactttaacttctttatcctccttattttcctcggctaccgtaacttctttacctttcgtactttctgcgttctcttcttttgctggttcttcttcttttgctggttctgtatgcgtttctgacggactcggttgctcttcggggggtttatcttcggatgatttttcaatttctgtttcggaggggctcaattcttcttcggggggactttcttcggacgtattcagagcattattatcactttcgactcgtggtgtctcaccagcttgttcatgtgccaggaagttttctgattcagctgaaatagaatgaactggggctgtactgaatcctgccctgttcaagacatcatccactttagcagaaactgtttctaaattagtacttcctgtaatgatatctaaaggaacacccttctgaccaataaaatatatcgagggtacactcggttctttataaatttcgctaaactgctggtgagctgtagagcccgcaattactttgatagctacaaagtgatcttgttccagtttttctccaaggtcgccattattgatgaggtctgttattttttgtgacttttcgtcagtaccttcaatatacactacaaaaacggctcctttcgatttagaaaaagcaaccgcatcggctatttctccactgtaccacttcattttaaaaaaaaataagttagtttagacttttacaacaataaaatactagcagacttctaacaattaaaaaagtacacatcagttatcgcaactacaaacacaaaatacaattttaaacgtcaccgtcaccggtcacaatctg

SEQ ID NO: 6894 - DNA, 1916 bp, Diabrotica virgifera
  SmartBlast Evalue=0; Info="Probable medium-chain specific acyl- CoA dehydrogenase, mitochondrial n=12 Tax=Drosophila RepID= ACADM_DROME"
atccagtataaccacagaacaaattacaattatattcgatgtaacaacagcataaaacgaaaacgaagaagtaaatctaatgacaacccagcaactaatgacgtaaaactgacactgacaactaatgcataaaaatgtaaaaaactcaaaaggctgctggtaagctaggtacaaaggttaaagtgcaattgtattttgttttataatctattttgattctacattctacttcaaatttagtattaattcgaatcctggtgtacgtttagatcatcagtaaagattattaaatattttcatttatttaaaatggcatgtcttcagaaggtttccaaggagtttttaaaaaaaggagttcgattaagcccaagtttagctaaatacagttcttctgcacctgggggctacaattttactcttaatgacactcaacgggaattccaggaattagctaggaaattcaccagagaagaaattatcccagtagcagctgaacatgataggacaggaaaatatcctttggacatccttaaaaaggcttgggccttggggctcaccaataatcatattcctgaaaaatatggtggtatggaaatgggagtattcgatggatgtgtcatagctgaagaaatcgcctatggatgtactggaatcaaaactgctttagaaggcagcggtctgggacaaacacccgttttgttaactggtaacgacgaacaaaagaaaaaatatctaggaagattaatagaagagcctttagtggctgcatatgccgttactgaaccatcagctggttctgatgtgaatggaattaaaacacgcgctgagaagaaaggagacgaatggatacttaatggacaaaagatgtggattaccaatggtggagttgctaactggtactttgtattagctcgtacaaatcctgacccgaaggcaccagcaagtaaagcttttactggattcattgtagaaagagaatgggcaggtgtaacacctggaaggaaggaaataaatatgggacagagagcttcagacacaagaggaatcacatttgaggatgttcgcatacccaaagaaaacgttttaattggtgaaggagctggatttaagattgctatgggcacttttgacatgacaaggccacctgttgctgccggagccgtggggctggcccaacgtgcgcttgacgaagcgaccaaatacgccatggaaagaaaagctttcggtgtccctattgctcaccaccaaggtgtagccttcatgttagctgacatggccatcggggtggaaacagctcgtctggcttggatgaaatctgcctgggaagtagaccaaggagtcagaaatactctagcagcttcggtagctaaatgttacgctgctgatatagcgaataagtgtgcaaccgacgcagtccagatttttggtggaaacggattcaacagcgaatatcctgtagaaaaattgatgagagatgcgaagatttatcaaatatacgaaggaacagctcagattcaaaggttgatcatttctagggcaattttcgaaaatgcaaaacaaaaggcataagaacttttttataactataatttaagattaaattttaacaacatcatcttccccgattacccgtataaaaaaatagtcaatttttcttttatataatggccactaaagattgtattgttgtttatttatttctttcaattactgttttaatttcaattaaataattaagcatcacaggccgaaaaaagtacaaaactttttcatctactacaataatggaaaaaagatttggaagatagtacctatatatttgtggaaattatttttatatccaatttacaatttttgtgaccaaccaaatcgttaaatgtaattttgaaagcaatacacgtttttatatttataag

SEQ ID NO: 6895 - DNA, 1909 bp, Diabrotica virgifera
gtctaatattggaaatttttgtagttaaagccaaggattttttgtaataaagcgagaaaatagcaaaaagaacaccaaacacaaaatgtttgcccctcagcgacgctgtcaaagtcacgtgacctggaatggtctattgtttttgtatatgtaagtgtttgaactatttttattttaatttaatttagccaaattagctcgttattcaaaaatttataaaattaaatttgactgtttacatcaaattttacgttgccaaaccttgttcaactcaagccgacagtggcgctagtggcaacgtgcttccagatttctgtgggagggagttggatgtattacagtcaatagtatttggtattatcctttaaggtcgcggctaattatcatgcacgcatcgttcctggcacgtagcgtagtctccgaaaaacctgattttacaaagacgtgatacgatacgtgtgaattgttcatatttaaaaccactaaaatcgatatttttcggaaactaaacgctacgtgccggaaacgatgcgtgcatgataatctgccgcgagctttagagtaaacgtgctgcgaaaacgttccatggttaatcgaattaattgatctgatatacgattatgttgaccataatgtgatttttaaaataaatttgcacaatttggaagcgtttttcaggtgtgagtctattcatgctgaaatgtgaaaccaaattaaacataaatcacttgacagctgtcaaaatggtcgccagttaaagtgttgccaacttatatttctatacctctaaaaaaacaacctttccattgtattaattaacttgtaacgacttctcctgcaagtattttgttattagaatcgtgtcgtctgtatatatgatattgttaacgctcttcgtagaatcatcttcaggacttcagggagtcgtcctaagattcctatccgttatgcaaatattactgttgttgcttgtgctgacatgtcgaggtttttacactatcagtgtcaaatccgtcattgggtgccgtcatatagtttgttgaaacactcaaggtgtgtcaggtgatcatatagtacgatatttatgtttgtttttatgctgcagatgtagatttgacagtgagagagaattttgcttgagctggttcatcaaaagtaacggatagaactttgcggtgatttagatggtactttctaaatcgacacaaggtagaatatgtagatagataaaacaagaagatagctgggtgctgtcagatattttgttgacacagtcagggtgtttctcaatgcggactgcagatgaattaccatgcagcggagttattacttcaccggtggggctttatgataatttaggcggttccataattaccacaaggtgaacaatgttaaaagagtataccggtgccgtcatttcttctctagacttccgaggtattcttcaatctcaatgccatttttaaagatggtctgtgatacgataaatcgaattggagtcatagtttggtgttgtaacatcattgtatttgtgtttaggatttttaccacttctaattatctaattatcgttttgattactcgaaataataaaaattgagcatgagaagcagataaatggctggcgagggcataaaacgaataaattattattcgagagagaaattattattgacctaaaatttgaaaatatatgtctacagaggattataatgaaagtatctttcatttatgtcaatgttgtgcagctttaattgagttgtggtgtatatgatatagaaatttaattaattttgaacactgttttgtgactgaacatccattaccaatgtatgaatacacacaaacctaaatgagcgattttcaagtatgtacattcgattcgtttcaccaggtttggagcttacta

SEQ ID NO: 6896 - DNA, 1914 bp, Diabrotica virgifera
tataatttagtgggaatggaaatttccaaaagaatttatgactcattaaaccataattagccagtaaacataactattaactaaacatcgaaatgaacttatctttatgaaactaaccactaaaatatttatttactgggaaatttaatttttctgtttttttttttgtaataaataatttacttaatattgttgtacaactatctattaaatagttgttggaaatagtattcttaatttttctatattttgatcacaactgtatgtttatgataaaaagttcattatcacccatttattatctctatacatttgattttaatcaatctttaccatttatttttcagtaatgattttttaatgcaaacaaactttaatgaacttttggcattccctaattacatttctttatactatgtggtagtaacagtacatgctaatacattttttatcacctaaagaccagcttattgataggtcttatacatagatattatttagtaccttgttatttttaatattattcaataggcaaatcaaaataagcggtacactacctggtaagcatacgagtaactaaagatattgacattgttcttccattttgctttgagtttgtgtttgtataaaaatatttatgtcttaaaagtaatttgataagaatgagttgttgaaatcagtattgttttcaaacagacttctgggtgttgattcaaatagcgaattgaaattcacttttcattacaaaatattaaaacatagcctaaaaagttgtggaacaataatttttagattacatagtggtaatgttccataagtcttgtatcataatatgtatcacaacaaatatactgaatggttatatcaatcattgttacagccaatgaaaaaagaatcaataaggaacaataaagcgcacaaaagggaagaacatgttactttagaaaagcagaaaaatgaatccaattgtataggacgtcgtgcatgattcaccaataataaagctggccattcacgatactgtggtgtcgttcgaaaaaatcgtcgatgatatcaattctgcagtactgcagcatagaagccagtttctctgcggtaaaattgtaacgattttgttggatgcacagtcaaacacgaccaaaatttttgccaattagttgaattcgacaaaattgaaccacgtgacagtgtcgtgagtggccggcttaatatgaacactatctattgtgctgcagaaatcaaggttatgttcaaggttggcaggcttaaacaacatgtttgaaaacttggtttaaaccaactggttttttaagaaaaaacctttgggctagtgcagttgaaacttcgaaacgcaattcaaatcggcttattactactaaaaacttattacctactattaaacttattaccaacgaattattactattaaaaattatttcaacattcaacaaatacaaaacccattgcaaaactcaaaactccaatgaccaatgtcaatatttatagttctacaatcgctaaccttggtgctgcattcttattttcggttgcctatagagtcttcatttattttttctgaaaagtatgttgatggcttaagtgcaaaatgtcatctacaaaaaagcaaaactgttgagaagaaacggaaaactttcagtagttagttaatgactaaaaattaaaattatattatgtttctatagagttatctgtaacatatggggaagaaattttattttgtttccaaaaagtagtgcattgtgagatagaacctgccaaaagatgatcttgttttattggaatattgagtgaaattggaatattgagtagccttcttgaaaatattgtttaacttcttgttctcaacttgttttagaataaataaggccgccaggctcagagcattcactttag

SEQ ID NO: 6897 - DNA, 1910 bp, Diabrotica virgifera
cttcttcctggtacctcttcttccgttttctgtttttttttaattatttatgagttctctctcagtccccattcttgtcagcaccttgttgttgatcacgtgctcttctgtccaagagatctttaacattcgtcaaacaacccacaccatacgcctcatactagtataattccgaaagtccatgtttccacttcgtggaataaccattcgtatggaataaccattacacattggtacataatatccaacgatatggtagagtttattaggaattttttcattgtttgaaaagcgggcctagcatactctatacctatgagtatgctttgtatgaatttcgacctcacggcaagatcgcttgttatcgagcaaatcaaaatactggaatctttgtacgggttctgtctgttttttatagatatgaatattaatgtcggcatgtttggtgtacctacgtgaaattaataatgaaatacttgtgggaaatagctgcaaaaccatatctgatgctttatttttgataagtaatagatttgaaccacctatatagtccagaagtctatatagtaccaatctatactacaaaaaatgatgtaggtcctattattacaaaacccaaaaatttagaatctgtaggtcatctgtatttagtcgttcggaattgaagtttaactgtagatgacaccaaaagacaaagacttgtctgcccagggttgtatgcccagtaagagaatttcatatgcccttcataattgttaaactcagctttatttttcataatgtttaagctccatggatgactaaaaatatcagaatatatttcaataaggcttggtatctgacgaggtcttttatacatcctgttgtgcactttttaaatttagtgaattttgatttttttctgaattaatattgatattttactgatatttactgatgtattggctgataacttattttgtaaaaatttattttgcaattccaaagcttaagattatgtgtaaaagataatattattttatcgaggaagagaaaaaaactactgacaatatgacagaagatctatatgcaaatttaaactagaaaaaattaccaataaggacaccaaaaaaaaagaaaagaaatagctcgttcatggctcggaagagaaggcactgtgacaaggacacaccaggcggcgcacgtcgattcgacgtcgaggcagcttaaaacacatggcgcggtgtaacagcggcagctatgctacgatttaaagtatttgtatttcgttgttgccaaatttagtcgcgtgttggctgctgtacgacacgatgtctgaaagttatgacgatttgtcttttgtaataaatacaagtttactttatcttagattacagaaaaaaagaaacgcagatattggatacatcctatcataaagggacgaaagtataagggattttttacacattatataacgaaattaatgtaataaaaggcccagagaagttttttaattttacaagaatgtctaaaaaatcttttcaggagttattagtaagtattaaagagtaatgttcaagaaataacaccgttatgagggaagcatatcacataggaaaaactatttataactctaagaggctgtcaacccattaattgggaatagtgatctttcacaaattaatattaacaaaaaaattattcaaaataaagtcaaagtacgtatcgagaaagacgaaaaccagaatatacaaaaccgtaataagagcaacagtcacctacggatgtgagacatgggtgctaaataaaacagaagaaatgatagagagttgagaacggaacgtacttagagctgtttttaggggaaagaagaaagaatacagatacagaagacggctggcatagaagcaccaatcaagaattaaggatgc

SEQ ID NO: 6898 - DNA, 1909 bp, Diabrotica virgifera
atcttgaatgagataacgttgagtatagcttttaaaatcttctctgtacttaatctgtgtcattacaatcgtattatttatgattttcttactcttttatatatcctttacatgtatatatcttaatatctttgttatttgtataaaagaactacattttgtatgccatttttttttagatcattcatatgagaagtttaaataaccatcacagatatataatatgatctacgttttttttctttctaatcaatatttacttattgcatatgatgaataatcgattaaatatgcaaaataaaccaaaattgctcgttttgtaatcaattaaaatccagtttttcagcttttctgattcctttatgtgtttgtatctcagtacttttgtaatatttataaaacttgatgtttccatgtacattctctctttttagatccattagatattgtgacaatggtctattttcctatttatttatgtcctatttactgatggctactatgtcacatgttaactgttatgccattttatgcggcagataaatatttaagacgtttaaatatgatagatctattcttcgcttttttcttttaatataaatatttacatattgcaagtaaataatcgactaaatatgccaaaaaatcctaaattattccttgttttatcaaatacagtaaaatctgtgttaaacggccacctgtcaaaaccggccacctgaactagccggccagtttcaaagttcctaaaaccaaaatttgtggactacaaaacctggtattagcggccacctttttatatcggccaatagttctgtcatttttagtgaccgttattgataggttttactgtactatcattttttgactcatgtttccccttttcagatcatgttggtattgtaacagaccccactctcatcaaagatggctactaagacgtcataagccagctgtcatgtcatttcatgtgtcaaataaatatttgaggcatttaaatataaatcacagatctaggaccttggttttttctttttaataaatatttacatatcgcatgccattcaatcgattgaatatgctaaaaattctaatatttttccttgtttcatcaaattctattatattattgatgcttttcttactcttttacttccccgccttaaaaatggtgactttgacgtcaactgtcatttcgtctgtcaaaaaatatttgagcggttaaataacagtcacagatgtgtgatcctcattatttttctaataattgtttataaatacttcatgtacataattgtacttcatgtactaaatgttctaaacgaaccaacgatattcttattgtaatcaagaaaaaaatagccactgcctaaataaaaatcgacgtcatgataaatgaataaattctagtctaattgattcgcgctaaataatcatttttaatatattttgcgtcgttaagatgttacaaatttagcatttttgatgattgtttttgttatcctcttattttttagtaaattacttgattaaagtaaaatttaaaggtgaacacatcgtccagatgttctttcttttcgattttgtgttcgaaaagtgctgtaaaaagaagcaatatcaaaaggaaagtacaaaagtagcgtatacttttgttttttatgagaataatgttccaacgaacctttcaatcattttaatgtacagggtgtccacaaataatgtttgaaaaggatactgtactatttcgagtaccaatatcttcaagaatagaatttggtacattaattaagtgaagtggaaaagatatttttgtggacacgtcgtataaattgatccaacgtattatttattttgttaaacttgtatataggtattttgaatcaaaccattcctgttatcctattttgag

SEQ ID NO: 6899 - DNA, 1908 bp, Diabrotica virgifera
  SmartBlast Evalue=1E-149; Info=CG8451 n=5 Tax=Sophophora RepID= Q9VLR8_DROME
cttcaaactcgtcgtgataatgaaagtaccagttccagttactattactacatcttgtaatctacatgtgctctccgtgttgtggcattgataaacaatatgtgatttgtgtttttccaatgtttttctcgattttaaattaatatttttgttttattatactatttgaaaaatgacgttcaaaagtcttcttcttaaggacatctaccatttcgatatcgttgattatgctgtcttctcggccatgttgttgctgtcagcattgactggattatattttggttgcagaggaagatattgcaaaagcgaagctagtcaaacacttagcgaatacctcacaggaaacaagaatttgaaaccctttcctgtagctctctctttaatagcaagttacatatcaggagtaacaatattgggtacaccatcagagatttacaattttggaacacaatattggtttatagtgatagcgatatggctgagcggtttagttgtctcaactgtataccttccagtatttttgactctgcaagtaaattcttcatacgagtacctcgaacttagatttagtagagttgttagaacaatggcatcagtattgtttattttagatgaggtgatgtttttaccaatcattatttatgttccttcgttagcatttaatcaagttaccgcaatagatattcatttgattggtaccgtagtagcagtagtgtgtgtattttatacatttttgggtggtttgaaagctgtggtatggactgattcatggcaggttatagcgatgttcatttcagttgtagtggtgatagttttggggacaatacaagtaggaggaccaagtacaattatcgatctcacaagcaagggcaacagatttgaattcttcaactttaatccaagcatgtacgaaagatatacagtatttagtgtgatcataggaggattcacctactggacctgtttcaattctgtcaaccaaactatggtccaaagatatctttcacttccaacagtaaaacagtcaaaattatcagttctgttgtttactatcggtgtttctggcttcgtatggatgtgtctgtatgcaggaatattagttttttctacctattattactgtgatccattgtcaatgggtagaatcaaggctgatgatcaaattcttcctttatttgttatggagactgtaggacacttaaaaggagttccagggttatttattgctggagtttttggagcagctcttagttcgttatctgtggtgctaaactctactgcccaagtagttttagaagattttattaaaggatgtatgcgtatgacgctatcggaaagaacagccacgttgttcgtcaaaggagttatcttagtattgggagttgtagctgtagcttttatgtacgtcgttgaacacatgggaggagttttagcaatggcatcttcactgtcagctattgcttcagggacgacttgcggagtattcactctaggtatgctgtttccatgggccaattccaagggagctgtcgcaggagcgattgcaggttcaattatgtcagggttggtatcttacggaggacagtatgtatcggctgctaaaatggtagttgcacatagacttcctgtgatagtcaacgcttcctgtttcgataaatacggtatcagtaatgcgactatcatacctgagatagaatatccagatgaatcaggagtttttccactattcaggctaagctttctttggataccactcgtaggagtagttagtgtattgattgtggggattgttgttagtttcctaacaggcgccaatgatttaaacaccactgatccggatgtcatttctcctgttatgcattggttactgcctcagaatgtcggaagttagcaggtagtactgtaaag

SEQ ID NO: 6900 - DNA, 1910 bp, Diabrotica virgifera
  SmartBlast Evalue=1E-152; Info=26S proteasome non-ATPase regulatory subunit 11 n=4 Tax=Apocrita RepID=E1ZYI0_9HYME
tcagatccgatcatattaacgtgaaaagcatatttatgacagacaaattaatggaagtttagtagtgagtagtgaaaaaatatggccggagcaatgttatttgaaagagccccgtctgtttcttctcaacacgagaagcttttaaaattatccagggattcagatgatgaagatcaaaatattgtcaataaagaacaagacatccttaatcttggtgagaaatataaaaaggagggcaaggcaaaggaactcgcagagcttataaaggccaccaggccttttttgagtttaataagcaaagcaaaagctgctaaattggtaaggtctctagttgactacttcctagatttagaagctggtattggtatcgaagtacaactctgcaaagaatgtatagaatgggcaaaggaagagagaagaacttttctacgtcagtcccttgaagccaggctgattgctctttattttgacactggaatgtacagcgaagcgctacaactggaatcgaccttactgaaagagttaaaaaagttggatgacaaaaatttgttggtggaagtacaactacttgaaagcaaaacatatcatgctttaagtaatttaccgaaggctagagctgcactaacttcagcacgaaccacagctaacgctatctattgccctccaaagatgcaggcagctttagatttacaatccggagtattacacgctgcagatgagaaggatttcaaaacagcttattcttatttttatgaagcttttgaaggttttgatagtgttgaatccccaaaagccctcacagcccttaaatacatgcttttgtcaaaaatcatgataaacagtccggaagacgtccaacaaatcgttagtggtaaattggcctttaaatacgctggtcaagatatagaggctatgaaatcagttgcacaggctgcacacaaaagatcactagcagatttccaacaagctgtaaaacagtttaaacatgaattagaagatgatgttattgttagagcacatttaggaacgttgtatgacaatatgttggagcagaacctttgcagaattatcgaaccatattctagggtacaagtagagtatgtagcaaaaaccataaaactcccagtactacaagtagagaagaaattgtcacagatgattttagatgccaagtttcatggaattttggaccaaggcgaaggtgtcctcatagtattcgaagaaagtgcagtagacaaaacatatgaaatggccctagaaacgatccagagtatgagcaaagtagtagatactctttatcaaaaagcaaagaaattgtcataggtataatgtagccgagaatgttatgaaaataataaaatgactgtaaatttttcagaactagattttttgtagacactgtgtttatataacctatttaatttgcttttgttaattcttgtctttttaaggattcttataactcatagttttcggagcttgagggttttggatgtgatggagtttttttgttaatacagtatagatattttttaagatacttaaagcttatctaaatctaggaaaatatcatgcctaaagtcataagagattcataatccatatgtaactaactcatagaactattttctttataatattttttacaagcaatgaaataaaagcctcaaaaaatagactgaactttagagactttaggcattgagttttggtctttattgggaaaatattaatacaaaagttctataagaaatatctttgtatggtttattaattcattttttaacctgccaagacattgtgatctctattactatcagtgtcattggcttgttttcatacaattttccctaataatacaaatagttacaataactctaagataatgtttatttttctcttaagaaatt

SEQ ID NO: 6901 - DNA, 1903 bp, Diabrotica virgifera
  SmartBlast Evalue=3E-75; Info=Oxidoreductase n=1 Tax=Aedes aegypti RepID=Q16II2_AEDAE
cctgtatatattttcaatacgttctgctgtactctttctgtagcagaatttgtaaacgtcgaagcgagcatcatttctacgtctccatgttgcagaccgatacagtaagatctggaagctctacttaaacaagctgctatcgcataagtatatataattgaatctgctagtcttctgatgtccatgtggaaatttaatacatctggaccgtatcttgtgagcaagatttctgcagcaaattctattcttttaacacaatactctaactgtttggaacaattttccaatgcaggatgaaggtaatcgcctaattccaaatccaatttagggttatcttcgttatttcttttgtttgtccatgctcttcgtagcccaaaatgtatatggaagagtggatttctaattttgctcactagatcattaaggtctttccctgcatgctggagacataacaatgccaaaataatttttaaactatcatcaggttcatttaaggttttaaaccgaactgcttcttgaagtaagggatgtagccaatgtgagtttgatgtacaattaatgcctgagagctccaatgcagtagttgctatattcatagtactgtatgaactgaataccttcacgatcgaagactccacttcgatatcctgatctttaaaattatcagtaagtcctgttgtaaggtacaacatactttccatggcatacagggacactaccatcttagcaatactgtctcttatcgcatcagtttcgtgtaacaaatttttatcgtcagatttgtttctaatgtctgtaacaacattattaagaatatttttcgagacagcgacagccatgggacctacacttaatctgagatctattatcatttttgataaaatcgactgtgctttgtttacttctccaattacgttttctactggaacctgaacatcagtaaaagttacatctgcaagttctaatccactgctgttaatttcacgacaactaattcctggcgcatctttatcaattgcaaaaacggttaatgatgtttccactagagtatccctctttaaaacttttgttactgcataaacaaagagaatattcgcagatagtccgtttaccacagcagatttcatgccatttaaaatccaatacttcccatctgaagatagttgagcttttgtcttaaaagaattgaaatctactgcatgaggctcagatatacatgttgcagataacatatcaccattcattagcttcgttaaatattttactttttgttgatcatttccaaacctatttagagtctgtatcccccactgttcattgttgactatagaatttctcaaattatgttcagataaagcctctaaaaacacagaagtttccgtaacattacattcccttccattcattaactgggcagcttgcagtcctagagctttaaaatcagacaaattctggcgaaatttccttgtcatttgagtagagtctaccatatgattttgtttcattaagtttctaactaaacatacatcttgctctaagagtttcgtatcttctttatttaactccggaaaagtgaggagatcagtatcaaatttgcctagaaggaaatttttacaaaggggggcttctgcggttttttagttcgtactttcttcgtcacattagttatggtttggaagtcctttaactgcttttcgtacttctcatcttgtgtgtcttttacagcaggtacttgttgatggaggatatgtgtggttccaaaataacttacgtctgtgttaattattcttttaaataaaccctattctttaaagactttcgtgcccacataattattgaaataatttaagctactgtactatttattattaaaataataaatctcagaatgacacaatgacag

SEQ ID NO: 6902 - DNA, 1910 bp, Diabrotica virgifera
  SmartBlast Evalue=2E-88; Info=OSJNBa0033G05.1 protein n=1 Tax= Oryza sativa Japonica Group RepID=Q7XJX8_ORYSJ
caactacaaactgcacagtgttggataacctgaatcacgatgtcgtactcggaatgccttggttagaacaggaagaagccaacgtagacataccccgaaaatgtctacacgtcggcaccaccagcagaactacgatctactggaagaaccagggcaagcctcatcccacgacacaaacactggaaacacaccaagctccaagcttcgccttccagacgatccaacagctgatccaacagtatagcgatgtattcgacgaccgtctacgccagccgaccacgaaagcgactgaaatggaaatcgaagtgaccgatagccgaccgatcaacgtgaaaccgtataagtactccaccgaaaagaagaggataatggcccgagaggtgaaggagatgctagcagcaggagtcatccggcccagcaagtctccatacaatagcccggtggttattgtaacgaagaaagatggcacccctcgtttctgcgtggactacagaaagctaaacaacatcacgatcgacgaagcctccagcatgccgcccattcatgacagcatcaaagagatcggcacagcacgaatattcacgacactagatttgaaaagcggattttggcaagtccccttacacaaggattccagctcgaagacagcattcagcctaccagatgggtcagcctacgagtttacagtgatgcccttcggactcaagaatggaccagccgtgtttcaaaaacttgttaccaccgtcttcgcaggattcatcgacgaatttatcaaggtatatatggatgatatcataatatactcagaagactggagccaacatcagaaacacctacacctggtactagaaagactccgaactcacggattatgggcatcactcaagaagtgtaaattcgctgcagacgagctggaatacctagggcacaaaattacagcaactaacacacaaccgctgagcaaacacatcgaacacatcaaggggttcgacacaccgaggaccatgaagcaactcagaagtttcatcggaacagcgaactggttgagagatttcattccccgattcgccgacatcataaccccactgacggacctaaccgcaggcaaccgaagacgtctgaagtggaacgaagcagcagaagacgccttcaaccacataaaacaaaagatagaaggacgactgcaacttcacagaccagacgcttccagaccgttcagcctgcaaacagacgcctccgatgtcggcatgggagcagtcctcttccaaggcacgcagaacgacaagagggttatcgcctacgcctctaccaaactcaggccagcagaaagacggtaccacataaacgaaaaggagtgcctcgccctagtttgggccctcaagaagtacaagcacttcctccaagaccaacacttcaccctctacacagacagccaagccctcctatggttagacaggttcaaagaggacaaagcaaagttgtcacgatgggctctactcctccaggagttcaacttcaccacgaatcatatacctggaaaagaaaacgaactcccagaccacctgtcaagaaacccaacagaagaacgagagggtgaagtggaccaagacgaagaagtggaccgtctaagctggcctacccaggaaacggaagaggaaaacacctttcctttactctgcatgctcgaggacgttgaagagggagagaacaaccccatcctggacgacctaaccgacctaccgctccaggataaaatcagacgaaatcacctggtacaccacgggatgaggcgcttccacagacgatggcaggagataaccgaccgaggaccaaggagcgaggtcgaggaagacctcctccgcgaatttacagtaatcaacggcgtagcatactacgtcctcaacccagac

SEQ ID NO: 6903 - DNA, 1908 bp, Diabrotica virgifera
  SmartBlast Evalue=1E-111; Info=Glucose transporter (Sugar transporter) n=1 Tax=Aedes aegypti RepID=Q176S8_AEDAE
tcaagaacctatgtatatctgtaacggtgtatattcaacaagattgcctccacagaatcctatatgtacaaacatttcatctcatattatctctcagtatctaagccactggttctatgtaaaaatggaagcttgaatattaagtacacttagagtcaacctataagtgtatgactttttacaacatatatcaaacattcccactggtattcattctttggttttcaggtacatttctttgtaacggttgagatgataaaccttggttgcataactcaacgacttctgttatgtctttgcctctcgtttcgggaagatagaatctagtgaagaggaacaatccaagagcaactagtgcgaaaatgaaaaacgacgccgctcccaggtaggtctgcatcaaaggaaatgtaagacctactatgaaattaccgccccaactagacatacttcctaacgccatggcacttggtctcggaccgacttcgaacaattctgaacctatgaagtatggaattggtcctaacccaaatccataacatagaacatatccctgtactcctattatgcttaagtaaggcacccatgaataggaatcaatatatttgattgcaaatcctagaattatcaaaaagatcgctgaggttattgtgctgacttgtatacaaaatcttctgttaaagcgtgacattgtccatactgacaaaatgccatgaaattgttgcataaaccagatccaatggtaccgagttcacttgctctatcggacaatcccgcttttttgaatattgcgttggagtagtaaaataccgcattgattccacttaattgctgtccagcttgaagagaacaaaccaataacagaggtaacaacaaagaacgatctactaaaacttttccaatactccagccaaccctggtgtttttttcgttgtcttgttgttctttttttagttccaatatttctaaatttactgcagattgttttgaattcctgagacggtttaattgttggacggctctttgttgatctctttttattacaaacaagtacttcggactttcaggcaatattggcagtgtaaaggagcagataatcacaggaattacatatgcagccaaacaataaggccaataatcgttattacctaatatatcatgcatggacataatctgacccatcagtacacctatcgtcactcctagggggcatagtacacccgtagatccccttaagtgaataggtgctaactcagttaaatacataggaacaacagtagttgtaaggcctgaagaaaatccaactaataatcttccgatgaacaacaattctattgacattactggtcgacttataaaaaacactagtgcagaaagagctgctaatccagaacaaactgctaatacgcctttccggccgatcttgtcagccaataccgaacctcccaatgacccaattgctgctccaaccaaaaatatggatactatcgatgaccatattaattcgagttggtatgtgctcggctcatttccaaatctctctgtgataatatttcgacaaaattccttgattatctctgcaggagtatttacaacgcctatattgtatcctactggtaatgacagtcctatcgttgttgccgttcctgccaatatcaacagaaacgtccatccggggcgttctatggaaatatctgtgtaaggtaactgccatgaattttttctacctctaggtccatctgctccactaaacaagcattcactgactcctccttgttccataataaagtaacacaaataatgaagtgagccaccaaaatcaaaaaccgtgcgggtattaaaccagaactattgtacataatctctacagtggtactcttctttacacaaagttaaagtgcatggtgattg

SEQ ID NO: 6904 - DNA, 1906 bp, Diabrotica virgifera
  SmartBlast Evalue=1E-81; Info=Cell elongation protein diminuto n=2 Tax=Pisum sativum RepID=DIM_PEA
tattttaaccaaatatattacaacagtataaaaataatgagttgtataataaacaccaacttgcgtaatcctgtagacaaatgaagactactaattgttgataaatatgctaataacaacattaacaataaattaccaaacgtgtgtacaacaggaactttaatttgtacttgaaaatgtgtttatacctgaaaattcacttaaaatagaaactaatttagttcacattgcctacctatttcaaaaacatcaatctcaggcttcactttatcatacaaatgcggaaaagcgtcttcagcatgatatttctttctaaccacttcgtacaaacttaaatcaaacatttcttcaaactcttctctattcataaaaatgtcagcatagagaaaagaaaatcctccaacgtctcgtgtgaatttttccatttctctcatggttttcacgggattgtatttttctttacgttttacaaaaccaggaacaccgtaaataccgagatcattgtatattgcatagtctgttccttccaccagatcttgcttcctaggttgtttcagttggccagattttggaccgtgatcgtataccttgcatggatataccaaaagcgggtaagtatcgaacagtttttcagaaatcgctatctgatcctctaattttctaatgggtagaacaatatcttggaatacttgcttcataaacgtgaaatttcttatccccggtgtcgttgtaaatttcaagaaagctggtttaggcggtaaaagccaaccaaataacaacctgaacagaggattatttccgaaaggtatcatagattctaccacccaaaatattgctctgttgtgacgtaacaaatactctctaagagggatcagttcggtgtgctttccttttttgagaaaagactctacgtatttgtaaaaccatggtttgtaccaactcgtaactgtattaattggcaaattggggtcataatcggagtaatctcctgtcattataacagcttcattgcgactaaatatagtagcttctacataatctgcaacggggtaatcagctccgttatcaccagataccagtctaatcatatcacagtaattatcctctccctttacgggaatgtaactcatttttatatagggtttgattttaacaatcttaagagtaagagctactaggaaccctaagcttccgtgtgaccaaggaaggcatttatacagatcttcatgttcttcactagaagctgttactagactaccatctcctaacactacatcataagagacgatattttcatggtataaaccaactttgtgagagtgggttgtcattcctgtgcccatggcaagtccaccaacagttgcatctgctatttccaaagttacagctagggtgtacccttttggtacgagatatttagtaatctcgcctacactcatcatcggttccaccttaaccgtcaaatttttctcgtctaattccaatacattgtaaagatctacgttaacttgatgacacaggtccttcctgaagaaagttagcgataagctctgccagtttggtctcgaggtacatagtaattttctatcttgcttgggtagtttgttccattgctgcacctgttgttgtactctccttacacgttggtcgtggtcttggtcaccactgaacagatagcggtatatctgcttgcgtagattaagtagcagatcgaaaataaagctggctggcaaacagaaaaataggacgaccaagcctctatttttttcaagcaggtctatgcttttatccttccatgatctatcttgcgttgtctggtcgcccatattaggaaggaaggatataccaattttctcaatgtccagccacttttgatatattgcttcttgttttaacacatttccag

SEQ ID NO: 6905 - DNA, 1908 bp, Diabrotica virgifera
  SmartBlast Evalue=1E-149; Info=Nardilysin n=1 Tax=Camponotus floridanus RepID=E2AMV2_9HYME
tgcctattccaccagttcttcacatcttcatgaagtacctgcttaatctcctcgatttcttgcttagaccggtcaaacatgtattcgtcgtttatgatctccgaccagtttcgatctacttcttcttttaaatgagaatcaactatttccttagtttcgattaatccttgtttcatttcttcgtattctttccctgaactcttttctataattgtctcggtgtgtttcaaaaactcctctattctgttgtcgagatgtttagttgtaaatttgttagcttgggaattaacggtgatggaatagcccaaaacaccataagtgtcccttaaggcacagtaaacatggtaacctagttgttcctttgttcttagtatgtcgaacaaaggttcttcaattatgaacattattatgtctatcatcacactgtctttcagcgaatacggacctacttggtaatagttggcagtgatagagttggtgtcacgtttattgaatgattcgaccttcaaacatttctctcctaaaggtatttgagctacaacaagagctggatactggtcttggggaagtggatcgtagtttaaggtgttaacaaatgtcttaatagtgtcagaagcaacttctggcaaaacgtttccttgaactagagctttgacgtagaaatttttaatgtacttattaataaatgcttgcatatcagaataagtgatatcgagtagttcacaatatttatcgactggagcaaaataatgtccaataagcaacttcaggcgagtatcttttgccagagtagacggtttgagtattttattgaaataggattttaacatcgtttctttgactacttggaacatgcactcgttaatatagttttgtagatttttgacgtattttgctatgacctcgattaaattcggaattttctcattgaaaccgcctatttttatcacaatgcctttttcctcacaggtgaattggtgttgtatattagccatatttgctggatagacttcttctcctatagcaaaagctaagagattcataaacatttctgttaaagctagacttttggcagactctacggaacttggattgattaaataaaaatgatagtatgccattggcagtttgaatttctcgtcctttctataccacatctctaccttaggagtatccatgattttctgaggatagtcaggatgtttgggtgatttcggtaatatggagaaattggtcgacaaatatggattgacgggaggaatgttcagttctgagtaaggtttaacagtttcccattgtgttataagatctttaggaatgtctattgcggtatattcagccttaaaccatttttcagttttatcaaacactaaaccatctggcagatctttagtggtaaccataatattaacttttttgggcactaaagaatccacgaccattgtaatagccttcggatcgtattcatagaatagttcagatccagccaaataatcctctggcggataaaattgcatagcttcacacaaattttctacattatcaaccggagttaactctgctgcaaatctaaaagtagtatctgctattaatttttgttcgtcgaaaattcttctctggggaccaacattcctgagcatattaatgtaggagaatactgcttcgatgacgctatatatctgtttcaaaccgttttcggttagtactatggatacattgaatatggcgtacatggaattgtgttcgcttcctgaatcttcattgcctgcttgcattgaagtagcccatgatttgctctttaaataagacaacaaactccccttcccctcatctcctataagacaggatacataacccattggtttacttttgtacatatgtttgagtgatggtagactccagtttaaa

SEQ ID NO: 6906 - DNA, 1903 bp, Diabrotica virgifera
  SmartBlast Evalue=7E-76; Info=Ankyrin repeat and zinc finger domain-containing protein 1 n=1 Tax=Camponotus floridanus RepID= E2APC5_9HYME
agggtctaccaaatattttgaacatggagactaccagtgtgttttcggaggcttttaaaatattattggtgatgttgttacgacagtacagttagaaggaaacgagaaggaaattaaaagagattcatctccagctgacgaatggtcttcatcaaacgacaaaaagtcatgttcttattgtcgcattgaatttcccgatagccagcttcaaagagaacattacaaactagactggcatcggtacaatttgaaacagtccctgttttccagaccaccaatcacggaagaagattttagtgtcaaaactggaaatgatgatttatccagtatatcaggatcagactctgaaaaagaagacacgctcgacacatacgccactgcccaaggaaaaatatttttgaaaaacaaaagcaaccaagttatctcattgtacaaatgcttaatgttagacagaaaggaagaaatctcagaaagtgtcatcttaaaccgtttgaaaaactgtgtaaccaaccagcattggaccatactcatgcttggagggggacactttgctggggctgtcttcaaaggtaacgaacccattttacacaagacgtttcattgttacaccgtcagagccggccagggtggttcacagggtgctagagataacaagtcgggtggatctcaacctaagagcgctggtgcatctttgagaagatataacgaaacagctctagtgcagcatgtcaaatctatcgtggagacgtggaaaacagaaatagaaaacagctctttaattatgtatcgagccgctggaccctataacagaggtgttttatttgggggaagtacacctttgctagatagaaccaatcctaaattaagaaccattccattttcgaccagaagagccactttcacggaactgaaaagggtgcatcagttattaacgacagtaaatgtttacgattctctggaaactgcaactaaaaatttttctaaacaagtagctcccgatgttgatgctaaaagaaacaaagttcggacttcctgtatcaatagagccaagtctagagagaccgtagaaagacctctacccactgagcacctttccagtgacagtgaatcagaaaccgatcaaatttatttatctaccaatgatcaggaaatatctttccatagtttgaaagaatttgaggattcgctaacacccgaacaaagaaaaaagcttgcaaagaagaaaaaaccgaagaaaagtaaaagtaaaaagttgaaagagctggaagacagtaaaaagaaggaactgattagtgttatatccaatggacaagtagaaaaattaaaaatcttgttagataattatttgcaaatatcagaagaacctgaagttgaaaaaaatagtcaagattttatcaacaaagtagtggacgaaagtcaaaatactttattacatgtggctgctcaaaaggaacaaatagatatggtgaatttcttgttaaataatgacgcaaatccttgtttgaaaaacaaagctcaacttacggcttatacttgcactcagagcaaagaagtgagggaatgtttgaggcagttttcaagagacaaccctgataaatacaactacaataaagcacagattcctgttaacgccctaactaatgaggaattggcagataagaaaaaggccatgcgtaaagtgaagagggagaaagaaaaagaaaagaaaaaggagaacgacatcaaaagaaaggaagaagaacagaaggaaaggttttgaaattaagtgacagggaaaagagggcgctagcggccgaaaggcggatactcaaccaaaagggcgtggtcaccaaaagatgctttttatgtggcgcagatatagctggaaaagtacctttgaatacttacagaatctattctgttc

SEQ ID NO: 6907 - DNA, 1909 bp, Diabrotica virgifera
  SmartBlast Evalue=0; Info=Collagen type IV alpha-3-binding protein n=2 Tax=Formicidae RepID=E2A0T0_9HYME
atttaaatatttaataattaataattatacaataaacaaagatgtgtagtaaaatagaccctgacataattaaaacataataggtttatttttcgtttgatttttaacataagctgtaaagcgttttaaaaactttggatattcccttttgtacaccgccctcaatacggaagctggagcccaaccaccaggattaactacagaacagtacgttattttacaagataagttatctcttgttaaagttgtaccatcttttggaggatccactgtcgtctgacacagtaggcatactgttaagaagatccttacacatttaccgttatttgcagggtgctctgaatactctgtagaattgttgacaaccgtccaaatatcgggaccatctctatctttctcgttgggtaacttccttatgtgcgaccaaaataaaccttctcgttgactagctggccatatccttttgtgagtctgtaagaacactaatgtgtcttccgatatggtctctagtactgtcatgtgctctaaagtggattcccaatcatatctgtattgaggattaaagaaatagtgacaaacttcatgaccagaaattcctttaactacatgaacagccttaagtggatcacataccatgccgtctacttcttcttctcttctgtacattttcatttcaccatcttctgcgaagagttgccacccagcaccgcattctcctattcccattttagccatattcacttgggacttcacaacattttcaatctgtggccataaccgatgttgacaggctggtgaggtaggaggaggagttacaggtaccactggaccagtttttaatctgtcccgcaattcctgctcttcctccattttatctagtcccgattctagcgcatcgtaaaattcatcatctgccaggacgctatgaggcccctcctccaaatctggtccgggatgaacgttcctaatcttctggatctgtgtaaaataggattgggacagcgtctcggccctcttacgtttttcaatttctttatcgaggcgtttgcgccacgactcttctcgttgagacatcaaatctgaacaatgttccaacgtttctatcacagctgttgtggtcgacttaaaagttattgcctctcctttaaaatccaccaccggaaagttttctttttctggtagtccgtttgtcgcattctggtccacgcaatgatcaaagtatccttgcaaagtatcgatctgtctgcataaaatatccttgaatgtaccgatctctgctaatttctccttgatgtttctggatgacctcttaaaactgctaccagaagctgtactgtatgtgttggactgtagactgactgtcgatccatgacgttttaaactattttcagaaccagtaccatatcctgattcaaccttaaatgattctaaagcatcaacccaactctgcttgctctctacggagatcgccctgagataccagacacaatcattgactgaaacatcaaatctgcactcatcaaattcatggggctttataacagcctttgcaagtgacagggctcctctacatccataatcgcattcctgttcactcttgtaatatgataatgctccgttttttaatacgatgtatctgtcttgccagccatgtatataattcgtccatttactcaacaccccagcaaactcatttaggttttccagatcagaatcgtcactgctgtgaccctcggccattctaatttagatttttcggtggtttatttgtattgaccaaatgcgtaggcattgacatctcgtatgtttagcacatcgcggtatttactgtaatcgtcgaaataaaatcaactgtgtagtaattaaagttacacttccaaattgtttatcacaattttccaaagttgac

SEQ ID NO: 6908 - DNA, 1901 bp, Diabrotica virgifera
  SmartBlast Evalue=6E-11; Info=Diacylglycerol kinase theta n=1 Tax=Camponotus floridanus RepID=E2ACQ0_9HYME
tgggtacagagcccatgtgatgtggttgtactaaaatctgctctaaaggcaacaatgctgaagaaaaataagttcaagcgtcgtcctaccgaaccaaacatactaccggccaatggggagggggaaagagcacagacgaataattccaaatatcaactcgtttcataagacacaacattttctcacaaaactttttttcatttttataagactttttcatttctcttttatcatataggcatgagtattttgcttggtttttttaggtaatcgtaaagttgcttttataacttacttaaagtagagaatatattcaattatttgtaacaagtatacgtttgtgtaccttcccccctcaggccaccatgttgaagaagatgaagggtaaaatgaaacgacgtaacacggaacctacaatgttggtatctcccggagttcaactggcgcccttaccttccaatgatggggaatctcccacggatccaaacaccaatttttagtttaactttcatttattaattgtgttttagactttcttcctttttacggatgtattattttttaattgcgactctggtaaatgtatttttaaaacagtaaaaagtaatagttattacgttagagtatggtatttttaccaaaatactggtgaaaaaacggcattcgccatatttagtttgtttaattctaaagcatttgttttaagtacaagtaatgtactagttgatagtctcaatatttatttaagggtgttcttatcaaaatgacaatcaattaatcctgctaatattattgtttaaaaaatggctcgaacgaagtttttattttaataaaatctgcatatgtgttatacctacggtttctgctataatcgagagttaagaaataaaaatctctatatagcaaaaatttagcggacaacaatgagcctaggaggatatttattgttgtattgatcagttcaccctacctaaagatatatatttaaaaaggtacatggatatgtatgtacctagatgtggcaaagatcctttaataaacctataaaacatcttataaggagtggagcaaacatctgctcgctataaaattccgattatcaatctctctgaaagacaactatcagaataatgttgacatattgtttattttaagtgaaatgaaagtggtgtattacagacaaatttgaactgctacttatttgtgtagggataggattgagtttatagtaggctatggttttcagtatcggtactgttagatgtgtttcagagtttgatgatcaagagtaggctatgcaatcttagtcatccctttccaaaagtttgtagccactagttgtggcaggtatgttgttgaacaagtattcctgatactctgtctttataagaaacctttactactaagtttgtatataaacctaaaggtttgtcaaaaaggcgaattgatagaatacacttatgaatgccggaagtgtttattctcacttgccagaaggtgacagtgaacgctgttattaacctacctaagtacatagggctcaattcttcattgatgctgtctggggcttattctatggagaaagtacttcaggtagatttatgacaaccgtttgaaaccctaattttagctgatatattactttaattgatgtgctctattgtttgtaattatatttcccaggtatgtattttagatgatcgccaaaacagtcacttttgtgtttcattaattagaaacaatttgataatctacctactccgtgtgtttattaagacattgatctcgataatcatactaagtacttatgatttacgtagactgttaaaatgtttctctgtatatgaaatatatatatgtatatgtgattaaaatagatatatgaaaaattgtgaaatata

SEQ ID NO: 6909 - DNA, 1905 bp, Diabrotica virgifera
  SmartBlast Evalue=1E-109; Info=Sodium-dependent phosphate transporter n=1 Tax=Aedes aegypti RepID=Q17LW3_AEDAE
ggtttaataaataaattatagttgttctaaaaaacccttatcgaattaattcgtaagtccatagataggtaaaaaacgtatctaaaaatattgataagacatttcaacaaagacaacaattacaacagagcaatatcgactttggcttatcaactattttgtatgaatattccggaacaaaagacagtacagtctcaggtaccattttggtacatcggttctttctctggaacgctatcttcttgttttggtcgtttgtcgttccatggttggatttctccggaggctccgaagacgtagaagagaccagtcgtcgagaatagtactgccgcggtgatgaaaacgatgttccacagttctttatcactttcttcataaccacccacatgtttaaacatatccacagccaaaggcgccagaatggcggccacatttccaattgcattagtaattcccatgagtgtacccgcatggttgggagcgatatctatgtgattcacgtggaaaccaattaaaataccggtattgcaacctactgctataaccaacataaatactgttaaggctttttcttctgaaccaataaaacacagagtaagtaaggcaacagacggtatgaatacacctatactgttaaatatttttctactagcaccaacagaagtaatcttattggtaataaggtaatcagcaataggactcatcaccagattcaacaggcaatagattagatacggaagggcagacaaagtactgttcgatgcgatgtcgtattttagaattttgtccatgtatgttggtatttctgtaagcatcgtccagaagccccagagatcgccgaagtggcacaccaaaatcgcccaaaatggaactgatttaaggatatctttccatggcgtcggtaattgctcttttttcttgttggtaacaatgccatcttgaatgaactttagctcgtcttgggagatattcttgtgtttatggggactgtctaatcccaagaagatccaacaagctgtccacgtaaaaccaacgccccccaataagtaaaagacagtctgccatcctagttttgatcctgaaattattcccacaatgggcatcacaatgactgtaccaaggggaccacctgcatatacgaatccggcaattttggctctgctgctgagcggcacccaggcgctgatcaaatggtgaatggatggatatataaatccttgcatcagtccctgaattattctacaaaacattactcctagatatccgaattgagcaccgcaaataggaatgagtattgaaaatagtgagcaaataaccattgctccggataaaaataattttggaccgaagcgttcggcaagttgaccggcaggaatttgagttagcacgtaaccccaaaagaaggaggataacatcacgtttttgctgcctgcccattctggataagtggtgactccctctggcggggttttgctaaccatggaaataacggctacatttaaaatatttcttaatccatacgctaaaacatttacactaaagagcagaaggtactgcacatgcctctttccaaaaaattgttttggtggttgtactctatccatggtgtcgaacttatcaatttgaaccatattatatatttcccaaaaaaatactaaaagtcttctcttctcttttcttgttttgattttctgtaaactgtggatttctttttgctccggaaacacactgattggcacttacttcaacatggtggctcctgacgttttcggagagtgagttatcaacaactggtaaataacgaaatgcatggtggcaaatacaaatttacaaatgtatggtatgttttcgagatgtggccggtctcgaaatttggcacctttcaagtgaaatggttacaattcc

SEQ ID NO: 6910 - DNA, 1900 bp, Diabrotica virgifera
  SmartBlast Evalue=0; Info="Asparaginyl-tRNA synthetase, cytoplasmic n=1 Tax=Camponotus floridanus RepID=E2AI73_9HYME"
tcggaagagaactgtaatgccacttttgttaaagcaagatcaaagaaaaatataaatataacaaaatattaaatgcatagttgtctgtatatttagctgaatcaccttaaggtttacaatgatgcagataccgcgggtacaaacagacttctctaatatgatatctgttgagcagccaacatacaaatctctccaaacccaaaccataacctccatgtggacatgtaccatatttacgttggtctgtgtaccagaaatatggagctggatctatttcctcacgtttgtatcccgctaatagctcttctagatcccatatcctcattgatcctcccacaatttcgcctacatttggcaacaaaacatcaacactttccgtcaatctggcatcctctggacatttgctcatgtagaaagatttgatgttggcagggaatctacagagcatgataggcttgttgatttggtctgtcatctttctttccggcatctctggaatgtcctctccaaattcataaaatgtgccatcctccttggtgatgttgttctttttgagatattcgatagcatctgaatagttcatcctcaagaagggtctttctggcacttggaagttggggttgagctcgtgaacaatctcgccatagggggattttaaaacacgatcaactacatcacaaataagatcttcgagcctgttcaaaaggtcatcaaaagtgataaatggacactctgcttctacatgggagtattcagctaaatgtcttctggttctgctttgttctgctctaaagctctcagctatacagtagacatctcccatagatggaagacatgtttcaaggtacaactgcgaactttgtgtcaaataggcctcttcaccaaaatagtccattttaaacaaagtggatcctccttccacctgagtctgtactatggatggtggtgtgatctcacagtaacctctgtcttgatagtggtctctgaatgcctgtagtaagacagatctcattcgtaagactttggatgtgttctctcccctaatcataatatgcctgttttcagcttgaacatcaggcaaagcttgctcattcaaaattgagtctgctcctcctggaggggctaaacctatcaattcccaatagtccacaagaagttcatgtccgcctggagctatttttccttccggcacttccttgatggtaccaaataacactatcgaagattctgtttgtaggaccaatgcattgtaagtctggcaaagtttgtcattgagtatgcactgcaagaagcctgtaccatctctcaagttacaaacattaggttttttccttgtcttctaatcctgtgagcccagccatatatttttaccctttatctctgtttttgcttccgtctgaaatctttatcctcttggcttctggcagagatttatcctcactgatagcaatctttttggcatcctccaagtttttggacctcttttctgcatcttcctcttcttttttggatttgtcagcctgtttatagctctcccttacccaaattttctgtattttcttcaattgtgacttggcagctggttcatacttgactccctcttcttttccatctacataaataactggaaaaggttcagctccagctttccgcattgcttgtagaatagtcttaaagggcttttgttcgctgccgtccccattttcgtcactcccttggctatcagaagtgtatatcggttctttattctctcctgacatgtttgatttttctattatttaaataaaaacagtcttttcactacgtataaaattaatatttaaatattttattaattttaaatgatgcaactttattggaaattgatatttgcccgcagcagtttatctgtaaaagagag

SEQ ID NO: 6911 - DNA, 1900 bp, Diabrotica virgifera
  SmartBlast Evalue=1E-159; Info=SMC1 alpha (Fragment) n=1 Tax= Oryzias latipes RepID=Q7SZI8_ORYLA
tttatcgttcttttcttctgccttttcctcgggtcagaactggtcatatttcgttaagtcacacgttagcacctggctaattagacaatccgcaggcttgatctccggacaaattccaattaaagcatcagcgtgtgaataaaactcttctttcaacgaaataacaatagtctgtagagactcagtcttttctctaatgtatttagccacttttccaatattagtgttatctaaagcagcatcaacctcgtctagaacgaagaacggggctggctgatagctgtggattgcaaatagcaaagctaaggctgccactgttttttctcctcccgacaagttagacataggctggaaccgttttccgggtgcaacacaattatagttgataccatctaagtaaggttcttcggggttttcggcacccaaaaatgcttgagctgattgattctgagctagagacttgtaaatgttatcaatttcgttggacacatgatcaaagcatcttgtaaacctctcgtatctttgctgttttattttttcaaaagcagctttagccttcttgttctgtttcctcaagttttcaaattcttcgttggtagattgcaactttccacaagcgagttgtagcttctcgatggctttcatgttaggtgctgtattttggtaagcgtatcttgtaattgttggatagacttaagtaatttgtccgcctgcttctttatttcgtccctttcttcgagatctttgaggttatcacttaggctgctgtagtcaatcttaattctagcttccttttcgtgttgttgtgcactggtactagtctcggcgttggatgaagactgagagggatcggcagcagcaatgtcctccatgtttcctactatcataggtatagctatgtcatccatcttgcactgcatgaggatagtatgcctttcactcttcttcccttcgatttttccttccaaagaaaccaccgctttctgagcagcttgtacatctttggccacagaacctacttctcttctagctttacccacttcgtcatcggcagcttcgacttcttgtttcttgtttaatctagacgctttcaactgttctacttgttgaagatctttgtctatttcgtccctatgtttgatctcttgcttcttacaagcttccaatttttcttcttcgtcatttactgtgcgttcccagcgactgacgttattctgtgtatctctgcttctttcgaaatccagattactcgtaatcctattgatttgcttctcaaattccaatcttttcttctttctctcttcttgtgctctcaattctctatcttcatactgtctaatatttttaacgccgatttcgcgacaaaaatctgaaaatacgacatcttcgacgctgttcatctttaatttgatttcctcgatttgttgttcgcgagtttgcatactcttctcgatagcttcaatttgaggaccatgtttcttcatctcttcatttagacgagcgagttccctttctacgatgtttatttgctttttagtgctttccatgtcggttctattatatctcaaacgagtttcaagtcctctgatttgtgagtcgacagtatttaattcagactctttacgagattttttcatagcctctctaagttcttccgttagtttttccttctgagctttcaactgagccatgtgtttttcgtcccatctcttagcttttctcgccagatccaaactacctccagagataatacctgacttttgatagtaagttccgtccaaagcgacagcatctaatcttcctcctagctcataagccactttcatagcatcttctggcgtttcgcagacgagcgcattattagtggcaaacatcactgcttggctatcgcttgaggttc

SEQ ID NO: 6912 - DNA, 1901 bp, Diabrotica virgifera
  SmartBlast Evalue=3E-83; Info=Leucine-rich repeat-containing protein 24 n=1 Tax=Camponotus floridanus RepID=E2AP20_9HYME
tttggtgggggcctgggaggaattttcttaattggctgtccgtcagctggcaaggaagacatggagtttctcttttcggggctacgtaaagcatctgcgttgtctttcgtccactggagcttcgatggcgttaatttggttgcatgtaaattcctagggagagtttggctggcaagaggttggctgggcggagactcgagactctcagcgattggatcgcagtttgttggactcagaggcaagagtcgaatggatcttggagtactggcagtgctgtccaatttgtttaaagacaaagtactagtgccaccgtcggcagtagttctggcacccagattgtcatataatggttccgctatcagttcctcaacattgggtggttcagaactccaactttgcattcttggacgtcttggaattgtaacgtatcccgttcgaggtattctagctgggggtcctacaaacggagaatgggatctggagtagggcaatgtacggtaaagattcagttgatcgtagattggactgtgaagaggagactgcgggccatgagttggtggaagacgggttgtatctgcaacagtagatgcagaacttccagcaggtgagacctgagccaacctaggaggaaatggtagtagatctggtgggtaatgattaggtccagtgtccagcataatttgaccttttcgatggggctggtcgaaatcaaaggatcgagaatcttcatcgccatcaaaaacagattcgttatccaataaagtcttcttaacatcgctgacttcagtacctccactaacaactgacggcgaaactgatgtacgaggcggtttggtaactggattaacatctgtaataagccctttcttaatctccgcttgtccagtgctcatatttatgtattcctctgacgtagtagcattgggtcttctctttgaataaaatccatgggtacttcttctgcaaaagcagaatagcgcaatcagcacaagaaatagaagtataataaggccaactgtaagtccaattacgagagttgtgctggttgatagcgttccaacaattccaccaccagttagagcccctggaaggatatctagagtaatatttctttcagtatatccaccaggattcttagcgatacacttatactctcctttgtctttgtaatttaaattaacgatagtcaagttattccaagtataaccaccgatggtttctttaaatgtaaaatatttttgtttgtctttcctagggtctcgttcgattataagtccattattgatccagtcaacatcaggagttgggtcgcctataactttacatgtaagagtaacgttgtttgtagcagcttgaactgtactgtacggtcctacatccattatttttggagagcatgcaaaaactacagagtcttcaagccaagactggttttccagtcttttgggaccagaacatattactttatcagtgatcaacttattgtgtttcacgctccttctgaaaatgtctagctcacagtcgcatatccacctgttgttctcgacattcaagctggacaattttggcaactgctcttttatatcgaaagtaattcgctcaattttgttaaatgacaaagagacgaattttaggtttggaaggtttcgaaacgtttcctgcgaaaccgtctcaatttcgttgtggtccaacagaactttttgtagataagtcaaattagaaaatagttcatcttctaatatctgtatcctattttggcttaatattagagtccttaatctaacagtaggtcgaaatacgtacttgttcagcgtaacgatattgtttgtacttaagtctagctcaatcactaagcctaaaccagtaaacgcccactggtggattttttctatggtacaatt

SEQ ID NO: 6913 - DNA, 1900 bp, Diabrotica virgifera
  SmartBlast Evalue=2E-10; Info=Cubilin n=2 Tax=Mus musculus RepID=CUBN_MOUSE
cattattctacttttgcactacgagtaactaagatgaatctctgtgaaagtataatattttttaccagcttttccgcaattttttcatccggcaccactcaactgacgaacgcgacttgtgggggtgtgtttaccgcaaacaagttttatctacaatcgccgaattatcctcaagaatatccaagaaatctgaactgtgtctatgtcctcaagggacctaattgtcccacccactaccaatttgactttattgattttgatttggaaaattccgtaggatgtgttaaagacagattattaattgaaaatcaagacgcattatgtggcaaagaaaagggtctcaagggtaataagggttattttggtatcaacgggtcgttgacagtaagattcatatcagatggtgatgggacagcgagaggctttcgaatattggttactagattggaatgcgagaacgaggcgaaaagagaagacagcacgacagataatacggaagttattgatacaacaacagtaaaaccagaatctactacaacattatttcgtccacttcacctgccactaccgaatccagaagacaatttgccacaatgttgtttaaatacttttaactctagacgatctttaataactagtcccaattttccatacaccctcaaccaaaaacttgactgtaaaataacaatccaaaaggcaacaaaaaatatatgtagactaaaactctcgttcttgttcttttggttgggatcagccaataaaaacagttgtccttatggatggttaagagttgatggaaagtttatttgtgggtgtaatcaggatctgaagctaacaactacgtttgatggtgaaaacgtaaaagaactggtctttagaagtgaaggtgtcaatctaaactcccaaagtggatttgttattgaagtagtccaagatgaatgcccaacaaaatactacccaggatacattcaaaatttaccatctgtatatagaaactatagatttcataggcagaatggagtacaacaatataattcaatgagtgtcaacaggaatgacgagcaaccttacatagaaactgcaaagctaatccacgagaagactgaagaagttgacaatcaaaacttgagttcaaagtttgtacaaggtccaaaactcataaaaagcttttaccttttttcagaaccagattataactctgcacctgaacaacctatcgaaccagaacccactacttttatagatactagcactgtatctgtaatagcaactagtataaaccaccaagaatgtacatattggaataacgttcaaattaacaagttatgttatgcctatggcaacaatttacaaacctgtaaaagaacgtctggtagtcaccagcaaaaggatgtcttgccaaagagtaactgtgtcgaactggactatgttcgtggttatttaaaaagcccaggatatccattttattatcctaaacttttaaatacatgttacaggtttaaaaagcgacccggatattgcggattacaagtttttatggctgattttcagttacaaagtagctatggatgttacaaggattaccttttagtggaaaatcgacacaaatattgtggaaagagcctatgtggccgatatttaactttcgacttaacagaaaaaacgcacgaagatttagtttttgtgacggaccgcttcttttgtggtcgcggcttttatgccacgtatgaacaacttccatgccaaacatatacgactacaaaagtaccagatataactatcgtacccatacctacaacacctacaactaccccaagtccaatttgtgatagatacatagccgacagattatttagaatcgaggtaaagcaagataaggataggtgcacttttcaaataa

SEQ ID NO: 6914 - DNA, 1895 bp, Diabrotica virgifera
  SmartBlast Evalue=0; Info=Cohesin subunit n=11 Tax=Drosophila RepID=Q9N6I4_DROME
atttattgttgtaaaacttgtagatgtaatttggtgaatttataatgaaatagtttgaataaaacagagtattatagatttttagttaaactattgaattgccacacgatggctgcaagattgaaacatattgaagtggagaacttcaaatcctacaggggtaggaaactaattgggcccctcaaacccttcaatgctgttattggtccaaatgggtcaggtaaatctaacttcatggatgccatcagttttgtgatgggggagaaaacacaaagtttacgagtcaaaagattaagtgatttaattcatggtgctgctatcagtagacctgtttccagaagtgcttcagtaacagcaatgttcattattgacgatggcagagaaatggcattccagaggtctgttcagggatcatcttcagaatatagggttgatggaactgttgtttcttctaatgagtatcttggcgaattggagaaattaaagattaatgttaaagccaagaactttctagtatttcaaggtgccgttgaatcagtagcaatgaaaaatccaaaagaaatgactgccctttttgaagaaattagtggatcaggatctttaaaagaagaatattctagacttcaacaggaaatgcagaaggctcaagaagaaatcaattgtgcgtatcagaagaaaaaaggtatcaatgccgagaaaaaagaagcaagattggaaaaagaagaggcagataaatatgctcgattaaaagatgatttgaacgacaaactggttgaccatcagcttttccgcttattccacaatgaaagagaaatgaaaaacctcgaacaagatctcaagtccaaacaaaaagaagtcgataaaatcgaaaagaagaaagagaagcaagaagacattctcaaagaaaagaggaaggaacacggaaagtacaaccgagaactcgcgaagatcgaacaggatataagagaagtagaggtggagatatcgaaaaagaagcctcagttcattaaggcaaaagaaagagtaactcatatgcagaaaaagttggacggtgctattaagactttggatcaagccagaaaagctcacgatgctcatatgaatgacattaaaaaattggaggatgaattagcatctgtggagaaaaagaaggatgaatacgagactcaaatagctggtgaatcacaaagtcaaggaagagatgtgcatttggaagatgctcaggtaagacaataccacaggttgaaagaagaagctgccaagcgatcagcacgatacatgcaggagttggattcggtcaacagagaacaaaaggcagaacaggatcgcttggacaatgtttctagaagtagaacagatgctgagaacaaacacagacagaaactgcacgaaaaagaagagatggaaaagagaatagaaaagttggcagaacatattagatccagtgatcaagctttgcaagatcagaagcaacttcgagaagatttacaatctgatgttggattttctaaggacagagttcatgaaattcaaaagcaattggaagatgtagctgagcaacttggtgacgctagaacagataagcacgaagattccaggagaaagaaaaaacaggaaattgtggaaagattcaagagtaactaccctggagtgtacgatcgaatgataaacatgtgccaccccattcacaagcggtataatgtagctattacaaagaatttgggaaagtatatggacgccattgttgtggacaccgaacatactggcagacaatgtattaaatatctcaaggagcaaatgttagaacccgaaacttttcttcctttggattatcttcagactaaaccaatcaaagaaaggttgaggaatataactgagcccaaaggtgttaaatt

SEQ ID NO: 6915 - DNA, 1898 bp, Diabrotica virgifera
gtccttacaatatagataccgttgcacgtcatccgcatcatagcacgtgacgtcacatgataccaatacgaaatatttaagtggtaggtatgttcctttttagaatcgtttagccgactacactggaattacagccactagacatactttattatattcgcatagaaataatattggaagatgtctattaatctaaatttaaagaaacatgccctaacttaattcatttaatttgtataagtgggatataaagcgtgtttacaaagcacacttgttcggattacactctaacggcgatcgaacaaaacaaaggtgacattttggcataaattggtaacatttatttgacagtgctttattatatttattgtttttattatttactttaaagtaagattataacgtaattcttgttttatatttatttacgtacgttaaatattaatttgttttgttgtataatccacttgcacaaaaattatgtgatatatttgatttaaaattaattcaagaattttctgtaattgggcaactatgtcgactcagatctctgacgtagatataggcgtgcaacggtatctatattgtacggaacaatacgtttttgttatgcatattctttcaatttatatatcgaaaacactgtttaagttgaactgtacaacatcgactgaactagaaaaatactttttcatcatttctacaatgtttaaagaaagaagcaattctcagacagtctcccatttttaaccgcgcttttacaaagatttctatatgaaatataactatgatataagatgataagaaataaataaggaacgattttaggcgagaataaatattatgacatttgcaataagaaacaccaaaaagtactaaaacaacccatattgtttttcaacgccgtttcagttttctctacatcacttaatactcattttcttcaattttcttctcacaaagaaaaatctgacgaatataactttttactgcgtgaattttgctgtgtcaaactttcgacgcctttttaggaatcatgttccagttatgtgcttatgaagcgcggtgtatttatatgtccaaaaatactgtaatctgataaggactacaatttctgaaggacaaaacacagttcacactttacacatggctcatatcacgcagaatttatcaagcttaataaactgaaaacaacaccatttagaataagtgcagttatattgtcatcttaattgcgtagaaaactgaaaacggcgtaaagagagcttatttcgctgagcctctgactaaattaatactgaagatgactctaaaatgttgattatcgaaagctaagcgagcattagtaaatatgctatccaaaaatagtttaaaatattaaattaaaaaatgagattaccctaaaagtagaattcaaagcttaagtatacttttcatgataaaaactgattggaaagtctttttttacttgttttatttcaccacacaaatatcacacgattggttagttggttttgtgtgctagtactaaaattatgagagttcataacatagaaaacctggaagaatcagcaactaaatttacataaataaggtactagatgggctccaaaacaggtccttgttgcatctagttttccaattttgtcaaatcttaatactagacccattatttcaattatcagttaagacaggactgaaatagtttggcatacgaataattttatgtactttgctcataaaactgtcataccaaaccttctcaaaagcttttgatggtgttcaaatagcactagaaagtctacaatttgttattgtagagcgtttttaacagcaatgtgacatttactacagacccacagtcagcacattgggtaatacaccagttttatatcagt

SEQ ID NO: 6916 - DNA, 1898 bp, Diabrotica virgifera
  SmartBlast Evalue=0; Info=T-complex protein 1 subunit alpha n=5 Tax=Diptera RepID=B0WAH6_CULQU
taaatattgtgaaaaagctttcaaaaacgtcttgtaattattaaaaatcctcgcaaatgatgaagtactgaaaaatacttcgaattaagtttattttaaaggagattagctgaaaatgagtgacaattatatgcagaaacgtataaattagtaatacagagtatatatcaaattaatcatataattctccactctccatggcttgctggtagctctttccgcctctttgttcggaatccaatttgatcatatcgtctattctcaagatggtaatggcagcttctgtcgcaaacttaagggattttattttggacatggtgggttccaaaactccggcttttcggttatctcgaacggtaccttccatgagatctaatcctacatatttcaaatgcgcatgatcctttttcgtttgactggaattctggtatgccctcaacttagctactaaatctgtagcgtcctgcgctgcattaactgccaacgttttaggaataaccagtaaactcctggcgaattcggcgatagccaattgttctctggagcttagcgtggttgcgaagttttccaaatatatcgaaagcgctgcttcgacactgcctccaccgactacgacgcttttcgattcgagtacgcgttttacaacggacaaggcgtcgtgaacagatctttccatttcatcacaatagaaatcgttgggtccccgcaagatgatagaggctgctgtacgtgcttttggtcctttaataattatcaattcatcgtcagaaattctttcttgaacaacttccgctgcctctcctaccatgctagaatcaaaactttcatctccctccatgttactaagagaagttaggaaagtggcaccagttgctttggcaatgcgttttaagtcagctttctttactcttcttacacccatcgctccattttcaacgaagtattttaggcaaagatcatcgataccaccactcgcaagaataacattaacaccggtagagaggattttctggatgcgttctttggtgatgtcgagctctcttgtgcggattgcttccagttgatttggatcagtaatcaaaacctgaacacccatcttcattttagccttctgcaatgaaaaatctaaacatgcgattttggcgttaacaatttttttgggcatcgcttggctggcaacggtgcagtttaatgcataacctggtacaaggaagctctctctggcgcttttaccatgtgctttcaagacattgacagcctttatgggatacatgctatttcctcttgaatctgtcactttaacagcattggcggcatcgacaacgatttgtgaaaaaagatcagcatcagctccaataatttttgagctcatcgaggttttggcaacatttatgatgcactcctttcccaattcttcgactggaatagtcaaatgatcctgaatgtacctacaagcctctttgcatgctaatctgtatccacttataattgaagttggatgtatcttttgtttcacgagttcatcagcattctttagtaattctgcagctatgataacaactgaagttgtaccatctcctacttcttcatcctgtaactgagccaattctactaatactctggcggcaggatgttcaacttctaaaagacgtaaaatggtagctccgtcattagttactgtcacatctccaatgtcatcaaccaacattttatctagaccaactggtcccaatgaactctttacaacatttgcgatagtagaggctgccataacattttgagtgcgaaccgaagctcccgttgttctggagccggctacagacagtggacttgctaaaatcgacattttttaaaacataagttttatagcaacctcgccgcaaattaatcaactgata

SEQ ID NO: 6917 - DNA, 1898 bp, Diabrotica virgifera
  SmartBlast Evalue=1E-141; Info=AMP dependent coa ligase n=1 Tax= Aedes aegypti RepID=Q17P68_AEDAE
gtaccgaagtgttctttgaatgaatattaaactatcacaaacacaatcaaatcccccagtcaggtagtagttgttgtcctttctttgctgtgaacggttacgggttgtctttcgatgtcggttttaaggagagtgctattcaaacggctttttttgccgaaatttaaccccaaagtgacgacaaatggtttcgcaactgactcgaattccagtgggtttattactacttctgataccgtggaagtaccgaagtgttctttgaatgaatatgtgtttcaaaatgtgcatctttgggaaaattgcatagctacagaatgtgctgtgactggaaggaattacacctactcacagcttaggacaaaatccaaaaattttggagcagctcttcggaagaagttcaaacttgagaaaaacgataccatcgccattttattgccaaacgttccagagttccccatcgtaacattgggtgcaataagggcaggactgatttgcaccactgtaaacccaatctacacagcagatgaaatcagtaggcaactgttggattcttcgaccaaagttattgtaaccctcaacgaattatggccgttagcagatgcagcgacaaaacaagcgaaaaagaacattccaatagtaactatcaaatcgcagcaaagtcaaagtgttccatcgggtgcagccaactttgcagaactggcggattgcaactcagacgtaccaagtgaagaatcttgggatagcgtagcatttttaccttattctagtgggacaactggattgcctaaaggtgtcatgctaacacatcacaatatagtagccaatgttgcccaaattgggcatccaaaattgcttatcagcagacaaaccacacctgatcaccaagatgtcgttcctgcggtgttgccaatgtttcatatttacggattgacgatccttagtatgttccaaattaaactgggggttaagatagtcaccttgccaaaatttaccccagaactgtacatcggtaccttgaagaaacataagccaaacgtattgtacttagctccacccatagctatatttttaggaaaagttccgcaagtacaggcggaagacttaaagtcagttagggcagtaattaacggtgcagctcctttagggcaattggatggtatgaggttaacggaaaaagctaataaagatcttccaatactccaaggttatggtttaactgaaacatcacctgcggtaataaccactcgactagcagagtacaacaaagaaagtgcgaagggttccctcggaaggccagttcccaacactacgttgaaaatagttaatcccgaggacccgtcaggagctcccttgggaccaaaccagctcggggagctgttggtgaagggacctcaagtcatgaaagggtacttaaatcgaccagaggagaacatttttgtggacggatggatgagaacgggagatatgatgtattacaatgacgacggatttttattcattcaagacagactaaaggagttgataaaagttaaaggattccaggtggctccggccgaacttgaagaaataatccgggacttcccagatgtcctcgacgcagccgtgatcggcattcctcacgaaatggagggcgaagttcccagggcctacatagttgccaaacctaactcaaaaattgacgtagaccaattaaagaatcatgtccatgcgaaggtggccccgtacaaacagttgaaaggtggagtttctgttgtcgatagtattccaaagaatgccagtggaaaaacgttgagaagagagttgaagcaaatgtatgagaaagaacttaagtaatttttattgttgtttttatatattatgtgactgcattttttaattatacaatatatatttttatt

SEQ ID NO: 6918 - DNA, 1897 bp, Diabrotica virgifera
  SmartBlast Evalue=8E-17; Info=Putative uncharacterized transposon-derived protein F52C9.6 (Fragment) n=1 Tax= Camponotus floridanus RepID=E2AL50_9HYME
gctggaacgaacataccttctccctgaatagaagataaatgaatataacaatttggcaataagaattaatttagattttttaaattttcatatctaagctaaataatttacataatttaataattgtttaactaaaaagtatatcagttagttacatatacataaaatatttcgaaggtcagtcaaagttgcatttacttctttttcataattaaatttactgaaagtttacaaaagaaatcaaataaatgttttactctctgaattataattcagcaaaatattcaccggtttctccaaaaacatatataggtatggaaaaagcaataaccgagactagaataccaaatattacaaaatcaagctgaattgaaacaaagatgctataaatatccaacaatgcacaagtatcagattcttgaatattttttgtatttacgtcagaaaacactagaattgcttattatttaacatcaagaatataacatattttttctttaaaaattatgtatactcatattaaaaaatcgacccacaatataaacataaaaatacacatacacacaaactacatacatccagtatttgctgactcactcatttagacaatcttcaatttttaaaaaattgaataaggtgttactcaattactcaaaggaagcttctggtccttttttcttctaatattaaatgtttctctcgattatatgtatgtttcgctaatcagccactaaaggtattctggacataatcctcccttttaacattaaatatccctccaactgaaccaaattacctcaattttgatgttattcgaggttatcccacataatatattatgtaactttctcctttctgcttgtgattgcatgatctttaataacagtagagcaatttgtttttcatgatatatcggcatttggtactctagttgaggcatatcttatttctcatgttcggttatttgacattaaatgttggtataataggatagactcttgaaaaacaccagtaggatctacttcttcttcagcctgtttgcatccacttcaggacaaaggcctctccatgagttctccattcttctctgttttgtgctatctggtgccagtttctccatatttttgctttgatgtcatctagccatcgtttttgtggtcttcctctactacgattgtgctcacgtgcttaatgtacaatgtttttcgtccacctttcgttattttgtcgtggcacgtgttctacccagttccatttcatttgcgcaattcttccaatcttccacctatatcctgctccgcacgtccttatttcggatatgccccctcagatatactcctaaaatagctcgttcgatcgccctccgtgtcgttctcaatctattggctgattactctgtgtcatggtctccattccataggataccagagcattttcgactttgtaattttagtgtttgagagcttatttctttgcccgtttatttttgtaatttggcccaagtatgcaaactgttgtttattatattatgtatcagactaaaaataaaacaggaaagtctatattaacacacgttgtacagcttgtcaaaaatatggtgatacttggcgattttgtccacttgcgtagaaaactaaactaaattccaataagacatgcgctacatgtaaacaatgattttacttgttaaagctgttcaaaatctaactactcattccatagtaacagtgtaatattaaaatcagctcatcgattattagttcttagtatatagtatataaattattgtaatcactaaatacatagatagtgaaaaataatattattaattaaattaatgaataatttacgccattatacaagtaactgttatccaaaaatattcgaacacttaacc

SEQ ID NO: 6919 - DNA, 1890 bp, Diabrotica virgifera
  SmartBlast Evalue=1E-139; Info=Cytochrome P450 n=1 Tax= Leptinotarsa decemlineata RepID=Q3I415_LEPDE
gatgtctcttctgacaaacaataatgtcatcgatgttattgtattgttagctacgatagttttattgggtattgcctatgtaagatattgttatgggtattggaaaagaaagggggttgtgcagttaaggcctcaattccctttgggaaattatggaaataatcttccacgaggaatctcaataggagccgtaaccaagaagttctacgatgagtttagaagaaaaggattgaaatttggaggtgtatatttgggactagacccatatttagtaatagtagatccgatatatgctaaagacattttaacaaaagattttcagtactttactgatagagcactgtattttagtaagaagagtcctataaccgtacatattttatctcaagaaggtacagaatggagagaggcaagggccaaatttaccaacatattcacctctgcaaagatgagattctttttcgaaactctaaaaaaatgcagcgaagatttacaatcaaccttgaaagaatacgttgatcaggataaagatgttgatatatttgagactgtagcttgttatacaaccgacatcattggagatgtagtttacggcattcaagctcaaagtttctccaaggaaggtgctattttcagacaaatgggaagagagctgtttaacgtattcagtaaattctttcaatttaagattttaatgaccatctgttaccccaaaatcgcaaaaatgctgggcatagtcaatattcaaggccatattggagagttcttcatgaaatttttaaaagaagctatggatgtgagggtagcgaacaaggctactagatcagattttcttcagctgctcattgagatgaagaattctggtgttgatcttactgacgatgaaatggcttctcaggcatttttgtttttcaccgctggatttgagacctcttcgatgtctagcagtctgacattatttgaactaggtcaacatcaagatgttcaagataaaataagggaagaaattaatgctgtattgaagaaacacgacgataaaatatcgtacgacgtactgaaagagatgaaacttttagatcaagcttttaatgagactgcgaggaagtatcctgttctatccacaataactagggtctgtacgaaggattataaactcgaagacaacgattttgttatcaaaaaaggtactcctgtgctactcccgcttttaggatacacccaagatccagaatattaccctgatcctttaaaatgggatataaatagatttcaagataaagacgagaaacaccttggatactttccttttggagatgggcctagaatttgtatgggatcaagatttggattaatgcaagtcaaactggcattggtatcagtactacgtaacttcaaagtcttcgtcagtcccaacaccgaaataccacttcaattcgatgaacaaaccttcgtaacaaaaactacagaaaggattttcttaagattaaaaagtatttaaactaataaaacatacgaatgtacagtatttctcatgatcatctttcggtgcgtcacagcattgattatagacacggatatccgtgtctataatcaatggtcacagtttttcgatttctttctaacgcattaaattgtatgtgacagaaaaaaaggcacgtcggtgattacatttcgtcggtgacatttttataacatttattctagttattctagttgtcgatagatggcgccataataaaaaatatttttttttttaatagagaataatattacaaatataatctgtataatttataagactatacaaatcaaagaaaataccatttataaatgcaagaaacacttttgatttgtttttattccaaattgacaacaaaatgtgacaactgt

SEQ ID NO: 6920 - DNA, 1891 bp, Diabrotica virgifera
tccatatatttaagatcctcgttatactgtaccatggttctataaaagtgggagttaatctcgtacaaagctctctcgattcggtctttgttatgtacgaatttcgttggtagttctagatcacctatttccttgaattttattttcttctgttttaacatatatgcaatattggcctctggacatgggtatcctttcgattctagttcccctgaaaatagctcagactaggatatttgctcaagttttcctgacattgaatgtttaattcattaagccaagccagtaccgcttcttcggtgaaactcgcgtctgttttaccttgaaattgtttatttagttcctcacaaaatatttcagctcgggaatttttccgatgtatttaagtcgattttctatatttcttacttcagatagtatcagtaagtctgtaactgatgtgttaccgtctgcagtaacaaaatatatctcactttctggttcctcatcgtccacaaatataacattaagttccgtgaggtaacgtttaagcatcgatttactaatacttgcttgtgacaatcgttttacttgatcgcaataatggcttaacgttggtgactttcccattttgcgaactacggaatctatcttagtaataatatttttaacttgtgaatctatcttctcttctatctgttcatttttacttgatggctcttctttagtagatccattgatttgcgatttattttcaacgacttgttccattttaaccacaactttactacttgagctattgggttcctgtttaatcactttagtttcagttttaatcgaaggtttccatactgcgttctttggaggagtatataatttggtcggtcttttactctttttacccccggtgggataaaatcctcatcatcgtcatcatcttgatagtcatcatcatcgtcttcgtcgttactacattcatagtcaggatctctatcatcctcaacctcatcgggatcatcaggattatcgtcataattttccattctgttttcattaggactgggttttacttcttcttctttcataagttctaaaagattacttggtgatataaatgatggtacgtcttcaacaaattcatcatccacttcttcgatcaatgttgtctcaaggtaagtgggcgtttgaataaagaccggttctgattgttttgagaaaacatccaccaccgagtctttaacctcaacttcttcatcttccttgtatttgaccccgagaagatttagcctccaggcaagttcttttttcgtaggtattaagtcattgaatagtattaacttggaataataatgattcataaatggtacttcatcggcaggcacattcttttcaacggtgattatagcttttacaagaaaaaattcttgctctatttcttctttggtgcacactttggaattgctggaagtgggtaaatttaatgtaggaattgcatttggtttcaaattgggtccaacacgttgagaaagagcaaaatgtttctggcaaatatagctgtcataatttggtgttttaacattttctggtgattgttttattgctttcatccaaggaatgtaacgttctcttgtcaaacaatgagtactatttggtggacatcctatcgtagggcagtcttctacaacgcatttcattttagttttagcccttcttgggcgtgtataactttcatctgggtcgttttcagatttagatgatgacgacatagtagtttaaaatatccacaagatacggcaataatataaaatcactttattttaatcatatgataactaattaacttaaacacattataaaacaatgttttgttcacttttacaaagcatacacaaatccatgtaaaacaggaacg

SEQ ID NO: 6921 - DNA, 1888 bp, Diabrotica virgifera
  SmartBlast Evalue=1E-128; Info=Proteasome activator complex subunit 4 n=1 Tax=Harpegnathos saltator RepID=E2B9B8_9HYME
gggccgcaattctaacttcactgtatcgagaggtgctcaactcgaataggtccagcaggatcatgcggtgggtgccggtgaaggaacaatttcgactctctatccggaattcctgctgcagcatcaccctgtcgactaaaacgtgccgcagatgaagctttttctggagcaggcggtcttccaatagtttcttggtcatgtggaagctcttccagtggaattcgaagtcttgcccgcgggttttattgaaaagtaaaatgttgtagatatttattatatgttgtatgctctgtgtatcgccttcgtccatgtccagcagcgctttctgtaatttgtgcaacaccgcaacgatagctttcctcacattagaaccatctggcatcgtcactaccccgccgccacaaaccttcaaattgaacgtccacggctcaagtacagactcaactagcggatacacctcttcttcccacatcggcaacagtggctggcacgacaaaattgacgtgacaatcttcagagattgtttcagctctaatctagtcatagattcctcggcgctggaaattttttccaacctctgcagctcaggtaagagatatctttcgaggaggttctggaccgccgccacttcttgggtctccggcacgtaccatgagatttttaggtcttgtatttgctgtgctttaccccattctctaatagacaaaaagtctttgataggtgtggaataatccacggcgctgcttcgtatttccgtaggctggatgttggtcaaagaagacatcattagctccaacattctggcggataattggctagcactttgacaagccatatgcaaagttttgtccaaaatattcgtcaatttgtctagatagttcaaaatttcagaacggccatccaccagttcagacagcataagaagattgtacaacagctcatcatcgatatgttcctccttcacgatattagggttttcgttcagcaattcttcaatcctgtcacagaggtacggtaaaaacagcttcagagtttccttggggttgactttggcgaaacaatggcaacagatcgccaacatttttccagaaacgtgcacttccatgattttactagttacgaaattgtagattttcttcagggcactcttaaaaatatcaggcgaacactggttcaaaacgacaccgacgacagaccccaacgcgctttccgaaatggtctcaattctgttcctagcgctctcgttactagtgatctgctccatgcgaatgaactccaaactgttcgactccatccagacgcacagcttgtcgaaaaactgcaaaacgaagtcttcaaagttagcagtcgcctcgcaaacgatgtgctcctcttcggtcaagtcgtggtaattgctcgcgctagacgaatcgatcagtgggatcatattgacgaagtgcacgatgaaattgaacgtgacatacgatttgcgaacgtcgttggggtcgatacctggaagcagctccatcaataagggaatgatgtgggttggcccttcaggatagttattccggctcccctggaccatatatcttccacaggcaatcacagccatcatcgaagaggtcagcttatggggttccgtcaggctattcatcgatgaataaagtttttctaacgtcataggaatgataatgttcggtctcaaacacgacaggtattgtagagtcaaactggtatcttgtagaccaattctgttatatagagcttgttcaatacaaggcttcatgatgttgacgaatctatccaaatctgcatctgtaagtttgaaatgatccggcacgtggaattcccatgagggcgtcttgtagcgttcacaatgaactcgctggatcatataaaatgaaag

SEQ ID NO: 6922 - DNA, 1891 bp, Diabrotica virgifera
  SmartBlast Evalue=4E-35; Info="Tyrosine protein phosphatase non- receptor type, putative n=1 Tax=Ixodes scapularis RepID=B7PGD2_ IXOSC"
tttgggccagtaaatatcttcaccgatctcattgtcgtttaccaaacagaggatcagttcgacctgttgttctctaatcatcgtccacatatcaccaacagttgaagacaacggcacttgtgtaacaataaatgacggagcatatggcgagatatccttaatgtatgaagcgttgatataatcatctttactatcgcacaactccaccctggaaaagtcgtaaggcaagatatccgggaacctattcttcataggataacatctagcgacggaaatgatcttcttctgcggctcgcaatcctgctggtcttggatctccttccatttaatatccagagtggtcggaccgctcaaagttttgtgggtcaaggtctccacgaacttctcatacctgtccagctcttggccgaacaagtttcttcacatcatcgttgtttaagggtttgctcggcaggattttgacgtacaagcgctttacttctggtccagtgggttgtttgggcgtggttactggtgttggatcttggtttttggtttcagaagaaacagccggtggttttgtttccttttcttggggttttatcgtaatgttttgttgaggcactagaggagcttggcttatgctgaagtccaagccactgagcagatccacattagaggaggatttggtggcagcaggaatattacttggagcagcttgtgctgcaggaggtgcttggtttgcgctgtaggtactcggttgactggaattatagttgttgccgtaatactgatcgtatccgtagtttggtaatgaactgttatttacagcttgttgggatggtactgcggcgttagcggacgagtagtactgatgctggtgtcctgctccagaaccaacttggttaaagttgtaattttgagaaacattttgagaggtcactggtgtcacttgattatatgtttgtccagttgcgtacgagggattggtaccaccttggacgttggtattgtaagtactggttgagtaataactggcattggcgggatagtactgcgcttgactcatctgagtacctgggtactgttgttgttgttgtatttttgaagtatccgctgctacactaccgctggtacttgtattgtagtaataattgtagttgttcatagcggtactcgggtttgcagagctggcgctcgactgttgaggctttgaagcattcggtactgcaccactactggtattcgggtcatagtagtactcgtaagaattattcaagttactaggatttgaggaattggtactagacatattagaaagcggcgacgagtaggtagagctgttataattgatgttgttcggcacagaagaagcgtactccaccgaatggtacttcagttggccggtaatatgttgagtattagcattcggtaaattctggctcggtgagtacccatgtgggtagtacgcattaatattgggatcagctggagtagtagctatctcaggtacttgttggtactgatacctgctaggatatccaactctgtcaacattcgaaacgttagattctgcgtacggtacgtatccttgagttgaggagctctgcaccgaacgataagcgttagtagtagccgtgaacgccttggtagggtcgtacggtgagttaatatctggagtttcttttccgtaagactgattacctggttggtacgcactttgagggtatgttggtggaatgtagttgctgtatccgtactgactaggcactgacgtcttagcacctggcatcaatgcgttcatttttttaatagtctgttcatcaatattctgtgacgcaggaacagaaggttgttggtaattatatggaatataaccttgtggttcaccttgaatattttcggtacatcc

SEQ ID NO: 6923 - DNA, 1889 bp, Diabrotica virgifera
  SmartBlast Evalue=6E-57; Info=CG3106 n=3 Tax=melanogaster subgroup RepID=Q9W322_DROME
ctacaagaaacatgaggcgactgtttattttatttttcgtaactatcgtgtcatcccagaatgagcttaaatttttacaaaactacaattattggtcagaacttgtgaaaaataatcttaacagtacaacattttctgactcatgtagccaacaatttagcgaattatttacaaatgatttacaggatgtatggaatctgtttgacgctacagcaaaattcccttggagtggcttagctaccggctcatattttgattggggaaattatgatcaatgcattaaaattaggcatgaatacacacaagacagaatattgggcaaatactgtacacacggtttactaataccatcccccaaagtgaacatttctaatcctgattttcaggatttttataaattaggactatgtatgccagatgcctgcacagcagccgattataatgaactcgttcaattaataaatctcaacggtttattcatttttcaagatcgagcatgtcatacgaaagaagatctagacagatattcatgggaagatattactatggtggtcgtacttgtaacatttgcatgctttatggtggtatcaactatgtacgatgtataccttaaattgaataaaaaaaaatctatacatcccatatgtgtggcattttctgtatatacgaatggccggaaaattattcaaacgtctaaaaataacaaagaacaaattcaaatttttaatgggataaaaactatcagcatggcttgggtcatagctggccatggaatggcaggatggaataatttttcactaacaaataatgccgctgtcgaatttaaagcaaagcatgcgagtacattctacgtgagtggggctagattggcagttgatacatttttttacatgagtggatttcttttagcttacacttatattaaacaaaaaacaaaaccattggctctgcatattaaacagttaccatatttggttgtacatagatatataagactcactcccgcagtagccatgctctttttcgtttttatgtcaatctttggtcatttgggatcgggtccactttgggtggcaggaatggatgaaataagaaaaccttgtagatcacattggttgccttttttcctttacgctcagaattatgtaaatcaggatgatgtatgcatcattcctacatggtatttatctgctgatatgcagttgtttttaatatcagttttaatcctgattccattgactgtgcttcttaatggagataaaagtaattttaagcgagttatgtcaatctgccttggtttgaatatatttttcactattttaccattagtcactaaacttgtttggccaaattataaaaatgattatgatacacattctcgagtgattgactatacgatgggaataatgatgggaattttcataagagaaagaaaagacaaaccttttttctatggcaaaatttctagacctaggctaactaatttattaatatggattttaattttgacgatgatgggagtgttagctgtgtattaccaagtaataatcatatccctcgattattctgatacagcggttgccattttttacacaatttgcaggccactatggtgcctaggattaagttggatggtatattccagttaccatggttatggtggaatcgtcaactggattttagtccgacctactttacagataactgcaaagttatcttattgcatgtatctaattcacggtttagtaattacacacgctacgttgatgacaagagacaggctatttttcagcgattgggtagagtttaataattggtgcgcatattttatagtatcttttctacttgcatttgtatggtcattggctttcgaatcacccttaattata

SEQ ID NO: 6924 - DNA, 1885 bp, Diabrotica virgifera
  SmartBlast Evalue=1E-148; Info="Sodium-dependent nutrient amino acid transporter, putative n=1 Tax=Pediculus humanus corporis RepID=E0VLW4_PEDHC"
tcgagcgtttgccctgtagtatagtgttcttctcttccaaaaatttcttccattcttcagtacgttgtcgtccttcaggtccccacgttttgaatgaaaacgtttccgttagtttctgaattccagggtattttctatttgcgtagaggtaatagaagaaccatcccatcaactgtataacagttactgcaagtatactccaaccaaatatttcgagtccgagaggtaatcgaagtgaatcaattccatatactatgggcttcaacgtccatataaaatacaggaagatgagaattagtaacagtggcatcagtagtccccaagttagcctccaatatattcctacttttcttttgctcataaattcaatgtcaaggcacaatctatcaatgccataaatgtaagcgattacaaatacttcgcatatagcacaaacaaatattacgaatgttccaccgaagaaatcaaccagatctaaagtatattgtccaccctgtgtcacatagataagtcctacaaaaaatagtactatggaggagcagcctgcaatcttccaatctggcgtgtaaggcaaatactctttgatcaaaccatttaagtttccgtgtaatccttgtaaactgcctagtcccaaaacaaagagcatcacgaagaaggttatagcaaataaccaaggtgcaaaagtgaatttggaaagagcatctggatacgatataaatgccaaagcagtacctccaccggcagcaatgacttcacttggtgggattttcatttcgtaggccaaattacccaggataccaaaaattgtgacaccagacagcaaggacgtaaaagtatccagagttgttattataaaggcgtctcggttaatattgtgactgaacttgttataggaggccaaagttacaatgttgccaaatccaacgttcaatgaaaagaaacactgagtcacagctgcataccatacctctgcatctttaagtcttgaaaaatcagcatccacaaaatatttcattccctccgcggctcctggtagagtagaagctcttattaaaagaaccagcattacaatatagggaaaaattgccaagaagtaggatgctttaccagagctttttacaccttttattgacactaaaaaggtagcaaaccacgatactagtaggaaaagagatagtttccaatctggagctccaagtccgtcactgatatcgtctttttcttttaacacttctcttctgaagtacatttctgctgaacttatggtattattgctagaaaaattgactgtatctttgtccacacatgtaaaatttcgttcattcaggtattcttcccacgattcccagcaagtggcccacggaaaattgatggtgaaggagttgactaggtaaagtaaggttatggccatgagaatgcagtagtatgatgcgacgcatgttgcaccaaagacttgtccaattccaatgccctttagcactggtgacatcttagaatacatctgtccaggacctctgctgcaaaactgacccagaaccatttccatgtagtacatcggtctccctactacagtcaagacaataaggtatggtatgaggaaagctccccctccatttgaccttgctataaagggaaacctccaaacatttcctagtccaactgacatcgccacgcaggacatgaggaattgggtgtcgtttccccattgagacctctgcggtgacttatcgttctcctcaacatctggaattttcccattggatttatggtctacgtcttctggagaaataataaatactgggttgtcgaaagtatattcctttttgtttttgcccattgtcgtcaatcactctttgttctttatccgttcttacctcgttaccat

SEQ ID NO: 6925 - DNA, 1887 bp, Diabrotica virgifera
  SmartBlast Evalue=4E-73; Info=Cysteine/serine-rich nuclear protein 3 n=1 Tax=Harpegnathos saltator RepID=E2C839_9HYME
ccagtgttcatacatttctctatatgtagttcgtttttggtacaatgaaccgaattatttcaaatattccaaagtgtattcaacagatttcaacaatgtctcaattgtttagtggcgttaaataatagaaaaaactaaaaaataaaaacttttaaaaaaagtaagggtttgaaattatcgttctatttagacacaggtgtacagagtgactcaaaaactgacaagtttcaagttgtgggtgagcgaagctgacaggggcgctttgtaacggtttttaacagggatgatggccttacacaattacaacagttcaacaaatctgcccaccaatgggatctaacgtctccacaaaaacggacagttcatcctcatcaatcatgtccaaccagaacgccaccattgaaccatcgaaaatcatcatcgaccaatccgaccaaaacatctccaattcagaccagtgctgttccgtctccgaccaaaccggtaccgaaggtaccagtagttctagttgccaccaaagcggtaccgaacatttaaaggaactaccttcaagtacaaacgttgaagagctgaaatcaaataaaaaagcaatagaatttagtgatgatacgacaggtgtagataagaacgaagacgaagactctgcaacggagagtcttccgcctactgaggagttaatcgaggaaccccacgatcgatcggatggttcggactctggtttaggttcagagctgagcgaagaacgaccacaggaagttgtggcgaatatagaaagcgatagcgagtcttcttttctttacaatacaatatctaacacccagtttgaggaatttgctaggcaagttgctaataacgacatgagcggcgtacaatccaagagtaaacagacaaaaagtagtcttaagcgaaagcatgttgcggatgaaaacgatgaacccaaagccaaaaaagaaaaggtatcacttttgatagtgtcaccgtcttctatttccccagaacgcaaggttttacttgcgttccttcacaaggcggctctaccttaggcatgggagctcaccattcgcacgtaaagaagttctccatagctgagcacgccttagagcaaagaaggatccataggcaactcctgcagcaacttcgctccgaaaggaacgttaccggtggcacagcaacttccagtgatgaatccgacagtgaagatgaagccagtgagggctcagataccgaaatggaccccgacaacttctacttccttcagccagttcctacaaggcagcgaagagctcttctcagagctgctggagtgaggaagatcgactcgatagagaaggacgagtgcaggaacattaggacgtcaagggagttctgtgggtgtggttgtaagggatattgtgatccggacacttgttcctgcagtcaggcggggatcaaatgtcaagtagatagacttaattttccttgtggctgttctagagacaattgtgggaactccagtggaaggatcgagttcaaccctgtccgggttcggacacatttcatacatacacttatgaggctagaactagaaaaagaaaaggaaggcaaatccgaaaacaaagacaccccagttccccaaaactggatggacaacgagaggctaacagccgtgccccaccaggaccaatcttcagctaagtctcccatcaataagtataatagtagtttgttacgagacgtcaatcttaccgccaacgtggaggccgaaaactgcgtccacaccggaagcttcaccaatctacactacggagctcctggagaagggcccgggaatcatctgccggacagagctgattccctggacctgtatactttcaggtaacttgtagttttgagtaatctagtatagta

SEQ ID NO: 6926 - DNA, 1883 bp, Diabrotica virgifera
  SmartBlast Evalue=0; Info=Nuclear cap-binding protein subunit 1 n=2 Tax=Culicidae RepID=NCBP1_AEDAE
aatgggatgctgccagatatgcactccgatttttagcagatttggtaaactgtcacgtcatttcaaatacttcgcttctgcagctactaaacaatatgatagatacagcaaatgaagataacgtaccacaggttcgtagagattggtacgtttttgccatacttagtacactcccatgggttggacgagaattgtatgaaaagaaagagaagtcattatatgacctgatgactcaaattgaagtatttctaaacaaaagatcaaagaagcaccacaaagccttaagagtttgggcaatagatagcccccatccacaagaagagtatctagattgcctctgggcacaagtacggaagttgaagcaggataattgggctgaaaaacatattcctaggccatatttagcttttgattctatcttgtgtgaagccttacagcataatctaccttctataatacctccacctcatcacgaaacttatgagtaccctatgccttgggttgtatttaggttatttgactacacagactgtccagaagtgcccattttaccaggagcccaaactattgaaagatttctcattgaagagcatcttcattcaatcattgaactgtaccacctggaaaggaaagattgtgctgctcacctgttgaatttcccttataagttaaaaattcccttggaatactgtatcgtagaagtcatttttggagaattgtttcacatgcccaagccaagatacattgaaatcgcctatggtgctattttaatcgaattgtgtaaactacaaccctctaccatgcctcaagtacttgcacaagctactgagatgctattcaaccgaatagatactatgaacgtttcttgcttcgatagattcgttaactggttctcttatcacttgagcaacttccagttcagatggtcttgggaggactgggattcctgtttgactttggatgatgagcatcccaagcctaagtttattagagaaactatgttgaaatgtatgaggctatcttattaccagcgaattcgggaaattctacccgagagttttagcaaatttatcccagaaaaaaccgaacccgattataaacacgccaaagaaggagcttctagtttacctggtaccgaagctgcccacaagttagtagttaccatccgacaaaaatgtagccccgaagaagcccttgccgtactaaaagacttacccaacccgcgatcagaagaagacgccgatggtagattcaacccacttaaaatcgacgttttcgtacaaactttattgaacttaggctcgaagagtttctctcacagcttcgcagctatttcaaagtttcattatgtgttcaagattttggctgagtcagaagaggctcagatttgtatactgaggaatatgttcgagttgtggcacaatcaccagcagatgatgattgttttggtggacaagatgctgaagacacagattgttgagtgctcagcggtggctaactggattttttccaaagaaatgaattcggagttcacgaaaatgtatttgtgggaaatccttcatcttaccattaagaaaatgaacaagcacgttatcaaaataggaggtgagctggtggaagctagagaaaaattggcgcgtgcagaatctagtgacagtgagtcggatgatgacgagaagaaaaaacaagatgaccttgagaaaccaacggaggaaatgatagaaaaaatggaggaaaaactggaaggggcacaaggggatcagaagaatttgttcttgatcatcttccaacggtttatcatgatcctgactgagcatttggtaagatgcgacacagacggtaaagattacggtacgcactggtacaagtggacgattggaaga

SEQ ID NO: 6927 - DNA, 1888 bp, Diabrotica virgifera
  SmartBlast Evalue=1E-160; Info=Beta-hexosaminidase b n=2 Tax= Aedes aegypti RepID=Q17BL1_AEDAE
aaaaataaaatcagtaacaaaaccctggaccatttggtggttgtgcttctatgcctctcctattcattctgcacgtgtgctcttccagtcgttttcttactttaagtaagtcgtaattatcatctctttgtgaccaaagcttttcagctgtagctgaagctcttggccaaactcgtgacatgatgttattttgatttacgacctccgcccacatgcaagcctcacctccaacaactagtaattgattcttggggttgctactaaaggaaagtggttcgcagttgtaaaattgtatccaatcacctccggtattgagatgatctaggtaccaacaagatgaaagtattcctgttctgtttgagtttgttacttctaatagaactgagtgccaataagttttccaaacttgaacaattgcattgttgggtagtttaacgccatttgtaaatacctcttcccaaactatatatttacgatttcgtttagctaccatattaataagtttctgtaaataaaaattttctaaagctttaaaatcgttgattccgtttttcttcataaagtttttaataatggtactgctactccaacattcaaactcaacttcatcaccgccaagatggatgtatgcatcagcaaatgtgttactaatttcttcaaaaaaatcgtccaaaaaggtgtaggttttattttgagttggatcaataggtccgtattttccttttaggtctccttcgcaagcggttagtatttctggatgagctacaccccaagatctcgtgtgtcctggtgtatcaaattctggaattactcttatacctcttactcttgcatattccgttatattttgaatatctttatacgaatatgtatagtacgacgtgtaggcaccctttaaacttaactcaggaaatttcctgctgacgtaaggaaaactctgatcgtctacaatatgccaatgaaaaacgttaagtttattgtaagccatcgcgtctagtgtaagtagaatattctttataggaataaaatgtcttgaggtgtctataagcagtccacgatgagagaatcgtggccgatcttccacagaagttttgttaatacgtaacgatagtccttcattggtcatatatatcatctgagaaaatgactctaagcctcttagaatgccccatacagaaaatgcctttaatcgctttacatcttcagaaacaattattgtatatgcttcttccatgtgatctgaaggcatctcttttccgttgcagtgtatatcgagactaatttctaaaacatctaatattcccaggtatttgggattacttagccacggtttcttttctaaatgatgattggataggtttaagttttcttgcatcaaagtatatcctgagaaaatgatggattcgtagttcttaattgcttcttctactattgaacacgtgttattgattattttaaagttgaagtgctccttcctgactgtaaagaaactatggtttttaatttgatggtatggttttggccaaagctctcctttggttggtgggtatcttggaccaggctcctctatgtatgcataaactaaactggtgcacaaaaacgttgataacaattgaattttaaatttcattttgtgcgaaatttcaagaggttacttgaaaacggtgaactcactacaatttaaaaacaatagaatttgtaattttcttctatttttgaactaataattgtacatttctctagaaacgggacaatttcacagcctcttctactcacgcttgttttttgatggttccatggtaatataatatttttgtaatttatgtaaaaacattcctggagaataaagaagtagctatatcgtttcgtattatcgtttgctttgttt

SEQ ID NO: 6928 - DNA, 1868 bp, Diabrotica virgifera
  SmartBlast Evalue=5E-98; Info=Probable Ufm1-specific protease 2 n=1 Tax=Camponotus floridanus RepID=E2AGI2_9HYME
gttgcttgaaaaggagttgaaaaattttgatttttttgaattttttagcaggtggccagtgattgatgattttgaaatatttattgaacaatagccgaaatgaagcaaacaataaaaatatcccaaactattatagatagattaggacgtacccctaacagctgtgatggtaatttgtatggaatttcccatcaaaatgatttgtttatcctggttttacaggcagattcagaaaacgaaattgatttctctagtttccttcccacaggaattgaattgtgcggccgttttcaaaaagccgagattaccgacttaaatatacaaattccagctcaatcagtattagttacaagtagtattggcaaagaaaataacgtgaatctttaccaagaacaaaatggaaagctcaataaatctgaatatcaaatcatcactgaacaggagattaatagcacatttttatttattagactgaaaggtgaggttgtcctaaaatctgaatttaccgtgcaagcattgaaggatgccttccaaataattaagaaatcactaccgttggatagtgtttttggtcttttaaaaagcaatttatttctccaagaacatggcacaataaatgctgagtctaatagtgctattaatgaattttacgaggatgtaaacggtgcaaatgatgaaggcagtagaaaaaagaataaagttgttagtataaagccaagagttttagattttaattatcttcaacagttaacaagagataaatcaattgatagtataaaagaacatgctccaattgggattcttaacaaaaatcccttgaccattattgatacactgttaccactaaattgtatttctatggttcatgaacaaactaagacaagtcaactctacgaaattttattaaaaagtactgcaaatagattaagtttactggaagagaaaattattcaatttgtaaaaagtaatagaaaatctttgacatttcaaccataccattattatcctgaggaatgcaagcattttttgacattactatatgccaagagtcagacagataaagatactgaatcagaacgaaaactaatacacaaacaattactattggatttgaatactcctaggtttagaagagcaaatcagtattcatttgataaaaaattgaatggtccattgattaatccacacgaaggagttaaaaacactgataatggtggtaccattgcattagttaaaggcaaatatgagtactaccactattgtcaaaacaacatggacgacaacggttggggatgtgcttatcgctccttacaaactctagcttcctggttcaaactgcaggggtatgttgatagggacgtgcccacttatcaggaaatacagcaatgtttggtagatattagagataaaccttctagctttgttgggtccagacagtggattggatctaccgaagtgaattttgtattaaatacattattaggtgttcaaaataaaattgtctatgttagtaatggtgaagatatggcttctcaaggtcctgaattggttaatcattttcagaattatggatctcccataatgataggtggaggcgttttggctcacacaattttgggagttgattacaaccaacagaccggtgatataagatttttaattctcgatcctcactatacggcaggagaagatttacatgtcatacaaaataagggatggtgtggatggaaaaacctctcattttggaataaaacgatactacaatatgtgcttaccggttggtcctagagaagtttagattttcgtggatttataaattcgatcacactggtacatttttttattatggataaagaataaagcattat

SEQ ID NO: 6929 - DNA, 1886 bp, Diabrotica virgifera
  SmartBlast Evalue=0; Info=Regulator of nonsense transcripts 1 n= 3 Tax=Apocrita RepID=E2BGD3_9HYME
cttaaaataagttacagttgatgtaaataaatgtatcttagtcacagcggtgtgaaaacgtcacctacagggaagagcctcgttccccctttcgatttggaggatatacaaaatatggagaaatgcgcaacacgcgtctcacttccggtgttcgcttctctagtatttttttacgtttttttgttgtgtgtgtaatatctctcttcttgtcgaatttgtttgttttatgttatccgttgtcgacatcttgtgaccttgttttgctgcgttactgacaatttgacgatcagatctcattcacttgcaaattttcagaagaccgctcccgcgattctattgtcatcttctgccgaactcgatcaatagggctgggagaactgggcacttggctggtagaaggctgacctatctccctggtatgtagaatcttgtgacaataatccgtccatttgcgattggtattccgccatgtatggatcttggctgagttcagcttgtgataatccaggttgactcaaactgaagccaggttgagacaaaccaggttgcgacatgccttgtgtcagttgcagactttggctgaaaggttgggtatgatcttgactaagattaccgcctttgcccttctgtctctgaggcggttttctgttgcggtggttttgctgctgtcgagcctgtaacgcttgttggtgttgattgtagaatctgggaggaatatgggccatattcatgaacattccaactggtactggtaggttcatactggcttgagcacgttcaggtgatatgtagctgattggatcgtgagttctaccaaaaacgtccaacggcacgcccctgtggcttggataattgaactgcccgttcattgcctggttagcactgcgatcatatacacttccgggtaccatggcttctctggcatcaaacgtagaagtggtcataaagtgcgacccaggattttcagaatttattaatttcttaggtttggcaaattgaatgagcgattccttcaaattggtcagtggaccttcgactaagactttctgttccttgtagaaggataatagatgattccatagcggttgtttggacaaaactttaggatttcctacaatgattattccgtatttagccctagttaaagcaacatttaaccttcgaggatcgttcaagaagcctattccttgatgttcgttggaacgtacacaggacataataattatgtccttctctcgaccttgaaaagcgtctacactggcaatttcgatttcttggtaaagtttgctatgaagagatccttggtattgcatgtattgcactaaatacgccctttgaccttcgtacggggtaatgacacctatttgttcgggttttacacccgatcttaaaaatctagtcgcaattttctcaacgttcgaagcttcagttctattcagataactcgttccagacccagcgatttcctcctgaccttgcgtaactaagaaaaacataggcctgtcttgaataggccacggaaaatcaattttcgctagtttcctctcctccgcgctaactccattctgtaaactaccttcgtagaagaagttggagggaaatctggacagttctggatgcattctgtattggacttctagacggaacggtctgatacctagtactactaatcgttcgaataaactctgcgacagaccagctctcgcagctttcttgcacattactacgggtcctaattggcagtgatcacctacgagaataagctgcttgacaccgaggacaacgggtaccatacattcaggttcggtagcctgcatgctttcatctatcaatatagaatgaaatttgagcctgaccagtctaggatcgccagcacctacacaagt

SEQ ID NO: 6930 - DNA, 1884 bp, Diabrotica virgifera
  SmartBlast Evalue=1E-149; Info=Protein TAPT1 homolog n=1 Tax= Drosophila melanogaster RepID=TAPT1_DROME
gtgacacagtgagcaagatgtcaattgaggttataagaatcaaaatataaataaaatattttaaaaatattcatctaaaatgcaaagcgaaaaacgtctacgttttttatcaacatctaaagttcttttcagttctgatagcaaaattgaagaattggttaagaacgaaaaaactgataatgacaaggaatcaaaccacaaaaaaaaaatgtccagtttatggaccttcctgaatatagaattgactcgagactatcagctggacaactctgaagacaggttttctcttaggagagagaaaatatattcttttatgaaaattccaaaagaggttgagcgctttatgctgtacggttttatgcaatgcgcagatgcatttttattcgtgtacaccttcttgcccatgagagttttattggctttatgggctcttgttaccagaccgttttgtaaatgttttgggtttggtcgaaagagtagcaaatgcatgttaacccctgctgaaatctgtgatctactgaaggctttgattcttttagtttgtagtataattatgatgtacttagacattaatatgctgtatcacctaatcaagagccaatccgtgataaagttgtatatattttataatatgttggaaataggtgatcgattattttcttcatttggtcaagacgccatcgattctttgttttggacagccacagaaccaagaggaagaaaaagagaacatttaggaacaatacctcatttattgttcgctatcatttatgttgtttttcatggagtattggtattattccaagcaacaactattaatgtagctattaattctcggaacaaagccttattgacaataatgatgtcaaataatttcgtagaattaaaaggcagtgtttttaagaaattcaacaataacaacctattccaagtctcctgcagtgacgtacgcgagcggttccacttatgtattctgatgttcctggtgattcttcaaacgatgcgggaatattcctggaaatcggagcgtttttgggtaatgttgccggactgcatcttcattctcttggcggaaatgttcgtcgattggatcaaacatgccttcataacgaggtttaacgaactaaacctagacgtgtacagggattatacaaccagtttggcgtatgacgttgcgcagactagacaaaaacacgccttttctgaccattgcgacctcgtcgcccgacgcatgggatttataccgttgccgttgggcgttgttataattcgcgtgctgtttcattgcgttaatatagaagatttaggttctattgttattttattttttgtatttttgtttctgacttctttgaaagttttaaatagtttattaatattagcaagggcgtgttatttgattagtcagcacaagatggataagagtcttaattctcctaacaataatagatgtaatagtcctctagttaccagaagtcggactgacacagctacgagcccattacatccaatcgtggaccaacctacccttcgaccaacgatgctttttcaggagattgacgataagaaagacgagaaacgtgatgcaccatcaattccgaaagatttgggacccgctgctatttttgccaatagcaacgtggatttaaagaacgcaactctaaacgaagaacttctcaaagtggaaggtgacgacatcaaaatcgaaacactcactgaggatgttaccagaagtgttccgaacataaaatcagaattacccgaagacgatattccaccagatagtattacagaagacaccttcaagagatcagagtctgaacctaatttaaacaaaaccgagaatgaaaattgagattatttatgcgagtttatttttgtacc

SEQ ID NO: 6931 - DNA, 1886 bp, Diabrotica virgifera
  SmartBlast Evalue=1E-164; Info=Trehalase n=1 Tax=Tenebrio molitor RepID=TREA_TENMO
ttaacgttacccttatattacattatattaaaacaaaatattaaataaaaacattcatacatcgttatttctctgtttctcatgtctctgatgtgatttcccgtgtttatggtgtttcttgtgtgattttgcgtaaaattcgttaattaacgtaagcgcttctccattcgcccaaccgaaaccggtttgaaccacgtattctccaccaccaccgtattcacctggatgtcttgcatcatacttttcaaacatgtccttggtggtttcgaatcctatcataaaagcctcgacaatcttcttcgcttctgatttggctaatctttcagctttttttgatccagttttacgcagacctaagacaatgaactcctgtagtggcggccatgcgttcggcatatcccactgttggccactttggagtaaagatgacggtattccaccagcgtaagtattaaccttcatctttctatagtaagtagcagccctaatgccgaatgtttccttcttggtagtatcgtaagcatcagcccaaagaggagcaaagttgctgggataaaactcctttctatgactggaatgctttacatcaaagtcataccaaataccgtcctcatcattgtaattgactgcttgaattgctgatcttaaatttaagtgcttatgggaccatgcttctgccttttcgttattacctacaagttgataaaacctagagagttcttcaaaggctctgcagaggatagcgtttagatctactggtatgacatcaatgatgtctatttgagagaggtttgtactggggtttctgtcgtcattgtataaccaacgagaagagaagtcccaaccactttctgcaccgctttttaagtttctgtaacaggctttctgttccgattctgtaaaattttggcacgtaataatatcttcatagtaggattccggtctgggtgtgtcgcttttgacagcatacatgaacatatcatagttcgctccatctttctttactgttacttttcgttcactccaccaccaattcatttctttctcgagagtatctacgtgtttttccaaccatgttttgtttcctgtttgatctatatactttcccatcatcatggctagtaatggtggttgtgatctatttagatagtatactctagctccatttggaataaagccaaatctctccacaattgataagaaattctctaaaactcctctaactgtttcagtcatttcactgactagtaatccttctactatccagtaactatcccaataatagatttctttaaaccgtcctcctgggattatgaagccattaggaatgtcgatcaaagaatgttgatctgcgtgttctcttacactatcgctaacttttctagcaagtttaggccaaacgttcactaaactttgagcgaagtttttaactctaggatcatctatccttcttaagaattttgggtttttattcaggtctggaggagtccaatcaactaattctcctgtactctcaaagttatcattaacaaattttatcaaatcttctctagaaggattatctttcttgtcactcattaattgctcgaaattttgtaacgttacttgagcaggatgtttttgttgcatgtctacaaatgttttggaatctggaaacagccttgccatttgaatggtgtgtagaagtttgccttggcagtagattgtactgtcacatgatggtatagagtttgcgtatacagtactagcaataaaggcaatagccaaaagcactgtgacgtggtgacccatggttcaaaacggttctggtccgctagttcaacgcaccatcaatcaccaaattactatcacaaacttcaattaaaacacttccaatgcctcgtgtt

SEQ ID NO: 6932 - DNA, 1885 bp, Diabrotica virgifera
  SmartBlast Evalue=4E-93; Info=Beta nu integrin subunit n=2 Tax= Aedes aegypti RepID=Q16TB6_AEDAE
aacatattatcttgtatcataatcaggcgacatgcgtttcgaaaaacatctatttaccgtatttttagtttttagttgtattaaagttagtgttttgcagaatgacctaaaatgtgacgatattaatacacaaaaattatgtgtggatcaagatttgtgtgactcgtgtttagaaagtcatatttgctgcaactattgttatgataagagttacactggaaggcgatgtaacactaaaaaccaattattaaaatcaagctgcaatgaaacgatgattgaattcaaccaaaaaagtagagttattacacagaaagacaaaccatttacaacaaaaggagaaattgttcaaatcaaacctcaaaatgttcttgttcaacttaaaaaaggtgttccaacaaatgtttcgtttacttacaaattggcggaaaactatccattggacttatattacctaggagatctcagtatgtctatgaagccaagcatgaaaatttttgcctcgctaggtcaacatttacccggtaatttaacgaaacttacaaaacactacaaactggcttttggatcttttggagataaaccagctatgcctttttactacactgatgaagaatctactcgaaatccctgttctaaagtgatggatacttgcgcacctgggtactcatttcgacatcacttgaactttactgcaaagactgaggactttttagatgtagttagttcgagcaaagttactgccaatgtcgatgatttagatggagctctagacgcactacttcaggttttggcatgtaatgagacgattaacttttcgcctttgtccaggaaaataattttgttaccaacagatagtttgcttcattcagcaggcgatggaatcttagcaggagctgttagaaaaccagatctcaaatgtttattggaccaaaatggagaatatactaaatctttaatcaatgattatcccgcactagaccaaattgaatttgccttacgaaaaaataaagttaacataatttttgccgttaagacactttccaaaatgcattactatttgaatatgacaagagatactttaaaaggatatgcatttgttggagaattacaggaagacgcaacaaatatcgtggacctaatcacaaaaggttactataattttgcacagacagtaagctttatgatgaacacaacagagcaagagtatattgacgttaaattttttgctgattgtagtaatcttggaatatataacgaaacatcaatttgttatggactcgataatcgcgaagttaattttaaagtacaattaacggctaaacatataccagaacatactcaacgggacaccttatacgtagaagaaaaaaatattaacgagaaactaacagttaatgtggaatatgtcagtagttgtcaatgctcgaactataaagacgacggaaataaattttgtggccatggtacctatagatgtggacgctgctactgtcaggagggatggtctgggtcaaattgttcagaaaattgtgaaaatttcgattttcgaagctgtcgttcatatgagactgatcccccatcaaaaatttgttttgaaaacggagactgcaaatgtggccattgtgaatgtgaactaccttattcaggtaaatactgccaatatgagtgcccattcaagagaataggaccagaactgataatatgcggagggccttcaaaaggatattgccataatggaatctgtatgtgccaggatggttttgcaggagaagactgtacatgctctgaatctgaatcggaatgtagtttcgatggagctgttctttgtaatgaacagggagaatgtaaatgtaataaatgtaactgcaatcagggatacaccggc

SEQ ID NO: 6933 - DNA, 1880 bp, Diabrotica virgifera
tagctttattatagaagcacaaaatattgcaactttaggccacataaacagacctatatatttgttagtacattatctgagtacacttatatagcaaaaggaactaccaaaattatcttgcactgcaaaaatcaacagtttttgatttttatttaattcgaaaaataaacatacaattcagaatcctgatattatatcgtctgctaaacgacgtgtatacttgccaacaaaatatttgagaaaatcgcatcccaatcctattacaaagtcattatttgtatttgagtagtatcgttaaatttcgagaggtaaatatactgaatagtaggtataataattacaagtacaatagattactttctacctgtaccggaaacataaccacaccattaaaatacaaatgactttgtaataagcttaagattacggttttctgaaatatcttgatagtaactataccccagggaccaggaattcccattcttccacctttgagatgatagttcctccaccaagagagttcctcccattcctccagcttttcttgcaatgatagttcctctaccaagttcaaacgaaagaaaccggtgaagacgaattcaatcctggtatagatcacttcaacagtttatccaaactgaacgaaatgacgtagtgagagacttgggcctatcgaaggatgctgcacaaatcttaaaaatcacaactgaaagctaaaaatctgttagctctaggaatcacattttcgtggtacatgcatcataaaaaaaagagctggtagagtagtcatgaaactgggaactgacgattacgattccacctcatggcaattatttattgattcttctaaaagaagtctgaagggtgtcttgttgcacggtggtaatacttatgcatcggtgcctcttctcactccgtacatctcaaagaaacgtatgagaatcttgagctgttgttatgctcaagactctactatgttgatacattttggattcacaaagtgtattttctattaagtatagtttcaataaatatgttctcagtattttttgcagtttctaagaaaaatttaaacacactttccctgaaaagttgacgtactggaaaacaactaagtttaataaaattgttgctatcggtagtaaaatagataataaaattcctctggaaaaatgcttacaaaaattttgtttgttatataatgacttttgtctgtggaaataattttggttgtccaaaatatcatggcacataactctaacacttgtacttatttataattaatgaaaatataatgctttgacatcctacataaaaagctctaaataaaatatactttgaaaatatcaacacaatatcgcttcaaataaaaatatatatttttaaaataaaataattgcacaaaatattttttgtttccttaattttatgatatatattgtgcatgttcattgtgtttttgtgaattttctattgaattgtttgtataaagatttttagattacttttaaaacacattaaaaattattaaactaagaaaattcagtctaccataatagtaaaagtattgatttgatacagggcgtttcaatttttaattatatcttatcaatttcagaacataaaactgctaaacgttcatcattttttggtttgagctaagtgtagaatcagttcatctgaaaaatcagtttgttgtgtatatagaaagatatatttataagatatgttaaaggtatacctgaaattcgcaaaaattataattccggagagaaaaagtagacacaatgaaacatacagtcggaaaaaatgaaagaacacccatgaacgatcacaccaatcacccatttgtatttgctgtctttttatgtggcgacagg

SEQ ID NO: 6934 - DNA, 1884 bp, Diabrotica virgifera
gtatacaaattaattaaagttttacaacaaagcattaggaagaaaacataatcgacttgtcaatttcaaagtgactatgactaaatcatatataagatgttatttaatttcctactgttgtgtttgcttttgtactttccaggtgtaggtatgtgaagagctgcttgtgactacaggttgtactctctgactttccatcttccacttgtaagagatagcggggatttttctctcgactgtccatctatacaaaaatttggagtcagcttgttgttcttgcattacccatgcttccaaatatgcaagatctaccttcagtgattcgtgccattggttgatgtttctctctacaagactcatatccatgccgttcctttgttgttcactgacccattgtttccaaacctcaggggaaactttctctacgcttctattgttgatccaaacgtggaaagtgccgctattttgtggttgtgaaaccatgcgtaccattttccattggtatgaaaaactgggaacttgtcttttgatgatccagttgaccaagaagttagcattggcgttttgttgttgcatgatccacccttccaagtatccaacatccaacttcatttgttggtgttgttgatttatccagttttctataacgcttatatcgatgttgtatttttgtttttgtgcaattaaccattgctgccaaacacttggttctacgctttcaaccatttgtccatttacgtatagttgtgaaacttcaggttcttcaacttctttactttggacaaaccattgggaggaaatttgaggaacctctttcctgattatccaattgtacaaaaagctaggattcctcttttgttgctggatgatccatccttccaagtctcctacatcttgttttaatacctggtgttgctggttgatccagttttcgataacatttaaatcaacgttgttctgttgtttttgttggattacccatcgttgccaaacttctggagttgctttttctacatttaatttcccagttggttccatcattggtccttttccattcaaaggtgattctaccattggtccgttttcgtttaacatattgggtacctgtttcctaatcatccagttgtacaaaaagcttggatttgagttttgttgttgcattatccatgcctctataatactttggtctagttttaatacttcatgttggttattgatccagttttcaataacagttatatcaatgttgttcttttgtttttgttgaatcaaccatttttgccaatctaccggctgtactttcttgatgttcaatatatttctcaatgggccagcgaatccaggatctatttcaatgttggtggttggtagcgtgcgaccgttaagaataactgaagaatctctatcctttgatacaggaagttcaattactacagaagaatctctgtctctggaggttgcatggtttaaaacgttgtcaacaacctggacggttttgtcagcaccatttttaatgttatttaaaacatttttacctaaatctagaacaacagaagcatctctatctctggatgtggggcgctcaaaaagaggtctgtcattaccactaattacaacagttgcgtctctatctctggatgttggtaggtcaaatgttggacggtcaagaacaacaggtctgtcattacctccaaggactacagttgcatctctatctctggatgttggacggtcaagaacaggtctgtcattacctccaaggactacagttgcgtctctatctctggatgttggacggtcaagaaggggtctatcattacctccaatgacaacggttgcgtctctatctctggatgttggaaggtcaagaagaggtctgtcatt

SEQ ID NO: 6935 - DNA, 1872 bp, Diabrotica virgifera
  SmartBlast Evalue=3E-46; Info=Endonuclease-reverse transcriptase n=1 Tax=Bombyx mori RepID=D7F170_BOMMO
atactacacataacacaaaacttttttgcaaagattttaagactaattagtttgacttttcttcctcatgtaccatgtcctttcagaacgctgtgttaccattatagctatctgaattttattcactgccaccctaaataggataattgtatcaataccatatatatatagtgactgtacaccccgatatggggctaagtcgcgtaagctttctagatcctatttcttagggaggatcagtcccttttgcttatgttatcttcttaacgatttctctccattttttcctatctctagtttttccccgccattctctgactcctgcgttttttaagtcttcttcaacttcttgcaaccactttgatcttggtcttcctcttttctttcttcctcctggattccattctatcatagcatatgtcactgcttcatctcctgcccgccagatgtgacctaaccatctaactctgcattgctttattttggtcacgatatcttcttttagtactttctaatctctgcatttgttcggcttctatattcattttgctgttctattggtcccagtatggttctcatgatctttctctccactattcttaagttttttcatcttttttagtcatcgtaattgtttctgctgcgtataataatattggtctaattatggtgttatacattctcatcttggttttcgcagtcagtattttgcttttaaggagtgttttatttgcaaaataagctttattcgctgccaatgtttttttatttctggtgttctttcacccgttttgcttattgtcactcccaggtatttgaaatgttctacatcttcaaactctgaatttcctattttggtttttccttttattgctgtttccctagtcttaatattttcgtctttttttcattaatctgagtcccattgtctcccctttctcttttatttcttctagcatttcttttattatgtttctattctttgcaacaataagaatgttatctgcgtaggcgattatttgtccacctcttgttcttaggttccctttgtttatatttcgtagtacatattctaaagctagattaaacagtgttgtggataaaccatctccttgtttcattcctttatttataatgaattcatctgtctcgcctctttgcgtctttatgctaattttggtagttttcattgtcatatttattgattttctgagttttgtagaatttttaatttttccagggcaatcattagttcttttctcttaatcgaatcaaatgcctgtttgaagtcgatgaacagcttttctaattcatttgctttttccattatttgttttatcatgtgtatagcatctattgtcgatcttccttctgtgaatccacattggtattgtcccactctcttcttcgtgatctttgacaatctttttcttattatcgaagtcaatattttatacgttgtgcttagtagtgttattcctctataattttcacaaatttgttggtctccctttttatgtattgttattacctgccctatctcccagtcctctggcatcttctcttccttccatatatttttcaatagtgatagtattttttccttcagttcctttcctccatattttataagttccatgttaatttcgtcttttcctggagcttttccatttttgctcttctgtattacttcctcgagttcatctattgttggctcttttgagactgcaatgtgtatttcgtctgcatcttcgtccaccgtttcctcttttcgtgcatttcttctccagtgtattcctccgtcaagagttctctgtagtgatctgcccatacctgttctttcctgttctatttcttgcatcttttcatctg

SEQ ID NO: 6936 - DNA, 1879 bp, Diabrotica virgifera
  SmartBlast Evalue=1E-10; Info="27 kDa hemolymph protein, putative n=1 Tax=Pediculus humanus corporis RepID=E0VKF6_PEDHC"
gattactgtatagatagtgtgatgtgatttagttttagggttttagcgtctaatagcaatcggaagaagtggtagtagtaacgaattagtaggtttcactcagtaataatttaactctagtgaattagactatataaaattatgaagattcttggaaaaattctcgtaattttatttataggatacagtaacacgcagaataatgattttaacagatttgacacgcagggtatagattttgcgaatttggataggagaatcaatggtatagaggagaacccaccaaacacacagggattaaattttaagccctatgaatcatttgatattaagcaatttgataattcagtaacgtttgatggtcgccgtttttgggaggacgtaccaacagatcccgatgcatatttggcatatcttcaccgtgaatgtgacaagtctgggcatcctgagatattaaatatggataacgaagtatatcgtcaagctaaagtttgcctcggcagcagagcggattacataaaaacgaccgtgagacaattttttaatgagtctggactcagtgctattcgccaaattgattataaagaagcctgtaaagtttggcccgaagttcataactgcattaaccctcttgtgagttccattaaacaatgtttgaaaagcgatgtacaaaaaatttttgatacattccttgaattcatcgacgtgtcccaaagtttcttctgcgacaacaatgcggaccgtatatcgagtttagtcagcgatggctctgtacaatgtttcagcttagtagataaagatcttaaagaatgtcaaactaactttaagaagaaactaggagactcaataaacgctattaatatatggggggacgtcgattcgtataaggttatgactgggaagaacttagcggacgagacttgtagcacattcaagtcttaccgtaactgcatcacctcaaaactagctaaatgcaaatctaaatatacttccaaaattgcagatgactatttagcactggttcaagacgagctcaaattctgcggttcgccacgatggtttccaagtactaatgctatgatattcataggacttggtgtagttactattaattgtattctatttttaggttttagggcattaggggctagaattgctaaaaaacgacagcaactatgttcctcacgtataacagcctctggccaaataccatatacaaatgtctaatgtctaatgcagcggttctcaaactgtggtacatgtaccactagtggtacatatcaatatttgaggttgtacataagacgcaaaaacagcccaaatcagcaccattattatagttaattcgatcacctagctagataggtatttcagttaggtggtaccaaaaatattaaaggtggtaaaaaatatttggtggtacatgactcaaaagattgagaaccgctggtctaatgcaaattaatatgttaataaattaggtacatttttctccgttcaccaagaaaaaagtaaatagagacaaacttatgattgaattgatagtaattgtaatagtgctttaaagctacactctcgtttatacaacaatttagctcatagccatacattcagtaatacagttgggtccatgattctttacccgtgcgagcatacgaaatcgaaaatctattccacgtaacagcaactgacagaaagtggctatagctccgatcacggattatattaaaaatttgacgttatcaaaaaataaataaaatgtaaaatgttggttttgctttaaaattttggtgcaaaattacagctacatttgaagtagcttaataaatccttttaatatcattagtgtaattaaatatttgttgaatataaacatttg

SEQ ID NO: 6937 - DNA, 1882 bp, Diabrotica virgifera
  SmartBlast Evalue=0; Info=Mitochondrial processing peptidase beta subunit n=3 Tax=Culicidae RepID=B0X1S0_CULQU
acctgttcacatttagactgtcaacatggcgtcaattctaaagttttctcgatcttttgcaaaattacctaaatacgaaactgcattaaaagcctgtagacaaaatattattagaggagcagccacccagccagattcacaaactgttgttctaaatgtaccaccaacaaaagtcagcactttgaaaaatggtatcagagttgctactgaagattggggatcccagactgccacagtaggtatttggattgatgctggcagtaggtatgaggatgataaaaataatggagttgctcacttcatggaacacatggcatttaagggtaccagtaaaagaacccaaagtcagttagaaattgaaattgaagacctaggtgcccaattgaatgcctacacaagcagagagcagacagtatattattccaaatgtttagccaaagatgtaccaaaggccatagaaatcttggctgatatcatccagaatgccaaattgggagaggctgaaatcgaacgagaaagaggtgtaatccttagggaaatgcaagaagtcgaatctaatttacaagaagttgtatttgatcatttacatgctattgcttaccaaggaacacctttagctaatactatcttaggtcccactgccaacattaggtcaatcaactccacagaccttagaaattaccttgacaaccactacaaatctagcagaattgttgttgctggagcaggtggaattgaacaccaagatttagtgaaactcgctgagagccatctgggttccttaaacaatacatatccaggaaaagttccagtaattgctccatgtcgtttcactggatcagaaattagagtcagagatgattccctgcctttggcacacattgcccttgctgttgaaggggctggttggtccgaccctgataccctcacattgatggttgcttctactttgttgggtgcttgggacaggtcccaagcctccgccaaacagaatgctaccaacttagctagagctagtggggaaggtgacttgtgtcattcctaccaaagcttcaatacctgctataaggatactggtttgtggggagtgtatttcgtctcagatcctcttaagattgaggatatggtctttaacattcaacaagaattcatgagactttgcacttccgtaactgaaggtgaagttgagcgtgctaaagctcttcttactgccaacactcttcttcaacttgacactactagtgcagtatgtgaagatattggtcgtcaattactctgctatggcaggagactcccaccccatgaattggctcaccgaatcaacagcatcaccgccaaaaacgtgaaagatgtatgctacaagtatttatacgacagatgtccagctgttgcaggtgtaggaccagtagaacagttacccgactacaacatcgtcaggtcacaaatgtactggcttagagtttaagagggttcagcaaaaacaggaatgatggatgattgtaaagaattgtttttattaatttctcctgcttatcgaggcttttggctctgcgtatggttactagtaaaatatgaaaacatttctgtaaatattttgttttatgacgtaaaagataagggaaaagtttgaaaggctgtaaattgtaaaccaaataacagaaaatcaagttgtttgataatgtagtgacacaaaattgatgggtgcatattgagaaattaacaattccttttgtatactagtattcatcgtttttgttaataaactcttagcgacattttttcccagatattttttaattcctgtacgatccacaccttgtaatatattaatttaatttataaaatacgttgtttaaatgtaagtactctacgtcgtttttat

SEQ ID NO: 6938 - DNA, 1879 bp, Diabrotica virgifera
  SmartBlast Evalue=0; Info=Isocitrate dehydrogenase [NADP] n=1 Tax=Tribolium castaneum RepID=D6X0W4_TRICA
ttttggttttgctgctctgaataaaaatcaaaattatttttccacgtattcagtttgtgtttgcgtgtcttagggagtctacacattcggcagataagtatttgttgtattccacttgtactaaaaatactaaaatgggaaaaattaaggccggtaccgttgtggatatcctaggagatgaaatgaccaggattatctgggatgccatcaaagaaaaactaatccttccctatttggacattgatctaaaagtatacgatttaggaatagaaaaccgtgataaaactaatgaccaagtaacaatagactgtgctgaagccataaagaaatacaatgttggaatcaaatgtgccactatcacccctgatgaaaacagagtgattgagttcaaattgaagcagatgtggaagagccctaatggtaccataagaaatatcctaggaggtacagtcttcagagaaccaatcatctgcaaaaatatccctaggttggttaggggatgggacaatcctattatcattggaagacacgctcacgcagaccaatacaaagctaccgatgttatcattcctagtgctggtaaattggaattaattttcactggtgccagcggtgatactcagaaatatgtagttcacgactacaagggacctggtgttgcaatgggaatgtttaacaccgatgattccatcgtagcattcgctcattcttcattcaaatacgctctcgagagaggatatcctctgtacctcagtaccaaaaacaccattttgaaaaaatacgatggtcgcttcaaggatatcttccaggatatctacgatcgcgaatacaaatctagctacgaagctaagaagatttggtatgaacatcgattgatcgatgatatggttgcctatgctatgaaatccgagggtggatttgtgtgggcctgcaagaattatgatggagatgtgcaatctgattcagtcgctcagggttatggatctttgggtctgatgacatcagttctgatttcccccgacggtaaaacagttgaagccgaagctgcacacggtacagtaacaagacatttccgaatgcaccaacaaggcaaagaaacctccaccaatccgatcgcttccattttcgcttggaccagaggacttcttcacagggccaaattggacaacaaccaagaattgaataagttcgcccatgctcttgaacaagtttgcgttgaaaccatcgaatccggcagcatgaccaaagatttggccatctgcatcaagggcatgagcaaagtaaccagagaagattatctggagaccttcgaattcatcaacaaattggcagagaaccttaaaaagaagcttaacgcttaaaacgtttattcctacgcaatccaacttaaaaggcgtatatctggaaaatggaaaaagattgttttgtgtattttgtaccaacgaaacttatttgatttattgtacgataaaactatagatttgttgtctacgtatttgtcgaagtttttttgtcttagtttatattaacttccagtacattttacactaattttacaccatgaaaccactaatacagtaataatccattacaaaaccgcaaccataaactatataatttgcagaaaatataattttcttcaaataccatgttattatttatttaaaaatttgttgttaattaatatattatattatttatgtgttttatttagtctttttccagttttacattgtaaacgaaatacatctttttcgctatttttatactttagaagtatttttaaaaagtattttaagcattttgataaacacatattgtgacgtttttaaaaaatcattgtaaacgggcgaggctgattttattttattaaaaattt

SEQ ID NO: 6939 - DNA, 1874 bp, Diabrotica virgifera
  misc_feature (62)..(62): n is a, c, g, or t
  SmartBlast Evalue=1E-23; Info=Peptidyl-prolyl cis-trans isomerase g n=1 Tax=Culex quinquefasciatus RepID=B0WY28_CULQU
ccgaagaatgagcaatttcctgtatttctcttccgcgtccttatcagcttgaacacgtcctngtctttatccttgtcttcgaccttgacgtgtttagcaggaacctcgggcgttctggagcgggatttcttcgatttctctttactcttggacttcctcgaacgagaacgggatcttgatttagatttggatcgggaacgtgaacgggatctccttcgtcctctatttctgtctctcgaacgggatcttcttggagatttcttgtagtcccttcccctattatctcttctatctctatttctgtctccgccccttctatcccgttccatcatgtcgttacgccttcggtcatcatatctatctcttcgtctcctcatgtcggaaaatctaccatttttttcatatctgttctcactttgaacaacaggtttttcggtttcaaatttatttcttccgtgtttttcttcaaccttactaggcaattgattgggagcaggtacattgtcctggtgcgctaactgcattaaacgcatattgacccttccaaagcggttgttggaattcaacttgtttgctgattgtgcttgattaaacttttctgatctatcacgctgtttattgtagccaccgaacttaatctctccagtggcaggatcttccccggtttttatttggacacctagagccattgctaaaaagtcagatcgcttattaatggcctcagcttccttttcctcttcatccacttgctcaatctccttttggatatcttctttgctcttatgtgtattttttgaactggagagcggatactgtactaaactaggcacaatttttttatgcttgtacgaatccttatttcatcttcgctctgatcttcataatccaacgcattataatcaactcctttattcttccctttactcttcgggtattcagtttggggagttaatgatttttcaaaagacggaagctccggagtttcactgcgccatttagatttgtcctttctattctccaactgtttacgcttcgcatcgagcttctgaagatcggacattttgatgacgcgagattcttctttgcgccaatggataggagtggcactgcgcgaccggcttcgagatggtgttctatatcgaaattttcctcttccttttatcattcttccgcttttagaggttgcagttcttccccaccgattgtaatctccaccccagtcccgtttgttacctcgatccctgtagtttttatctcttctgtcgtcttttctattatcgttatttttatccctttccctatcttttctgccttctcctctcatcaggaatttattagctgggatctcgggtatttcttcaggatcaatatttgttacggtaactaacgggtgaggctcaaacacttcgccttcttctccttcttcctccccttcgtccgatttgctggtttctttgctatgctttttatttttcttctcctttttcttatctttcttacttttcttctttgatttaatttctccctcctcttcattgtcatcatccgcttctactttcttcttttctttcttggctttgacttgctttacaagctctccgcacttgatgatcttcgcatcttgaagaggtcgactgttggcatccactggaagtgattcgatctgcctcaccaaatcaactccgctcactactcttccaaataccacgtgaacatcgtccagatgggggggccggttgcgttgtaataaagaactgtgatccattagtgtcttttcctctattagccattgataacaacaatggctgatcgtgtttgagaataaaattctcatcttcaaatgtccctccatatatactttcgcctccagtacc

SEQ ID NO: 6940 - DNA, 1877 bp, Diabrotica virgifera
  SmartBlast Evalue=0; Info=Amidophosphoribosyltransferase n=2 Tax=Tribolium castaneum RepID=D6X4R0_TRICA
ttagtttttaaatttaaaaaatgtcagaggataaaaaaccctgcggatttgaacacaaggacgaagaagatgatttggcgtgcgcattggaaagtgtaggaatgagtaaaagaaagggaagaggacgtgtaacttctggattaactcacgaatgcggagtttttggtgccataggatgtggggagtggcctacgaatctagagatttcgcaaatcatttgctggggattggttgcattacaacacagaggccaagagtccgccggtatagtcacaagcgaagggcgctgctcaaaatacttcaacgtcgtcaaaggtatgggcatgatcagtaacattttcaacgacgaagccataagaaaattgaagggaagcgtaggcatcggccacaccagatattcgacctctgcagcttcagaggaagtcaactgccaaccttttgtagtccatactgcgcacggagcacttgccgtagcacacaatggagaattagtcaactgtgatagtttaagaagacaagtattggaacatggtgttggtttatccacccactcagacagcgaactgattacgcaagctctatgcttgaacccaccagagggtgagcccaatggtgaaccagactggccagctaggataaagcatttgatggatttagcacctttaagttattctctagtaattatgttgaaaaataagatttatgctatcagagatccgtatggaaacaggcctctgtgcttgggaaagattttaccttttaatgaacctcttgatggagaatgtgatgacagccgagaggcagagggatgggtggtatcctcagaatcttgtggattcttgtccattggagcacaatacgtacgtgaagtattccctggagaaataatagaaatgaccagacacggtatccgcaccatcgatgtggttgcaaggcctgaagacaaaacccaagctttctgtattttcgaatatgtatattttgccagagccgacagtatttttgaaggtcagatggtgtatgccgtcagaatgcaatgcggtagacaattggctatagaacaccccgtagaagcagacattgttagtgctgttccagaatctggtaatgcagcagctcatggtttttcacgacagagtggtataaggttcgcagaagttttatgcaagaatagatatgtaggaagatctttcatccagccaagtaatcgtctcagacaactcagtattgcaaagaaattcggtgccttggcaggaaacgtaaaaggaaagaaagttctcttaatcgacgattccatcgtaagaggaaatacaatcggtcccatcatcaaactattgaaaaacgcaggagccaaagaagtccatattagagttgctagtccacccttaaaatatccctgctacatgggaatcaatattcctaccagagaagaattgatagcaaacaaattaagcgcatcagaactagcaaagaaagtcggcgctgacagcttagagtacttgtctttggaaggtttgatcaaagctgtgagatcagacataaaaactaaaaacgcccactctaaagtaggacactgcactgcatgtttatccggaatttatccaggaggtgtcccgaatacgaactctgactatgactggtagtgaataaagtgaaaacaaaagctctgtaggttttatgttgagtaatttatgattagggatgtaaataattaacatgaagataccgaatttggaaagatcgagtaatgatttgacttaaacaatttttgattatgcgcaagcgcttctgcgtaaacaatgttgccaaatttataatttataggtaagacatttaaacaatcataaattaattcatgattgttatagttaaatgtc

SEQ ID NO: 6941 - DNA, 1876 bp, Diabrotica virgifera
  SmartBlast Evalue=0; Info=Xylulose kinase n=1 Tax=Harpegnathos saltator RepID=E2BMY1_9HYME
atcgttccagcaacgataccgctacaaaatgagaaattctgcagcagtcacttttcgaggttaaaagattaaggcacggatttatattatactcgactttttaggcttctacttccagtgtacctaacaacttttcttccagtagaaaatttagtgagaagtgtgaaaagcgcgtgtggttaggttttcccgcttgaaggttcccggaaacctcgtgagtgtatttttagaatttcgatcgatatttaggcagatatgagctagaacctcgggaaagattttattcggataagatacgcattcgcaaaatgggcgatcaaggagataatctttaccttggtttggatcttagcacacaacagcttaaggctgctgtagttaacgaaaaactagaaattgtagcggaacaaatcgtaatatatgactctgacttacctgaatttcgtacccaaggaggcgcgattatagataaaattaacaatgcctacatcacttctcccactttaatgtgggtaaaggcccttgatatagtgctggacaagctaacagtggcaggaatcaatttttcaaaaatagcagcaatctcaggaagtggacagcaacatggttcagtttattggcaaagaggggctagtcaaacgttagcaaatttaaatcctggtgaatttcttcatcaacagttagcccattcttttgctgtagctaacagtccgatatggatggactcaagtacgaccaaacagtgccagttactggaacaagctgtaggcggaccaatgaaattagcagaaattacaggttctcgagcttatgaaagattcacaggatctcaaatatgtaaaataaatcaaacaagaccagatgcttataaaagttcagagagaatatctctcgttagcagtttcgtgtgttctctcttcgctggaaaaattgctccaatagacatatccgacggatcgggaatgaacctgatgaacatcaaaacgaaaaaatgggatgaaacgttgcttgcagtatgcggatcaaatttagccgaaaagttaggggatcctgtaccatcgacaacaattgtggggaatgtatcgccctattatgtggatcgatataactttaatcccaactgtaaaacaattgcttgtactggggataatcctgcttctctcataggtatgaggcttagcgagaactggatagccgtaagtttagggaccagtgatacagtcttcctttggctacaagagcccaaaatagttctggatggtcatgtactttgtaacccaatagatgaaaatgcttacatgggcatgttatgttttaaaaatggttcttttacaagagaaaggatacgggaccaatgcgcagaaggctcatgggatgttttcaatgaattattagaaagcacgcctagaggaaatttcggaaatataggactttattacgataatcaagaaatcattccatttttacatggcgattacagattcagtaagggtggtcgtgttaccaagtttaatagtttagaggtcgaagtgagagctgttattgaagggcagtgtattaggaatagagcttattccgaagattttggacttaaaatagataaaaatacgaagattctagctacaggtggtgcttccaataataaagcaattcttcaagtgttgtctgatgtatttaatgtaccagtgtatgtgcaacaagctgcaaactccgctatgctgggtgcagcataccaagctaaacatggtttgttcttcggtcaaaaatcgtatcgtgatgtgatgtctccactacccgaaccagaactggcctgcacaccttatcaagacgccgaatcaatttatataccaatggtacatagatatagagccattgt

SEQ ID NO: 6942 - DNA, 1876 bp, Diabrotica virgifera
  SmartBlast Evalue=0; Info="Stress-induced-phosphoprotein, putative n=1 Tax=Pediculus humanus corporis RepID=E0VNU4_PEDHC"
ggcgaaaattctggaaggaaaggaaatttcgataccagttacaaagcaagtgtttagttcgtgaataagttaaatatatttatcatttaccggtaaaatggaacaggtcgcagttttgaaagataaaggaaatcaagcactttccgcaaataagatagatgaggcacttaaatattacactgaagcaattaacctagatccacagaatgccgtcttatattcgaatagatctgctgcttatgctaaagcgaatcaatatgatctagccctaaaagatgctgaaaaagctgttgaaatcaagccggactggtcgaaggcttattctaggaaaggtgctgctttgtcctatttaggtagacacgatgaagctattactacgtatgagaaaggattggaaatagatccaagcaatgctcagcttaatgaaggactaaatgaggtcagagctcaaaaagctaagaaaagccgctctttcccaaatcccttctctgctcccgatgtaataccaaaactgagagcagatccgaaaacaagagctttcctcgacgatcctgaatatttagcccttttagcacaactacaggccaatccacaatcgatgggtaccaaactacaagaccccagagttttgaccaccctcagtgttctcttgggtgtagatattggatctgaagaacctatggatactgaaccagcgtatacgccacctcctaggaaacctgaaccaaaaccggaacctaagaaggaaccggaacctgacttacccgaaaataaaaggttagcaaaagctgaaaagaacagggtaacaacttctacaaaaataaagattttgaaaatgctattgtacattacaacaaggctatcgaacatgatcctaccgacattactttttacaacaatttagctgctgtttattttgaacaaaaggagtacgaacaatgcataaaagaatgccaaagagctatagaccttggtagagaaaacagagctgattttaaacttattgccaagtctttcatgagaattggcaacgcctataaaaaattgaaagactataaaacagcgaagacatattacgaaaagtctatgtctgaacacagaactcctgaaatcaagacgttgttgtcagatgtagaacgtattattaaagatgaggaaaggaaatcgtacatcaatccagaactagctgaaaaggaaaaagaaatgggcaatgatatgttcaaaaagggcgactacgctaccgcagtgaagcattacactgaagctattaagcgtaatccagacgatgcaaaactatacagtaaccgtgctgcatgttatacgaaattagctgccttcgatttaggcttgaaagactgtgataagtgtgtagaactagacccgaagtttattaaaggttggataagaaaaggtcacattctccagggtatgcagcaacagagcaaagccatttctgccttccagaaagctctcgacttagatccgaataaccaagaagcgttacagggatacagggcatgtactattgaaaacgccaatctagatggagatccggaaaagatcagacagcgggctatggctgatccggaagtccagaccattcttagagatcctgccatgagaatgatattggaacagatgcagaacgatcccaaagctctgcaagatcatctaaagaatccagatattgctgctaaaatacaaaaacttttagaatctggacttatcgcaattcgctaattgattatatatatatatatatcttttttttacgaactagaatgttttatttgtgaatttcacttcgaatgactgtttccatagttttcttttgtattttaggttataacgccattaaagtcgatatctgaaacct

SEQ ID NO: 6943 - DNA, 1876 bp, Diabrotica virgifera
tgctactgctctctgatttatctgatttatctgatttatccgattcttcagaatcgctggcctcgcgctttgcttttttctcggtatccgattcgtctgaatcggaaaggacgattttcaccttcttctttttgcttagttcctttttcttttctttcttccttgtagcaaaatcgtcgtcagaatcagagctatctaacgttatcgttttcttttttttatcttcagtctcgctatcggatgaattaattgtcactttctgtacactggtatctgcatcggaatcatcgctagaaattgtagatatctttttcgagctatcgtcttcatcatcggtcttgtttgatttgtcgtttttgtctttaactttatcttcatcttctgattctttagatgaatctgagtttttagttttcttctttttgttgccatttttagaactggttgaaggtgaatctgagtctgcatctgactgggatttcttatctccgtcaacagactctgcatctgaattattgtttgatccttttttcgtttttgttttctttttagattcctccgcatcttttgcttttttgtttttacttcctttcttcgtagttttgtcgtcttcaggttgacttttcttatttttctttgtacttacttcttcctcggaatcactgattactacattttcattattttcgctgtcgtcttcctttgttttaacacttttcttcgaagatttatcttcgccagattccacatctttgtcctttgtttttatgtccttgttcgacggattttcctcttcagaatctttatcgttcttaacccttttcccagatttcttactattcgatgtatcatcatttaaatcggcatccacgtctttggttgtttttttacttctggtcgtttttgaagagtcgccttcattatcagaatcgtctgatattacagtggttttcgattttttctttctggatttctcagtatcgcttgaggagtcgcccggggatttacggcctctcttcgattttctcaacaactttaacttttcaacacttaatactgcaaagctctcttggtttttgttaaagacctccttcatcttgtcacatccatataaaggtaatggaacatacactttgctgttcagcttcacatcattagatttgcgtctcggttgtacaccagatcttttagacgtttttgatttttcatggtcagaatcactagaagaaccgtctgacttatcggctgcagattttttgttcgttgtctttgatggtctcttgaatttagctttaagactctctctcattaaaactttgttattttgcacggattttagtctctttgattttctactagtactgtctgattcagaatctgagattttaatttctgcttcattgtcagcatccacagaaactgtgctgttcttatctttacgtttagtagagttggattttgatttattatcgacattttcacttgattttttagaattacttctagtgtttttggtatttgtaacttgtggaacactattttcctcatcagaactacttaggactataatagaactgtcaaatgtcaccttttttcgtatgttgggatcaatcagtttatttaaatctaccaatcgaattcttggaggttctgtcttaacttccgcatcagcagcatccacattatctttttcagttctatcttccttttcagcagcatcacttgtaagcggatcttccttatttttctttttcttatcttttttcatagttgtctcttccactgctgttgtttcttgagtcttttcagcagcatcacttgtaagaggatcttccttatttttgtttttcttatctttttctatagttgtctcttg

SEQ ID NO: 6944 - DNA, 1866 bp, Diabrotica virgifera
  SmartBlast Evalue=1E-106; Info=Methylenetetrahydrofolate dehydrogenase n=1 Tax=Glossina morsitans morsitans RepID=D3TPH5_ GLOMM
ataaccttaaaatacctgtgtaacgatcgggaaaaataacgaggcttcaaaatgctttcagtttcagcttcagcagacttaaaatgactctgtttggcaaaacgttgtcaatagttttaaaaaatgtctcggtcgtttacaaaaaagctccgaaaatgcatctttttatttacattaagaaacacattctgctcgcaaatcatcgatggcaaaaaagttgccgaagaaatccagaaggagctgaagagagatatagacacatgggtgagcgaagggcaccgggctccatctttgactgccattttggtaggagaggatccggctagcaacaaatatgttcggaataagatgactgctgctaaaaaagttggtataactagcaaaactttaaaattatcaaaagacttaacggaacaagaactgattgacaaaataaaggaacttaatgaagaccctctggtggacggtattctagtacagctcccagtccccgaacacatctcggagagaaaagtatgcaatgccgtagatcctaaaaaagatgtagatggattccacattaccaacatgggtcgtttggctcttaatctggatacgctagtgccctgcaccgctttgggtgtcatcgaactcatcaaaaggtcccacattgataccttcggcaagaacgtagtagtgtgtggtagatccaagaacgtaggtcttccgatagccttgcttcttcactctgacgctagaaacgaatgtccaggtcatgaagccaccgtcaccttgtgtcacagacacacccctccggaagaattggagtttttcgttaagcgagctgacattgtcataagtgccaccggtgtagttaacttgatcaaaccagatatgatcaagcctggagcatgtattatcgacgttggtattacaaggataccaaccgaagatggcaaggacaaaattgtaggagatgttgattttgaaggttgttctgatgttgctggctacatcactcctgtccctggtggagtgggacctatgactgtagcaatgctaatgtcaaatacctttaaagctgcccaacttatggtggaaggggctgctaaggttgttaaagccaacgggcattaaatttaatgttaaaccaaaacaaaaaagcatgttgggctttaaagatatttttcaaatgttaatttatagaatattgtgagtttaattcttgatatgacagaaatacggccttgatactctactattctaaggaatctccaatgtatactttttctttatgtaccttatgtacatacttttcacgtgattttctaaacctggataatggattgtgtacaaagaagagagtgatatgacaaactgatgtacttagaaatatttgaagcattttcgaaaacctaaaagtctatgaagtaacattaaggttaatgttgatagaaatcatggtccagtttctaagaacagataaacaacatatacagtgtatcgacgtaacttggaaccatatgacaaattttttccaaaatgtgcgtccaaaaagtatgcctcaccctgtctttcagaaatttttgtttattaattttacaagaaaaagctttgtatggtgtaaaacttaaaacctgcaaccatcggatatgaattttatcaatcttatacgaggtatgtcaaaaaaatatgaatttcactcaatagtaaggtgcatttatatttcacaacattgaaaattgtttggaattgaaaacttatgttgtatatgaaactacttccttctaattaaaaataaaaattttgcaaatttttctcatgattttatttattaaaaatatgataactcttccattccgataaaaatgataggcaaattttcac

SEQ ID NO: 6945 - DNA, 1860 bp, Diabrotica virgifera
  SmartBlast Evalue=1E-179; Info=Coronin-2B n=1 Tax=Harpegnathos saltator RepID=E2BW29_9HYME
gactctttgttcgctattgataagttgtttcttcaatttacgaatttcttcgccttgagattgatatgctcgtcgcaagtcgttttcagtcatgatattatccccgaagctattcacctctttgatgagacgaacatctttatggttgttgatttcgatttgactgaacttctgctgcaacttttggaaagtttgattgttcgtagttttctactcttctccgtaatgacattatccttcggccgataatctatgatagtctccgtcgcaaggaaagccagtttcttcttgttgttatccaccttcgatggttcggcgactgtcttgatcaagttgcgttgttttatagaggttatgttgagttcgttttgttcacctgttttcatggatatgagcaagggcatggcattcttgcccctgatccattcctgagctgacaacgccggcttaggagctgccgtatctgggtacaaatcttcatggaattgatcacttttgcgaggtacgatcatactgatcggttcacacaagcctttagttgcatgtaacttataaaatcgaaaaacttcacactgggcagtccttagacctctctttggcataaaacctaaccctctttgaggatttccagacagaatttggcttaagtaatgcacatacggagcctcatcggtcacttcgtagtatctaatattaccgtctccttttcctgctaggtaaaccatgttggtgtcggcgtcgaagaaaggaaaaactacgcctgaggaactgtcaatactgtctgtaaaaagaggctgagatagatcggattcgtcccaaactgaatattgtcggtcggaatgtcttgagaagccggtggttaaaagttgaccagttgaacctaagtagaccactttgctcgctttagatccagcatggcatattccttccgttttaacaatgccacttcttggttcaataatcctcaattttttatccttacaagtcgtagccagcaagctgccgtctctgtttaaggacatggaatgtatggcatcgtgatggcagtcgatcacgtttatggcttcgcctttttctatatcccaaacaataaccaaatagtcgaaacctgcactgaataggatgttttcagctgtaggatgccattctatgtagccaactcgtcgtttgtgaccctgcagttctaccaaccaatctgttaggtgcaccgaaagaccttcgtcaggaatgtgccacaattttatcgtacaatcatctgaacaggaagcgataacattgtcattaaaaggattccattttatatctaaaattggacccgagtggccagtgactttgctggcattaaaatccaatctgccagtgcagttgattgggataacgatgaaagctcctccaccggccacttccgtaactacagccacgaatttcggattgactgcgcagaattgagaatcgtgcgcatttttcgtgatcggaatgttgtcgtagcatttctctcttttcgcaggttcaccgtatacgtgccgaaatttcgaacttctcactcccttaaaccagagctgagagctctgaagcattccagattccgtcgggatacccatgagtagtccttagataatgcccgcatgcactatttcacaatacaaaactttctagtcggttttgtacaggacctgttatcaatgcatttaaaattttatcagacgctttttgaggagacaaatttcttatttccaattcactgaacataatccaccgaaaatgcagacgaaatgttggaattttctttgaagaattaagaataataaacaagatttttattataaacaaaccgaatctaccacacacgagctgtcaagt

SEQ ID NO: 6946 - DNA, 1868 bp, Diabrotica virgifera
  SmartBlast Evalue=5E-56; Info="Ofd1 protein, putative n=1 Tax= Aedes aegypti RepID=Q16LR3_AEDAE"
agtattaggtacagataaactgatatataaggtactgtctaaatacttatcttcaggttttgccagttgtcattttataacgattttcaaccgaaaaacgtggagagcattatgtatctctttcagttgtattttcttcaatattactagttgcttcttcatttgccattacttctattgaatcagcatttggatcttcacttgtgagtctttcggtaattacagatacttcctccctattttcgattccattatttgggccatacgtgtcgtggagattattagttgcttctccatttgccataacttctattgaattagcatttggctcttcactttctagtctttctgtaattgcagatacttcctccctattttcgacttcattacttgtgccataagtttcgtggagattatccaacctattactgattacagtgcttctaatagcagtatttgttgtttgtgttactaagctctcagcttggctttctagtcttttgagtcttgcttctttttttgctatcatttcttcaaatgcctttcttgaatcatgtactttagaagatgatgtactgggcctatctaagctgttaactgtttctgttttggaagaatctgaacttgttgttttggatgcatcagaacattcattgattggtgaagaggtttctttttcaataacttcagtttcttcgcattgtactacactttggacattgtcattatttccactctcgcatacgcttcttacttctgacaaatcattatcgacagtgttttctaagacgtcagtttgattaggcaaattgtcttcactcaagtcttcaagttctaaatcttgattttcagtatcttctccagttttctgggcgcactctgatacatcagtttcatatcctggttcttcgtcactaagtccttctctgtcatcactataaccactttctgcgctattgtttacgtcttctactgtagtatttctcctgctagcgaactcagtcctcagctgcttccactgcagctcggtgttggagtttttttccctggcttgtgcccatttttctctactatattccaattcttcttttaattcgcttaaaagttttcttttttgggcaagttcgtatctgaggattttttcttgggtgtgtaacatttgatgttgtttctgcagcttcccaaccactagccatgtttttgacagctcagtctgcaccaattccagcctcttttcctggtcttgtaaccggttctccaaatgaccgtttaaatgtttcaagtgcgcagtctccttttccaatgacttcttctccagtattagatccttaagtcgaataaacgtctggcttacacttaggacgaggctcggtcccttcggagtgtcgacttttttataacaaggatcttcgtcactggtttcgtctgtgaggacatttgtaggacctgtttggtgactcagtagctctataaggactttccataccttcgggagattttctactatctcttcggcgctgttcatttggtgaaggttattttggttggaacattctggctcatcatcagatgatagttgatgctcagtagaagattcttcctggacctcttcagcttcttgaagttggtttattaactcaagtaaaacttttggcagtgcagaagacacctcagacgatacttcattgaccacgatatccttcagaagtccatggttttcctctaggtgtttctgtagtctatctaagtctaggtcttgagtagcattgtattttagcaaagtttctgagaagagctggttgatgactgccagttctgcctggtattggcggcattccgctttagataggccaaagcttgattctaaa

SEQ ID NO: 6947 - DNA, 1863 bp, Diabrotica virgifera
  SmartBlast Evalue=0; Info=Isocitrate dehydrogenase [NADP] n=1 Tax=Tribolium castaneum RepID=D6WMM9_TRICA
acaaaaatactttttatttcactgttcaaagtaaatgatttacttactaaaattacattaaaaataaattatgaccgatataaatgaaagatggacataaacaatgaaaaattacctaaaaatgatgttacctaagaggttgtgttaatctcagcatcgacaagaatagaggaagcctcttaggttttatgcaaaagcgaagtcccaaaaagataaaacatcttgaacataaatattgaactacttaaaatgcaagttaaaacagcgtttttatcagtctgcttgtgctaacttgtctgcttcgaccaagttaacaataaaaaaattaaaaaattgttaaaattttttatcgaaaaaattctgggacttctcgtaataaaaaactgatttacattaaaacgatcatcaaactgatctttttaattgttcagaaatagcttctaaaaagtcttgggtactcaagaacattccctccttaacgttggggagtccatggatggaagctgccaaatctttggtcatttttccgctttcaactgtgtctatgcaagcttgttccaacttgttgccgaaattgacgagatctttgttaccatcgaggtttccacggtggattaggcctctggtccacgcgaagatggacgcgatgggattggttgaggtttgctggcctttttggtgcatcctataatgtctagttactgttccgtgagcagcttccgattcgatggtctttccatcgggacacatcaatactgaagtcatcatacccaaagatccataaccctgggcaactacatctgattggacgtctccatcgtagttcttgcaagaccatacgaatcctcctgaagacttaatagcttgggctaccatgtcgtcgataagacgatgttcgtaccagatctttttggcgtcaaattgggctttgtaatgtttatcgaagatttcctggaatatatccttgaatctaccatcatattttttcaaaatggtatttttcgtggataagtatactggccagcccttttgaagaccaacttggaatgaagagtgagcaaatgattcaatactttcgtctgtgttgtacatagccatccccacacctgcgcctttgtatctgaacacttctgtcctctgttctttgccgtcatcagttgttaagactaattctagctttccaggtttctctacaacaatatccacagccttgtattgatcaccgtgtgcatgacgaccaattaccatggattgagtccaaccaggtactagtcttggaatgtttttacataaaataggttccctgaatactgttcctccaagaatatttcttatggttccatttggagatttccacatcgattttagtttaaattcttctaccctctgttcgtctggtgtaatcgttgcacatttaattccgacattatgttttaagatggcatgtgcagcatcaatggtcacctgatcattagtttggtccctgtatggtagccccaaatcgaagtaaagacattcgagtttaacgtaaggaaaaatgagcgattccttaatcttgtgccaaatgattctggtcatgtcatcaccgtccatctcgacgacgggtttcgccacttcaaccctttttccactagcatagttgcgattttgaacgtagacagcaggcgctagaacaccatttttaacggcagacacatcttttaaatttttgcagaattttgttagggtaccggccattttaacctcacttttaggatgaacttataaatttttgatatggaactcggtttgtctgactcgatacgcagtggaaaaggtacgattttgtgcagcgtggggaggcggataccgacggaaagctgg

SEQ ID NO: 6948 - DNA, 1863 bp, Diabrotica virgifera
  SmartBlast Evalue=0; Info=Pescadillo n=1 Tax=Harpegnathos saltator RepID=E2B9B0_9HYME
tattttgaatgcacgtgagagtgtacatgtatgttttgatttaagtttttgtaaataattaacaatggtttcgaagcgtaagaagaagtatacatctggagaaggtgctcagtttatgacaagaaaacagcccttaagaaactgcagttatccctgaacgattttcgcaagctgtgtattttaaaagggatatatccaagagaacctagaaatcgcaaaagagcccaaaaaggaaaagccggaattaaaaccctgtaccatgtgaaggatatacaatttttactacatgaaccaattatttggcgtttaagggattacaaaatatttaataaaaaagttggacgtgctagagctgtaaaagattttgaaaaactaaataagtttcttaataaccatcccacacttaaattagatcatattgtaaaagaacgttatccaacgtttatggatgccttgaaagatttagatgactgcctgacgctatgttttttgtttagtacatttccttcattagcacatgtaccaagagatcaatctgctttatgtagaagattgacactcgaatttcttcatgcagtagttgaagggaaggcattaagaaaagtatttatttcaattaaaggaatatattttcaggccgaatttaaaggacaaactattacttgggttacacctcatcatttttcatttacaccacagtctaaagccgaagtcgactttaaacttatgtctacctttgttgaattctatactgtgatgcttggatttgtaaattttaggctttatcatagtttaaatttgtattaccctcccaaatttacagctgtacaacaaagtagcagtgaaaaaatgttagtagatgaagacatttttgtatcagaaagagtagcagcattgaatttttctttgtcaaaaacgtctaatgaagccctagaggatgatttagaaattgataattttaatgcagatggaagtgaagtgaatgaagaaaaacttgaagaaattcgcaaggaagcagaacaaattaagaaacttaaaacactattcaagggcctaaagttcttcttaaatagggaagttcctagggagccccttgtttttgtaataaggtgttttggtggagaagtatcttgggataagacaatgtttgttggatcaacttttaatgaagatgatgaatgtataactcatcagattgtagatcggccttctatggaaaagcagtttatatctaggtattatgtccaaccgcaatgggtttttgattctgtaaatgctcgggacttactaccagtacagaaatatttcatgggggaagttcttcctccacatttgtcaccgttcatcgataaagaaagagatcagcaatacattccacctgaagctagagcattgtacaatgaaaacgaattagaagagcaacatatgaaagatgaaactcaagggactgagaatatagatgacaatgaggaagaaagtgagggggaagatgaggaagataatcatgaagacaatgaaagtgaagaggaaggtactgatcaagaggaatcaacaaaatcgaagaaacctaagctgtcagtcagtactggtgaagtatacaaagaaattccgtgggaaaaagatcgccaagaaagacaagaattccgtcttagagaaaaaatggtgaaaaataaacatcgtaagttatataagagtatgatggaaggaaagaaacaaagagctaaagaaatatggttattgagaaagaagcgaagattgcacgatgaaaaggaacagaagcccggaaagagtggacagaaaaaagttgtaacaaagaaagctaaggcttaaatatatgatacgaaaagtgaataaataatattc

SEQ ID NO: 6949 - DNA, 1860 bp, Diabrotica virgifera
  SmartBlast Evalue=0; Info=Kurtz n=2 Tax=Tribolium castaneum RepID=D6W6M4_TRICA
aatttattgttaaaatttaataaataattactgatatattaggacatagataaaaattaaagaagggaacaagttaattcatacaagaagtgcaatctggttgtgtcgcaatgcacagccgctgactagggcacacacactggttatataggtaccgtttcctagaatctaccaatatcgctcaaaattattcttccaaaaaacgtactcttccattggcttcaatttttcgaacaataactttcgaaacatatgtgtagattcgtagtacctattcgcaggtgaaatacacctcggtacgtaggggtacaaatggacgggttttggccagtacccgctttcatgcatcagtttctcctccttttaatcgtaatcttgcgaaatcctcaaaaattatgtcatcgtcatgattttcctcctccagctgaattaagttggcatcgactggtacgtcacttctgacgtcttcactgacacgcctagaaggagtggctggcggtaaaatttcctcttctggtttaggatgcatcaaaataaaaggtaattcagctacgaggtctcctcccaatgcaccaaggcacaattttaccttaactttgtattggacgatgattcccaagttttctcgttgtgacatatcagctacaagtgtactagacgcaagatttgtgtcttcatgttttaattgaccgtcgagggctaagccccatttatctttgttattggccagtaagggagtaagcgtaaaaactttgctaagtgtgaagccaggtcctatcggacacccttcttcactttcagtttcagcaactgtgcatttgtattgagctgttgaaaatagacatatatcagcgaactgtctcactgacactttgatctttttgactgtgcgatttgaattattcgctatgtgtacgttgacagctatattttcgccatggtggtacaatttcttatccagagacgcttctaagtataatttgttaggactcatcataaattccttgctcacttcgacggacggttgttctccttgtttattcggtgcatacataatttttcgaatggccagcctcacggaattcctcttgtgcggtttgtcgtcctggctttctccgacgaacgccttgagttcgtagtcgatgccgcatggtttgccggtatctcctggtgccggttgcagcgtcacggacgcgggacaatgaggaggcaattcgaaatagaaggggtaagcgtttgatcccaatttcttaatcaaccgttcctgcagtcttgttaaaggtcgtttgttttgctgtgggctgtcttgcgggtagatttgttcggcggctaagtagaggtccttgcgaaatgttaagcctaggacatcgagatcttctctaccgtacctaaatgcggcgagtacatgtccaaatactcttctgtcttttacataatcgggatctattaatacaacgccatctataggatcaacgcatgatatgtggtcgacgaaatctcttttacctaaatatactgtaatctttccattcggggaactcttcttgaacaccctggtggcttgtcgtttgcctccatcgtccatatctggactagagccggacggagctagcctcgtgctttgtgggtccgaagtggaaagcaaaggcaccttgtgcccctccagtctgttgaagtgaacagcgtgatcctcttaaagtacttggtctcgacaggaacttctttttggttactttattgacctcattggacgtgaataaatgcaaaatatatcataagaataagaacttttcactacaaacacggttttttctaactcattagaccattaggaaatggtcgtgaaacatcgaagtcttg

SEQ ID NO: 6950 - DNA, 1852 bp, Diabrotica virgifera
  SmartBlast Evalue=5E-10; Info=Endonuclease-reverse transcriptase n=1 Tax=Bombyx mori RepID=D7F172_BOMMO
gatggaagaccgaacaaattggaagaaagttgtacagtcagccaggacccacccagggttgtagcgctacgtgatgatgataacatcttgtatctaagacttggctggccatctgttgtcatccatccactgcacgtgtccatatcatattaactgtctagtttttattctttcctaaattttatgtactctatctgtttttcttctaatttcagtattaggtatacgttctgctcttgatatacgacaagctcttctcaggtagtccatttcaatagtgccaactttttctttttttttgctgtcatttgccaacattctgctccatatatacaattactttgtagattgtcattttagtttccaaagtatatagctctattggaccaaagtatcgaattatgtcaacttcttgtgtgaactctcttcctgccttgttgcactctacgattgatgtctcattccgttgttcctttactgcagatcatacttcccaaatatttgtattcgtagcaccttttcatttatctaatttccaaatccggtcttcgtcttcacttcctattcacatataatctgtttttgacttattcatactcattccccatttttcgcattcatttttgagatttctaagcatatcatctgcatcttcttcacagctggcaactagtacttgatcatcttcaaagaacaacgttgtcagataattgttgttaagcttcaaccccacttccgcacatttttgtctctactggtgcaatgcttcttggatatatattttgaatagggtaggggaaagacaacgtccttgtctcaaacctttcgttactgtaaatacccttgagaaagtatttcttgttttcaccgtattaaggtacgttttcgtcaagataccaaataacaattttaaagaaacataagccttctccagatctataaataccagatgcgtagggaggtttcgagtgacaaactttcttgcatctttttgggaatgtgatcttttgagaatttggtcacaaaattgacattctcagaaaaattcagcttgttcgtatgatttttagacgtcagaacgacgactgaactacctaccccaaaataataattttctgttacctattaaataaaaattaaagaaattcaatagaataataataatatcgtatggcatttttgccggggagatttaccatttacgtgccggggtgccatttacatctttaaccctgttttaagtaacttgtgtcgatgtacacactagcccagggggaccgacggcttaacgtactctccgaggcacggtgaacagctcgtatcatttttagaaatgaaaatagattgtctgtgccgggtctcgaacccgagcgccctggcgtataaggccagttatcatgccgctgtactacggctgttcacaaagaaattcaatgcgaaatggttagaaacgcacataggtcctattttataccacaattaagtaaaagtggtaaaaaatagccttcttgcgtcatatttttactgctagtatatataaaaaagaattttaacttacttgtatatttaatgaagttaaacaagacgccgtttccttactactgttcctccttccagtgttctatacctaacattaaaaatttctgctaatttttgtatctgctacatatacatagttctcttcttgataaaagaaacaacaataaggtttaacggtctagctagatgataactcacaagctctaaaaagttttttattcttctcgtattgggactactgatttgtttttattgatgcaaccatggcagcagttatatttattttgttaataaaatgttgtaataaataatt

SEQ ID NO: 6951 - DNA, 1855 bp, Diabrotica virgifera
  SmartBlast Evalue=1E-104; Info=Transmembrane protein 26 n=1 Tax= Harpegnathos saltator RepID=E2BUL9_9HYME
gacaatgtgacaagcgaaaaatcaagggaacaccgtatcgcgtgtttgtgtaattgtgtagttttaatttatttactttaataactaattttcttcttgtgaaatgggacgacacagaatatgtcgtgctataactattcgaatcgtgttcattatccattcgttgatagcaattggacaagttgcttatatgaaagatgacagatggtattggtatttgtgttgcccgctacttcttatggtgctagagactgtagtgacgttgaccctgacaagaaacctcgaatggagttggttttgtccatccgtgtttctctatttgggaagtgtagtaccggcgatatggctcctagaattggacaaagtagatcgaaggttaaaagctctcgaagaattacctatgaatctgaccacgggaggacaacttaaagacctgaacacattcataggaatcggggtggaaataaaacttccagaaatttcattaagcacagaaacgtggataactcttatcgaacaattcctcatgcttattcttataatagggagatggatgttgccaaaaggtgatctcaccagagatcaactcagccagcttttgctcgtctatatcggtaccgctgcggatattcttgaattttttgattctttcaaagatgataagatcgcatctgaaccagtattggtgctattgacgttagcaatttggtcttggagcttaatgcagtttactgtagtattaactgccaccaaagctagaaagtcaagacttacaacaactacatcaacaattgagaagtcagataattgttgcagtatcgacgtttgcagtattattcttaacattacccttcaagatgcaccatatttagtatttaggctgcttcttatttgtcactacaagatcattacgtatatgaatattttctttacttgtaagaatacgttagtaatacttcttcaaatttacagactctacgtcgtatatacagaaaacaacaaaggcacgcccgatgatgacgtagaaagagctagcactatttccataatctccaatatgccaaaaagtgctcttacatttgaaccgagacgaaggcgaagaccgagatcccagcctggaagtccaaggagtacgataacgaataaaagtgtgcgaagcaccagtagtagaaaaagtagggacacagaagagtctagtgatagtgatgcgagcagacttgaaaataatcgagggggcaggaagtcgaatacacgaaaagacacaggttattctacagccagttcgacagttagcgccaaaaatcaccatcagcctcagcagaaatctttcgataacatagacgcagaaacacgaaggatgctaaagcaaaaattgaaacgttcagacaaagaaacacgcggcagaagaaaactcgaagacgtggtttctgaagaaagcgacggcacttacttagaggaagaacgaattagggagagaaattatcatcaaagaaatagacagaaagacagaaattatgataaaaattcaacggtgactataagcgatcagtcctcagactgacgtcatcaactagccataatggctatattttgtttgtattttttcatttttatatgctgtgtattgtttatatattggggtattaacactgagggacttattattgcaagagtaaatagaagaaacagaactagtatttaactgttttaatgggaaatgggccgcagttttgctaaaaaatgatttgattacgtttcgacgtccaaatcggacgccgttgtcaaaaataaaaaaaatattaatggacgtcgaaacgttaatggaatcattttttagtgaaactgtggcttgttt

SEQ ID NO: 6952 - DNA, 1853 bp, Diabrotica virgifera
  SmartBlast Evalue=3E-79; Info=DnaJ-like protein subfamily C member 2 n=1 Tax=Camponotus floridanus RepID=E2ARS6_9HYME
gggtttttagacgttcgccatgcgggaaattatgtttaatgttataaattattaaagtacgttataaccgtcaaataaaccaactacattaaattcggacgtccatatttagtgtaattaaagttcaacgatttttgtgggtgccgtaagaggttatgcgatagtaaacatgggagaagccagaattgcaaaaagtggtatttgcacagcagtcgcacttagatattactttatttacgaaaatgtaggcgctggagaacctgaactacgctttgtgcaacatcccttaatcgaattagaagttgatataccaaaagaggacaaagaggaagaactaactccagaaaccgtggactatgaagacgatgttgaatacttgagaagtttagaccctaaagaatggaagtcccaagaccattacaaagtcctaggtatcccaaacataagatacaaagcaacagatgacattatcaaaacggcatacaggaagaaagtcttaaagcatcatcctgacaaacgtaaagctctaggggaagaaatcaaaacagatgatgactattttacctgtataacaatggcttatgaaactctaggaaatataagtaggagaagagcgtatgattctgtcgatccacaattcgacaatgatctaccttgtactagtgatataaaaaaagacttttataaaacgtttacttattactttgacttaaactcccgatggtctgaaaaaacacgggtgcccaaattaggaactgaaaattcgacaagggaagaggtggaacacttttattcattttggtatgattttaaatcatggagggaatattcgtatgaagacgaagaggataaagataaatgtcaagatcgtgatgagagaaggtatgtggataagttaaacaaagctgagaggttaagaaagaaaaaagaagaaatgtccagaatacgccagttagtagacttatcctatagtaacgatcctagaattgcgaaatttaaacaagaagacaaggagaagaaactagcagcaaaaagagccaagcaaaatgcagcacaggcgaaaaagaagaggaagagaggattctaaaggaagctcagttggcgaaagaacaagccgaagcagctgagagagctaaaatcgaagcaaagagacaagagagagaagtacaaaaaaaggcgctgaagaaagaaagaaaaattctgagagatatttgtaaatcgaataattattacgcagacaatgatgatcagaacttgtcttatatgacagcaatagaagggatgtgtgaaaggttatctttaactgaattagaagatttaaataagaatttaaaaaataatggaaagtccgcttttgtaaaagccattaaagagaatgaagcttatttacaaaaagaaaggatggacttactaaattcagctaaaagtaaagttaacactgaaaataatactactgctgttgttatggtagcacctgattggaacgaagagaatgtccagttactagttaaagctgttaatcttttccctgcaggtaccaatcaaaggtgggatgttgtgtcgaattttatcaatcaacacggtactttctcacaaaacagcaacaagttcaacgctaaaatggtactttctaaagcaaaagatcttcaaaacacggatttctctaaaaacaatcttaaggaagttgcaaataagcaagcgtttgacaatttcaagaaggacaagaaaagtgttcttaacattactgaatctgatatatctaaaaaattagacgaagtaaatttaaacgatagtgcgaaaaaaccgacgactaacggagaagcgaaaccgaaggctgaactgccttggacgac

SEQ ID NO: 6953 - DNA, 1854 bp, Diabrotica virgifera
  SmartBlast Evalue=2E-18; Info=Sarcalumenin n=1 Tax=Papilio xuthus RepID=B2DBG2_9NEOP
tttatgtgaccggtgtagtgacaagaagccatggaggtctaccgaagatcctctgggctggtgctgctccttggattgtttcttctcgccactaccttgcagggtgtgcaaggtgaggtcgagtcagaaggtccttccgaatccgaatgtaggccatatatcgaaaaggctttgaaagagctggaggcgggcgaagttcccgcgggatcatcggcagaagatggcgacggcgatagcaaggaagatattcccactgtagaaataactgacgactccgctcaccaagaaggcgacggagaaaaagacgatactaacgaagcaggtcaagaccaagacagtaatgagaacgttcaaactgtttccgaaaaaatcgagccagagcaagatgatgctagccaagaacaacaagatgaagcttctgtaaatgatgccgatcgaaaggacgctgaagaagacgaacaaaaagaagattcgaaggaagacgataccaaaacagacgaaacagcaagcgcagaagacgatggtaaggatgaagctagcaatgaaggggacgatgagaaagctgatgagaaggcgagcgaagatgaggagagtaaagaacagcaggctgatgataatgtgagcgaagatggggagagtgaagaaccgcaggctgagagtgaggaagaaaaagctgatactgacgatagtaaagaggaagctgaagctcaacaaaacgcagatgactcgactgaagatgacggtgcacaacaagatgaaagtaaagaggaacaagctcaacaagatgataagagtgaggaacatggagacagtttagaggaaaggatagaagccgaaattatagagcatttaacacaatcccaaaatcaagatgatggaagcaaagaagacgaaccagcagcacaagttgaagatcaaaaggaaagtatagaagatcaagctcaaagtgatgaagagcaagcccagagtgaagaggaacaacctacaaacacagaagatacacaagatacaaaagaggatgactcaaaggaagatgatggaaaagatggtgactcaaaagaagatgaaaaaaatgatccggaagacgataaagaagcgtcaaaagaagttactaaggacgaaaccgacgatgacagtaaagaggatgaacatgaacgccacaaaagatctattgatgatgctcaggatgatggaatagaatcaaaggaagaagaagctactttaaaagaagatgcatcaaaggaagattcaaaagaggatgaagcagctacaaaagaagaagtagatgataaacaacaagaggaagtcgaagaggtcgcggagtccaaagaagacgatgtggattctaaagaaggtacaacagaagatgctgacaagtctgatgaaaaagtgagcctcaatcagacgaaaacactgaggataacaaacaagaaagtgccgaaaacaaggatgatgaccaaaaagatggagatagcaaagaagatgacacaaaatcaaccgaacaagatgataaggatgataaagatgatgatgttaagggtgacagtagggaagaaaatgcggatgataagtctgtcgaagccgaaaaagatggtgacgaaagcagggaaaatgattcaactgatgataataaaagtggagaagatggtgctcctgtggaggaactatccttggacacagaaattccaagcgacttacgacccagagatcacgtggagcaacttcttaagctcgacgagcaatcttcagatacagaaacaataattaacagggtctctgaaataaccttaagagatctcaagaaactgtatgaaaatgctatcaagccattagaagttttgtataaatacagag

SEQ ID NO: 6954 - DNA, 1852 bp, Diabrotica virgifera
  SmartBlast Evalue=1E-162; Info="Sodium antiporter, putative n=1 Tax=Pediculus humanus corporis RepID=E0VFM9_PEDHC"
taaagcattgcaagtgccggtaatggaccaacatccgcacaatcgaggccatgatcgaggccacgataaccctgtattcgaatccccgagcaggaaagtttccagtgtctcagaagcagaaatcgggcccgtcaggaaaaaaagcatattgcacaaaaacagcgatttcgatatagttagcaactcggggaagagtgataccggcagacaaaatggagaatatagatttaaaaagcattcaactacagattctgtatattctaggactcgatttgcagacacagtacacgaagataggtcgtggtggtacattttctgtcttcaatgtagatccgatgacggccagcaatcgtggaaaccagacttctggcctaaactgtgtccatacccgttctgtcctacctacagacaattcacaaggattataactataactcttataggagtgttaacgtggtgtatattttattctgtggtaggtgaaacggcagcgccacctaacggaaaattgtttcagttgatattattaactatttgcgcgcatataggaggatggttgatgagtttaactacgttgccagcactgatagggatgttgttcacgggattgctgtttcaaaatgtaggatttgtaaatatagatgattcgttttcctacatatgcaaagaattaagaaatgtagcgctggtcataattcttatcagagctggattggatcttgatccaaatgccttaatgagattaaaattttcagtagttaaactaggattgggcccatgggccatagaagcaggaatgacggctgtgttttctgtatatatcttagggatgtcatggagttacggaatattgttaggatctgttatagctgcagtatctcccgcagttgtggttccttgtctttttagactgagatcaaaaggttacggtgtggctaaaggaattcctacgcttattatagccattgctggagtagacgatgctgcatcagtcgctgcttttggaattattaagagtattatgttttccaatagttctctaacgaatcttatcatttcggctcctctatctatattaggaggaattggttttggtgctctatggggtgttctctccaactttgccccagaacgacacgaccccttcgtcgtacccttacgggtactgctgctgctggttggcggtatgatcgcagtcttcggaagtgaaatgatcggtttgggtggcgctggtcccttgggatgtgtaacggcagcgtttgcttcgatctgtttctggaccaaacaaggttgggacatagaagacaatccggctgcgactgcgtttgaaatattctggatgatcttcgagcccattctattcggcataacgggtacttccataaaactgaaccagctggatgcgagtattgtgtactacagtattggtattattatcactgtggcggttattagaatcttaacgactatattactgggtattggctgtaaattgaatttgaaggagaaagtttttgctgcgatttcgttgatggcgaaagctacagttcaagctgcccttggtccagtacttctgagcatagtagcagctgactccaaagaacacgattgggcttcaaaattccttaccacctgcgttctctccatcgtcgtcacggctccaacaggaggcatactcataacgattctaggtcctagacttctaactaaaacgaaattcatgccagaacccgaaggatggagaaggagtcacaggccatcgatcagggatataagtataattaacgaagaagaggaaaaagaaccgcaagaagtctctagtgattcggggcagatcaaaactatagctgtc

SEQ ID NO: 6955 - DNA, 1855 bp, Diabrotica virgifera
  SmartBlast Evalue=1E-148; Info=Cytochrome P450 n=1 Tax= Leptinotarsa decemlineata RepID=Q3I414_LEPDE
gtcctgagcttacttcggcagtgtcatattaaaaatttatatcttcaaaaaaaatttccgctagttttgtaaagcactgtattgtatcacatgtacaagagtttccattaacttttctctttaccaaaacgaaacaaagctgttggattttcaactttattttataaaaataaaaactcttaaaataaatatgtcagtagataataatcctcctattaacaaactttttccatgtctaaccataggccaccctcaggcgtaggtatgaatgcaggcgttaatttgagtggcatttgcattttcttgcttatacttagcctatagttccttaaaactgtcatgatacctacttttacttgaatgatgccaaacctcatacctaaacataacctagggccttctccaaaaggaacatatgtgtatggaataatgttctttctgttctcttctgaaaatcgttctggatcgaatacatctggattatcataatattcttcatcatagtgaatacctatggtaggtatgacgactcttgtgcctttttcaactactatgtttgtctcaggtatctggtaatcttgagaacattctctggtgagaaaaggaattggtggatatttccttaatgtttcatcgatgcattgacccatatatttaagatcgcagagggactcgtaggtgatttcgccgttgtgattgtttagtacttcttctatttcttctctaactctttcttggatgtcgggattggcagccatctcgtataaaacccatgacatagtggttgcgctggtttcgtagcctgctacgaaaaacacgaaactttgagccactatttcgtccattgtgatagctgtctcgtcgtttaattttcctcttgtttctggatcgttcttaatattgatcagtccttgtaagaaatcattacgatcaattttactattttccctatacgtaacagtatcaacaacaactttcgtgaaaaattccttaatagtcttcggtatccaagtcaatctgatagcactagctaattttggaaagttgattgcaacagcaaatttgacgtcatccgaaagtgttctgtttacgattctattggccatctgcttgaacggattgtcatcttcgaaactgttgcagtctattccaaatgcgcatgaacctattacgctgatggtgaaactacccataaattgtttaagatcaacgggctcctctccattaatctttgtgcttaagcaattctccaacatttttccacatgaaatgacagtgtgaaacatcgattttaactttcccgatgaaaaatttggcgtaaatttacttctaaggctcttccattttgtcccaccaagtgcaaataagtgagcgcctataggttcatctttttcattgatatatattcctcgggcattaaagtaattaaaatccttggctaaaacccgctttataagatcattatctactggcatataaattggagatatagcggcataaagtccgatgtgtttgtgtccatctcgcttagcgtttacatacatctgagcaaattcttctcccattgatattgtggagttgatttgtggtttgagactgccccatggaatcctaggctccacaaatggtacacctctgaccttccagtaacggaatgcccattgacagtatacaacaaatatggctatgaatgcaaaaactactcccgtaagatcgtaacagatatttcctgtgatgatggccatttttagatagattaattaataacaaaactattatattatattaataataactataattttgttgttacgggatgttccgcatcctaggactccactaactagaataaagg

SEQ ID NO: 6956 - DNA, 1851 bp, Diabrotica virgifera
  SmartBlast Evalue=0; Info="Beta-1,4-mannosyltransferase egh n=2 Tax=Formicidae RepID=E1ZZ85_9HYME"
ctttggtgggatgtagttaggtaaatttgttcgaaactaaggaaattacgatgctctccagtaaagccaaacactatttacattgccttctatttctaaacgtgataatctttttcgaaatttttactgggggcataaagagcttcggagaaggggtgtttgtaccgccaacagagttgaatccatggatacagtacggtgttttcggggctacgcttctctatattttaagatttctcacttttctacctctgccccaagtgatcttcaactgtttgggtttgacgctgtacaacgcttttccggaaaaagtggtgctgaagggatccccgcttcttgcgccttttatttgcatcaggatcgtaaccagaggtgattttccgcaattggtcaaaaacaatgttgttcggaacatgaacaaatgtttggacgcgggtttggaaaattttctgatagaagtggtaaccgataaatcgataggtctggagactcacagaaggactcgagaagttgtggtgccggcagattatcgtaccaaaagtggcgctctatacaaagccagagccttgcagtactgtttagaagatggagtgaatattcttagcgataacgattggatagtacatctcgacgaggaaacgttacttacggaaaattcagtaagaggaattctgaactttgtcatggatggtaaacatccattcggtcaaggcttgatcacctacgcaaacgaagaagtcgtcaactggataacaactttagccgacagttttcgcgtgacggacgatatgggaaaactaaaattgcagttcttgatgttccacaagccttacttcagttggaaaggctcttacgtcgtcactcagctggctgcagaaaaagacgtctctttcgacaacggcctggacggttccatagctgaagactgcttcttcgccatgcgcgcctacagcaaaggctacaccttcaactacatcgaaggagagatgtgggagaaatcgcccttcaccttctgggactttatccagcaaagaaaacgctggctccaaggcatctccctcgtcgtccattccaaagccattcccgtcaagaacaagctgctcctcgcgtgttcctgctactcgtggctgactctacccttgtcggtatctaacttaatcatagccgccaagtatcccataccttgtcctccgttcatcgatttcatctgcgcgttcatcggtgctgtcaacatctacatgttcatcttcggcgtcattaaatccttcacgatatacagatttgggttgtttaaactcaccctgtgcatcgtcggtgccgtcattgtcataccctttaacttagttatcgaaaacatagcagtgttgtggggcattttcggaaagaaacacaaattctacgtggtgaataaaaccaacggcccctcgcttaccagtaccgtgtaactggtcgaattgttaagaagaagaagaaagcgtagaggagtcacgactacccagtggtattttgttaacctggcaaccaggtcaaatgttttgttgtttaatttttttatattttgttaaaatagaaaacatacgaatccaatcaatgccgtgcttatgagatgaactcttaagaatgagagtacctttctgaagggctcggaagactacgacagtccagagatctgccatattttaatagaaaaaaaaaatgatcatcatcatccattatttatttctccgataaatccttaaaaaaacattacgccagtgtagcagtagcgtttattgatgacatttgtcacactagaatccaccaatccgtcacaaagttgtatacgtcttaaaaattacatacaagtcaccc

SEQ ID NO: 6957 - DNA, 1849 bp, Diabrotica virgifera
gcgcatacctgtgtactaaaaattgttatcaaataggacatgttctaatttgtataacattttctgttaacagattttgtttcctgttttacattgtgacaaaacttagtataccattgtcttatatcattctatgttatagtctaaaacagacttaacgggtatttgtccagtacccaaagtaccgatacctcgttgttagaaattctcgttactttcggtacaagtaatctagcgaaatacccagatgtcggtaacaccgaaccaaacaaatactgtgtcgattggtatgtcggtgtcggtagttagcacttcgaaagataaatcgaggcagtgacgaaagtaacgagtataaagttccgggtatagatagttaaagtaacgaatcgttacaaaacacatattccaaagtaacgaaagtttacactactagtgaaatcaccaaaaaatgaaacaatttttggggaaaactcatcaaaactttttttgtatttaaaaaagctttaattttgtgattttataaaagtttctagcatcaaaactaaacaagttacgcccaaaaaaagttggtcccttttttgctaaacaaaatcgtgaaggtcgctccctaattagcatcccaaatgaaagtaatctttacagttttattttgttcaaaaatcaacatatttactcgcaaataactccaaaaatattaacttatggccgatttacaacgacgaatagtagttgattcgatgaataaagttattcgaccaataaaactgatacatctacgtttcaccaaggtcaaataagacttaataataatagtctaccgttttataccactcacgtggctttgggagtatagcagggtactctgctatatctagggcctacagtatacaaggaaggtaacagggccagtgctacgcttcaaccgcctattattacccaaggtacttatttattcaggctgagtcgacctggggcctatagacacttttaaaatgtcgagttgttcttgccggcggtaggatttgaactccgtaccaccggcacgagagccaaacacactaccgcttagctacgccggccttaaagttcctgggaatagtatttccagatacctgggaaagtcatcggacatcatttcctggcgcccatgatttgtttgtttttattcaatttgttcatcattagaaattattcatatttattcatgttcagtaccttatacgtatcttaatatttccattcttagtcatcatcactatctactttgagctaccgtctttgacaggcatgcaaattggccgtatccatccttgagtgtcaagtagtcgttctcttgcatatatcgctagcctaactcctttcagtttgcctctgtctattcacatttctattatcctttcattacattggcgcccaacgtggggccaatgtaacaaaaaatacatattttatttattttaggccaataagacttattttatttatttatcaaataaatatttactcttcgaataattgacaagttaatatcgctttaaatatctataacaatgaacattcgtcagtttagctttaaattatcaaaattttattgaaacacaataaaaatataatcgactaacacattttattcgacgaacaactattcactgatttatttgttgttggtgaaaccggtccttagtgaaaaaactctgtagaacaatattttcttagaattagtcagttatgtttcttattatactttttctcagagacttctttcagtgcgtcacagtttttcgatttctttctaacgcattaagttggaagtgacagaaaaaaggtaagtccgtgattatactcattt

SEQ ID NO: 6958 - DNA, 1848 bp, Diabrotica virgifera
  SmartBlast Evalue=1E-152; Info=Signal recognition particle 68 kDa protein n=2 Tax=Culicini RepID=B0WMF9_CULQU
cggtaatattaaatttattaaacaatgtgaaaatcttataaaacccatctgtattaactaatttcctattttccccatccccaaagtcccttaacgaaaccagaaataccggctccctgtttctgtttgggttttccatcatccaacttctcagaaagatcgggaaattcggcaaaattcaaagctaaatcgaagaatagtggttttgctggcactggttccatagcaggtggcagagtaacaagattgggatttttggacagcaactgcggatcttccctaaactcatccaatctttcgaccaacggtttcttgcttttgtaagttttttggctctgtggaaattgtatcgttgattcatcctgtttaagatccaataccatgttagctttagccgttgcgatttcaatttgtgatttgtcctcaatcctttgtaaaatttctttaacttccaattcaaatttaccttgttttaaaacttgcgcagaattgtaggcagtatcgaagagaacagcagcttctttccaacgtttttgagctccttgagatttcgctagataataatatctaagagttttatatgctgcgatttgggactcatagtatttttgggcattagtattgtcctttattatgtcattctgtgataattcgttagtctgttgaatgttgatgtctaaaagacggacacaatcttgtgattttcttgtctgtaaaattagcaaaacatttctctgggaagtacgctcaatacgtatagacaacagataagcaatcagctgctgatattcctttgtttgcttggctgttaacttatcagacctagaattatctcttgccaatgatattatatctctcaaatcaataaatagattctctaaaatcttaatctttccctgattatcttcagcatggtttaaagattcgtttaaaccttcaatactgactaaaaataatcttattctttctattctgactggaatgttcaggttaaaccatttcacctcatacagaacatcctcattcttttctttattctgggatacaagagcatcaaagttctccaatactccctgactacgtagttccaaaagatctacagctttttcatccccgatattataggcacaatatctcaaacttggactaatttcttccactctctgtttataaggtagctgttcctcttcaggcagtgtagacgatatcttttcatagattacttgggctttcttcaaattttcagcagcttgctgccagagttgaagttcaaattgaagagagccttgaatccaagcaagatatgcttgtgattctagcttagtccgaacatcacatcggtcttgcttacagagctcatccaactgtagagcatacacacaagcttttctcatcttctgaactaaatgaaacttctttctaggctcagtattggcctcttgtctcaattgcattgcatatgcccaatttctctctgctagtataagaggaatgtgtagaaatctatcgtcagattttggatttattatgtgagcttcagtaacgtctcgttttttgaagtgtcgacgatctccttgaggaattttgagtactttacgcagtctgctaatccttctggagcagtaacctctgtatctctgataatctccatgtcgaagaccgtgttgttgctgacagtcttttattaacttcaaaatttctaaagtaaatggtagaagaggttcttgctgcactggtttattttgtgtatctcctgatacattatctatgttttcagttcccatttgaattttatttaattttattaaactcacgttacctgacgtccctcgtccctcaagacgtttc

SEQ ID NO: 6959 - DNA, 1848 bp, Diabrotica virgifera
  SmartBlast Evalue=0; Info=T-complex protein 1 subunit epsilon n= 4 Tax=Culicidae RepID=B0XGB7_CULQU
tttctgtcactttcatgggagtagccagttcgaaacaaaaataaaattttaattaatctggaacatctcccaattttttagaaaacttacattttcaatatgagtgctataccaggaagtattgcatttgatgaatatggacgacccttcataattcttagagaccaagataagcaaaagaggttgaccgggatagatgcacttaagtcacatattttggcagcgagacaaatcgctcaaactataagcacttctttgggtcccaaaggtttagacaagatgatggtgtcacctgacggtgaagtaacagtcactaatgatggtgctactattttgaaaatgatggatgttgaacatgaagtcgctaaattgctagtacagctatcacagtcccaagatgatgaaattggtgatggtaccacaggtgttgtagttttggctggtgccctgttagagcaagcaggatctttattagacagaggtattcatcccataaggattgctgatggttttgagctagcttgtcaaacagctgtagctcatttggaaaaaattgcagaactatttccagtatcagcagaaaacactgaaccattaataaaagttgcaatgaccactctgggatctaaaatcattaacaagtgtcataaacagatggcagaaatagctgttaatgcagtcttagctgttgcagatttagaacagaaagatgttaattttgaacttattaaagttgaaggcaaggttggtggaaaattggaagacacaacattagttaaaggtgtagttattgacaaaacaatgtcccatccacaaatgcccaaagaactaaaagatgtaaaattggctattctcacctgcccgttcgaaccaccaaaaccaaagaccaaacataagttggatgtcagcagtgtggaagattataaggaactaagacagtatgaacaagaaaagttcaaagaaatcgttggtttggtaaagaaagctggagctacattagcaatttgtcaatggggcttcgatgatgaagccaatcacttattgttacaacaagaattaccagctgtaagatgggttggaggtccagaaattgaacttatagcaatagctactgggggtaggatagttccccgttttgaagagcttactcctgaaaaacttggtcatgctggtttggtacgagaaattgcatttggcaccactaaggatagaatgttggttattgaagaatgttcaaattcacgggcagttacgattcttgtcagaggaggtaatcaaatgttagtagctgaagccaagagaagtctccatgatgcattatgtgttgtcaggagtttagttcaagaaccaagagtagtgtatggtggtggagcagcagaaattgcctgctgtttggcagtcgcggctcaagcagatcaactagcttccttggaacagtacgcctatcgtgcatttgctgaagccttagaaagtataccacttgctttggctgataacagtgggctatctgcgatccatacgctaggagaagtcaaggctaaacaagcagctacaggagatccagctctcggtatcgattgtatgaatactggaaacctcaacatgagagaacaacatgttatcgaatcactcagatcaaaaagacaacaatttttgttggccacccagttggttaaaatgatattgaaaattgacgatgtacgccaacctgcatcgggataaaatgacacttatttttgtactaccggcgttaatttctaattctcactaataatgacttttataagttgatctgcgtaatgcttctttgttcttataatcactgaaagtattaatataatttataga

SEQ ID NO: 6960 - DNA, 1844 bp, Diabrotica virgifera
  SmartBlast Evalue=1E-116; Info=Cap-specific mRNA (nucleoside-2'- O-)-methyltransferase 1 n=4 Tax=melanogaster subgroup RepID= MTR1_DROME
ttgacgtctatcatgatgttaaccttaattttttatttatttaatatattttaaaattataaaaatgatttcagaaactgttaatgaatctgacacaaatataagtatgcaataccaaaatcttagtatatatgacaatggtccaccatttgaagtctttcaaaatgaagaaacaactaaaagccccaatatcgatgagaaagccttacggatgatgcaaaaaatgggctacaaagaaggatctggtttaggtaaaagtgaacaaggaattactaaaattatagatataaactatcaacatggtaaaagaggtttgggactaaaattaaaacgtattgaagatacactcaaaacgtggaatttctcaattgaggaggtgaacataaaggaaaatttgatttggctaaaaaatgaagcagcttcagattatacagaggaagaactgttaacgtggataaaagaaggagagcatgttacggatattaaaacccaaactgaattttgtgatgaagaaattctcaataatgttgtgaatgcaaaagacatatttgaagaaatggacattattgaactgtgtcaagccagagcaaaatctaacccctttgagacaattcgttcagcattttttatgaacagagcagcattgaagatggccaatattgatgcagtgacaaattacatgttcacggatgttgacaaaaatgaaaattttcaaaatcacgaaggtccttattatttcgcagatgtgtgtgcgggtccaggaggtttttccgaatacatcctatggagaaaacagtggaattttaaaggatttggtttgaccttaaaagatgaaaacgattttaaactgggtgattcaacttgcgcttgtcctgcatcgttccaggctttgtatggtaatgatgatgacggaaatgtttgctctccggaaaatattttagattttaaagagaaagttatgcatgaaactgatatgcagggtgttcattttatgatgtcggacggtggattttcagtggaaggaaacgagaattttcaagaaattctgtcgaaaagcatttatatatgtcagtgtttggtaggtttggaaatagtcagatctcatgggcacttcgtaacgaaattgtttgatgtatttacaccatttagtgttggtattttgtttctcatgtttaaatgttttgaaaacgtggccattttgaagccgaacagttctcgaccagccaattctgaacgatattttatttgttcaaacttaaatagggaccatttttacgaaagagtcaaaaaatatttttggtctatagtacgaagactatgggagattaaagataataataatatagacgtgctggagatagtgcctttacatattttaaaaggcgataaatctttttacaattacatagtcaacagtaacattaccttagcggttagacaaacgacaggattacaaaaaatagcagcattttgtcagaatccaactttagtggaatgtcggcaagaagaatgtagaaggaaatgtctcgagttctggaacttacctgataaatcaaaaacggcactacctcagcttagcgcacttcagcttgtcaatttagttttagataaaccagaaattcttttggtgcaacccagaaaagttgaccatattgaagcatttaacgaattgatctcagacgtggaagattggtattattttccattgtatagttctcagaaaacaaataattgtaacttctatgctggtgtttctggcaaggtttataggttacaaaaaggaaaatggataaaaataaataatatacaattgtgcagaggaaccttgttgtacggcgaatttg

SEQ ID NO: 6961 - DNA, 1848 bp, Diabrotica virgifera
  SmartBlast Evalue=0; Info="Dihydrolipoyl dehydrogenase, putative n=1 Tax=Pediculus humanus corporis RepID=E0VNL5_PEDHC"
cggtcagtcaaagtcaagtcgcatgtcgcatgtctttgtttgtcttgtcttatgtctttcttagtaagtaaatgtcacctctagggtcgaggtgaaaaaagtaaattataataaaattacgaaaaatttgaataataacaattttttaacgaagtccgtgcttcttattaataccttcaccaaaagcaacaatgcagtgttcagtttttaaagtattatcgtccacaataaagccaactttaaggcacaaccaaagaatattaggaaacttacaaagtcgtttatattcaaacgatggagatgctgacattgtagtgattggttcaggaccaggaggttatgtagctgctatcaaagctgcccaattgggcatgaagaccgtttgtatcgaaaaaaatccaacattgggaggtacgtgtcttaatgttggctgtataccatccaaggctctattgaacaattcacatttctatcatatggcccattctggtgaccttactgagagaggcattgaaactagcggtgttaacttaaatttagatgcaatgatgggtcagaaagtcaaagctgtcacaagtttgacgggaggtatcgcccaattattcaagaaaaacaaagtgacgctcatcaaaggacacggtaaaatcaccggaccaaatcaggtaacagctgcgaaagaagacggttccaccgaagtagtcaatacgaaaaacattctgatcgctacaggatcggaagttacaccttttccaggaattgagactgacgaagaaaccattgttacttctacaggagcattgtcactcggcaaagttccacaaaggcttatagtcatcggtgctggtgtcatcggtttggaattgggttcagtttggtcccgtttgggatccgaagtaaccgccatagaattcttgcccagcatcggcggtgccggtatcgacgcggaggtggcgaaatctttgcagaagattctttcgaagcaaggtctcaaattcaagctcggtaccaaagtgactggagcctcaagagaaggaggtgttattaaagttaatatcgaagacggaaaagattcgagcaaaacggaagtgctcgactgtgatgtactattggtgtgtgtaggaagaaggcctttcactgaaggattaggtttagaagaaatgggaattgctaaagaccagaaaggaagaattccggtaaactcacacttccagactgttattccaagtatttatgccattggtgattgcatacacggtcctatgttggcacacaaggctgaagatgaaggtgtcgcctgtgtggaaggtttacagggtggtccagtacacatcgactacaattgcgtgccgtctgtaatctacactcatccagaagtcggttgggttggaaagaccgaagaagatcttaaaaacgaaggtattgcctacaaagtaggcaaatttccgttcatggctaattccagagcaaaaacaaataacgacacagatggatttgttaaggtactagctgacaaagctaccgataggatcctaggaacacacatcatcggccccggagctggcgaactcatcaatgaagccgtacttggtcaagaatacggagcatcaagtgaagatatcgccagggtgtgccacgctcatcctacctgctctgaggctttgagggaagctaatttggcggcttattgcggaaaacctatcaatttctaattcgtaaatgcaatatcatctcatcacaccttttttttaattttaactttatgtacatacctcttttgttaagcgtcataaatcttaactctaaaatcatgtgaaatgttaaaatataggttatttatttgtaaaaaaa

SEQ ID NO: 6962 - DNA, 1848 bp, Diabrotica virgifera
  SmartBlast Evalue=0; Info=Protein Swiss cheese n=1 Tax= Harpegnathos saltator RepID=E2BKL4_9HYME
ttgggaaccttcactggttgtgtaaaagggttccatctcttccacaataaccaccatccggatagatcgtcgccgtagttggtcaaatcttgatcgtccacggaaccaacatcgattgccaaaatatgatttgctccaagacttcgcatgacatcagctggtaaattgttggtgtaacctccatctaacagtagatgaccatctataggatcacacagcggtggcatataaccagatagggacatcgatgagcgtacgtaccgccatagcgagccgtgcgaatggatcctcatgcaagacgaagtaatgtcagtagtaacagtaaagtaaggcaaccacaaatcttctatgtatgtatcggagaaggtactttttatcgtatgattaaaatctttcccgctaaacatagacgtcatcggataagtaaggtctagaatttgacgccaccactgagtcatttttttagaccactctctcgctttttgagtcatagtcgtcatgttcctctcttgacaccataaggctcccataaacgctccaatactaacacctcctaccatatcaataggaattccagcttcatagattgctttgatcattcctacatgtgcagagcccctagcacctcctcctcctaatactaatcctacggattttcctgttaaccatctggctaatcgagaaaagtcggagtgtacgtttggctgcgttgtgtgaatttttgagtataattcgttaattctattaactgattttctagcgaataccctatttggacataatatgtgatgatgtgacgacacccaacttctcatatttagccaagcaattgtgtttttaggtttaccgccttctcggtgcaacaagactaattctttttgagtccgtatggccaatcgttcaatttctttttccactttccctaaggaaggatgattgtcaccaagtcctactataagaatacaatcagcctgtcgtatacatctttgcgtccatgcgcttacagttaaatcacattgatatagcgagatcctatgttgatcttcttgttgggctaaccaatttgaaagtctgtattcgttatttgggtccatgatggaatttcctaatgtcttacgtactacatccgacgtcagtcttaaagttgatccaatggcacttaaacagtgattgagctcgtaagtaaaggcagtcaaaggtacatcatctgaagcagcaacgatagctaccgtcgaaaaattaactgacgatggcctagtatccacggcaggagaattagtgtcatgtatattcaatgccggcttcttccaagtacctagaatcctatgacctaataatttgattaatctggtaacaactattggatatcttaattttatggcattgaataatccctctggtaacttggccaattcagaatcacgaactgctatcactgttgtacttcgttttgtttgggtaaccatttccaccactccaattaaatctccttttccatattcacccaccagttcttttttcccatttttatgagttatcacagaacgcaatcgaccagacaaaacgatgtaagtagaatcgctttcgtcgtcttgtctgtatatggctctaccggattccataaatatccagtccagagcaaaatcaacttgccttacaaagggagataatcgccttactacggagtgagctatatggagaactattttgggttggtctttcattaaagtataaaatgtactcttggaaattaaagctattcttgttaagtgtttagctctaatggtgaaaaagcttggttcccccgtcagtactgctaatcctcctactatttcaccaggatgcgca

SEQ ID NO: 6963 - DNA, 1848 bp, Diabrotica virgifera
  SmartBlast Evalue=1E-179; Info="Beta-glucuronidase, putative n= 1 Tax=Pediculus humanus corporis RepID=E0VTV4_PEDHC"
gtatacgagaagaaagatgatacctcctacatcggttttattattggcgtgcttgatcattggaattgagggtgggatcctctacccaagagcatcaaaaacgagagaccttcaatatttggatggattgtggcacttttctttaaatgccagtgcctctagccaggaactttcaggcaatcctaatgacaaagacattcatttaatgccagtaccatcgagttataatgatattctcaccagtagtgaaggcagagatcacctaggaccagtagtgtaccaaaaaaagtttttttcgccaagtacttggacaaaagagggacgaaaaatttggttaaggtttggttctgtatgttattctgcaaaagtttatattaatgataagttcgcatttgctcacgcaattggccatctcccgtttgctggggaaataaccagtttggttaatgatgatgaaaacactatcaaagttattgtggacaatacacttacaccaacaacgattcctcaaggatcagttactacattgccaggtggaagagtagctcaaacatacacctttgatttttttaactatgcaggaattgatagacccatagctttgtatactacacccgaagtatacatcgatgacgtaaccatacacacttcagttcggggaacaacaggtattgtctcttacaaaataaacctaaattcgaacgaaaatagtaaaaataagttaataagttacaaagtcacagtcctagataaaaataataataaagttggtgaaaatgtggaagctagtggaaatatatcgattccagatgcacatctttggtggccgtatctaatgcatgatgatcctggttattgctataggttaaaagtggaaatttttgttgctttagatacaacactaatagacagctatactcagcattttggcatacgagaactattttggaacagcacctctgtcactatcaacggaaaacccatttatattagaggatttggacgccatgaagattctgatatccgcggaaagggtcttgatttacctctgatcataagagaccataacttgatgcgatggattggggccaacgcgtatagaacgtcacattacccctacgctgaagaaattatggatttggcagatgaactgggaatcatgataattgatgaaacgcctgcagtaaacatagacaatataagtgatgcactactggaaaatcataaacgagctatcacagaactttacaacagagataaaaatagaccaggagtggttatatggtccctcgcaaatgaaccaagatctcaaacggatgcttcagctgattattacaagtccattgtagatcatatgaaatctttagacaaaactagaccggtaactatagtggacatgtatagaaattgggaagacaaatcagaacaatttgtcgatataatcttcttcaaccgttacaacgcatggtatttgaattctggtgacttagatacagtggtgactgaaattgtgcaagagggtgaacactggcatgaagcacacaacaagccagtagtagtggcagaatatggtggagatacaatggaaggccttcattatttaccagcatatgtgtggtcagaagaatatcaagctaaactattgagccaacactttaaagcatttgatcaattaaggaacaagggatggttcataggggagatgatatggaactttgctgatttcaaaactgctcaaacgtatacaagggttggaggtaacaagaaaggcatatttacaagacaacgacaacctaaagaagctgcacatttggtaaggcgaagatattgggctctcgctaagaaact

SEQ ID NO: 6964 - DNA, 1846 bp, Diabrotica virgifera
  SmartBlast Evalue=2E-39; Info=Serine/threonine-protein kinase haspin n=1 Tax=Camponotus floridanus RepID=E1ZWG2_9HYME
aggcttagcgatagctgaagaagagctccaatttgaacatcgagatcttcattggggaaacgttttgatatctactgtagaaaccaataaaatagcatcgtttacactggaaaataaaacatatgacatacccacaattggtgttgaagttgcaataattgattacaccctgtccagaattgaacatgatggtgttgtaattttttaacgatcttggattggatccggatttgtttactgctgaaggagactatcaattcgatatctacagattgatgcaagagaaaaacagaaacaactggaaagactttgagccattctccaatctcttatggctacattacattctagacaaggcgattttgggtctaaggtacaaagccccgaaaagtaaactccacaaggcttacttacgaaaactcaaaaacgtaaaggatgacattttgtcctatcacaacgtcaaagattttatagttgctaatttgttagacatataaattaaaagtttgtattttgttatatattgtgtgtttatttttttacatacgtgcattaatgtttagataaggtagctgaatggagagtaaaagtaaaaaatcttgaattttgttttatatcaagtatgtataaatatcaagtatgtacaaattttccgaaaatttttagtggattaattttcgtctgctagtttatgattgaagaaaaatcaatgtaactaggttccaaaaatttattaagttctgctttattgaaaaatagcgattacaataacatatctgtataaaaaaatatgtaaaactttgcttattttaaaattacaaaaataaatgaattagatgagtaaacttagccttgatattatggtcaatttttttttaattgttggttaccaaaaatgtttgattatattagtatatagtgtatattatagtcggttctctaagctcagacacaactggctagtgattttagtaagtaattttgccaatttgttaaaattggcaaaaaaatattactaaatagtactagccagttgggtctgagtttagcgaaccgactatattagtatatagatgatccgatataaggttataaggtcgaattgcatggatctgtttaatgaataaaaaatgtttgttatatagtttagtatgctaacaattattataaaaaaaggggtgcatgatataattttgttcttactataattgaataataattaaaaaataattttcttataattaaaaaattttttggcccgggtagatattatttcggattttttggatcattctaaacaggaaagaacttttgtaatttttctcttgatcgtttttgagttataaacaatttaaaaataaaaataaaaacgaaaaatgacgattttcaaggctcaagacacaagtaggaatattatttttgtaatcatcaatacaaattcaagttcaattgttatggggaaggttccttatgggaagacgggcgatgggctgcattaacaactaaaaaacaatgctttaaaatgaaataagtccaaaatacttatcaataacttaaagtataagataaggtatgaacttgaatttaggtacttcgtaatttcaaagatgatattttttacttatgtttttgaacactgaaaatcgtcatcatctttctttcttttttcagtattaaattattgttaactcgaaaacgattaacttagagaaaaattacaaagaccttttttgtttagaatgatctaaaaaatccgaagtaatatctgccaaagtcgaaaaatttgtttaaaaagatcattttttaattattaattaattatagtcagaaccaaattagatcggcc

SEQ ID NO: 6965 - DNA, 1847 bp, Diabrotica virgifera
  SmartBlast Evalue=1E-95; Info="RNA-binding motif, single- stranded-interacting protein 1 (Fragment) n=2 Tax=Formicidae RepID=E2BHL6_9HYME"
gtccggttgacgaggggagtggcgaatgaaaactgtagttgcggtagaaacaagtgccggcgagatccggttatgtagtagggctccctcgtaccgcttagccctaaaaaaaatacaaacaagtgccgtgtgataaatatgacctcttcgtagtgtgccatgacatttaatacttaaataatcatagacacacccctataattcaactcatctgtgataataattatggccgtacgtatggacaactctacacccaatagaaaattaactataaagttacgacaaataacggaagcggctctggcggcatccgaccgacgtcagcctcgacgcaaccctttggaggcggtggaggtggcggtggaggtataaataataaagggtgcggtgcgggcttaggtaccgtaggaggcggtcccatggccactcagcaccagacggcaggcgtttatcgcggtcaatggagcaacgtaggtgccggacatcaacaccaacatcctgcggctgctcccgcaggctactatcagcggtaccctaacacggtacaaccagtccaagtacaagcacagcttcaatcgccggcacagaattcctacacgcctaatagtactaccaccaatagcaattacaataattctaattcgtacacaaatcaaagagtgccaacagcgacatctccgtcaaatgctagtagctcgagtagtcacaccggcagtcaaagcggcaacgtttcgacctctctcagcaacaacatgcctaacaataccaatacgtcttctaacaattcctcgtccggatccgagcagctttcgaagactaacctttacatcaggggactgaatccagcgaccaccgacaaggatttagttaatatgtgtcaacaattcggcactatcatatccaccaaagcgatcctagataaaaatactaacaaatgtaagggttatggtttcgtagattttgagagtcccgccgctgccgaaggtgccgtgaaggctttaaccgcgaaaaacatacaggctcaaatggcgaaagtgggtatctggtatcaacaccgtagaaaagccactcaacaggaacaagatcccacaaatttgtacatcgctaacttgccgccgaattttaaggaatcagacttggaccaaatgctatctaaatatggacaagttatatcaacacgtatccttcgggacgcttctggtatatccaaaggagtagggttcgcacgaatggagagcaaagaaaaatgcgagtacatcatccagcacttcaatgccaaaatgctaccagcaagtaaagaaccgttattggtgaaattcgccgacggagggaacaaaaagaagaacatgtataaaaataatgacaacgttaagatgtggcgagacagtgcagaaggtttaacggcggttcaatatgatccgtctacattggcgcaaaatggagtcgcaggtcagcatttggtgccgactttaacgaattacaggcattacaatcagtttccttcgtacactactggacaatggccgttcccgtatgttatggcgcctccattggccactgtagaggaaagttacaatttgcctggacacatggcagctcagtataagaacgacggacaacctcctcggggaataccgcttatgatgccatctacagaaactactgttccttatacaaatatcatacctcagctcacaacacaaatgggagcaatgcagataagtacgggatcatacatctcccctcaatattcgtactacccatcaatagtacacgctgttccagtcgattctgaacacacttccaacgcagcaagtccagaagatccataccaagcgtaccaaggg

SEQ ID NO: 6966 - DNA, 1841 bp, Diabrotica virgifera
  SmartBlast Evalue=7E-33; Info=Eukaryotic translation initiation factor 4B n=1 Tax=Camponotus floridanus RepID=E2AQI3_9HYME
ttacagtggaaataaatatgtaattcatcaacacaaattacaataaaattttcaacaaaaaaatacacatacaaactggttttttttgtatttaacaaaaaaatatattctatgactaaaacaataaatatgtaaaaccgcttcacattcgttttaaaaagttcatattttattaaacacagtttattcaaaatatttacaccatttaataatcacgtattgctaatcggaatctgtcggcagaaaagcgaacttattgttggctgcgaagttcgggggttctggctcagtcaattttggcatatccttctcgtacctgtctcttttctcctctcgcttgggcttttcagacttatcgtgtttgtgcctattatcaagtctgtctggcgatttgtgatcatttttaggaggtaattttctgtcatcatagttctttttaggtccatctctgtggtccttatctctttgtgggctatcatctattctgcgtggtggtggcctacttctttcaatcctatctacattttttcgttcactattttcatgctttctattctcatctctatctttgctactttctcttggtttatcagcctctctggcaattttctcttctatttctctttctcgctgcgctgtatctacaggtttcgcactaccgaatatagaagctgaaggcactgattctgtagtatttacaggtacaacttctactggttttgtccttggtgctaacattaattttggcctttcacgtggttccgacgactctgtatcccggtcatctcttcttgaaaatccatcccgtctatctctgtctttatcatcccttctgtcatcaaaccttcttccaccaaagcctccacctcttcgatcatcgtcgtatcggttgcctctgtcagagtcacggaaattgcctctatcacggttgaaacccctatctctgtcgcggtccccatctttattttgtctatctccatctctccatccaccgggccgatcatcaatatcttttctatccctattactatccctatctctattgaagtctctgttactatctctgtcacgtccaaaatctcgattgtccctatctctaccatagtcacgatctctcattccttcacgagtaaaacttttgtcatctctatcacgcattccttctctggtaaatcctccgccacctccaccgccgtctcgatccctattaaaaccggttcggcggttatccatactgtcagaagatgcccttggtccagaccgccaatcaccaaaagaatcgctgcgatctggttgcctgtcacgattcatgtccattctacctcttcgcctatcattatccatatttgatgctacttctatcctcattcttctagattttaatgtggtgtcacgaaggaaaagtgcttccaataaactgtctctgtcttcaaattcaatatatccataacctttcgattttgattctcctcctctgtcatcttttggaattctcatattggctatcctcatgttattaaaaaatgctgaaagttcatcttcatccacgtcgtaaggcaaattcgaaagataagcccaaaatggtggttccataggaaccgtattgctaatatcatcataatctcttgaagcttttggagccgtgggtaacactacattgacagcctttcttgtatcatcataatcttctacctcgtcggcccaattgatatttgatttgcgaataggttgaacaggaatggagccggtagtttcctgtaagaaatcggtaagagcgaacgtcttccctttggttttcttccctttttttcctgatgccatgtttcaacgaaaaagaaatg

SEQ ID NO: 6967 - DNA, 1839 bp, Diabrotica virgifera
  SmartBlast Evalue=8E-38; Info=G-protein coupled receptor Mth2 n= 1 Tax=Harpegnathos saltator RepID=E2BKF8_9HYME
ctgatctgcagggcttggctggagtacgagaaaaataccaaagaagacctcggagggaggatgctgagagaggacttagaggagatgggtaaagggggttgatatcggtatgacccaagatagaagcctatggagaaatgtaattatggaatcagaccctgcaggtacaggcggaagtgacaaaaatcaggaaaaaaagatgattatattatccatatgaaaaaattatatttaatgaaaagcaattagaaaacatgtaacactttttaaaggtttggctgcagtaaatcgatgttgtgtatatacctagtatattgagatatttttggataactaatcgaaaattttcaaaataaaatttcaacttaaaatattggattaggtttaaaataaaatttaaaactaaataatatcacagttggcttatttattaactccgttcctatgttttaagctgattcgagtttgagaggttgtgaatgattctgtgttactgaggtaagcatctcttcgtcgcaggtgcagtttcttcaagaagtcgttgtagacggatcgtttgcagataaaaatgatgaaaatgtagacaccttgtaaacaattgatgcagtcaataactatttcaaaatttctccagaaagtccctgcattgttcaagtcgacgaatccagacactgtgtccacaatgaatgttattcccataataactgctagttttattattaaaataacttctctttatctcgattaaatttaactttcttctcattttttgtatcatttattcgttctatttcattttttatccgtaaacaatacaaaatggtcttcagaaaaagataggcgttgagtatttgaatcagtagatgtggaagacggaaaaacaaaaatggggcataatttccaggtctctgtactataaagcaagcgcttgtcccaacatatggtcttatagagtctggtagagactggataatactcaagatgtaaattagaagagttaaaagcagtggcatgccccatccataagtcatataaattgccagtttctttaattctgttcttctttggtaaacaccaatagaatgttttgtagagccaaatgtgagccagatgtcacagcacataacatttaaccaggcgaacgacactgtcgcaaagaatatgaggcaaaatcctacaagctggcatggaagatcagtgggttgcatatcactttgagcataagtcagtaatgcgtacatacacaaggtcgatatacagtaattaatcaaaatctttccgaacagctttttcgtctgatttagcaaaatgtaaatcaaaatagttaacccaaggaagacacacgataatatttttggccatttcgtgtaattgaatttttgcttattggctgctgattgtatacagttgaaaaagaagaatccattagctttaggactggtcgaatgttcaatgcagtatcctgtaaggtctgttggattttcgtacacaaaagagttggtgatgttcttccagtattgaaatttgccattttttagcagattaaaaatgtatctgctctccgacattaggaagaattttccactgcatcttgtggtgttgtgtacgattgcaaatggttcctctggatcttcaattttcgttgaaaacttcagatcaattccattgttataagtgtccacacaatttgatccattgatgaaacttttcccatcacgacaacactttttaacacatcgtatatcagaacatacatcctcatctttacaatgtcttcgcacaaagcctttctttggtttcatcttcacaatactcgccttcagatgtatctccatgtcc

SEQ ID NO: 6968 - DNA, 1845 bp, Diabrotica virgifera
  SmartBlast Evalue=2E-20; Info=Endonuclease-reverse transcriptase n=1 Tax=Bombyx mori RepID=D5LB38_BOMMO
ggcaagatatttaagtggtataaagcgtacaggatgtttgaagatgttttgaaaggtctgtaacgttttctataacaagtggccttaggatttttggttgcgtgtacttcgttttgttggtgtacattattacacccatttttatatccgcttctttaattgccagagccagattgaacagtatacatgagagagggtctccctggattcgttacattcaaatttttcaagagatacttttggtaaacttgccaactgatttgttactcctagctctttcattgctctgaacatttatcttctatttagagagtcgtgggttgccttgtagtctaccgcaaggtgatacaatagtaaacatgctattcatatggtgaatgtaggaaaatttagcaaaattatttacagtaataccctcattatggtacacccttgaatttcggataaaaaacctttaacctagctactctgttatcccccagttcatcttttctgatgacgtcacaacgcctgtgatgacgtcaaaacgcctacgataacatcatacatctcgagtagacctcaaataatagtcttattccttaagtgccatatccgcgacggaggtcggcaatcatcatagctattcggacttaagagacggctgctctgaaaagttcatttgacgtacatccgtaccattctctcaggttaggcaaccacgatactctgggtctctctatgcttccttttccttgaatctttccctgcataatcaattggagaaagttgtacctctctacacatgtagtatgtccgagatattctaattttcttgttttgatggtatttaagatctccgtttctttattcatctttctcagaacctctttgtttgtgatgtgttgtgcgcgatattttcagaattcttaggtacacccacagctcgaatgattggttggctaggtgaaaacgtagcacctagccaacctaactcttagctccagctttccaatctcttgtgcagagcacttttctcgtgttgttaaaatttgctctagtcttttctattctgatttcctggaagtaatcacctgtggagttgatcattgttccaagatatgcatattggtcgactcgttcgacatagaatccgtttatgaagagattctcgttatttatttgagttttcgatattctcataaatttgtcttcttgacgttcaatattaaaccttattcttgtccaaactccgctattctggtcaccagcctctgaagatctccaatattttcagctaagatgacagtgttatccgcatatctaatgttgttactaatgcattatctaatgtttccttaaaaacatgcaatacttcttcagttatagacttctaaagacatccttgaacaccgtgttcctagaaactgatctaacagaaagaaaagataacaaacggaacaaaaacgaacaagaactatacaaaaataagtatattaacaagttctcctttttcaccagttctaggctcttaattcaatcttccagaactcaaccctccaataaatttccaataacaccacaacctataacttctataacagaacaaaaacttctcagtacaaccaagataccgactttctctgctttaattgaacatcctgtataaatgaaaccttcagtgataacaataaataaaatattttctctcctgtttacacattttcagttcagtgatacaaacgtgacggaaacaaaatgtgtagatgcacaaaatgtaaagcaactttttcgctaatttatgtacttgaatagtctaatattagcagaaaactcaataaacatgaatagatgcataatattttt

SEQ ID NO: 6969 - DNA, 1842 bp, Diabrotica virgifera
gcggagaaatcttacaacttttttaaataattcatttgtcaattgaaattgtcaaattgacgtatatttcatatctattgtcaatgaagaagaaaaatttatgttgctccacaatattgatatgatatgcaattattatataaaagtaaatttaattaattgtattttgattgtagtagtgcatttaataattaattttatttactacatacaattgtttaccttttaataacataaccttaatattactttttcttataatttttttgggctatggccatgacaattgtccagtaaccaggaccaatatgattggccaatataattaaaagtgcgaaaaaagttgccgagctatgaaaccaggtgtcgcttttccgaacttgcacggtcccaatagattttcaacagtgttggcgataagctgcattcctgtcccttattcacaatgaagctattggataactgttgttgattgattgggtgttgttatagaatttttgcactgcttttattaaagttatattaattagagtatttccaggacttgtcataatttacacagtgatactgtggtctgtgtcataatttacaaagacgatcttgtgtatggtttatatgtgacttacaaaaacaagtgattatttgaagttttcctattaattttgtgctaatgtatcaatacattattagtttgctatagacaccctatatggtagaaaatgttttgatataatacataaatataggttaaatatgaaagacacagagatattttaaggtgaacttgtatgattgaggtatttgacattcgacgtaggctgaacataatatgtcagtgttgccatatcgtcaattatttcatactctcacatctaaaattcaaaatcgggcaatttattatattatatttactgttataatgtacgtaagaccgtcctccaatttgtaaaatttgcgccaccatgtgaagcactatcgaaatatcatatcccctctgtcaacccttccagcgaatgctgaagccatcgaaaaagttcgtaattaaagtaggttgtggaatttacatttaaatgacgatggttaacatttcatatggacatttttgcaaattgttagtggcagtatgtgacatttgtgtcattatcgttgttagtattcaaagttttattaaaagtggtaaataaataagttaggttatgtgtagcttattctatgcaagtggttaaggtccaaagctctgttatttttattccacaggccacagactatattagtttcgatggctttatcccaggcaaccaaataacgtttataaaaagttgaaaagacgtcataattattaccaaaccacgtcagtttatcacgttttttcgacgtcgaaagtcacgtgaatttgccccaccacaattcacgtcatttttatcatgttttacctacgtgatatcaataacgtagtttttatgtcgttttttagattgtttttcattttatgggtttaaaaatacacaattattcgtatgggcattgttggtattgcaatttttcatttaactgttttaaatttagcccataggctaaaagtaaaaccaaatggaagactatctaaaatgtatagaattacaataccctcaatgcaacaaatatagaattttcactttttatatatacttactgcatcaaaactgaaactacatataaactaataaataatttattaacaaattaatttaattaaactctaattaaacacatcattagttcattaacagaaaataaacaccaaaacaaaacaaataacataacctcaaacagttttcatgaagaactattgcacttattgag

SEQ ID NO: 6970 - DNA, 1842 bp, Diabrotica virgifera
  SmartBlast Evalue=1E-174; Info=MAP kinse-ERK kinase n=1 Tax= Bombyx mori RepID=Q3C2L3_BOMMO
gtgacattgaagattttatccaaaaattttgggtcctagttaaatgtgtctcctttttatatatgaattctgtcagagatctgcaatagtgttcaatttcctgtaatctgtaattaattagccacgtattattattatctttgtacctatatctatcatattcattattcatcataggttctatcacactacactataagttaaaggatgtagtcactcccaaattcggttttagttaatagataaatataaaaaattcaatgggaaaatcccaatagtctattcccccaatagataaatataaatttgtcttttaaaaaatcaattgtctcatagtgtaataaataaatgtgtatagtaactaaaaaagagttccttatgtgcaaattgtaattaagttaacctccgaagttaatttataggtattatagcagtaatttctacagtagaaatgtaattgaaatatttacaatgtcaaaaaataaattaaacctaacactacctcctggttcaatagaccaaacaccggcggtaacaccaacatcatcatttcaagaaacaccagttgcaagtaaccttgtgaggggaaatagtattgaaaatttaactgcacgtatagaagaacttgattcaactcttgaaatggatgatacccagcgtaaaagaatagaggttttcctttgtcaaaaagaaaaaattggaggagagttttctgatgatgatttcgaaaaattgggagaacttggttctggcaatggaggtgttgttaccaaagtccgtcacaagggcagtggattaataatggcaagaaaacttattcacctggaagtaaaacctgcaataaaaaaacaaattattagagaattacgagtactgcacaaatgcaatttcgcacatattgttggttttatggagcattttatagtgacggtgaaattagtatttgtatggagtatatggatgcaggatctctcgatctaattttgaagagagctggccgaatcccggaaaatattttaggtaaaataacatttgcggttctaaaagggcttagttacttaagagacaaacatgcaataatgcacagagacgtgaaaccaagtaatatactcataaatagttcaggagaaatcaaaatatgtgattttggagtatccggtcaactgattgattcaatggccaattcttttgttggaaccaggagttacatgtctccagaacggttacaaggaacccactattcagtacaaagtgacatttggtctttgggactctcactagttgaaatggctattggaatgtatccaattcctcctccagatgcaaaaacacttgcatccatattcgggcctcataatgatagtgattcgccagatcatactaaaggacccagacctatggctatatttgaactcttagattacattgtaaatgaacctccacctaaactgccatctgggatctttacagacgattttaaggattttgtagacagatgtttaaggaagaatccggatgaaagagcagacctcaaaactctaatgaatcacgcttggatcaggaaaactgaatcggaggatgtcgatatcgcaggatgggtctgcaaaacaatggaaattcaccctccaaataaatagctacaattatgtttaaatatttttcttacattaaaaaaactctaattaatgatttagttaaatgttatatgaagtaaatagatggtaatacgtaatatcagaacatattccagtgataaacgtacctaatatctaaaagttgtatatttattttttaaatttcacttagtttacatgaaataaaatataaattgaatattgaaaa

SEQ ID NO: 6971 - DNA, 1843 bp, Diabrotica virgifera
  SmartBlast Evalue=1E-116; Info="Golgi phosphoprotein, putative n=1 Tax=Pediculus humanus corporis RepID=E0VAJ7_PEDHC"
cagtaaacgtcaacattatttagatatgtaccctgaaaatgaatcgtagtgagggttttgttaaaagaaggaatgtaacaagggaaaatagtgagggtttaaacaaagaagaacaaaataatgataagaaatcgagccgcgacgaagatatcgacgatggtgattctaaagaaacaaggttgacgttgatggaagaggtcttgctccttggtctcaaagataaagagggttacacgtctttttggaacgactgcatttccagtggcttaagaggatgtattctaatcgaattggggcttcgagggcgggtcgaactggagaaaactggtatgagaagaagaggccttcttgcgaggaaactaattattaaaagtgacacccccattggagacgtacttctggacgaggctttaaaacatcttaaggagacggaaccaccagaaacagttcaaagttggattgaatacttaagtggagaaacctggaatccattgaaactgcgatatcagttaaagaatgttagagaacgtttggcaaaaaatttagttgaaaaaggtgtgcttaccactgaaaaacaaaattttttattttttgatatgaccacacatcccctaacagacaatgtcacaaaaagtcgattaatcaagaaaattcaagatgccgttctctccaaatgggtaaataatcctcaacagatggataaacggatgctagctctgatattcctagcacacgcaagtgatgtactcgagaatgcttttgcacctctcaacgatgatgattatgaattagcaactaaacgagtaagaaaactcctagatttgaatttcgaagaagaagccaacaaaccaaacacatctgatgtgttgtgggctgttttcgctgcttttactaaataaaaagtgtaacaagtatggttattttttgccaaatgaccaatacctcaaaatcgaaactaattttagatcttttgaggtatagaattaaaaccttataagtttatttgatggtttacaggtaacttttatagtattcataattgtttacatactaacgatacgattagaaataacattaggacgctgaagtacttatacaactacatattgttctcatgtattttctggtcgtatagtccaatatatgtctccgctttttataaaactctttgttctcaggtaaataaagtattatttccaaaatctatatttgggacattactgtaaagcctcatttgacttagaggaaattaaaattgctataaaagtttcatcccatttgcaaaacattcgtattttatatttttttactaagtatcacatcttttaggacctttatatctaaacaagagaactaagagacttattaatattcagttcagcgggatgctattactcaatttgtgaaattatatataaacaatggatcattttatgaaacagttagatcccttgtttatggattttcacaccttgtaaaatagtaccactcagctgaatactaatgactcttagttcgctggttccactatacatatttattttcatatttaacatagcataatttttgagattccttcaaaaatataacgtctatgaaatatcactattaaatacaaattttaaagtatataatatatagcttcaaaaatcaatctgagaacaaagagtgctagtatcatgttatttaaaccaattgatttttctaaatttctatatcagttaatagtgttgttttatgaacttgttgactgagtaggagcatttttcgattccaaaaccatggatattaatttctttatgggtagttttttttactatgggacatttctttgtacacaagc

SEQ ID NO: 6972 - DNA, 1840 bp, Diabrotica virgifera
  SmartBlast Evalue=9E-57; Info=Endonuclease-reverse transcriptase n=1 Tax=Bombyx mori RepID=D7F170_BOMMO
acaaacggattcttccaacaccgagttatccataaatatacatggacacaaaatacccgagggctgaaatcaatcatagactatacaatcataagacaaaagactaaattgattgtacaggatgtgcgggtatatagaggagccacttgcggcagtgaccaccatctattaaaaacaaagctcacaataggaatagatagagcaagagatttaaaagaagctgcagcggaaatagaaaaattaacagaaaagaaatacaacctaaacagcttagaacaagaaagcgtgagggatttatacaggagtagattagataaaaagttagaaaccatgcaatttaccagcaatgaagagcattatcattatataaaaacatgtcttcaggaagcagcaacagaggccctcggactccaaataaaaaaccacagaaaaactccgtattggtgggacgaagaaatagaacaagagattaaaaataaaagagagaagtataaaaaatttctgaacacaaggaccgacgccgataaggtagaatacaagagggtccaagctaaagtgcgaaaaatgatatgccaaaagaagaatgaggcttgggagcaaaagtgtaacatgattaacacacatttaggaggacggagaagtacagaaagttggaaagtattaaaatcgctacgacaggaaaagaaaagagatataatatcagcaatcacaccggatcaatgggacgaatattttgaaaaactcctaaatgaggacagagcggaatttttaaataacagtgataccagcaatgtaaatatcttagcctcaccattacgggtaacaacaaaagaagtagaagaagtatgtaagtttttaaaaaataacaaagcaccaggaccagggaaaataccagctgaactaataaaatttggcacaacaaaattatatgaaaacctggctaaactctttcaaagatgcatcaacggagcggaaatcccagaagaatggaagacatcatggatatccaccatacataaaaaatgcagacgggatcaatgtgacaactacagaggcatcgctgtaacgaactcgatcagccgaatatacggaaaactgattaaaaataaaatcgaaaacgaatataaagatatagaagctgaagaacaggcaggattcagggcagggagatcaacggttgaccatctgttttgtattacacagattattgagaagaaactggccgtcaaccaggaggtgcatctgttatatgtggacttaagaaaagcgtatgatagcatcccacaaaacaaactatgggaagcattagagaaaaccaatataagcgcaaatttaataacagcgacgaaacaattgtataccaaaactgcatcaagggtgaaagttggaagcaggctatcgagaggattccaaattagcaaaggcctaaaacaagggtgctgcctttcaccgacattatttaagatctacctcgaacaaactctaaaactttggaaacgcaaatgcaaaaacatgggattaccgatcagcaacaatacaatatacactttgtcatttgcagacgaccaacttgtactagcgcaagactacgatgatatagaatatatgacaaggaaattaatagaggagtacaaaaaaggtggtttggaaataaacataaagaagaccgaatatatgtgtatcggtgggacacagcaggaccttacactggggaatggcgaaattattaaacattgcgacgcatataaataccttggtatgaccatcacacaagaaggaagcgtagaccggacgatagaagaagaaacaaccagggaagaaaagcaattacccttctcaa

SEQ ID NO: 6973 - DNA, 1834 bp, Diabrotica virgifera
gtgtgtttctctgcgcagtcacggtggtcaactgtgaaaagtttagctttggtagattcggagagatttttcagcgctgcctctccgtctatattcttaaatcaaattacttgtacagtgatcaaataattatgaattagtagattattttgtgaaactttctgattctggttacattattcaaacctgctaatgtacagcaattaaagcagcttggtttgttcaacggaggtactcttatatgggtcgattacacagagtatgggtacagcacgaccaaattcactttgtgtttgagttttggatgcgcactactgttaatgttcggtttttccaaactttttgaattttattttggtaacgtcttgccaagtaaaatacctgcgcggtaacaaaataaaatttagcaaacggggaaaaaaccgaaggtcaacaacagtgcgcatcccaagctgaagtacggagtgagtttggtcgtgctgtacacctctatcttacttaatacaaagactctgatctatcttctagccacaccatgtgacaaacttaacttctttggatcaaaataaaatttttaaaaaatgtcgattctatagttttgtgaggccgctctgtccatgcagtcattaatgcaactgaagctgtaacaagtaaataaattgataacggattctgattcattattaaaagttatggaatgataatgataaatctggaagtttgctagttgggttccgagaaaactagagtctatgaaatggtatagaatttaattgtctcttagtatatagtcgaagcacatatttctactaacctacttctgcagaaagccttttcatatccacaaacttctattaaaatgaatattgttgcacctatcaactgtcattattgtacagactactcgtatgtttaaagatattatttaaataaatactttaataaatatacccatttttgcaaaaaatctgtatcagaaatcaaatgtaattgattaaccaaaaatttcctcgaaatcaagagtactactactagaactgccaatacgatcttaccaattataatataagtgttagaagttggtaccaacaccaaataaaattaaataaagtaaataccagagacgctaatttaggcccttcgtccaccgccgcaacgcaactacaactggactgtgatgcatctattgccaatgaatcgcatcgtttgactttcgtccaccaacgcaactgatttgcaaccagatacgttcaagatgtcgaggagttcagatgacgatgtcgtagtaatggcctggtacacaggaaaaattaaaaggaaacgaaattggtggactcatcgtcatccttatatagcaaatgataaaaatagacaagcttttacaggccgcgaagaaattggagacggacgtgaagaagtttcgtttattttaccgaatctcgagacgactcttcactgaactagtaaaaattgcttcggccacacatggcaaaaagggacactctgtatgtagttaatattgccacaaaataatgccttcaaaatccacaaaatgtgcatgcaaccgttgtatggcgactgccatgccagttgaatggcgatcagttgcgagtcaattcgttttacgttgctttgatgagctgactttgtactaaaagcacgtgtccgactcctagttgactgtgtaacaacaacaacgtaacttttgcagtagagttgcagttgtgttgcggggtggaggaagggcctttcttcttgtattttgttaatttttatcaacattttattatacttatggcgcctactgccgaaaaccaattgttcacatgaaatg

SEQ ID NO: 6974 - DNA, 1832 bp, Diabrotica virgifera
  SmartBlast Evalue=2E-72; Info=HEAT repeat-containing protein 2 n=1 Tax=Camponotus floridanus RepID=E2AAI4_9HYME
cattttttgtctaaaagtaattcatttattttcttccattttcagcagttttttgtgctatttttgtactaatagtgatatctaataaacaataacaatgtccgcacaagacaacgtgaccacccctgaggaattcgtagaacacgaaaatgaaagcagttacaagcctccaccagagaagaccatcgaagaaattctacagatcgatcaggaggatgaaagtttgaggaaatacaaagaggccttactcggtcaagcacaaactggacctgttgtagtggaaccagacaacccaaagaaagttatagtgaaaagactggtactagtagcagccgataggccagaattggctctagatctcaccggcgatttgtcaaagctcaaaaaagaaacgttcaccatcaaagaaggcgtttcgtacaaaatcaggattgaatttctggtccaaagagaaatcgtacatggattgaagtatgtgcagaagacgagtaaaatgggcattacagtcgataaaatgacacacatggtcggatccttcgcgcccaagactgaaatacaatcctacaccactgctgccgaggatgcaccctctggaatggtcgcaagaggaacgtacacagtccactcgttgttcacagacgacgacaagaacgagcatttgaaatgggagtggactttcgagataaaaaaagactggaaagattaagtttcctctgggtaagcagtcagtcagggtattttttaaatcctaagccttttacccgccacaaatactattttatataagtataacctttttgaaagaaatttaccaaaaaaacctttttgaacattttgctgatgtactattaaaaatgagtcagtattttgccttaactgtaaattgtgttatgaatataatccggtctgtctatccaacaaggtaatccaatagtcctttatatattttaagtttatttttattttatatttatagaaagttctgtttacttattcattgtttattggaagtcgtaagtggctatagtgcttaaccttgtgactttgtaaattcctcaggttgttaataaaatgtatagacaatattgcgtgtctttttctatagaaattaaacctctcaaagaaaatgagtccaatctcagcagataaccgaatcatcaaaaggaacaacttgcggccatctctaacatatggaattggaatatttcaaatggaaactgggacagaaaaatcacatatcggaattatttagtaattgaattaagtatttttatactgaatttgaataataactgtatttaaaacttgacagtattcggtaatcgatggtgttagtcttgaatgggtgaaacaaaacaatttaagaagaggattcctagcaaataaccgaatcgccaaaagaaactaattgtgccacctctaacatatttaaaatattttgcaatgggaaaaactacacccagaaattatttagcgactgaattgaaattgttattaactttattgtaatcattacctggggttaaaacatgaaatgaagatgcagaaatcatctctacctaagaatttataatataggtaaacctggaaaattggaaatagaaaaactacatccaggagtttagttttaacaattactattgactgtaatacatccaactcccacagaaatctagaagcatgttgccactagcgcgctagcgccactgtcggcttgaagtgaaactacgttttgaaaatataaaatttgaggtaaacattcaaatttaattttataaatttttgaataacgagctaattttgttaaattaaataaaaataaaaatagttcc

SEQ ID NO: 6975 - DNA, 1835 bp, Diabrotica virgifera
  SmartBlast Evalue=2E-25; Info="Juvenile hormone-inducible protein, putative n=1 Tax=Aedes aegypti RepID=Q175M4_AEDAE"
gagtatatgagtatattacatcaatctttcaaacagagccaatatagttcttgaaagtcttctctaattctatgaagaggcatttggttccaaacctcatcgtataagtactctttctcgacggtatagaaatgcatagcttcttctggactggattcatcttctccagtctttctgggggtataaaaataacggaacggttttgagtagctatatatacagcacaaggtttaaggtcgtccactgaggaaataaaatctttgtaaggaaagacttcttcaacattaaccccatattcttccaaatttgtctttacgtggttatagtattcgtccagaagttttggcaagtacttttgtctggtttctatatttgtacacacctgagttagcaccagtagttccaacgctggcggtacgtatctgcacatttgaaaatcgatcaaataacaagctatggggtttttattatcatcccatttgaacataatatttttccaccagacgtccccattacaaatgacgttaacgtactttttggattttctgaagcctgaataaatctttgagtatacatgggttttaattctgttctggaactcttccatagacatatctttaacaatttctggaaaccgttctgcttctttttgcatacttcgtagattacaagccgtgaacgcatctgatgagtcatggataaacatttctgtgagcatctctggaaaatactcatccaaagtcttcttgacacccgataaagctgctaacttatgttcgagtaaaagggaagttgagtgtagcttagccatttccttgaaagcaattgaaagatgtttatagtcaaggtcttccaaaggtggagattggtaattatccaccgaagcatcttcgaaagctagaaatgattgagattggagataacattcaggggcaaacttactaactttttcgaaacccaatttccttgccatcgctataaatcgcaggtagagctcagcttcttttttgacagatattttaagccaacctcctcttaattcatcaatgatctgtggcacgagcttgatgaaaaacttatgggtttcttccttttttaagcgatttacaaggatgtttagttttgcgtattctcccatgaaacccatgctggaatccaaataatcaactttaaaacttactaagtctacatcatctgttcctaattttgcagcaattatctcgtagcaatcttctcttgatagtgcaggagagactgtatgttcatttagctcttgaagcatagattttaatgctacagtatttttacaaggcaattctagtgatttaagaattacattaagctttacaaaaggaataagatctcttaccaagctcttgtattctggtttggtcataatgagagcgtgaagctttgattgagcttgtttttgaaccagagagtcataggcataattcactatactattccatgcttgtaacctttctttctggtttgtgacaagaaaaacattggtaaatacatgaaacgttatgtttttaaccgcatctttctgatattcttgataattatcacaaaactctttccaatgcttttcaatagcacttttcatagatgcgtattcaatttcttgagaatattcgtcatggagtagttcccaaaacagtgtcaatgcattttcactacattttattcgacctccgttactgttagctgtggatatgtctattaaaacttctaatgcacttgtttgcattgtagattaaacttaagtgctcactgttgatattgtttgttcagttacaccaaaataattagactaatgcacattcctg

SEQ ID NO: 6976 - DNA, 1839 bp, Diabrotica virgifera
  SmartBlast Evalue=1E-148; Info=Xaa-pro dipeptidase pepd/pepq(E.coli) n=1 Tax=Aedes aegypti RepID=Q16XF1_AEDAE
gcataaatatactttaataactcttaacaatatttcaaagttgacactttaatacgaatattgtaaaacactgtatcacatagttatagtaatactagaataatcttggtaaaataataacaaaaataatatgaagacgaaggattatccaaatataaagttcctggcatattttattactaggcgttattttcaatattaggagtactttttgtcgtcatctgttcccgctatccagtcttcaatctcctggacagttcttggcactttggttaaatttttaataccatcttctgtaactacgacatcatcctcaatgcggacaccaccaaaattcctataagtgttaataacatctgcgactaaaaatttagacttgatcggatcagctagggcattatctaataggatattaatgaaataacatccaggttcaatagtcagaaccatatttttttctaaaatcctagcagtcctcaaactttttaatccaggttttgtaggtctttcggggtttccttccaaataacctccaacatcatgcacattcaaaccaacaaagtgtcccaaaccatgaggttgaaagataggtgcaatatcagctgctatcatatcatctactgaaccctgtagaagtccccctttcttaagttcctccagcaagactctattggccaataaatgcatatcggtccatgacactcctggtttaccagctttgaggacagcttcatttgattttaaaacagcttcgtatacgattttttgttgtggagaaaatttaccgttaactgggaaggtaactgtaatgtcagctgcgtaaccgtagtattcgcctcccatatcaaataggcacaattttccatcttccagttgaaagttgttgggagctccagcgtggccatagtgcaaaacagccccgttaatccccgatccacatatacaagtatatgcaacatgtctgcatccgccatgtttgtagcagtggtttaagaattctgattcgcactgatattcgaatgttccggctttggcgaatcgcattacatgcctatgtgctgctgaagacacctcagtaacgtatttcagtacatccagctcgtagcttgttttaattactcgaagatctgctattattggaaatagagccttattgttcactttaaacttttcaataccctcaaaagtagctgttttagctgtaagaccactgtcactattaacaccactcaatgtcagtaaagtctctctgtttaggttttcgagtacttgtttcagttcatccacgtagtgtacatgatgtgacttatacttctttttaaattcatccagaggagtgaggggacccatccatactgcatactctactggaagacggggaaaaaataaatgggaatctcctgttactacatctatgattccatagcagtcaggttcagcgactccaaaacaccaattgaagtatgcttcctgtctgaacagatatgttgtgtctgagtcatagatggacacctcagatccaccttggagaactacgacagagtttgctatatcttttttcaatcgttccacaagtctctttctattggtttcatatagtatgggtggaatttcgaaagtgtgagcgcccatagacagttttcctacatgtttatttgccattatgactacacaatctgaaaccacaatagctgataaatcctcttttataagtcgtgataagtaatctaggctgatttgtttatttatttgttgtgtgtgaactataaaatgtaaaatcagatctacgaaatcactttgtaattatcgggtctggtattatcgtacactcactacata

SEQ ID NO: 6977 - DNA, 1840 bp, Diabrotica virgifera
  SmartBlast Evalue=1E-144; Info=Exuperantia n=1 Tax=Tribolium castaneum RepID=D6WRU5_TRICA
gcacgtgcgaaatgcatttttctgttccgacataaacctaatttattttcaatttataatcgaagctaaccggtgtacagaacaaaatccatagatttattttctagtcttttctactgatcggatagtctgaagattttaacattgtgataataaataatttatgatggtgcagaaggagagtgcaaactctggtgatgagagggagagttcagtgccagttgttcctgaaaatccagcaaagggtattcctactggaaaatacaagcttgtaggatggggtatagatactactggccgcagactaattgatgaaatcattcaaatagctgcgtttacacctgaatcacagttttcacagtacgtcatgccatttggagatttgaatcctacctacagcagaagacatggtatcagagtagtaaacacaatccgctacagaaggttgaaagatgtcaacacccaggaattcttgaagaccaagagtgaaatttctgctctccaagacttcttgaaatggttggagactgttaaaggaaatgacgttgatggaattatattgatttattatgaacttcgcaaagcctcaccggggatgctgttagaatcattaagaagacataatatgattgaaaggttccaaaaggtggtaaaaggctttgctaatggcttcaatatagcccaagcaaaatgtggcaacaccacgaaatctttcaatctccatataatgtctaaggtattgttaaacaggggtgcagagcacttcaacagtgcagtagatagagcaagggcttcatttgatattgctgctcatttagctcaaggggaaagagaggaattaaagggagaggcagccagtaaagattgtactggaacagaaagtcatctcatggaagtggtatgtccatatgtcaatcctatagatgctgaggaagaggaaatagctctttttaaggtattattagaaagacaaaatacattccggccagtgtttggagcactgttacgggccagtcgaactgagaggcagcacgcgagccatttaaggagacttttggcagagaacaacattaattatgacaaacttaaaatcgcttatgattctgacgccaaggatggtttggagaaagttattaagagtgaggtagcaaatgcgaaggataaagatctggaagagctgttggatatcttagatcgtttctttgatcctgaaaagaaagcaattcagccaaaacctaaacctagcccccaacgttatccgtatggtcggcggccaaaattcgtgaggaacaaaaacaattcacagagcaagaacccaaaaacaaactcgactgcaaacgacaatccaaccgccagcgacgattcttctcctcgaagcgaatctgaacaacctgcacaagacgggccagaagtcacttcgcccaaggaagagaagccggtggaggctcaatgagtgccttgaagcatgtggtgaaaacctcatgaagattttttgttcatttcaaggccagattagttctcacagttactgactcagcaacagtgaattctcggtgtctttaacatttttatttaccgttcacacactgaaagctgttattttgacataattaatttaatgttaaatagcattttcaacttttctttacagtttaaatttctttgtacaattttttgaggcaatttttcaagtgtgattggtttattttttattatatcgaagcatgtttaatttttttttgtgatagtaataggattatgtattgtgtaacattcattcaggattgtttgttacatacctgttattaatatttgagtttaataaagtttaatactactt

SEQ ID NO: 6978 - DNA, 1837 bp, Diabrotica virgifera
  SmartBlast Evalue=0; Info=DNA replication licensing factor Mcm2 n=1 Tax=Camponotus floridanus RepID=E2AHY1_9HYME
aacatcatttacagttaactgtttaactgtcaactcatttaaatcttcatctgagtcataataatcggattgaggttctctaggtgagaacttgcatccacgtgaaatataagctttcagcctatctttggcagctaatatgagacctaaaaatggaggtgacggtctcatgggtcttgataaatattccgggtggtattgcacggctacataataaggatgtttgtctaattctaaaatttccattcgcttcttgtccacgtcgacacctacaaaatgcatgccgctttcctcaaaagcctcaatatattcgggatttacttcatacctatgcctgtgtctctcatcaattttatctctattttcatataatgttttgacaagactagttggtctattaaaaatggtagttctttttcctaacctcatggtaccacctttaccgccagtattatgttcgggcatatcaataaccacgggatatggagtggtttcattgacttcagtggaattggcacctggtaaattaagaacatttctggcatactctatcacagctgcttggaagcccaaacatatacctaaaaaaggtttgtcattcagcctgcaccatttacaagcttcaattttcccttcaactcctcgttttccaaagcctccaggtacaacaacgccatcgcaaacacataaattatgccaagcattatggtaagaagcaggatcgtcattcagcatagtagtttccaaagtagaagcttcaataaacttcagattaactttaaaaccagctttatttccagcatgttttaaagctttagtaatcgacgtatacgaatcttctaatcgtgtgtatttccccacaattcctatcgtaacttcgttcttaaggttggtcattctatctccaaggtctatccacggtttcatatacttttttaatggaggcaagggggtaattcctaactgtagtcttctacatagatattctgccataccgtgattttccataaaaactggaacttcgtatactgattttaagtctggaatactaatgatctgttcaggtgctacatggcagaaatttgaaattttctctttaacactatgtccaatgggcttctctgacctacaaacgataatgtcaggagacaatcccagtcctctgagttccctaacagatgattgagttggtttagttttatgttcccctgtagttctgggttgtggaatgagagatacatgtgccacacagaaattctctcgctttactctaaattggaattgtctaaaagcttctacgaatgccatactttcgatatcacctactataccacccagttctattatacacacttctggggtttttccagattctgaaactggtttttgtgccacacgctccacccattcctgtatcgcgtcagttatatgaggaacaacttgaacagtttttccaagataatcaccatgtctttccttgtctatcacatgcttataaatttttccagtggtaatattattttctctatgtagggttacattcaaaaaacgttcataatttcctaaatctagatctacttctccaccatcatcaaggacatatacttcaccatgttcataaggtgaaaatgttccagcatccaaattgatgtaagggtcgatttttatggatgtcacttcaatcccacaacattttaatatagctccaaatgaactagatataacacctttccctacaccactaataacacctcccgttactaaaatatacttcattttttataaaatattggaatggatggaatggcacgtgtgtgatgtctctaccgcactaccg

SEQ ID NO: 6979 - DNA, 1835 bp, Diabrotica virgifera
  SmartBlast Evalue=4E-30; Info=Transmembrane protein 173 (Fragment) n=1 Tax=Harpegnathos saltator RepID=E2BX31_9HYME
agtctatgcaacgaatatcggtatatgtgtgcgtataaatgcacattttaaagctactgctactgtaattctactacagaatgcatttatttagcactaatttttaatatgcggatatgcggtaaagtctagagtagacacttttcttttctttctcacttagggagaaatttgatatctataccaaagtgcgtgagatcggctgttgagtgtatccataaattattataagataaacatagaagtttttaaacttgttatgaaataggtctccctgcctcaaggttatatcttatatccctaaagtggtttgagttgagttgatacaatgcgttttgctgaagtttgaatcttccatccagatcgaagatcgaattcagttttattgagatagtataagtgggtggaagcaggaagctgagatgtctgaaagagtaaattacaaaaggctttgtgtcagatccgacaaagatggattcacgtatccaaagacaatagcgaaagaacgaggagaactttcgacagtcatttccattgcaatttgtcttattctatttttggttgacttaatccacaatgaaaatagtttttgcgtatttgcaatacaatacaccactggagtcgtgctgactatagttttgcaattgatctaccgatttattttgatgtgtgaagaaatgcgacatttaatatcacgttacgatagaaacgtatggattttgtttaaggacgttttgcattttccaattcctgtttatatgacattttttttcggtgttatatacctggtatataattactcatctacagcctttgaactttggaactcaagtgtcacactgcctagaattgtgtccatgtatctaaacatgtacctgttgggaaaacttttgaaattggattctggcccgcttaacgactctctatggatagctgaggataatggtttggattacggctctggaatggcatattcctttttctttggatatctaaatctagttcttccaaaaacaggtagagaagataagcatttgaaagaaatcatggaagactacgaaggtagtaacggcataacgtttgccgtacataaactatttatactaataccgaagtcaatgaaatgtttcgttagtttaaagaacgaatattcgccatctgtggatgaaagtagatcgttagaacaaaaagttatgacagttgctggggttcaaaatagagtatataaaaacgccgtttataagatcagtccaaagaagaatgattacatttatgtctcagcagaatatgcaacacccttgaagacttttaaagacgtttttgacaatagaggacaacattcagaaaatttccacaaacataagaaggacattattttacagttctatttgacgcttaaacgagtattggaacaaaaaggacttaaccaattttgtgaactgatttattatgaaggctatggctgcggatgggatataatcctaccttctgcctgggctcaaccaatgtggatttcacttgtaatgtggggaggtagggctggcggtttaagagaaactgattcaatattgttcgagtctggccaccagtatcatctacatcctgatacgttagcaggcgagaaggaagaacatgacttgtcttccaaatgtaaagagagattctttaaaatgcctgttaataaacggaccaacttcgccagatttgcaatctccagtccgctggattataattggaagatattgttgactgaatggtcactaaacggcaaagaagtgacagatttttttgtactcagggacaaaaaacttttaaaaagtattcaggatgtacta

SEQ ID NO: 6980 - DNA, 1837 bp, Diabrotica virgifera
gccctccttttagatcagtatatcctatttgacactgcagcatgctattcaatttttgaaacaaatttaaagaaatataaaaaaataatgtaaatggccgaagatatcaataaaacaatacagagcagtgagaaagtagatggaaatgcgtgagtagaagtaggacaggataaaatgaagataggcgaagagtaggttaggttatattgtatgccgatgggtcagagttcagccagctaagtttggatccagcctagtcagttggagaaagagggggtgagtttagttggtaggcggctcactacggttagaagtagcgagatgaatccaacacgccttcaacatattcccagaagtctttataagattctcacctcccaaaaagggttatgttgtgtaactaaaaattcctatgtaactaaaacgctcattctaaaatttcagctattgcatggtattgaatgttgtgcagttataaagaaaaaaacaacaaacatgcatgttaaagaaatgagaatgcttagatcgatgaagtgacaaaacaggatagaattgagaatgagtattagggacagtctaggtatggcacgaattgatgccaagataaggtaaaaatcaatcaatacgaaagttctcagtattaggttcctagatggagtacgaaaggaagacaaagaggaattgaaagaaaacataacaaacaatgattaaaagtagtacacgaaaagggtggaatagagttcaccaaattccatgtatgaacatgactgagcatcagagctagatatgcaaataaaaaataaggcttttatagatgatgtattggtgagataataaaaaggataaaatttaaaataaatatattacacgtttaatgcacatgttgttaattggctagtttttggaaaaattaggaaatatgtaatggaagacttgtacataagttcgtttaggacacactttggcaaaactactaatgatttcgaaaatcctatcattggcagaccaacgcagcgaaattatgggtaattatcttagtaggagaagtaagcctccgctctttttttccaaataccttctctctctgctctctgcaccgatgggcaaatttttgaaaatcattattactagttccgatcctaggaaaacaggaaaatacaataataacaatctaaaagaactagttcagtttgggtcataattctccaacattatgctactatttactattgtaatgatagaccgatcttggtaattcaagattcagctgaattttttaagaaatgtggaaatgaaagtacaattttcgtttttcagtaagtttgctaaacacaaatgaaaacccctgtattttggaaaaatctgtagtggcacttattgttggttttatgtaactcaatatgagtcaactcaatatagtacaaaatcaaagatatctttacattcccgctcgtattacaaccaaattaatgaaaatattataaaatttttttgtcaacaccagacttacacttttccgtcaggacctacatatatgtactcgttggtcttttctcgatgaattcttgtatcacaatctcgattcacagttaggccctatgctttatcttctaacatttacgtacgtacgtctgatatacatttttattttgtaaaatacagtttgtagtaaatattaatattaagtcaatatgtacaattatatcgctaaggtaaatgttgataaagtgattttgatatagataacagtatataaactaaaagaatgtggtgtaacagatatgtaactgggttttttgctatgtttgttaaagaggaacattatactttttattta

SEQ ID NO: 6981 - DNA, 1829 bp, Diabrotica virgifera
  SmartBlast Evalue=1E-51; Info=Endonuclease-reverse transcriptase n=1 Tax=Bombyx mori RepID=D7F170_BOMMO
gttctctttctggacttacgagctcttgaaaatactcattccaccttctcattagttcctgtttctcgctaataattgtcccatttttgtccttgcaaactgttgatcttgtcatgtatccttttgtattgcttggtttccttgtaaaatttttgagtctctcttctgttgttataatctgtaatctgttgtatttttctattcaacatttctctcttttctcagttctctatatgcccttctattctatcaggaatccctttttagacatttctgtcaagctatatttttgctatgtattacttgttggcaatcttggtcaaaccattccttattcatcagtcaattatcagtatcagtaaacatatttactaataaactatcaccgtcgtatatataattgaattaacaaacacgccaatatattttttcacattgtttatttgcactgacgtaacttactcaagatttagcaactaacttcatattgttgctttttcctgtcggtgtgcgtgcgcatcgtaaaaattcactctcaatatttttcccaatcgcacctgaagaagtcatcatcataaatggcgctacaactcttcgtgagtctttgccgcgtttactattgccttccatgtttgtcggtcccgtgccactaattctcaatgtcgcattcccattttctctagatcttctttgactgcatctttccacctttttccctacagaccttcttccatctggcctttcccagaacacattgtttataaggtgattgtcgttactgcatatcacatgccctgcccatctgagtctattagcctttatatatctgactagattttcttttccgaatagagactctagctcgttattgtatctgcgcctccattcgtttgtcacgctgtctctgcaagggccatatatcattcgaaggattttacgttcccacaccagcaatttatttacttctctttttgttagcgtccatgtttcgcttccatacgcgactgctggtcgtattatggtcttatatatctggatttttgcacctcgtgaaagaagttttgacttcattagatgtttcattgcaaagaaagatctgtttcctgccattattcgcgtttcaacttctcgctctaatttgttgtcatttgtgattgttgctcctagatatttaaattctttaaccacttcgaagttatgatcgtttatagtaatattttgccttattcgccgtcgttcttgttttgagacgaccatgtattttgttttgtcttcatttatttttagaccgatgtttaatgcagcttcttcaaagctcgagaaaatatccttaatttctaatgttgattgtgctactgcgtctacgtcatcggcaaaggcgagtatgatttttgctccccgagcagttatgtctggtttgagttttggatacatttttcgcatgacatattctaaggccaggttaaacaacaatggggacaacggatctccccaaatataaattgctacaaaatattaagcaagggaaaatgacaggcaaatgcggtccaggacgaagaaagtcctcatggttgaagaacttgcgagattgcaaccgcgagtggcggcgaataagattaaaatagctatgatggtaaccaacattctgaaaaggacgttaatagaaaataaaaatataatcgtcctaccgagaagataaatcgtaaatataatcgcccttgttctaccgagaagactattcgaagtatggtgggcaaatttgattccactggttcagtaaacaatcaaccaacactctaacaaccaaggtccaaatcacaattaccctc

SEQ ID NO: 6982 - DNA, 1818 bp, Diabrotica virgifera
aatgatgaaacagtagtaggaaaaaaacaatgatactaaaactgatgacagtattaaatctaatttaggtataaataaagacaatatagaaaaacataaacaagttccttgtaaattggatgatgtaggagtaaatagtaagactgacaataatagtactaatgattctgtaaattctgaagataccacattaaatgatgaagcagctaaatcaccaaaagaaattctaagaaaagttcattcttttttggttcacctgacaaaaaacaactatttctcaatccttaactgttggatttggaacaaattgccaagaaaaagagaaaaattgtaccagtgaagagaagaaaaataaaaaaccaaggggttagcgaaggaaaaatttgaaataaatcataacaaaaatgaagggaacaaaatatcagataaagaagaattaaatgtaaatatggaagaagataacaatttagtacctgttgtggagaaaccttgtgtaaagaaagtagcttacgtctgtggaaaagaagatgaagaagaaaaaaatgaaaaagatgatgaagaagaaaaaaatgaaaaagataataaagaagaaaaaaatgaaaaagataatattgcagacgataagaaaactgaaaaagaagtatctaaacctgttaaagtttctaaattgttaaaagatcagtcttcaaaaaaggaagacactcctgttgataataataatgaaaataaaaaagaagaaaaagaagatgttgataaaaaagacaaagtacctccatcagaaaaagttgaggaattaccaaaaaagtctttgcgatccgtgcgaagtaaaaagataacaaatgttacaaataagagtcaggagtcaaaaccagagccttctgtagtgaaggatgtttccactgaagtagtatatataaaaggaagaagaactaggcaaaagaagaaagaaaatgaagtaacacccgctgttaataaaaaaccgaaactaaccaaagaaaataatgggacagactcagatgttgaccccattcataaaaagttaaaaagcacaaaaagcgtggccagtacaaactcttctcgggtatcatctccaatatccgtagctgattctatcataacaatgccggattcagtagacagtacagagctaccagttacagctaaggatcccctcgctgcatcagacgatgaatccaatattgtgcctgcaaaacctgtgaatttgcagtctttttctcttgactacaacgattcctctacaccaccgcctatacctatcattccatctacaaggacattacgagggaaacggaggagggatgatagtccaaaagaaaaagaacttcctgctaaagatggcaagaggatgaaagtaaagggaaagagacaggtggatgtacagttaagaaaaagcatcgaacagaaaaaagaacaacaaataagtagtagcgacgaagttatagaaatatcagagagtgaagctaaaagcaaaaaatccgcgtcaaagaagaaaaaaccggctccaaaaagtaaaaagcccgcaacaattaccatcagtgatgatgattcgacaagtactcctacccctatctctgcgcctgtcaaaactgtcaaagtaaaagtgattaaagaaaggaaaccgataaataggcatccagaaaataaaaataagacgagtaattggcgggtcttgatatatctagcgagagcctgaatctgtcatcgaatgtaaggcaatctagaagattagctacagaataaaaaattaaagaacaagtagagcccaagaaaccagaaccgaaggccaaagaggataaa

SEQ ID NO: 6983 - DNA, 1826 bp, Diabrotica virgifera
  SmartBlast Evalue=1E-143; Info="Integrin alpha-PS2, putative n= 1 Tax=Pediculus humanus corporis RepID=E0VVR4_PEDHC"
gagatacagcaattgacgagaaaagctggcagtggtttggtgcaacactaagttcatccggacgcatggacggtccagttgtggcttgcgctccacgatacatctggtttaccaaagacttaaatagaagagatccagttgggacgtgttttgtttctaatggagctttcgataattttgaagaatattctccttgtagaacaatgaactggggataccatagacaaggatcttgtcaagctggttttagtgctggtgttgataggtgggagatcgtctctacgttggagctcctggcagttattattggcaaggccaaatgtattccatagatgcccatgctcattttaacatacacctggaattttcggaaatgtggctatggcgccaaaggttcggtgcatcagcagagtttagaaagcagaccagctgtgttttctacaagagaaggcaaagctccagatgacgattcgtacatagggtattccaccgtagtaggacacttcaaacaaggacaggaatatgaaggaatagctgttggaatgcctagaggaaacaaattgaaaggaaaggttctgctttttacgtgggacctcaaaaactacaaaaacataaccataagcaaacaaatcggctcctacttcggttactcccttgcagctgctgatgtaaatggagacaaaatgttagaccttatagtaggggcgccaatgcacacagaacccaatactgaggaaaaatacgatgtgggaagggtatatgttttctaccaaagcagtaatacatacgaaagttttaacagttctcattttgttgatggattaaactccaaaggacgatttggactcgcagtagcttcccttggtgacttgaatcaggatggatatgacgactttggtgttggagctccatatgacggtcccgacggtaatggagcggtgtatatttactatggttcgaaggacggcattagaaaaaaatacggacaagtcatttatgcctcagatatatcaggttctagaaacgctctatccacatttggattctctattactggcggattagacttggacaataacgaatatcccgatatggctgtgggcgcataccttgcggactctgcattttttcttcagatccagacccgttgtttttatcgacagctatgtccaatttctcagtgtcaacaagaaaatagatctcaaacacaagaattgtaagttaccaaatggccaggaaagcacttgtacctttatagacttttgcatcaaatattacggcaagggaattccagacaagattaatctcgatgttcagtacatcttggatacaaaagtaaactctcctcgaatggctttcaaaaatctaggaacaagcacattcaatcaaacgattttactttacaaagacgccaaggaaaattgcaaacgtgaagagatcatcatgaaaaacgagtttaaagataagctcacagctttagaagcagaagttaagttctcgatgcaggaggaggcttattgggacggttacagagatgcgcgatcgagattaactgcggtgctagatttgaataacccaccttcaaggtccgattctataacgatccaaaagaactgcggacctgacgatgtttgtatacctaacctgcatgtagaagttacatccaatgttaacaaatatctcttgggctctaatacaacgatcgaattcgacgtaatagtctccaatttcgaagaggacgcgttcgaaacaactttcgaaattacatatcccgcaggagtcttctacaaaggatacagcaaaaaaattggatggctttgtaacga

SEQ ID NO: 6984 - DNA, 1831 bp, Diabrotica virgifera
  SmartBlast Evalue=0; Info=Elongation factor 1-alpha 1 n=1272 Tax=Pterygota RepID=EF1A1_DROME
aaaatagacattcaaaatgggtaaagaaaagattcatattaacatcgtcgtcatcggtcacgtagattctggcaagtccacgtctaccggtcacttgatctacaaatgtggtggtatcgataaacgtaccatcgaaaaattcgaaaaggaagcccaggaaatgggcaaaggttctttcaaatacgcctgggtgttggacaaactgaaagccgaacgtgaacgtggtatcaccattgacatcgccctctggaaattcgaaactgctaaatattacgttactattatcgatgcacccggacacagagatttcatcaagaacatgatcaccggtacttcccaggccgattgcgctgtcctcatcgtagccgctggcacgggcgaattcgaagcaggaatctcgaagaacggccaaactcgcgaacatgccttgcttgccttcacgcttggagtgaaacagctgatcgtaggagtcaacaaaatggactccactgaaccaccctattcggaaacccgatttgaagagattaagaaggaggtgtcgtcgtacattaagaagatcggctacaatccagctgctgtagcgttcgtacctatctctggttggcacggggataacatgcttgaaagttccgataagatgccttggttcaaaggatgggccgtcgaacgcaaagaaggaaaagccgagggaaaaactttgattgaagccttagacgccatcttgcctccttccagacccaccgagaagcctttgagacttcctcttcaggacgtctacaaaatcggcggcattggaactgttccagtaggaagagtcgaaactggaatccttaaacccggtatggtggtcacttttgctccagtaggcctcaccaccgaagtcaaatccgtagaaatgcaccacgaagcgctccaggaagcagttccaggagataacgtcggtttcaacgtcaagaacgtgtctgtgaaagaactgagacgtggatacgtcgccggagattccaagaacaatccaccaagaggtgcttctgattttatggcgcaggtcatcgtactgaaccatccaggacagatagcaaacggttacactcccgtcctggattgccacacggcccacatcgcctgcaaattcgccgagatcaaagaaaagtgcgatcgtcgtaccggcaaaaccaccgaagagaacccgaaggcgatcaagagcggcgacgccgccatcgtcaatctggttccctccaagccgatgtgcgtcgagtcattccaggagttcccgcctttgggccgcttcgccgtgcgcgacatgcgtcagaccgtcgccgtgggtgtgatcaaatccgtcactttcaaagacactgctggcaaagttacgaaggccgccgagaaagcccaaaagaagaaataactaggcttagtgctgcctcgttccgccataggcaacaaggaaatcttcatcatttactattactattatttgttgtttaggtggttgcagcggaattattttcatcggaaagagtttagaaggaaagatggtgttctgactattttagttctttttttcaatttaatttaaagtttaatcccataaattattattattattatgattgagaaactgtttccattgtcgttttggttagcgtttgattgatttctattggagcgagctcgtaatgacgtataatgatattaatacgtacgtatataggataagttacttttagtcatatgatattattatttgttatgtttctgttgatacttgatgatgatagacttgataaaattaatgtataagcttcttattaaccattaaagaagctcttgaagc

SEQ ID NO: 6985 - DNA, 1832 bp, Diabrotica virgifera
gaatcactagtagatagaaaatttttctagttcgtgatcatttcatgattacatattcaaatctgtaagactttaatttcggttaacgccttttatatagatgccatgaacagagtacgagtacagtgttttggttatcgttcagttgtgtttagttttttaatatatactatatccaaacgttacagcatttgagagacgcatttgtgcatatgcgtcatatatacgaaatgtttgtgttactcttccactatacgacttcgtcatttttttttaaatccaatagaaaataagtaaaaaaaagaaagcaaatttaaaaattcgttattttcttttttattcttgtattgtttgcttgaaaattgttaatgtcggcacatgcagtgttatgtatataactgcaattaccaagtggccttaatatatttgtgattccaagtcgtggcatattgactgaaaaacgtaagtccaaaattatgccatgtatatttgattaagcatttttctgagactggctccattgaagtctcttgttattattttaagtgtacaactgagattgtagtatttttgtaagcatattggccaacattttatggaagttcatgaccactaaaaacttgcaattgtcacttatttttgtcaattacttttatcggagttttttgaaagaaatactcaatattttgtcatattttatcagttaaagtaaaaagggaatttatataaatgaataaaagcatatacgaggccttaaaaccgtattatctcacatcatacaatgatgaaagaattaaaataataaaataaactacttatttttacagtattgaaatttttaataaagatttttctatgaaacctgtcaatatttgacagttgacagcattttaaagttatatgatattttaactttaaaatgtgggaataacgtggaagtaaagggcaaaaacaaattgaatcaacttatttttaaacacattttcggatttattttttctctggtaagttagttatctttatcgcagtattttttaattttgtgagtacagggtgtaatatttaaagtattttttgaaatagtatagagccctgtagagtacgctacaaaagagcaaattagaaattattaacactgtagccgtgcctgttttctacattttgctttttgtatcactgttactgtagcacacagcaaatattaaatgtatgtttttaagtttttataaaatttacaatattttattcatatttggtgtaagtattattaaaattcattcttcatgtcattatgaatactcacatgaaaacagcattgtatatattcatgtactgacactactgtatagttacgtcttgaatgatttccatagaaggaaatgaaagctcaacacaaaaaaatatatttacaatgactgctgttagaatccaacgaactttctgaatctattgtgttcttgtgagttatttatctcgtattgcccaaaaaaccatctcaaaaattcagtattttaatttacttttcacgtgttatgcaaagggcatttatattatcatttttatacataaaaattgtgattttgtaaaatgcattaaaagtcggtagtgtcatttcgattagtttaagatgaaagacaagctgcgcgcatagtcaaagtggttgatgtcggaccaaatatttttatatcaatattaagtttagatatattttttgaaaatattgtataccagtcatattttatcacttttgttatgcgattttttaatatttggatgtatataatataagctggtagtagttacgtgaatgtattttatcgatatcattttaa

SEQ ID NO: 6986 - DNA, 1829 bp, Diabrotica virgifera
  SmartBlast Evalue=0; Info="T-complex protein 1 subunit eta, putative n=1 Tax=Pediculus humanus corporis RepID=E0V947_PEDHC"
aaagctttattagaaaaattacagcaagtaaattaaacgaagagataaattagtgaggtgcactgcatactggttatacaaaagatcaatttcttgaccttaaaaagttacataggccttcccataccacggccccccatttgaggtggcgcctcagatttttgatttttatcgtttcatcaacagacagaatcaaacatgttgcttctgtggctgcagtcagggcattgattttgacgatggccggttcccatacgcaggcttcgaagttatcactgatgtcttctttgtttatgtccacaccgtaccagcagtgaccctgcgcgtgtttctgtcgaagtttgttgaggatgttggtggcgtcaaatcctgcgttatcgcataattgtctggggatgatctctaatgccttagctattgcaccaatcagaagctgttctttgccggcaattgtgcgagaatgatcccgtaaaatttttgataattccatctctatagcaccacccccagctacaactgcgtcatttttaatagtccttctaacaatcatgatggcatcatgaagtgatctttcagtttcttctaaaaattgttctgctcctccacgtaaaattaaagtacacgtttttgcatttgggcagcctttaaagaaattaaatctttctcctcctatttgtttttcttcaaacagctcacatttaccgagtacagaatcgctgatgtcattaacagtggtcattacagcacctccacatgctttcagggtacgtttcatatcatcttcttgaacacgaccagcacagaacatatccctatcagcaaagtattgggtagcaacatctccaatgggtaattttgacaaaacaacattagctccagactcataaattttttgaagtttattgtacaagatagtccattctgcatcaacaattttctgatattcttttacattatctactcttacttctgcgttatccctctcagctttaagttccaattcaatgtttagcagagctattttacaatctttgtataccttgggttgcatttcaaatccggcataagaaaaagttttcttaaatgctactccggctaccaaaagtgactcttctagggctccaccttgtacctttttgataccgatcatattgagaggtagtaaatcgtctagtaacagaacagcatctacaaccattttagaaaagaaagatctttgttgattaattaatttcgagctcatcgctgtggcagcacacttttccaatagagatctgaattcgtcagcatttgatttattgattttaacagctatttcacttattttctcaaggcaaatttggaacgatcttctgactgctttgattattattctcgggtgaacaccctcatcaacgtaaggctttatttgttttaaaaactctcctgctagtaatactacacttgtcgtaccgtccccgacctctgcatcttgtgacttagcaatatctaccaaagttttcgcagcagggtgaacgatatccaataatttcaaaatagttgccccgtcgtttgatatagtagcatgtccttgcctctgtactatgagcttgtccatacccctgggccccaatgttgttcttacagcatccgtcacattctggcaggcatttatgtttgagattaattgaggttttccttgggatgagtcagttccctcttttaagagtaatatctgtggttgcatcattttgtgagtggaaagttattcaatattactttatttcaaaattataaaatataaaattttcacgtgcaacactaaaccacaggccacaccaaacgtcaag

SEQ ID NO: 6987 - DNA, 1831 bp, Diabrotica virgifera
  SmartBlast Evalue=4E-51; Info="Ankyrin 2,3/unc44 (Fragment) n=1 Tax=Aedes aegypti RepID=Q16FR1_AEDAE"
aaaaatgcatcgataagggggtgtgggaaatggaaattagtggcttttttgctgtactgtctcctagtttttgctctgggctctggcttaatctcttgtttaaacaatttttaatttcaaaaacaaaattgtttcgtcaagtcaacgcagtgttacacgtatttttaaatatgtcacagattgagtttccactccatctagcctcacgattaggaaacctagatgcagtccaacagttgattgaaggaggagcagaaattaatgaagttgattcttctggtttgacggcactacatgtagctacattttcccaacacaaaaaagtagccaaatatttgttggcacacggagctgatttgaacgcaatcgaaacgtatcagcaggaaactcctttaaatatctcaactggtattaatgatcatgaaatggttcgattattgatagaagcgggagcaaatatgcagtgtttagatattagtggaaatatgccaattcatattgcggccaaaaaaggatatctaaatattgtagaatgttttttagaaaatgggataaatgtagatattctaaatgaaatcagcaaaatgacccctcttcatatggctgcctgtgggggttacatcgaagtagtagactatttgcttttaaataacgctaacgtgcatcttaaagattgtcgaagtcgaagttcaattcatcatggtgttttaggagggaaagctaaaattgttaaaatgcttatagaaaaaggagttgatgtaaatgttgaagacatcaattggactcctttacatttagcttgtagacacgggaatttagaaattgtcaagttacttttagaaaacggtgcagtgtatgataaccgacaggggaaatcacgaaactattctccactccttgttgctattgaaatgggtcatctagaaattataaaatattttattagcattggggtagacgtgaatttcagtacaaataatgaagactatactcttctgcatgcagcttgtactaacacgcaggcacaagttcaaattgaaatagttaaattgttgattgaaaatggtgcggacgtaaacaagaaaactttatccaaaggagctactcctttgtattgtgcgataaaccgtatgcgtccatatgttgcagaactcttaattctaaatggagctgatttaaaacaatccaagtataaaggcaactctcttttatcgatagctttaaataatgtggaacgtaattatgaagagataaatagattctgtggtaattggtcagaacagacagactctatggaaattgcaagagtaataatcaaatacaccgtgttaatttacaatcccattaaaacaattattcaagatggttgtcctttcttcagagcattcttacaatactataatgactgccaaaaagaaataacaagtatgaaaagcatgataataaagaatactaatgtttcattatatcgaataatttgtgactccaataaaggtaataacgcgtttgttcaatatatacgtaacgacaatattaaaaacgagttacaaaatattgaagattaccttaaagagttttcgatatatggtaatattcttcctttggtacaacattgggttaaaaaaggctttcaaagaatggaattacttgcacatgctgacgtaatgatgaaaaaacttgcacctcagttaccatcagaaatacgatggaaagtattagactacttaaacatgagtgatcttaaaattatgatacaatcagatttttttaaatacaagtgattattttttatttgattctttataaaaacgttaagatctaacacgcaaat

SEQ ID NO: 6988 - DNA, 1828 bp, Diabrotica virgifera
  SmartBlast Evalue=1E-25; Info=CG9447 n=3 Tax=melanogaster subgroup RepID=A1Z6Q3_DROME
ggttatttaaagtaattagtaagttactaaattaactagttgtaatgttaacaattactataagagaaggtcaagaataattcaacaataaataaatggtgattttcaaaaatagaggtataatcatgaacactaaattgtactatatcttggcctgtcttgcaaattatttcttattatgttctactgcagtatcagatgaagaatatggattgatgccagatatatttcaagttgatgattttgattcgtgtatgatgttaaaagatagagctctttactgtgaaataacatatgaattcacacccataaatccgaataatccaccggatatatggaagactataaaggaagttagttcttcagaattacattatcgacacgacctattacgcctttttgtatgtgttccaaaatcctgtccaatgacaaaaatatccaattctacaaacgaaaagttgagaaaagacttaaatgactgtatcgatgaaaggcatagaagtttgggttttaaaggaattgtaaagattaatgcttgcaaaagggtaaatcctatatatgaagttgataccggagactggctgtttgcaatcgctttcttctcctacatgggttttgtccttctatgcacaatgctggagtacaaaaataaggaagatgaaggattttataaaaacacttcaaccactggaaaaattatactttccttttcaattatgagcaactggaataagttgaaaactgttcccacaggaccaaaattcgaaagattaaggccagtgcaaggcttaagggtttatctatcaattttagtaattcttgttcacacaggccttagtcaagttgcaattccagttaccaatacaaaatttttagagaatataaacgactctccagactttctgaatgaaattccaaagagaggaatttttttgttatcttttttcttcttgatgtcagcttggatggtaattatgcctctattagcgaaaagagaccaaaatgaagatttaagtgttaaatttgttattcattctatcataaaaagatacattagattattgcctaccgtagctgtcatagttggcttttacgcaacttggttcagacatattccgtttggcccattttttaggggtctgtgcgaagaaagcgaacgatgcagacaaaattggtggccaatatttttatttattcaaaaccattatgatcgttattttatgtgccatattgtcagctggtatttagcagtagaaatgcagtattatatcattaccttgtttttatttacatttattttaaaaagaaatattagtattccgttaacagttggagtacttcttacactaaacgtaatatgggattttttggaccattggagacacggttatccatcaatcctgtcgggaaggccagaggaaatttactctatcgtctttaaccaaaaaccacaatggcatgaccattttgcaaattaccatggaaacgcttcgggatatattttgggattgggattcggatatgtattttataaatatagcaataaaccgatatttgacacacagtggaagaaaatagtttgggctattctttcatttggtcccgtctttctcacgaccaatctgccattatactacgacgtggatgccactcctgctcactctgcagtatgggtagctttaacaaaacctttattctcattaggaatgggatttatggttttaggacttgcggaaggattaggaggtcctctaagatcaattttgaattggagcccattatacgttttaggaaaattatcttttgcttatatattgggcatacggta

SEQ ID NO: 6989 - DNA, 1821 bp, Diabrotica virgifera
  SmartBlast Evalue=3E-24; Info=Double-stranded RNA-binding protein Staufen-like protein 2 n=1 Tax=Harpegnathos saltator RepID=E2B6M9_9HYME
gtaccgagtacgagaaagagctgataacctatcgaatattaacaattttcttttattattttaactagtttattaggttctgttctattcacttcagtataatgaagaatcagctggtcttttttcttcacataatttttattacgacagttacctcaaagacacactctgttaaagatttaaaaaacgtatttaaagatgagctctgcatagaaggtaatattaatagtatatattccaaaaagacggacactgtggttgtgaagagtacaaaaactgaaggtcttctcaaccttacttctgtaggaacagtacaggagtctgaaaagccagtattatccagactgaatgaactagttggcttcaatcaaattgactattatttcaaacttgaaaatgaagagggtcctccacataataggttgtttacagtagaactaaccttaggcaaagaaaaatatataggaaaaggaaaaagtcttaaaaagccaaacaagaggctgccacaaaagctttagaaaaaactgaatatgattttcccgaaataaaaaacaatagccctgaggatatagaggaactcactcccactgttcttctaaataatatagcctctaaattgggtgttggagttacatattatcttctagataaaaataaagaggaaatactccattccaacatcattatgactgacaaaaagaaatcatatttgcaaagactgaatgcgtctatttacaatgacaaaaaattaagaaaaaagaaagagatagagtcaaccaagggtccatttaggctgaaattgaaatttgctgattatacattctttacaacttcacattcaatacagggaggaagacatgaagttgctgtacaggctctggaatacttggttaaaacaaagacagtctagatatcgcttgtttgcaggaaggatctgaagctgaatgcaagcagaataaagattacctgaagtcacctatctccaaagtgtatgaagaagccgaaaaaaggaaaatgagcatagaatgtgaagtcataaaagaatctggaatgtctcacaagaaaaaatttaagactgaatgtagattgggtgatattataacagaaggtgaaggtttttctaaaaaagaatcaaaaagagatgctgctatcaatatgttggcaaaaatagctgaattggagcctcttccaatagaggaagaagctagaaattttataaaaaatgacaagaaacaaaagaataggaggaaaaataaaaagaacaagctgatcaagactaagtttgatgagattgggatgatgcttgacaaagtgggagaatctattaaaacaatgactacaaatatttttggagaggaagatcagcctactgattcaaatgattcaagtgaatatgatgcaaaacctaagaaagtaaaatcgaacaagaaaagtcataaacaacagccaagaactaaacaatcatcatttcaagatgaactgttagaattaagcaacatattaggttttggaatatcttatatagatatttctgaaaaagataaacatgcatctctactatctctttataccaatccagaatatatttgttttggtgaaggcaaaactgagtctgatgctagaaatagtgctgctgataacggcttagatttgctggagaaaattggtatttattatttatttcaagaacagaagtaaaccaatttggagagggaaaccaaagaaggagtaagaattgccatgaagcacatagtttcagaaaagaaagaggaattgtgataaactgcccagtaattttgtttagtatgtttatcttttttt

SEQ ID NO: 6990 - DNA, 1828 bp, Diabrotica virgifera
taaaaaataccatctcgtcctatttgcttatctcaatttttttctccaaaaaatttaaaaacagatataagagctttttttgttatatactttctaacgctgttttgtgtaaaatcaagcaatggcacatctaaaattatttattcattgtgtacttatattttttgtccatgaagggctaacttctcctgtggctgaatcgactgatgatgacttaatcgtaacattgtctacagggagcaaagtccgcggacatgtccttcagagttttgaagggaatgatttccaagcatttgaaaatattccatatgcagaacctcctactggaaagaacagatttcagcccgctattccaaaaacaccatgggaaggagtatttaatgcaacttttgcatataaattctgtccacagtttggtgtagttgcagctgtagaggattgtcttgttttaaatgtatataaaccagtgaatgctaatgatcaacagctattgcctgtatttttctggattcacggagggagtttcataaatggagctggtagtctctatgatcctaaattattgattgattatgatattgtaattgttacgattaactacaggctgggagcattaggatttttaacaacccttgatgataatattcctggaaacttgggtcttaaggatcaacttcttgctcttcagtgggtacacgataacattaatgcctttggaggcgatcccaagcaagttacagtaggtggtgaaagtgctggaagcatgtctgctggatttcatttgcttagcagattagcacatggtttatatagcggaatcatccaacaaagtggctcaccgttgagttcggctttctatccaaacaaaaatcgtgagcaggcttttgaatttggaagaaaattaaatagttcctttgcttctagtaaatctagtgatttattgaaactgttacaagaagcaccattgtcagatatagtgactcagcaggcattgtcacccactgcatgtattccaactatggaagaagaatttaacgacaaagcttttgttagtggaccaatgcatagagccattctcaatggtgaattcaactttgttcctgtcttaataggcatcaattccgaggaatacctgttgtttgtggatgcagacagtgacgattttaaagaaaaatgcaaatattttgatgacaatccagaacaaatggtctctgcatctttcaatgtagctgaagaaattagagaatatgttggtaaagcattaaagacactctataccaactcatcgtttgtggaagaccctcttggatatataaaatacaacagcgatgaagtttttggacgatcgacagcacgtcaagcagaagctgcatctcgatttgttcctgtgtacatgtatcaattttcttggtatgacaaaagtagtccccttccaggtgttaaacatgcagccgatttatattacatgtggaatgtatcattcggcaccactacccacaacgatgctcttcggaaacctatacttaaatggtggacaaatttcatcaagtatcaaaatcctactccagtaaaagatgaagatctacaaaatgtcatttggccagaagttaaacctgggtctgtgaagtatttggacatcgattccacatttgaggttaaagaaaatcctcgacaatattatcaaattgaatcaattctcgatcctgtcataaatgaacctcttatcacatattaaaaagaataatatatgtaatttaatgaatacaataaatgtaattaataataagtaatttaacggaaagaaaaataaacataaacaagcaaaaaa

SEQ ID NO: 6991 - DNA, 1828 bp, Diabrotica virgifera
ggccgtcagatggaagaagtgtcgttattgttattcgaaaagtttgttcgacattttgcacaatattgtcatatttcagttgctttccaggtatcatgctaagtgaacgtacttcttttgtggaacactgcatctcttgcatctctgtgagttagatcaatattaaaaaaaaacaagtaaatattttcatattttttttaaaaaacaatgtactattttgagacatgccatccttcctcaaaaacacaataagataatacaatactttgtgtgaacaataatggattattttgagttgtatcagtcttgtaaagaagtagaggttgagttaaaatgagttatagtataattttgagttatgtcaatattttagaaaattaatagaactttttaaattttcacaatttaaatttaaaattttactatctacaatttatttcgaccgtcgttcttaaaaaaataaattctgctaaagttgatcaagatagaaaactacactttgaaagagttcaacaatttaaatacttggaagtaattgtgaatggcaaaaataagaagacgaagtaacggagcgaatccaagccggcaactaagcatactggagataccatagggtaatgaatgacaagaacttattcagaactacaaaaattagttacaaacgcagctgcgacaatgtgtctcacagataaaaatgaagaaaaactatgaatatttgaaaggaaattttccgaagaattatgggcccgataagaataaaaaacggagaaattagaagaagaattaactaggaaataagagactatgaaaagagaagatatagttagatttattagagcacagaaactaagatctaggacatatagagaaagtaaaacgacctactgattactgattaggaaggtcaccagatggaagtcagaaacttaaaggcctagagggaaatggtaatcctatacaatatacaagaagcatgaggagtgattcaccaaaataagtgaatcaaagatctggcaaatatttcatcataaatcaaaagcattaatgatgttgatgatttatgttgattttttcattttaaactgtgtaaagcacagataagtgtcgtctttcttgccttttgtataaagttcatgtaaataaatgtggacaattaatctccttttatattattttgtcgatctcttgttacaaaagtggcgcccaacgttttttgatcggtgttaaactcatagacatattaaccatagaccaggctcggtatatgccgctcaatgcaacgggtgtaacgccaatatcaagtacagtggtctagctatcttagtctgtcgtacgagtgtgagcgtatctaccaaaaggtgggagtaatgaaacgacacagacacagagttacagcggcagcgaccatcatatgctagagagagaaagctaagcgccggtagagagagatagatagatcatcgatgaactgctccgccttacgctatttttcgtaccttggttaatctattatctatggttaaatccatcacatccaacaatatgaacaattatttggatatttgaatggtgggctacaacaatgttgtaagcgacagaattaagattatgcaagagatggaaaaaacttattgacaagtcatttatgacaatacggataccaatattgcggtacgaaaaactcggggaaggtaaaatgtttttagcctgattgaaagatgctcgcattggtcattggatatacaataatattgcattaaaacctcactttgacccaatctgtctcttacagcgttgttgtagcccaccattcatttgttgatacact

SEQ ID NO: 6992 - DNA, 1827 bp, Diabrotica virgifera
actagcgtcgagctttgatcgttacaagtggaatcgatcccaatcaaaatataaacaaaatgagttccaaagacaatagcgatgttgcagtcgacaaattagacaacgaaaaaagtacagatggcaaagcagagataaaaggaacgaagcgagcggcagaggacaaaacagaagaccccaaaaaagcgaaaaaagaagaaaatggtgcaaattcagacggtgaggatttagatgaggaagaagaagaggccattgaagaagaggaagacacgggcgaagaagacgtagttgaaggggatgatgaagaaatagaggctgaagatgaagaggatgtagagggcgagggtgtagaagaagaagaggatgatgacgcataataaagtgggtgccgtcaaaccctgtgaactttacttggcggactatctcagtgcaaagtctcgagttactttgtggacattttattttcattttcaattagtcgttgttcagtgcgccttaaacgccaggatgttccacgtcgccaacgttgttataacttcattcatataatacaccatccatcgacacatccttcatcattttatccacaggctacctcgtgacctttgccgtcggagctagggctcttcagtgaccgtgagaactgcacgtgacccgcggtacctgactatttctaacttattacgtatccccttcgatttgtaaaaatgtccattttgtgtaaagatagatataaatttagtttaagttggtctcagacataacatatacgatttttggttttcttattttctttattgatttaactaattgtacaaaaagatgaacatgtcaggatggcatatcctgccaccgtcacacccggaagtcttgaaacataaaaatggagtacataatggtctttagattggtgatcaatcattatcgtgtaatgatttcaccaaatatttttgacgagggagacagaagggcaataaagcgttactgtaggctaaaatagaacttagtctaatctgtttttagatcagtgtgttttctgtatgtatgatattgtaattattttttaattaatttttatttaaagaattgcgttcattagctgtgctagtcttcgcactttttttattcactcgtcaaatgtttattgaaaataacaaaaatcttcacgattggtgtaaatccaaaaatgtaagtacattaaaataccaacaaagtcactttttctcataaatataatctttcacagtaactgaagatttttttattagaaagattgtttttgttacttttttaaattgatttaaaggctgataatacttacgtttttatttttatcaatcatcaaatgacaatttgtatttaccaatagagatgggatcggattctatggttaagttataggtcattaaaatgtattatcaaacatttagatacattttagtaataaatttggttgtgctataaagggggttgccaaagttgaacgcagaagtttgtattattgccaataacttgtagcaaccccacttataactctttgataatacatatttttgttgtttgctcgtaagagatttttgcgaaattttgtaattgacatttgacataggttcattccaacttacaattaaacggcaatttgggtggttgcgcctcaattcgatatatttttactacagagaatgttttatgaactgtttgtctacttaacataatgatcttgtagaaattcattttgtaacagtgctgtatgatttttgagtgcatataaacgatggatacaaattgtttcataacgtttagtttcatttaaattgcctactataa

SEQ ID NO: 6993 - DNA, 1823 bp, Diabrotica virgifera
tatggaaaataatactgtcaagtataatacaatacttattgtgcaagtatgtgtactatctaccaatggatttttactttcattgtaagaatacacacattattttaaatcaaactacttatgaataaatgctaacaaaactaataggatattccacaagacttaaaaatcaaatctcaacaaaatactaattaaggcccctaggacacaaggggtgtcagtggcaagttttgagaaaactttgttcaaagttctagacaaatttaaaaatctaggtaagtactgaggtactacttagcatgtttcaatgacatgtcatttttgatcatggtattgttagtttatgtagaaattttgaagccaccatgttttctatgtgtttgggagctcatttttgtatttaacccaatttcctacaaattgtcacttacacccctttaggggcctcaattttgtacagttatcataaaacatccctgatcataaaccattcaatgttgagagtgttgaaatcagttgaagatcaccaaattgttgtgataatggtatgaaaacaataagaattgtatatattcaatgcccctagtatgtttctagcaagacacagtaagtataatggctcaactatacaaaatttgtagaattaaaagaaactatcaacctgatggattatctaacaatacaactggatgttctcctgatatgataacaacgatatacttaatacaatgaggtaagaaaaatccatattatgccatatatttcaagatcaggagaagcatattgtacattatagatagttgagataaagctttttagatttaaatttgacaagagattacagattacatgactgactaggaacggatttcattgaataaaataaataagtactgaactttgtcaaaactgattcagttatgcagtatttacttctcagtatctgttaataaatattagataggtatatgttgtaagctgccaaataatttcaataagaaaaggatatgaatttcctgtacttagtcagctgtatactgaataatcataaaaatttgaatcaaaaatattcctttgtaaaaagaagcctttctggctacatcacacaacatttttggaatgacaatcccatctttagtgctgcttacaaagtatacatggctcaagccactaaaaatatagttgctacctagagtttgtttagagaggttagaggttccctatagaccggcaaccccatagttgagatttctgtgttgccaacaatggcttactatgaaaccttcgtatctcattttacagaagagactttgaaatgaatttctgcataggtactgtaacccaaagataaaaaactatctttatgtatttttgactatgtacacatttatatcgttacgcatacatttttcatatatattttaggatagagtgagtttggaaaaattcactttaaggagtctcctgtaaaattttatgtaaaataagatatgaggtgtttacacttaagtcatcgataagtaggtaccatttataaaggattttttttattttttttaatttcaaaaagaactgctagaaatattttacttagtatgttataggttacgtttactaggagtgtgtgcttaaccaccctttcaaacagcctaagaggtctatattgtgactcttgatttgttataattaagttcctgtagaaatacagatatatttcaatttgttttcctgtagaatttaactataacataattactagaatataatctgtaaatacttacttttgtattcataatacgtttaaatactgtatttgtttaaaa

SEQ ID NO: 6994 - DNA, 1824 bp, Diabrotica virgifera
  SmartBlast Evalue=1E-142; Info=Cytochrome P450 6BQ11 n=1 Tax= Tribolium castaneum RepID=D2A096_TRICA
ttctgcaaatagtagatatattaaacaaacacacattttattaaatacaaaaacagcaaagtaacaatttaaatatttgttgtaatgatcacaataaattaaataaatgctggtattttcactgccgtaggttggcagcaaatcaggatttatattaaaccttgcagcaaaatttttcgtcctatgaaacgggttctaagtttagccaaatgccgtccttcacagttgagataaagttgctttcatatcttattggcaattttgttttttcattcagagtaaccttgtagtttcttaacacatagcataagcctactttactttgtagctttccaaatctcaaacctatacatgttctaggaccctcaccaaatggtaaataagcaaacggatgtcttttggctttattttcttcgttgaacctctctggatcgaacctgtctggatctgggtagtaatccggatccctgtgaatcgataagactggaatatttactcttgtaccctcagtaatgacaacatcggtgtctgggatttggtagtttttggtacaaacacgtggtaacatgcctaaaggtggatgttttctgagagattctaacaccactttctccaaatattccatatccattatggtttcataagtcactttattatcatggttcgcaagaaccctgttgatttcatctcttgctttatcttgaatttcttggttctgagctaactctaacagagcaaacgacatcgtagtggctgaagtctcgaacccagcaatgaagaacacgaacgactgtgctgccatctcgtttagagacaaaccctggatgttgctatttttggtcttttgcatcaactggtcttcattttcttcagaaaccttgcccatactcttcaactggataagtagttgcataaagtcttttctgtaaacgtcgttttcctctctgtacgccactgttttcttcaccaaattaatataaaagctttcagtatctttggaaaatatttttattccgattttcttagatagccaccgcgggaatatagtaagaaacatgaatttaatcctacccattagtgtagttctgaaaatccttttaccgtattctctaaattcagagtctgggttcttcatgctgtttatatccagaccgaatgccactgatccgatgacgtcagtggtgaagcagcctaaaatgtcttttatgtccacgggctctgtgctcgatgaagtagtcttgagcatttcttgaaggccttctgatgagctaaccatagtttggaacatcatcttcattttccctgatgtaaaagttggcgtaagcttggctctaagattcctccacttctcatcttcaaggttgaagagatgaccggtaaggggatctttttcttcgttaacataaagcccgcgatttgtaaaagaggcaaaatctttatgtaatatacatttaatcaagtccaaatcaaccggaataaactggggagtgaacaatgcataatgacccccaaaacgctttccttgcgctttaactttattgtaaagttctccaagaacatcggttatgtgggctcttctcttcattactggcttgatgttaccgtaaaagaacactggttcgatgtgtactacattcctgtctttccagtacgagaactgtcgcttagagtatatatatactagcgtagctagtgtaaccaataaataaatccatggacttatctccatttttaattaacaacccttctctcacttaatattttcatatacaatacttctaagtagaacaactttcagttttagctacaatgttaataaaaacg

SEQ ID NO: 6995 - DNA, 1823 bp, Diabrotica virgifera
  SmartBlast Evalue=3E-99; Info="Synaptotagmin, putative (Fragment) n=1 Tax=Aedes aegypti RepID=Q16WM9_AEDAE"
cctgcctatcggtgggtgctgtttcacagtcacagtagacgaactgaatacggagacggaatctcaaataagtctcaagttagtttccgtggagtttggtgagagattattttcttccgtacattatttaatacataaaccttgcgtgtgtataatttttttacctcaaccggttgctacatggcgtgccacagtttggcactgtcatcaataaaaaaatcaatggattagttttgtttgtaaacttctttaacctcaaagctgcgtgtacaaatttatgttcagtagattctcagtgttgtttatgtgtaaaaacagtgttcgtattgatctaccaaatatagttttcgataacttgtataatgagtggaaatacgaatatggacagttcgagttcgagcagcgaatctggtgatacaggtggtggtgaaatcaaaaatgaaaacaaacccgaacgaaaagagaagaaacaagccagcatgaaggaaattgctattagttttgctaagaagggagcactcttctttcttggatacttaatatgttacttaaacttttctctaacactgccgatccttgccatatgtaccttagtttatttcgagacacaaacttcacaaataaccaggaaaatatcgagcaagtcgaaggcgagttcatatacaaagaaggatctgttaaaagtggtagatgaattgccatcttgggttacctttcctgatagagaacgtgctgagtggctgaatgagattattggacaactgtggcctagcatctccctatatgtgataaagctgtgcagaacaaaattacaagcgaaaattaaaaagaaattcgattctttcagatttgaagatatcgattttggagtttcgcctccaaagattgatggcgtaaaagtttacaataagactattactaaggatgctataattatagacttcgacgtatactacgatggtgactgtgatatcaaattttccttatctggacaacaaattggctgtattaaggattttcaagttggagccgagttgagattagtattaaagcctttaatggtgaaaatgccgattgttggtggcatacaaatatttttcttaaatacgcctgacattaattttgaattggaaggaatcactggaattccaggattcagctactttatccggcaaaaaatagaagaacgaattaaaaagaagttagtctttccaaataagattaccaaacgattttcaaaatccgtcgaagctgctgaacttaagtcacttgaacctgctggcgttttgagggtccacgtttttgaagctaaagacttagaaagaaaggatgtaactggaaaatcagacccctatgttgtcctaaccgttggcgcacaagagtgcaagactcctgttatcaaacgagaactgaatccaaagtgggactactggtgtgagtttgttattttggatccattgggccagcatctccattttaaaatgtttgatcaagacgatttaaacgaagatgattttatgggaagcggcattgcggaaattcattccgtaattaaagaaggagaaaatgacaaatggtttaatttagataacgctaaacatggcaaaattcatctaagatttacttggttaggattgtctgctgacaaaggagatcttcatgcggcctcccaagaaataaaattattaaaggtagcggacattagtacagctcttcttaccatatatttagatacagcacaagaacttccgagagtgaagtctaagaaaccggatccatacgctgtcttgacagtgggcaaaaatcaacaaaagaagtaaagt

SEQ ID NO: 6996 - DNA, 1821 bp, Diabrotica virgifera
  SmartBlast Evalue=1E-153; Info=Sulfate transporter n=1 Tax= Culex quinquefasciatus RepID=B0W0Z2_CULQU
tgcactctcgggtattgtggaagtgataggatgtctgatcgttaatcaggcatcactgaatcaacaggaagcctgtaactccatggctagacatggataatgttgtttatcaatcactcctcagagacatacgaacagtagaaaattcaagtataagaaacctagcaaagaaacgacttccaatattaacatggctcccatcttatgatctagaaacgttttcacaggatcttctggctggatttaccgttggtcttacagaaattccacaaggtatcgcatatgcagtcgttgcaggtcttccttctcaatatggactctacgcgggattcatgggttgtttcatgtactttgttatcggtagctgcaaagacatcaatattggacctacggcaattatggcactaatgatacagccctacgtaactgccttgggagttgcaggagggattttgataacattcctgtcgggttgtcttatcttcctatgtggactttttaatttaggttttatagttgaattcttttcgtatccagtgatagcaggttttacgacggcagcagctttaaacatagcatcttctcaaataaaatcgcttttgggaattactgggaaatcagatacattcctgactgcttggatatctgtttttgaaaacatcaaacaaacgagactggcagattccttgatgggattattcactattatattcttagtgatggcaaaggaaatcagaagatttggatcattaaaaaggcgatccgattggtcaagaagaagaaatatctttggaatatctatttttatgttttcgttggcaagtaatgcccttgtggtcattttctgcagtgtgcttgcctacatatacaagcaaaatggagaaacgcccttcaaacttacaggtgaagtcaaaggcggactgccgtctttcggtttgccaccatttagtactgattttaatggtacacatttttctttcaaagatatgatgaatgaatatggatcactagttgtattttgtccattaattgccgtcctagaacatattgccattgccaaggctttttccaagggtcgatctttagacgccacccaagaaatgttggctctgggaatctgcaacatcatgggctcgttaattcaatcaatgccagtaaccggttcctttacgagaacagcagtaaaccacgcatctggtgcaaagactccaacatgtggaataatcacaggtatcatggtgctactcgctctcggatttttgacctccacttttcaatacattccaaagagtacattagctggtgttataatggtagctatgtactatctgtgtgattttgctgcatttaaactgttgtggaaatcaaaaaaactcgatctcattcctcttacaacaacgttagtctgctgtctactgatcaacttagagtatggaattttaatcggaatcgcagtaaatattgtattcgtactatattcttcggcacgaccaaagatagaaattgaagaattatctcctcagtattacttagtcaaattcaaaaccggattgcactataccgcttccgaatatttaagggaaaatatactacaaatgtgtaaaactgccaatagtaccgtcattattgatggtgaatatattggcaacgtagatgccactgtagctaagagttttaacgttctgcaagatgaactgaacattaggaaccaaaaagttatattttggaatttcaaaaaatctgtgattaaaacttgcctaggagttaatgagaacctcaaggaaaacttcagagaagacagtttacaacaaattatagctt

SEQ ID NO: 6997 - DNA, 1820 bp, Diabrotica virgifera
  SmartBlast Evalue=0; Info=Chaperonin n=1 Tax=Bombyx mori RepID= A1YM11_BOMMO
ctaaataaaatcctataaccttttttgggatttcaattcgaattaaataaatttcttcagaaacatacaagaaacaaatacagacaatggctttacacgtccctaaagcaccgggctttgcccagatgttaaaagaaggagccaggcactattctggtttggaagaagctgttataagaaacataatagcatgcaaggaatttgcacaatccgtaaaaactgcctatggtccaaatggtatgaataaaatggtcattaatcacattgagaaacaatttgtcacaagtgatgcagctacaattatgcgagaactagatatagaacacccagcagccaaactcatgatactaggaagtcaaatgcaagattctgaggtgggtgatggaactaactttgtgattatacttgctggagcacttttggagcatgctgaagaactaattcgtcttggagtaactcccacagaaatagcagaaggttatgagaaagcactagacaaatgtctagaaatccttcctaatcttatttgctacacaatcaaggatttcagaaacatcgaagaagtcaaaaagggcatacaaacctcaattcaatctaagcagtatggcaatgaagagtttctatcaaaacttattgcagaagcttgtgtgtcaattttgccagaagaaacaacatttaatgttgataatgttagaatatgtaaagttttggggtctggtttacataactctcaggttgtacaaggtatggttttcaaaagacaagttgaaggggaaataactaaagcagaaaaagctaaaattgctgtattcagctgtgctgttgatattatgcaaacagaaactaaaggaactgtacttatcaaaactgcagatgaacttatgaactttagtaggggagaagaaaatcttcttgaattacaaatcaaatgtatagcagatgctggagctaaagttgtagttgcaggagccaaatttggagatatggctctacattacttacataaatatggcatgatggttgtcaggttgaactccaaatttgatttgagaagattatgcaaaactgttggtgctacttgtcttccacgcctaacagctcccacatctcaagaacttggttacgcagatattgtatgtgtagaagaattgggtgatacccctatagtttctttcagattggagggcaaagaatcaagaatttccacaattgtcatcagaggtgctactgacaattacatggatgacattgaaagagcaattgatgatggagttaatacatttaagggaatctctcgagatggcagatttgttcctggtgccggcgccgttgaagcagagttagctgttcagctgactaaatatgcagacactcttccaggcttagaacagtatgctgtcagaaaattcgcatctgcccttgaaagttttcccaaaacgttggcagataatagtggacacaaatccacagcagtattagaaaaaatattggaagctcaccagaatggtcagaaaaatgttggagttgacatagaagctgaaagtgcagtatgtgacgctttggaaaagaacatcttggacctttatcaatgtaaatattggggactgaagtatgctgtaggagcagcagcaaccattttaagagtcgaccaaattattatggcgaaaagggcaggtgggccaaaagttaggcaaccaaagggaagtgatgacgaatcttgaaatcgttaattttgcgcttggtttctcgtatacacttaaattcaccttacaactcacttgtattaatctgttaatttaattttttaattaatatttctt

SEQ ID NO: 6998 - DNA, 1816 bp, Diabrotica virgifera
  SmartBlast Evalue=0; Info=catalase-like n=1 Tax=Tribolium castaneum RepID=UPI0001A4719D
agcgattaatgatttttccataaaatattccccttccacgtaatcgtctgcgcatacataacttttatcgtccaagttcaatgtttattattgcggctttcacttttgtataaaagcagtccagaaagaatccaaccggttgacggtttaaagcagtcgtcagtcgttcagtttttggtttatttagtttaaaagaacgagtaacatggcaaacagagactcagctactaaccaattacttaactacaagaaaaagactcaagggggagagtctgtaacaactggatatggcaaccccgtcggacaattcgcttctttgagcgtcgggcccagaggccccattctattccaagatcaaatcctagtcgatgaactttcccactttaacagggaaaggattcctgaaagagtagtccacgctaaaggagctggtgctttcggatattttgaatgtactaatgatatcacaaaatactcagcagcaaaattattttcttccatcggcaaaaagaccccaatcgctattcgtttctcgaccgtcggcggtgagtctggatcagcagacacagtaagagatcccagaggtttcgcaatcaaattctacaccgaggaaggcatctgggatttggcgggaaacaacactcccatcttctttattagagaccctatcttcttcgccagctttatccgcactcagaagagaaatccacagacccaccttaaagaccccgacatgttctgggacttcatgtctttgaggcctgagactatgcaccaattgttattcttgttctcagacagaggtattcctgatggatacagacatatgaacggatatggatcccacaccttcaagtttgtcaacaaagaaggccaggtacatttttgtaaattccatcacaaaactgaccaaggaatacaaaatctcgatgtcaataaagctgatgacttgtctgcatcagaccctgattacagcatcagagacctgttcaacgccatcgccgatggaaactacccctcatggaccacttatgttcaaataatgaccccagaacaagcacaacgatcgccattcgatcccttcgacttgaccaaggtttggccccaaggcgaatatcctctcatcaagttgggtaaaatagtcctcaatcgtaatcccgaaaactacttcagcgatgtcgaacagatcgccttcagcccatctcacatggtgcccggaattgaagcctcccaagacaagatgttacaaggtcgtcttttcgcttacagcgacactcacagacaccgtttgggtcccaaccatttgcaattgccagtcaactgtcccttcgctgtccgcaaccaccagagagacggattcatgaacaccaagagtcaaggtggtgcccccaactatttccctaacagctttaacggtccagtatgtgacaaagtcgctcaacatctcgaaccagcatttactgtttctggagaagcttacagatacgacactggagattctgacaactttagccaggctcgtatatttgtgcagaaggttctaaacaaagagcaacaagacagattggtctccaacatagtcggacatctttccggagctctggactttatccaagaaagacaagtcaatcacttcaaacaagtggatcaatcatttggagagagaatcgcagctggacttcaaaacgtcaaacacactaaggctaaaatataaatttttaagattttttacttttttgttatgtacttgatttttgttgttaatcaaggtgtttgtcaacgtttataataattatatacttcaaattttcgtgaa

SEQ ID NO: 6999 - DNA, 1817 bp, Diabrotica virgifera
  SmartBlast Evalue=8E-40; Info=Sox14 protein n=1 Tax=Scylla paramamosain RepID=B9VWK7_9EUCA
tccgagtaagagtttctgaaaaatatagtccaaatcaaaagtttcaaagtgagccgatttctatgcactttagtttacttttataaataataaaatattacaaaattaagcaaaatatgtatacatatttatttgatacttgctaaactagataaatatcccacttccccataaactgaacgacgagaaaggaaggcaactgaccaacataatatcctgtacaaaagaggccaaacaggggtaacttagagggaatcaatggaatacgaatccgttgaaatgcaaaaaattatcatgcattagttatcagatttaatatgtgcaattttactgaatacgaatatggcctagagtctagagtctagagcgtaacaaaatgttggtaagctaaaaaaatatgaaagtactcaatgaaataagaaacaaaggagtaaataaataggtaagatatacatccatttgcatttaaaaatttcgacaaatctgactaccagaaccatttatttcgtcacaaacacgtttacataaaaatatttatatatacagatcccttaggaatgcgattttcagtggcagtttaaatatagtggcattctcgatctaaaatgactgtcttacgtaaaactgttagattctggtaatacatcgtaatgataaatacaaaaataataaacgcaaaatgagatcaatgtttggggttaagaatatttataacaatataaaaactgtcgatgtggccatcgttctatataatgaggaccaaccccaaaatattaacagtataattgtgcctccacacacagtaaaatctcaaaaacagtcttaatctcttcctcacattagaaacgccgctgtttgcatttcggcccatgtttcgttttcgatgttagagaacatcggaatatccttgggacatgagaaatctaggtgcgatccggaactatttgaagcagtatcgaagttggtatcgatatccgctaattcttcaagattgatcccatccattggtaataggtcgtcgatcctgtctaaatcgtctaacgaggctggagtaatctgtggatgggacaacctatcttcaggctcttctttgactgtggtgaactggctgacccaggtatcgtcataaatggtagcactttctggtgaatccggagtatcacatgaaggactcgacggtaccttagccaggaagctcatcggaggcaaaggcatgctctgtcttatatggtcttctgtttcgactatcctattgagctgcctttgctctgcaacattggtcaacctaaatttcaatttcgatgccaccgattcaggcactgtgctacgtctggcgtaaatcttttcattgactatggagctattattatttgtatcatttttatgcaacttggatgatttcttgttctttttagaagaactgggtttgggagttggcttggtacttttctttctgggacggtatttgtagtcagggtactctttctgatgtaattgacgtaggcgttcggcttcttcgataaacggctgacgttcttcatcgttcagttgtttccatctccggcccagctttttggagatctcggcgttgtgcatatctggacttacttcacagatttttctgcgctcgatctgagaccataccatgaacgcattcatcggtctcttaatgtgattcggattgttcttttttgtctgagttgcatcagagtagggagttgacgaatttttatcaaccaactgagaaccaaagatgggttgaccactgagagagggtgtctcagaacgcgaggcatccatggtttgcggcaacatat

SEQ ID NO: 7000 - DNA, 1811 bp, Diabrotica virgifera
  SmartBlast Evalue=0; Info=Glycerol kinase n=1 Tax=Aedes aegypti RepID=Q0IFH7_AEDAE
gggcgtaatcttaattcgacttttcgtcgtcgtggactagtaaacgagacaaaatttgttgatgataacaaatgataccagtgcttatgacaccacaagtttaaaagaaataaactatatactgcaataacattcgtcgtcaatgcttgataagcttattcatgatttggcacaataaaatctgtgctattttgtcaatgtaatgtcttttactagcaaatagctgattttttttttaaatttccttattaatcttccacattggatacttcatcgtcgctatacagacatgtcccatcccatagctcgttccactgccatcttccacttggaatacctgacgtcccgttcattctccgtagacttggccgtccattttaccgcggggatgtccagggatttgttcaaatcccacactccaacagctgcccctgcaaccatcgctgctcctagagctgtactttccgccatagtcggttttaacactgttattcctgctagatctgcctgcatctgcatcaggaggggattggctgtcataccaccatcaacctgcaaaactgataaaggggaaccatagtcactgttcattgcttctaaaatatctcttgtttgataacaaactgcctctaaagtggcttttacgatatgggacgattctgtatcctcagatattccaactatgacacctctagcttcctgctgccaatatggagcatacaatccactaaacgccggtacgaagtaaacatcccctccttctatacccgcagccttctcggcgatctgttgggcatctccaaagctggggagtagcgtcaaattgtctctcagccagttcatagcggccccagctatggcaactgaaccttctaaagcataaactgcgggtgtgtcggggccaaatttgtaggcgattgttgtcaatagcccatgagagctacttactttcgcgtttccggtattatagagaagaaaacagccagtaccataggtagctttagcctgtcctcgaataaggcattgctgtccaacgagtgctgattgttgatcaccaagacatccagccaatttaactcctttcaacgaccttttcataatatttccataaacctccgagctggagcgtatagagggcaaaatattgctaggaatatcgaagaagtttataagtacagggtcccatttaagcgtatcgatgttcatcaacatggttcttgatgcgttcgtaacatcggtgacatgaacgcctccattaataccgcctgttaagttccaaatcaaccacgaatcgatagtgccgaacatgcagtttcctgcagccatagaactgcgtattttgggaatattctcctgtaaccatttaaccttcacagcactaaaatatggagacagaggaaggccacaaagaggttttaagtaattcttatttctcgttttgtttggaactttatttaacaaactatcgactgtagaagaagtccttacatccagccaaacaatggaattgtacaaaggttcccccgtctgcctatcccataatacagtagactccctttgatttgtaatccctacagaaacgatatcatcaacacttccacccaacgtgataagcttgtctatcgttttctctatgcatgcttctacaacggacagaatctccaaaggatcttgctctacccatccttcttgagggtaaatagaggatagctctatttggtgagacgctactacttctggtgtgccggctttaaacaaaaggaatctagcacttgaagtgccttcgtctatagctccaactagtggtccca

SEQ ID NO: 7001 - DNA, 1814 bp, Diabrotica virgifera
  SmartBlast Evalue=1E-122; Info=Pheromone-degrading enzyme n=1 Tax=Popillia japonica RepID=Q2TIL3_POPJA
ttataaatttttatttactcaagcattttaatataaaaaatacacgtcaaatcctgaaataaaatcagaacaattgtcttttataatataaagcaatctatgtgcattactgatactagatctcttacaattcatcctttttggtaaacaatctttcgttttcttcaattggtaagctatcccaaaactttttgtttccaatgtgatctttttcttctaagaaagtcttcctgggaccagcaatgtgcagttgcacccatggatcacttgccttcttcgaaagaggtttccagtctgcactaacatttggttttccagtgtccatgaatgatgtgagcatatctaacattagtttcgtcatttgtctatcatcttctgtggataaggtgtccattttcgccgccttaagtgtgtacgcagtatcgtctgcatgagatacacctatatcgacactagagtgtgtcttgtactccgacgaactgtgtgcgcctctataattaaagtaataggaatatacagacgattttgtagcttccgattgcaatcgtgcagctgtttctatatcttttataaataacctgtcgctcagtatcttaacaaatttagcataatcgcgtctactgactggcgttttcttaagatattcctgtctgattttttgactgactttatccatttgatattttggcaccgattcatggtaatgtaaaattaagggcattatgctatcccagtttttatccaagtactcagtatattcgtcaaagtaaaaatcagatgctggatataatccttcagaagaagtgtacgaaatcatccaaggcaaatcttgagttagacctttttgtaacagcaagaaaggatgctctggaaaaactggatcttcggcccagctgtctactaccaaaccgaatggagaaaatggattgtatagccaaggttgaaaatgttttacagtatttacaatctgttttgctggcttggttttcaaacaattaaccatttcttcattactttctgttggacatccgacaagagaagctacttttttggcatggttaagtggttcttccatcaacacccaagggtttaaaacacaaccactttgggaaaatccttttgcgaataagccttttgaatgtggagttatataatgtgtatgtacacttgctcctccagcagacatgcccataatcgttatggaatcaggatttcctccgaaatactctatgttgtctttaatccatttcagggctagaatttggtccctcattccaccatttccaggaattacattatcttcggtactcaaaaaacctagtggccccaaacgatagtttattgtaacgtaaataacgtctctatccatgatcatttctgacccatacaatccaccatggttaaacatgaaggcacctccgtggatgtagaggagtacgttcagcttctttgatgactgtttttttggagtataaatgttaacgtatagacagtcttcagttcctgataccatatcttgtcccgctggggtcatatgatcgtattgaatacacctcattattgtttctgccttccatattcccgtccacggttttactggtacaggtttctcaaaccttaaatcaccaactggtggacttgcatatggtacaccttcgaatgcattaaattcctttccattgactgtctttttaatgtatccctccaccactcctagtggaagagtaactgttggtggcggagattccttgcatattaccactcctagaacaaaaacaaatgttatataaatacagaatcatcttctgtaattg

SEQ ID NO: 7002 - DNA, 1810 bp, Diabrotica virgifera
  SmartBlast Evalue=6E-21; Info=Putative uncharacterized transposon-derived protein F52C9.6 (Fragment) n=1 Tax= Harpegnathos saltator RepID=E2BUQ3_9HYME
cattttattacataacattatatttctgtaatgtatataataaaccaaggaatgtatgagaatatacaaccaaaaaataagattgataagtattacgatgtttctttcttgtggcatgtttaacttagatattattttgtatggaattaaactagaatttattgtaatgagaattttttacatttgctttgacgtttcgtgcaatggatccaaaaaatccaagttgaacaacagcacatgattttctgaatttgatgacctggcaacgctgcggcgcttacagaaacaggtatttacgtaccaaacgaattggtttggtgaccccggtcttctaatataagtattattatttattaagctcaataggccttgaatacctatggctgaaagatttaatttttcttacaataattactattacatataatatttataacagtatacactatactactatattatacaatattacattcagtcatataaaacacaatattccttatagtctttccatacatttcttgaccacttccgtccattgttttctgtccaaaggtttttctttccagttcaccatattacttttttgtaagtcttcatataggctgtctttccatctccttcttggtctacctattcttcttttttggattggtgtacgtgatagtaccatttttggcattctttcccttcccattctttcaatgtgtcctaaatatcgaattatcttgctttatctgtgctttgattgccgtcgttatttttggttcgttatatagttcttcaagttccttattatttcttcttctccattgaccatctattttcacgcctccatatattgctctttgtattttcctctcccatctttctaaaaggtctatttctgattttttaagcacccatgtttggcatgcatatgtagctgtaggtctgataactgttttgtagattcttatttttgttttctttgagacatatttaatcgcagtgcccatactttttgcttccttttgccattcttgcttttatctccccttccccatgtcccttttcatctacttttacaccgaggtaagtaaattctgaaactcttaaacgcgcatgaattttctcatatctccaatgtgaaattgtgttctttttccttatctgtttctcccattatcatatattttgtcttttccttatttatgaggagaccaaacctttttgcttcttttattatgttgctcattaatttttttagctctttcttgcttgtcgttaatagtgttagatcatctgcgaatgctatacattgatggccatttttaaagtgatgtaagataagtagctatattattttaaatacatttgtctcagtttctaactaaaagcatgcacacataaaaaatctaattctaataataattgttgaagatgttacttttgttctttattttattttgtttgctatacaaaaacgttaaccaacattttacattttggaaatatgtaagtatgtatgtcgatatcacaattttaaaaattcacgcaagtgttgatgtaataaacttggtttaaaatattaccggatttatagatatataatttattatacatgaaaataaagaaatcctgtcatcaactctcgataatattcctttatcgtcacatattatcttttattttatttgatagcagattttgaatatgtataggtatatagtccgtccgctataacttttcccaggcggtacaattcattttcaatcaaaccaagtcaaaacataaattgaaacgaacgtcgatgtgtacatacattttg

SEQ ID NO: 7003 - DNA, 1812 bp, Diabrotica virgifera
  SmartBlast Evalue=1E-142; Info=Heat shock protein 70 (Hsp70)- interacting protein n=1 Tax=Aedes aegypti RepID=Q0IF61_AEDAE
cggggcatggtctgtcacacattatgatcattatattttatatgattaacttataaaattaagaataatgccatcattaaaatggcaaattgcttttggtctcggagcagccggtgctttgggtttagcttattggtatttaagagccagcaagaaagaaacgttgcagacacttaatgctgcaattgaaaatgataaggaaaataccccatttcaagaagcacaaaagtataagacacaaggcaacgaatttttcaaaaggggcaagtatgatgaggctatcgcctgttataatagtgcaatagagacaataccggaagaacacaaattagatcttgctacatactatcaaaatcgtgctgctgcatatgaacagctaaaaaaatggagttcagtcatatcggattgcacaaaagcgattgaacttaataatagatatgaaaaagcacttttcagaagagccaaggctgaggaaatgctgaaagattgggtaaatgcattggatgacattaccacagtatgcttattacagaattttcaaaatcaagctaccatgcttatggctgatagggtattaaaggaattgggtaaacaaaatgcagcagaagctataaaaaatagaatacctgtaataccctcgcgtagttttattaagacatatttttcttcgttctctgaagatccagtatttaaaaagttacaagaaatatctgaaccactaggactaggtgacttaaaaggttttttgaaagcaaaattagcttttgctactgaaaggtatgatgaagttatatcagcatgcacagaagagctgaatcttagtgagtcagaatcacagtacaaatttgaagccttatctcttagagcatcgttttatttcctcactggtcagttcaaagaggctttggaagaccttacatttataatagactcgaaagaagcagatcttctcatcaaggtaaattctcttataaagaggtcttcaatttacatgcagacagaaaaaatccaggattgtcttgctgattttgaagcagctgctgaattaggtcctgaagtatcagatgtattccatcacaggggccaagtaaaactgttaatggagcaaatagaagacgccagaaaagactttgaaaaggcggtggccttgaatccagattttgcagtcgcagtcgtacaaaaatgctacgcagactatcgttacgcaatgcaagtcaaagatgtaacgctcctcatgcaaacaatgcacgatttccgtatggcaattgagcgtttcccgaattgtgcggaaacctacgttttattcgcacaagtgaaaactgaaaaacaagagtttcacgaagccgagaaactttatcaaaccgccatggaaatcgatccacataacgcttctatttatgtacatagggggcttttgttgttgcagtggaagggagaaattgaaaatgctgtggaactaatgaaggaggctgtaaaagtcgatgataagtctgaatttgcttatgaaacgcttggaacggtggaagtacaaagaggtaatttggtactcgcgatagaactgttcaacaaagccatcgccctggcaaggtcggagatggaaatggtgcatttattctcactgagagacgcggcatcttcacaactcaaaatagcctcgaagatgggtttgggaccagatattttgaaaggagtgtcataatgcttggaattaatttcatgttaaaatttcatttgtagtggttgatacagtagattgttaagcatattgttgttaaatgtatatacagatcattcctaaattaaacgtttgtg

SEQ ID NO: 7004 - DNA, 1805 bp, Diabrotica virgifera
  SmartBlast Evalue=1E-113; Info=Probable multidrug resistance- associated protein lethal(2)03659 n=1 Tax=Camponotus floridanus RepID=E2A9S6_9HYME
agtatagataggacttcggtttactgattccactctcttaacatctcgactagtttctaaaatacgaccttcattacatagaacagtatccctataaggatagtaggtatcattatccagtaggttaaactacctagtacgaaacatatcgcaacaacctcaaggccaattccaagagtatccatgatagtcattggtaaaacttcatctaaagcaccgatgtctttggaaaacctattcagaattcttccagaaggatttatattgaaaaacctcattgggctgtaaactatgttctcaaacatcatattgtgcatttttgttgatgctgttatagcccacgcataaaacgaagacgacctgatattcataataattaccatcaccatgtttaaagcaatgaagtagaatgaagtgttttcactcacaaaaactggggttagccaccaatcagcaaaacctgtattgtcggtcgattgaggaggagtggtcaaatttaacggtgcggtaacattttctactacaaccccagtgtctgttgagtttagtatgttttgtgaagatttccattgttgaatattgacccagaaagtaacaaagtattgacatacgcttaacaaagcttggctaagtataaagaggaataatatagaaaaagccttaaagatatgtccaccagcttgagcatactttcgataaacacgtccagaaataattcctgtacttttaccttctctttgtaatacaggacctgcttctccttcagcttcttcttcttttgtttgaacaaccttagacttccttcttatctcttcttcctcctcttctatatcatgcaacagttcactataatgtgtattagaatcttttatattattataggacccggagacagctatttgtccattttttaataaatatatattctgaatatttttaaatactgtagttgatgagtgaccagtacgacgcacttgcttccaaggtattcacaaatacattcttcaaatatatgtttaccaacgtgtgtatccacagcggataaaggatcatctagtaagtagatatcagcgtctttgtaaactgccctagctaagtttattctagctctttgtcctccacttaaggtaacacctcgttcacccgctaaggttcgatcaccataagggaatagagtaaagtccctttctagtgcacatacacgaactacttcgttgtatttgagttggtcatatgtttctccaaataggatattttgcctaatactacctccaaataaccaaggctcttgagaagcatacgaaatttttccagtgacattaacagatccactttctaattcgagctctttcataattatgtgcaacaaagttgtctttccgcttcctacggatccaacaacagcagctacactaccagctgccacatccatgtcaatgttctctaaattgttctcgtattgtgacttcaaccatttagcagacgcctttttaatatgaatgcttcccttatcagatccagttaactcttgtaagtcttgtttaccgttttgtttaccattcagtgaatttttaagattttcaatgttaagttcatcatattgcaaaaatttctcgattctcttcatggatatccacatttcggagccttgagaaacggccatgggtaagaagtaagtaaggctgcccatgagacgataatatgaagtaactgtaaacgcatatgaagctgttaggggatttcctgtcaatacatatgtcaccaggcatatggcaacagctatatcatttaaagtcatgctatgg

SEQ ID NO: 7005 - DNA, 1805 bp, Diabrotica virgifera
actaaaactgtcactgtggcagtggcatttctcaaattcgtccaatacgtctaaaggttggaaacaatcaatatactgtcaatctacaagttactatcgccaaagttaacacctccactaagttcatctcttttttatctcacaacttcatatgttttccatcgtttgcgttatttttccggtcattagtgcgctcatcactgtatacaaacatatatactaacgtggatctctagattagtctgtaaataaacaggtctagcatttcgtaatattacagattactatagataatataaaaaatatatgaaattttcttccgtcgtcaccccataccactttaatttattaatcacgtatcctgtcagaaatctattgatgtgaaattcgtcaagcaatctctgtatagcttatctagcagccttagtttaatatacagtaaccgccacgctactagatacacgggttcattgagctaatgcagtcctggaccaatatatgtaaacacagaaagttgacagtttatagaacatacagtcggaaaaatgaaaagattacccatgaacgatcatatcaatcacatgttattcagattattaataattatctccctattaataattctctctctctcgttttgatatttatggaaaaagacagcaaatacaaaatatgtgattgatgtgatcgttcgtgggtaaactttcattttccaactgttgttgttttttaacttatttgaagtttgtagttgtcattgtgataaagttgtaaaagttataaagtattgtaatattgttggtgtttgaatagttttttaaacagggccggatttaaggggtagcaggctgggcagctgcccggatcccccacattccgggggccctcacaaagcctcaaacgcaaaaaatatcagcaaatttttcacatagcattatttttgttttatacaaacacttttgccgtccactctttaaatttagttgcaaaagctgcagctgagtgttgttcttctgctacagcattatccgatttcttagaagaactatatgtgttttcacttcctctacatatagatacaacttgttaatcaaatgtttaaaagctgcatctttaagcgacagcaacgcagaccgtggcagaaatattagtgttcctaaaagagtaaatactactagatggttatccaaaagtgataccgcaaaagctctagttaaagattataatctgactaaagtagacttatccaaaatttcagaagcaataatttaaaactcgtagtgatacaaattggatgtgcttactgtaaacaggaatatttgcaatattttgaaatgaattgttagagaaaacaaacagtccaagtcgtattattctccaagatccaaacattgtccttaattcaggagtggtatttagagtggtattggggcatttagatcacttaaagaatttatacagtcaaaacgtgacaattttaaaacatatgagaggcgaggcgcgatggtaagcggaagtcaagactattcgacacatagaaaatgactacggaatattcgactgactccactggattatggaacatctcaagaaactgaaatgacaaaatcagagaaaaggactcaaaattttatcgctattatagatcacctcattacctctttaagtcagaggctctctacatataaatgcattcatttaaatttttgatttttacatcatttagatatattttggtcatgcatataaatgtacaatattttggccatgttatgtgacacccctcttcttctttaagtaccgtt

SEQ ID NO: 7006 - DNA, 1810 bp, Diabrotica virgifera
ctggcgcgtacaatttttgtgttgtccttgacttcaattttttttacttttaaccttggggttgaaggtacggtgtgtgtggatcagtttgatccgaaagatgcgggtgtttgccacaagggtgtaaataatggagattcagaacaaaccattgaaatggaccagtcaattgtgcagaccacggaaggaaaattaaggggatgtattagacacacttttgatggtgaagagttttatggcttccttggaattccttacattaaaccagctttaggagacctacgatttaaggctccacaacctccagaaccttggaccggtattagagatgcaacaaaagtgggcagtccagttttccacaaagaaacttttactaaatcttttcttggtggcgaggatggggtcaatcttaatgtatatactaagaagcccattccacaaggttcaaagcttaatccagttatggtttacattcacggcggtggttacgttgaaggccgtaatggtcccgacatgttcggacctgagtatcttctcaccgaagacgtagttttggttgtcatcaactacagattgggcattcttggatttttgtccctcgaagatccttccttaaaaatatacggcaacgctggacttaaagaccaagtggcagcactcaaatgggtcaagaggaatattaaaaactttggtggtgatcctgataacgttacgatttttgggcaaagtgctggagctgccgctgttgagtatttagtagcttctcctgcagctaaaggacttttccatagggccattttccagagcggttcagtcggtagcttctgggcttctggacaaagattttcaaagggccttttgcaatttttggaaaaaggcaacctgtcagacacacaagctttagaatattttaaaagtttgtctgttagagaattgtacgacattatgactaagtacaccaagagtattccatcacgaactttagggcttcttggtccgatagaagaaattccaaatgatacagcctttatcactaaacatccactgcagcatattatttctggggattataacaaagttcctataatgatggggtacacttcaaatgaggtgatctgtctcagctctgaacttatggaagatcaaggcaaagctttcgtagacaatttcgatatcgaattcattttgaacgctatgataggaattgaaaaaggcagcgagacatctaaaaagtacgtacaacggatacaagagatttataagatgccaaatggtgaaatcaacaagtacttagtattatcagatctcttctttgtaacaggtgccgttggttgtgccaaacatcacgcagctacgtctggtaaaccagtttatttgtacagaatgtctttagatgctggcctaaatatgtttaaaagattagcccatcttgacgatttaccaggagtaagccactttgacgatattggatacatatttaaaaacgcgggtttcccttcaccaaagaacggtaccatcgaggagatttctgtcagaaggtttgtaaagctgtggaccaactttgcaaaatatggaaatcccacaccaaaagaaaatgaattgggaattatctggaaaccattggaacctaagcaggactatctgtttgatatagataggcaactttctttattgaccgaaatagaacctgagagaatgaagttatggcgtgaaatctttcagttgaatcctatgttgaaaaatttgttgtaaattttgcatttgtgtttcactattatttttaaagtttattaaaatgcttgttcagttg

SEQ ID NO: 7007 - DNA, 1810 bp, Diabrotica virgifera
  SmartBlast Evalue=1E-127; Info=Solute carrier family 41 member 1 n=1 Tax=Camponotus floridanus RepID=E2ABA7_9HYME
tttaaataatttcctatagcatctataaatttaatatgatttgtacaataaaatataatcacaataaatataagattatggccccaagtatgggatttgcacaatccaccctggaaaatctgtaacatcactttaatcaccaacgtcactatctctatctccaatgaggaagagtaagtgaaaagctagtgctaggagcattgttcctagtaagtctcctatggccgttaaataaggtatagcggagttatcaggatcaattcctaatttccacatgttgagagtcataatttgggcgatgtataacaacaaaaacacttgcaatagagcagcggctaagtaaatcgtcataaaaataactgtaaatgaagtatgacctgcttcgagataacttatagtataagaaaaaatgaggtgcccaggtatcaccatcagcatcaacatttgtgcggtacccgcatggcttgtttcttttttatcacaaaaagccgaacaagggcttaagcatacttgcatatgtggtggtaagtaccctggttgtgcaatactgtgcaactcagtagatatcctactggcttgtactgcaaccagattccctccaactccgtttataacaagctggaatacagctactcccttaaattgggaaactgtaaagtccaaaataagtccaccgacactgctaattatcatagctgttacgacgggactccaaccactgaagaggactttgtttacaaattcattttggctggctaaccaagcccaaagaggcaccattagcagcccaatcacaatagagcttgatgttaagtacggatgtgtatccatagtatggtaaaaaactgaagctaaccatgacaaacacgccaaagttgttaagtctcctaaacttgctgctataggagtagcgacattgtcaggattaatgtgaaaatgcctagaaacaataattacaacaaccattaccaaacctaaaataaaactggccccaaaagcagtgacgatactgctggcacacaacaaaagagcatgtttgagattgatgtccccacttagaacccaaccgaatatcaccgctgctactgaggctaagaatcctactacaatggcttggcacaatattaaggcaagatttcctccgatcaaagcgattttctgatggtgtgtatcgagatgtcccaaattcgcatgtgttgacagtcgagacgctaatgtcatttccaagtttcctttgagacccagaagtgcaggtactaggatatacacctcgctaacatctttatatactggccaatgctgtaccttatctaataacaaacttgctgcaaccattccaaacccagccacaatgaatgggacgaacatttgtacagcagtcacccatactggctccttttgttcaatactgacttcagtctttgagatctgtccactattaagtaaaacgcaggtatctaatatcacatcctcttcatccatctcttcatcttctggcatcttgtgtgttttgaaacttctctgttttctgcgttttaaatgtaaattattgataggtttctccattgcaatatctaattaacaaattcattattaacatcatgctagaagcttccaatagtcattaataaatctcattacgatcaattttagagcaaaattacaactataaccgattatagcacaaatcttgaatataaaaacaataaataaattgtagttatagatttgtagttaaacataaatattatataacctaacaccttgatgacttcttactagttcctacttcttcttcttcagaaattcg

SEQ ID NO: 7008 - DNA, 1808 bp, Diabrotica virgifera
  SmartBlast Evalue=1E-161; Info=Kelch repeat domain-containing protein KIAA0265-like protein n=1 Tax=Camponotus floridanus RepID=E2AE06_9HYME
ctctgtcatataaaactgacaagaatacgcagctgattcggcagatacccagctaactcacactcattgtcaatttttttgtgaattcctaaattaataataccttcgaaaagtagactaacgaaacagtattaaacaaaatattacaaaatgatcaaaaatggtaaaaatactaagtacctaaaacgtaatagaataaaatcacacttaagcttttccgttcatcggctttccattgaggttgccatgattcacgttgttgtatagctgtttcatattagaatcacggttttctgacgttggatatttcgaaaaatccgaatctgtaactgatctgcagaactttttagatgtcttccagtcttcccttagtgataagttgaacatggaataatctggattacccgtcacttccttcttgatatttaagaagcttggtagagtttttaataactgctggtcatccagagctgagtaggtttccaagaggatcatacctcggcatctcggatgacttggctgttcatagatatccaattggaagtactgattattctcgataaagcatctgcgtcttttgtagatcgtgaaatgagttttgtccttttgtgtcaataaattgatgtagtcacgatgagctatctgcgttttcacctcgataacttgtcccccaggatgattttgtctgcgcacagtgtgaatgtaactgtagtgacctttctggcctctcttcctcaatctaacttgattaggcgaattagattgtagatagttatgcacaacttcgaagtcctgaaatggaggaaagagcaggtcgtccggtaaaggtccctcgaccaaaaacttgtgttttcttgagtttttcagtaatctgtcgccggtatccaagccgattttatggcacactgatacgatcatccttctgatttttccctcgaagtccgtggagttgtcgatgacgtcgaagtacgggtggccaacccaggcagcggctgctttggtatcaagttctctggctagttccacgccttctgagcgacagttgtgatcctctgtggaataaaattcttccgcacccttcgctgctgttaccatgtgtattatttggttatatctgttatcccttaattctacattattccaggcgttacctctcatgatagtctcccatgtttctttggcaacaaatgctgaagcatccatagcccccctatcacaaattataagacagtttcgtttgcaggttttcccaagttcaaaaaaggtatcttcaatttgcagcatacttttcaataaattttcctggaatttcacactctctctttcatctaggtctgcaaacttgatgcctccgcccagaaggactgaagctgtttcaggtactcggaaaaccttccatcctagattttcgaagaaggtacacagtcttgcctggcctgttgttttgcctccacatggacctccagtaagtaccaatttgtagaggatacggttatccttcgggtcttccatactgataaaaaaatgtaatccttccaaaactttagaaaatactttttgattttttaaaatttcatttgaaagatggtataaaaaataatttcttgtataacaaaaccgatcttatgttgatgtacaaataaatgtaaatgatgattaatttgaagaactggagcacatgactaaattttataaattgtaaaacgcattttggatttttcgcgagtctttgcgacgtaaacaccgcacaaggcggaaaaacgttgtctgaaaagacaagcaacagaaagacccgtttttgtcgtttt

SEQ ID NO: 7009 - DNA, 1806 bp, Diabrotica virgifera
  SmartBlast Evalue=1E-148; Info=Thymus-specific serine protease n=1 Tax=Culex quinquefasciatus RepID=B0WJZ7_CULQU
atccagtccaaagtttatataaacattttttttcattattaaattataacagtgaggagtcttcagattagtttgcaaattgtgaatagttaaaaaataggtgataaatagatggagtgttaccaaaaaccttaagcgatggctagattactttcatttacaacgatagtgcttttactatctattttcggttcgtttgctgctggggctactttctttcgaaggggaagaatacttcatccagaaaaagatccagaacctagcaagtatgaaagatggtttactcaaaatctggaccattttaaccctaacgatgagcggacctggcaacagaggtactatgtgaacgaggaacttgctagtggcaaaggcgatctcgcctttcttcaaattggtggagagggagaagcaacagctgcgtggatgaccaacggatcatggatcacgtacgctcgcaaatataaaccaattttgttccaactcgagcacagatactatggtaaaagtcatccgaccaaagatttaagtaccgagaatctggcatatctaacaagccagcaggccctaagcgatttagcatttttcattgaagccatgaaccaacaacacaacctgagttctgatgtaaaatggattgttttcggaggttcttatcccggaaacttggctgcctgggtacgccaaaagtacccccatttggtgcatggggccatgtctgccagtggaccacttctcgcacaattagatttttcagaatattttaaggtggtagcagattctttacgagccagcaacgaaaaatgtccaaatattgtgaaacaaagtactgcccaagttgaagctcttttgcacactgcagttggtcaaaaaaatcttaaccaactattcaatttgtgtgaggatataacagagaacgttcataattctttagacgtgtccaacttcttcatgagcttagctgataattttgctggggtggttcaatacaataaagataacagggaagcaactaaaaagagaaacctcaccgtcgatcgcttgtgtgacattctgttggatgaatctatcgggcctgaaatcaatcgcttggcagctgttaataatttgattcttgacgtggatggtgagaagtgtttggattacagttataataagctgatcgacatgatgaaggatgttagttgggacggcgatgctgctgagggaagtcgtcaatggacatatcaaacctgtacagaatttggttattatcaaacttcctcctacaaacctcatatatttggcacccgatttccacttagtttctccattcagcaatgccaagatattttcggatcttcatacaatgaaacgtttctaaatcatgctatagaaaggacgaacgttctttacggtggtttagacattgaagtttctaacgttgtattcgttcagggatcattggatccatggcatgttttgggagttacaacaaccttaaatgataaagctcctgctattcttattaaaggtgccgcccactgcgcaaatatgtataacccttctgatgatgatactcctcagttaaaggcagctagagtccaaatacaagaattaataggtagctggatagatttgtaatctagttctaatgtgttaagttgtattttaagttatttaagttgtattttaatctaattcgaagaaaaaacacattattagtattaaagagataagtataaaacattgatattaaacaaacaaatgatattaaaagagtgtagcttgttgtaaaaagaaattttgttttaataaagatatttatat

SEQ ID NO: 7010 - DNA, 1805 bp, Diabrotica virgifera
aaacatcaaaataactaaaataagcaattgaatgagcatatagggcacataaaattttacataactgtacctaatttaagtttttacacaagtgaataactgttcattatccacaacatttaatcttaatattaaaatagatataactcatctacaaaattcgatggtaaacttttaccatctagatttatctattagtcaatgattttatcttatcattttttaaggtctttattttttattgaattggttttcattgcttccggatattatagatttctagtgaggtggactagctcaaacagtttctgtgtccagtgcagaatgcttcattttaatatttttagccccactagatgtacatagttacttgaaggtacctttactgtatccctgaaacttgggtttattgattttatttgctgatcttgaattgttttaaagatttgcccgactattttaaggaaacaaattttgaaaatatgaggattttgaatcattaataaagttgctatctccaatgtaaccgcttctttacttttggcaatgaagcacttccaaaaataacttttcaattgcatatcacgatcagtgctgaatcttggctaaagtcagtagggattacaaagaggactgaactatagtccatacatttgatattcaatatttagtatacaacaatgtttcacacagtttcattgttcattatcaagaaacgctacaagtataggttgtaagtctttcaaaagcatattgtagataacaactgcagtgtggtgaaagaaagtggaaagaaattggaataaacgaagctagatagttttcatgggacaatatttcgaaaagaaatagtttcataggttttggaaatatgtatacaaaacccttgtactgccaatgctggcatatggattagaaacatgaaacatgtgaccatctccaagactgatgaaaacatcttgctctaatgccgaaatgggcagaacatctagcaatatcgcagcagaacaaaccttccagacgaattctgatgtgacagcggtgagatgtagacgaataggtaggtcaaggtaccaaggtattcaccatggaagaaggtgtagacgaagatgctagaagatgcaacaaattggcaagggttgacaatggaaaggactgactggcgaaataaacttccagaaagaaaggtccaggctctattatagggctgtagcaccatcaatgatgataaggtttcagaaaacttatcaggtactactcaatttaaaactctttaatgatgttcgaaaccattggtcaatccaactaatagtttggactttaccaagtagataactagtaactcaaaggcaaagttgtggccacaacattggcttattaaatgttttaaatatttgtagagttctaatgattattacaaactattttctatattaatcaatgataatacaaaattaattaacacaactaaaaaatataaagttatgagtatatttctttttcttttattacgggatatgtcatgtcttataaatatgcgaatttaaccttaaccataaagtaatacagatgtttattttgttttggcaatagtgctatggattttggacaaatacactattggaatgaatacttggccaacatagtggtgttattttggtatatgatcacacataatgtattgtcagtaactataattgatcaccaacgtccgactcatatgcttaatcatgtaatgagaacgacaaactgaaaaaataaggaaaacacttggctgaattaataaaataactctgttttgcaag

SEQ ID NO: 7011 - DNA, 1804 bp, Diabrotica virgifera
tagggctacgtatttcttatgaacgatagaagcgcgccgatgccgcttctatcgtatcgagaatgaatcgtatatcggcaaactagtagcaacacgtgcctgagagatttggcaacactgatctgtataagccaaacgttccgttcttaacgtgaaataaagtatagcacatttcttctaaaagcatatttagacattttagtttttgaacaaaggatgacaacgcattgtagtaacaacacaacaaaactaattccgttataaatcaaatgcattacaatttaagaaagattataatatataatatagaaaagttaaatgggcgcaattacataaccgcatttttaacgtaaataccctatacgatacggtgttttaaaaacgatattacatatacaccggtatattcggcgtcaacgcccttccggtagggatctatgggggagtatcactaagacacaagcccttatcccttgtcgtactgctttctatagggcgatcagagaccaatgtattccagtctaagtcgtagatttaatttagaacttaaaactgctgcgttagcctttttatttttctgtccactgggccagggtttgaactcacatcaactagagcacctcgcactgaagcgaagtgaggttgaccgcctgtcccgcttggctatctgaccaacaaaaattacattaactttctgtaaataccgttttttcattcataaaggcaaatggaagtactgctaaatatattgttacattgttctgcgcatttagcgattaagtgaagcaagatgtggtttaactaacagtatttaacttaaaaacttacttaattacaaatattacaatcacactgacgcgtcaaattgagattgtcaagtccgcatgaagtctttttagattgtcaagaagtaatcagaattactattcgacgttactgaccaatctacaggaaaaagtatggaacgaagaggaagcaagttgtccaaagatatctttacatgttaatctccctgcgcactgtataaaaaattgtgatgtacgcttcgaattaatctaacagccttcttattcaccagatctggttccatccgattatcacgtctttcctcaactgaaagaagtcgtaacttttctatcaacgcgcatgatagaagctgtggaggcctgctttacagagcatgatatcaatttttcgaaaactttagaaccgttgtaggttcgtttaataaaatatctaactaagaggaatacttggacttttatttgcttctatagcaataatttttcactacgtcatcgtattatactaaactgtactaaacgagacggccgtagtggccgactcagtggctcagacactagaaagttttcaatttctaatttaactgagccgcaaccgtgtttcggagggcacgtgaagccgtcggtcccggctacgtaagtagtcgttaagtcatgttaggggtgcttgcgcgacctgaaaacgctaagccccggcgcaaattgatcctaagcgagacacaacctgcgccggcaaactgcctagacagttttgcgcatccaactatcagtgcatgcgttcgcaggtctcacttgggaacacgggcgcccatataaaaatttttagggggcgagacgcgaagatgttgcacattatattatgtatactttggataaccatatatagtttaagcacccaaaaagcaaggggggcatggccccctgtccatgggtttgggcgcctatgcttgggaacgtttgtcatcggcgtacagttttcttggtccgtgggacgcgtgact

SEQ ID NO: 7012 - DNA, 1800 bp, Diabrotica virgifera
  SmartBlast Evalue=1E-114; Info=Putative RNA-binding protein Luc7-like 2 n=2 Tax=Aculeata RepID=E2B304_9HYME
ggaatgtggtagcttgtcctagttacatattgttgttaaatatatatttttttgatattttctagtgttgagttgaaataaggcaaaaaaatacaaaatgacagcccacgatcagatgagggctatgttagatcagcttatgggaacaggaagaaatggtgaaagtaacaaattccatgttaagttcaatgataccagagtgtgcaaatcatttttgctcagttgctgtccccacgagattttatcttccacacgaatggatctgggtgaatgcccaaaaatacacgatttggcgctgcgagcagattttgacaaggcccagcaatccaaggactacttctatgatttagatgcaatggaacatttgcaagcgttcataggcgattgcgacagacgtaccgagtcagctaagcaacgtttggcggaaacccaagaagaactgtcagccgaggtggccgtcaaggctaacagcgttcacgaactagcagagcaaattggtcaaaaattagctaaagccgaacagttgggagaagaaggatttgtcgatgagagcatgaagcttatgggagaggtggaagaactaaggaaaaagaagctagacgccgaacaggagtaccgcaactcgatgccggccagcagctaccaacaacaaaaattgcgagtatgtgaagtgtgttcagcctacctcggtattcacgataatgaccgacggttagcggatcatttcggaggtaaacttcatctagggttcatcaaaatcagagaaaaactggcagatttagagaaaaattcagaaaaacgtaaagaagaaaagaaaaaatctggcagggaccgagatcgcgaagagagagacgaccgctacgatcgacgatacagagaacattacgttggtggtagagaattggacagaagatctaaaagacatcggtctaggtcgaaggatcgcaaagacagagagcgcaaagataaggataaaagcagaagcagtcgatacaggtcaaggtctagaagccgtgaccgcgatcgcagccgcagatcccgctcacgccattcaagttcaagcgacaaaaaaagggatagagatagagattaataggacagtaatttataattcgtattaagcgtttttgagaaagatgccgaaaatgtatacacaacggtttgatgttcagagtatcacttcagtgatggcatcgatattttgtattgtacaaagctgtcctgatcgagcttcattggcactagagtgacccgcattagtcttgaatttattgacactaaaaattttcaccaaatcagtagtttacactgcataatatgctctcatatatttcttaatgtaatattacattttatatctcaatattacatttccaaaatacattattgagcagattatgccactcttgtagtcttttattcttctttttgattgcttaattgaggtattcaccacttgtagcctccacatagctcatatttgccttaaatgaaagtttctttaaaccagattcaatatcaaaccattgtgtgtagatgttttactgttatattggaataatattttaattattcgttgtttctttctcgaaagtaaaatcactagattgttcttgtgtggtttctaaaaaaacagaactgcaattaaataaatagatgaaccttcattttaaacaatattatctcttcctttttacgcaattcgccacaataatataatatataccaaaaaggtctgtaattatttatgtgattgtatcatatgagtaacattattatgtaatttcccatgttatataa

SEQ ID NO: 7013 - DNA, 1800 bp, Diabrotica virgifera
  SmartBlast Evalue=4E-12; Info=Adenomatous polyposis coli protein n=1 Tax=Harpegnathos saltator RepID=E2BCD3_9HYME
ggccgatttcaaatcacattaatttaatacaaaatctagtaaaaggtacacacaataacctaaagtaatcaaaaaaattgaaagcactgtatagtttatatgtatctacaataaataattcacagtatataaagacaaaatgctaaaaataaagaatgcccttaaaagaacactaaattgaaactaaattaaaaactaatcagtcgtaactccatccccacctccatctgttataacgaaagagtccaaccttgaaatgcgcttctcttcagtttcacaacgtgttttcaatcctgacccatctttattgtcaaatgtgttgctcctgattaaacgaggaggttcattttcactttcagcttgaatccagactcgagtgtctggtttaggtgtctgttttttactgtcctcaatcttcttccacaaacttgcaatcttactggttacttgcttctttgaatttgcactaccgctcgaatttaaactagtatactactagatctttgagtaagactgggtatcgaagacttcttcacagccccattctgctgaggcttcccttctcccttcaagctttgacttgaaggactcgcatgaatcttcctggtattctgctctctactgtccgcacttgtagacctattatacactttaggattcttgtttgctctatcagaactggcagattttgtaaaaccatttctcgttgtgcttatgggtggtttcccaggtaatttagagatagaagacggtgatgttattttagaagctattttagatgcgaaggctggaattttggagactgtgggaattttgctggtagctttggtaactgtaggtgaaggtgcagtactgtttgaatttggttcgtcctttgtgaatgtaccttgacggtctaagggtggagtcccctttaatggattaaaattcgtcgctttgggggtggccacatgtttcggactacctctactgcttgctggtgttcgtgcaggactcgtttttggcgacattgaatttgatacgcttctgctgccatatccactcgatgttctactttgtgtttgtgcggttacagttttgttttgcctcgaaaccacggctttcaaagccgtcccggatttaagcgtcgatgtgacgtttttcactaaattggaggtcatattcctgactggttttatattctttggtgttgaattggtaatggtttggaataaagtggttttctacggcctcttattcctttgggcacttcttcaactggagcttcttctgtgataaccctatcttctggttttactattttcggtttggcgaatactctgcactcattttcaatgttttcatcatcagaattgacttcttccacaggactagtttcggcttgatgattattcaattcgttagtcttgatattggtaataacaggaacgtttttcttcaatccccaactcttgtgatacgttctgtagttgacagaacctccagagttgtattccgaatcgtcatcattgctcactaaactcaaagtctcacaatctaggagttcatcttgggtttttgtatctcgcaatgttttcaagaccctgttagcttccttctgtaaatgcaattgtacttccgattcaccatttaagggaggcgacgcagaagaaatttcgggcgaaaaactagactcacttatagttctcgtcctgaacctttctctattttctagtcttttttgcataaagtttcgtctaatacttagtttggttctagctgggctctgtgctggagaagaggaacagctatttgagttgg

SEQ ID NO: 7014 - DNA, 1802 bp, Diabrotica virgifera
  SmartBlast Evalue=4E-92; Info=Encapsulation-relating protein n= 1 Tax=Diabrotica virgifera virgifera RepID=D7EYY4_DIAVI
aggaaaaaaatgaaaagcggaattgatattcactaacatcacacaaagatgaagtggttggttcttctttccgtcgtaacgttaagtacagctttgccaactctccgcggcagacacctttccattggtgatgatggaactgtaactcttattggatctaacggtttcgaaattgatatattcaaaagtgttactgaccccagcatcgttgatgtcatcctaagaagcccacgtggacctaccaggtcttttcaaattgatgaggtcaacaatatcagagaagttagtgaccgtaatgtcttcggatattccagatatcatgacttcaaccaggctgatatccttgcccaaatcttccgtcagtaccaaggttctatagcggaaaaccaatactacagtcttctaaacagaatccaattgttggtcgaaggaggagttcttaacgaagctatctatgatgttttgagggaatggaaccagtacaatttgcaagatgttagcgatattgtcccatcgcaacacagagaaaacattttacccattaacgaacaatggaacctcgatagagaaactctaatccagcctcttcaatccactttggaagaaattagagaaaaacgccaacttcaacaagaattattaaaatctggaaagtattttgatctagaggatgaaaaccttgatcttcttttaggagaaaagtataacactgacaaaattttgaaacttatttacaaagaacaaattggccagttgccaataaatccttcaaatgtacttttgatgaggccaaatggagaagacaaacctttagatgttaatttcgttgataaattcgtaaaaaatgaggattcaattaatttgaaaatccaagagttcatcgataataaagatatcgcttcaccatacctgattttcaaacaaaggcttcttaatattgaagtagaaaagttcattcaacaactagcataccatcaaaatctaattaatcgacaaattgaacaatatatcggtcaatccgaagtgattcctaacgaattggtatatcaacaaagattaatctttaaacaagcctacccattgctccaaaaactgacagaagacgttttgtttataaaccgcaaaattatagaacttcgtggaaaaggaatattggcagaaagagaatttttcgtacagcaaaaaataaattccctgttaagtcaacaattgataaaattattgttagttcaacaaattcacttgaagcaacaaatacaatcattaataccaaaagctgatgctgtttctagagatttagttctcttccaacaagctacccaggaacaattgcaagacacaattcactctttaatcaagcagcttctgttggaacaatcgtcattcaaggatttagtcgaaaagtgcattcaagaaggtaccgcaataccccaggaatttatttcccattattacataatccacaaagaattacttcaattaatcgcacaaggagataccattcctaaagcaatttggtaccaacaatatgtaatgcaccaacaaattgtattttttctgaaacaagccaatcttatgacccaaccaattttcccacttcaacctaagaatctgctgcaacaactcccttactaaagaagtattaaatggtacttcttgttttatgtaaaaaaattatagtacttatcaagatattttagaagaccttaatcttaaacttattacaagtttttaagttttcggtcaggtagaaattaataaattttaatctattgtatttttaataattattacatatctgc

SEQ ID NO: 7015 - DNA, 1803 bp, Diabrotica virgifera
taaacaaacacttcgaaagactttataagacactaataacacaggaacaataattttgttagtgtgtaatctgtgaacttcatggctatgatactaatcaattatagctaggatcattcatccgacccaagttggagaaggtttatgtaagtccagcacgtctgtttgcctctagaacatttcaaaaacaaaaaaataacgaacattgttttaagaattattgttctgctgtgtaagaagtctcttatagtactgcataaacagtggtgcttgttcttggatcgtcttttcaatgttttcattgtttactactttttaactgatcctaagcaatacaattaaattgaaaatatcgagtatatttttttcttatattgaaaatatcaggagaatcctagtagtatcttcgacgtttgtagaaaaatgctgctgtctattttccacatttatttaagtttaggtagcagagtactgaatagaatgagataaaatcggtgtgttaggtacggttttaaaatccgattacctcgagacgactgctacgatggtgatttaacgataatcaaccctataggggttacataggtcttgtatttccaaaaaattcaattttttattccttatgaaagaacagtacttcaagagtatttacttcaaatttgaagtaaattcgagcaatattaccggagttatagcgatttgaatatgacgcggtgggacttgtactctgccttccctattattggctccgtgcgtctcccctctacttacagtcacgtgacacgctgtcagattttgtcaggacgttttaacattgagtcttatgggattattttgttaaacttgaatattttattttgtagtgattataaccgaatacaattgttagaattcattagttattaatttatactgtaatttatagtgcaacaaaaatattttcttttgcgttaataaagatttattgacataaactgcgatagtgaggttatgtatacaaaatcaaactgatcaaatttatatcagattaagtgcgtttttattttctgtttatattaatacataatatcactagcgtgacacggcattttttttaaatgtctcatgtaaacatacacaaagcgtcctgataaaatttcaaaaaaccgctaccatgagcagatcggtcgattttgctttgacactttgttaacgctcggagcgaataagcatgcggcacggttctaccgcgtaaaatcagctttaaacgcgtttttctcgaaacggttttttccgtgcggtaggcacgatttctcaagaatgaattgaccgattttgctcaaagtttgcacagttcatctttatagtattgtttcctgattgaacgaggggattttcaatcggtcgactcgttctgagaaaaatgttttaaaaacgatgagaatcggcaaaaggctaaaaaatatgggacgaaaattcattcaaacttatttcaaaactttaagtttcatttttttcaaacttattttctttaagacctatgtaactccttaatcggttcagtagatttcagttgattattagggtaaagtacagaatttagtcaagcgagtctgttgtacaagtttaataaattagggctgtagcaccacggatgacgatctagtcctagtcaaataaaaatgtggtgtgggaaaagttgttaccctgtggggtcaatatgatcatcagttgtcaacaattattattctgatggacaatatctagtcgtttcaacacgaaagcatcatcgctcagcagaaaacaggtttgttccaacataaa

SEQ ID NO: 7016 - DNA, 1804 bp, Diabrotica virgifera
aacaatatattttatatttataattctaatatacaactgaataaataaaaacactaaatgttacaaagtataaacaaaatataaaaattaggtacattatttcaacaaagtccaaatgtacaactttgtgttaatgtaaaatctaggcaaaacagtaagacatagtaaaaatagaaagcttcataaaacatgtacacgcctcagggtcctaaaagtggggcataaggaaacagtgttaatacaaggctatccaaaagtcttagcactaaaaaaatggtacatcaaaaattaatgtgtaaaaatacagaaaaacttttacatgttaaagaccagatatcacatgaaattttgttacatataacaatacatttaacgatacattttgttacaattaaacaaaacttgaatttatataatcagttttgagaaagtatcaatttttcagattaaaattaaaatgaaatcattagaaaaaaggttgtttaaatttaactatatttaaagatgatgataaattttcaataaagtattttttatcatatcgtaaatcgttcagctggacatatattgagataattgtagcaactgcgctgtctcgatgacaatatggttgttaatattaaggggcattaacctcaaaattcttaacctcgacacctattggtaaaagaggcaatcgattatgtaggtatgtaacctcaaaattgatcattcagttcaacttacacaaataaacgtcaaaatctgacaatgtggtagtgtgtagtagctacacatttttggcctaaggaaattttaaaattaaagtaaaattattaacttaataatcataatctttgttttgatttatttatggacagacttgcttgcagacccactcattctattcgttctaacagctgtattgcaccagatacacgtactcgaacagaagcttcaactaacacaggttagcgcagttgccacaattatctcaatgtatattacctacgtccatctgaacgatttacgtactgtatatcaaaactacaatcctttttaatttttaacacttcttatattcagcaacaacatgtccatctgatacaggatatctagcggggaagaaaaaaataaaaaatatattccgtatcttgttttctgtttcagaaagccctgtattaaatataacaaagtaaattaggatttctacatttctcatacacttatcaacatcaactttaagcattttcattaattattttaaaacattttagtaagcgtgatcaaaattgcatttcttctcaaaattgcgtttcttacgatatagtaaatgagaaatgtactttgtttagaaaaaataatctaatggttttaaagccagtaatctttcatttttgataaaaattgagatcaaattttaaataaaaaatcagtgaagttataaataataaggagtaacagattttctaataaatggagctaaaaagagttgctcaaatatatttttaattccataatctaataatctaaactttcaagcaaaaatatattaatataaaaaataaattatttagaatacatgtttattatgtcaggtatggtccttttcatgagcatttttcagtgcgtcacaaatgatagaaaaaaaggtaagtccgtgataatacacatttatgacatttattttaacataacattttagttaaatctgacagttgtcacatttgatttgccatttggcataaaaacaaatcaattgtgtttattgcatttttataaaatggtattttctttgatttgtatagtcttatgaattgtacag

SEQ ID NO: 7017 - DNA, 1802 bp, Diabrotica virgifera
  SmartBlast Evalue=1E-153; Info="Synaptotagmin, putative (Fragment) n=1 Tax=Aedes aegypti RepID=Q16WM9_AEDAE"
cgcttgatgaagaagctcttgatgaaggccgcttttctaaatattcttgaaaattagcgttgtggaaaatctttaaatgcaatgaccaaatcaatttacgatcactctttccatattctagcctcaaaacttctttttctacttccaaattgtctttggtgcatatactactaatattataactaatttcactaagttcagcttcagtttttgcatcaaatatttttaaattgaggtaatctgagtcaggatttgttaacataaatatgaaactttcttcccatactggattgactgttctcatcaccgaattggtagttttaatttgtctacctaattgaagctggacgtaaggatccggttttgttgacgccctgacttgctttaaattcgttgcagaatctatgtacacgattaataaagccgaactcatatgggagagttgcaactgctggctttcatataaggcagcttttaggttagagtaatccgtcgacagtgttaaccaatttgtcctaatgtgaatatctccgtgtttaacgtcttctagaaccaaccacatatcgcttaattctgctttaattaaagatgctatgtccacggatacccttcctaaaaattcatcatctgtcgcatcttcatcccatactgttattaaaatttcttgtccagtagattctaggatgacaaactcacaccaataatcccattttggattaacgttggattgtatagtctcagtcttgaaactttgttctcctactactagctgagcatacgggtctgatttgcttttaccggtaaaagtaatatctttctttaccaggtcttttgcttctattacatggactctaagaactcccgctggatttggtgtatttagttgttcactgcttacttcaggagtaaatttaactggaaatttgtttggtaataccatcaacgacgcaaccgtagcgcacacacactttctcaaggattcgtttattccaggtacatccagaataccagcaattccgtctagctcgaaatctatatcgggattattaaggaaaaacagctgtacaccgcctatcaatggaaagtggcgaataagaggtttgagcactattcttaattttccatacatctggaaatttttaattccgcctagaagtcctctaagacgaaatttaatatcacagtcgccagcgtatgaaacatcaacatccatgactatttcttctctagaaacattgtcatatactacaatgccacctgttcgtaagggcgtactgcccaatatgattctctcaaaatggaatcctttcagactatatttctccagatttttcttgagcttattttctacgtacgttttaatgaggtcacgagcataaaaatttataaagggccaacattgcttcacggccttatttaaccactctgctcgttctacatccggaaacacgacccaaaatggaagttccccccaattttcgataatttccttttcctttcccgaagctgcttctttggcgaaagttctttttttcttctttgtatgtgtatattcctccgatagagtcacgagtaatgcaggtattaacacccatgtcattgaccagtttgcatatccaactaaatatagaagtccgtaaaatactaccctttttacaattctcacaaaaagactgtccagcctctcgttactgtcactcaatgccattttcaataagattcatatttgagttccttattacacaaaatttattttgtgtttatctgaaataacaatagcaaatcaactcgtttgaattatt

SEQ ID NO: 7018 - DNA, 1798 bp, Diabrotica virgifera
  SmartBlast Evalue=1E-148; Info=Guanine nucleotide-binding protein-like 3-like protein n=1 Tax=Harpegnathos saltator RepID= E2BEV6_9HYME
acacgttctagcctagaaggggttcatatcagtataaatatttataaaatacaatggctaagtttcacttaagaaaaaagtctaaacgacagccagcgcgtctcagatataagattgaaaagaaagtccgagagcacaacagaaaactcaagaaagaaaataagaacaaccctaaaaagaaaaaggaaataatgcaaatcccaaacatatgtccttttaaagaggacattcttaaagaagtagaagcactaaagaaacaaaaggaagaagaaaaacttaagctaagagaagctgcaaaattggaaaggcaaaaggagaaagaggaaagtaaaaaagagaaacttactgcaggacttcagggattagtgcaaaatgctgaactaaggagtaaacttcatgaacatttaacaccagataataatgtaaaacagcacgagacaaataatgagcagtccctgaaacaatattacaaagagtttaagaaggttatcgaagctgcagatgttattctagaagtagttgacgctagagatcctttagggactagatgtaagcaagtagagcaggctgtgttagatacaaaaggtaataaaagactagtcttagtattaaacaaggcagacttagttcctagggaaattttggatcaatggctaaagtacttgaagaaaaccactcccactatagcattcaaagcatcaactcaaaatcaaagtaaaaagttaggacagagaaagcttggaaagggaaataaggtattgcagagttcaaattctgtaggagcagaattgttaatgtctctgctagcaaactattgtaggaacaagggtatcaaaacttctataagagttggaattgtaggtttgcctaatgtaggaaaaagttcaattattaacagcttaaaaaggtctagagcttgtaatgttggtgcaacacctggtgttactagggcaatgcaggaagtacaattagactcaaagataaaacttttggattctcctggtatagtttttgcatctggaaatgacagtagtgcttctttgagaaatgcagttcgaatttctgccttgagtgatcctgtaacacctgcaaatgcaattttacaaagagtaactaaacaacaaatgatggaaatgtatgatgttactgaatatagcacaccagaggaattttatagtttaaaagctgcaaggactggaagatttaagaaaggtggtgttcctgatgctattgctgctgccagaggtttattagaagattggaataatggaaaaatcaagtactatacagtaccacctgaggagcctcaaaacaatgtgcacattagtgcatcaattgtcactgaagtagctaaagaattcgacttggacagtttcgagtctatggaaactgacattttaaataaaatcgagaaagaatcagatacaaaaacaaaagcatttgttttggaaagtttgggacctgtagattctgttgaggatatggaagaagatacggaagaggcagatgaattgataaatgcgaaaacaaacatagtctctaacaagaaaaaacaaaaacaaaagggtgtcgcaaggttgaagaaactagacccagaaatggagctggaaggtaaccaaaaactgaaccaaattagaaagaaacaatttaaaaaagagaagaaggatcaaaggagaagagaaaaagtggcgatgcagctttcctcaggtttagaaaactttaacctaaataaatctaatgaatctgaagattataactttgatactgattttgttacaaaataaacttgaaataattc

SEQ ID NO: 7019 - DNA, 1802 bp, Diabrotica virgifera
  SmartBlast Evalue=1E-101; Info=RNA-binding protein lark n=3 Tax= Aculeata RepID=E2A1C4_9HYME
tttgactgtcaaaagatttgaaaatgattggacgagattcaaatcagcatatttatacctatttttagaatgacattagtcgctaataataaaaaaacaattctataataaacacagaactatttaccacagtttatgaatcaatataaatattttgaaataaattagttaataaactttggcattcttttgtatgtccaaagtttatatatattttttgtatgctagtttttaaatgtccttgttctgtgcttactctacaacacacacaagtatcatactatgtgactatctgaactttaaattgcatatcaagaatttgataaaaattcatagaattttaaaatgaattttacgttgtcacactgtgttctttgtgtgccaaatacaaacctaaatttatgataatcattttcgttacatataaatagaaatgttttcactaaattataagtcaggaattatgtaatcttggcaacttggccgttgcatacatacaagcctttaatatggcgcatatcttcttggaggtgatggtcctcttaatccaggtctcctatcatcgaatgagtctctgctaaaatcctcatacatcctactactcctcaaacttccggaaggtggcggcgacctcctgctaaacataccataatcacttgcgcttctcgaaaaaccgctgtctcttagactgcctcccataccgctggaaggtcctcctctcaacccgatggacggcattggaggcagaggttctctgcgtgggggcagtggaggcggcatgaagtcacgcgcgcttgcagcgccgcgcatgcccacgtcgcggctagacggcattccggaataacgacgttcgtacatgtcacgagaatcttcgaagcgacggtcatagtagccatcgtaaccatccccaaatcgtcccatcatgcggtcgcgcaggaaaggtggcgggggtggtggggggtaggggtctctggcaaacatgcgttcgcggaacctttcgggccccatgcctttggggcattccttggaccaatgcccgccgcggccgcaacggtagcactgctccggatcgcccatgccgggacgctgacgtacgcgcgacgtcgatatttgaaccttcatgggttgaccgtccaccatggtaccattcagttcttcaattgcaagttttactttgatagcctcgttcacgtctcccgatgactctaaatggacgaacccgtagttcctaacgatgtcgcactccaccacggtgccgtactttttgaacaattcgcgtatttgaggagccttcgtgttgtccgtcaaatttccaacgaagatcttggtggtaggtgtttggggggccttccggctcttggccgcttcgcacttcatcggctgaccgttcaacatgtgtccgtttaaattattgatggcctcgcgtccgtcggtttcgttttccatgtggacgaagccgtaattcttgacgacgtcgcattcgacgacctttccgtacttttcgaacaatggacgcagttcggccactgcggtcttctcgcccaaatttccgataaagattttgaaggtacccgcgctgctaaaacccggcatttttggggattttcggtcttcggcggcgatacaaacactactacttcacacggcgacgacgacgaccaagttgcttttagaaccacgcctgaaactcactgcaatgagcaagcttccagttgaaatcagcaatataagaaattgtattgttcaatacaataactgataacacaaccaacaactacaacacagctaaatttgcgtaatgg

SEQ ID NO: 7020 - DNA, 1795 bp, Diabrotica virgifera
  SmartBlast Evalue=1E-154; Info=Cytochrome P450 CYP6BQ9 n=2 Tax= Tribolium castaneum RepID=D7PM84_TRICA
acaactgtttatttaacgtaaacctaacataacacataaatatactatcttttgagtagtttctgtcttttaatactgtttactttatagaacgaacattgagccagacatctcctttgacgccagaaataactgcttttggatcatatttgatgggagtctgtgttttctcgtttaaagttactgcaaagtttcctattattgttgctaatcctactttgacctgaagcaaaccaaatcttgccccaatacacattcgtggtccctctccaaaaggcatgaacgtaccattaggtcttgtagctttattttcctcactgaatctctccggatcgaacttttctggttctggataatattcgggatctctgtgaattccctggatagggattctaattttaactccaggctcgatgatgagatctgatccaggaaccttgtaagcagtgttacagactcgtcctgtcagtgatgcaggaggatgttttcttaatgtttcattaactaccttatccaaataattcatactcattaaagcttcgtaactcatttcattattgtgtttcttcataacattattaatatctttccgtaatgtttcttgcacttctggattctgcgccaactccaatagagcaaaagtaatcgaagtagctgaagtttcgaaacctgccaagaaaaacacgaagcactgagccgctacctcattcaaggtcaaaaagtgaccctctttaccgtgtttgtctggagccgctaaaaagtcttcatcatcggttgtgtaacccttatttttcagttgcagaagtaaatgcaggaagtcttttctaaacactttgttttcttctctatattttacagtactattaactacactcataaagaaatcttcaatttcttttggtgttcgttttatacgaaagaaagtgaccaaacctacgggcaatgtgttgagcaaagtgcgcttgattctgcgccatttgcttcctttgaaaactttcctaccgaactctctgaattcagagttgggattcttcaaactgttgcagtcgaggccaaaggcagccgatccgatgacatcggtggtgaatctggagattatttctttgatatcgacggcatcttggaggtcagctgattctttaaggaggtcctttaagccacttgaacaggataccattgtgggaaacatcattttcattttacctgacgtaaatgtgggtgttagtttggctcgaagatttttccacttatcatccgtcaaaaacagcaaatgtccactaagagggtccactttttcgttagtatactctccatgatttctgaaatttgcaaagtccttctgtatgatactttttgtaatttcgatatctactggcatatacgcaggcgcgaacatttcataaaatcctccgtgtcttaagcctttggatttaaactcatcatagagtgatttgtactgatccgtcaaacttgcttttcccaccattaggtcttttatattaccgtagaaagattccggttctatgtagtaaagatttcttcgtttccagtaggaataactccattttttgtaaagatatgctactatgccgagaagtaatagcaaaggtaccaacattgtttataatataatgtatcgaatattaatttattatgtgtcacatgaggtcacttaaaaggaactataatattagtcctatataatgaaaatcaacaatttctttctcaccaacaacaatcacttcaacagtaacaattgaaatatatttttttaaatctcaaatagacgataacc

SEQ ID NO: 7021 - DNA, 1793 bp, Diabrotica virgifera
ggttaataatgttagtatacgtgttttaacttttacaccactttcaatgttattgtctgtatcagttttattttcgttcatatcacgacgacctgtatttctttctagtgaattgttaaagcatgtttgatcttcttttaaatatatttcattaaggatgaacgtactaaaactatccgcaatattgttattttcctcggttaatttacttggtgttatctctactgggtcaacattcttttgagtggaatttttaaggttgggttccatatctacaggtaatattacaggctcattaactaacacatccgatttattttcgttaatgttagtaattggtgtttccgtttcacatttattataatttcctttgccactactttcaaatatattagaaccgccgctaatagggtcacagatttcggtgccattgagagaatcggtgtcttttgtggtgacttcaagtttacgttcacagttgttgtttttgtcgtctattaaaccttcgaaaattgttccatgctttgttatttcatctacgacttctttgaagttaaatgaagatttgtggatcagttgcttttcctcgaaaatttcttcttgaattgcttgacttatcgttgacgacattttttcttcagatgaatctataacttttctgacagttcttgaatgccgcaacgactttaaagttacttcactttcattcttttcgttgacaaaaatgtggacattaaaaggacaccctttgattagttcaccaccagcaatcatgttgatctcgtacattccatagttcttcggaatatagcaaactttaatcctgtcgttttctaaagtagcttcgacgtctatttcttcgctaggtacttttttttggcttcttgaaaagttccattggaaagattggagattttcgataagtttaatagaagacctacgccgtgatttaatttttcttgtaaatttgcgctttctgttgatcagttttggagaaatagcttctccgaatgacccaaaaggacctcttatttggattattatgttgctttcgttgtcgtcgtcacagttctcgtctaaatatacgtagaattcggccattttgtactgttctccggaaaaaactcccattcctcttactatgtatcgttcggtaatctttttctctttttcgttattttctgcgattttattcattgatatttgaatttcggataggtacttgataaactttctttccagttgagaactaagagccttctgtaagtcttcgtttgaaaaaatcggtatgactccaaaatacttatacgccatggcttgtgcatgcactggtggtttcttccaatgtctatgaggatttggacatgctcctgggatagatgcgttaatcaaagtacacagcaaggatccgtctcgccataagtcttctataccaccagataaagtttttgtataatgcgaagaccaagtcggggaagtctgccactggcccattttagaagtgcttccttttttataaagcgtggacaaagaactgttaaacatcttttatctatttgatttataagcttttcgaatatttgctttcttccaaaagcgaccaaaatcagtccggccactggtagaagtacatgaaaacccactgaaaatctgctacttttgtattcgatttgtttggcttcagggacaacttccgaagataacgcattatctttcgactcctcctttttgctcatgttcaaatgctgtctacatatttttccaataaaacgatattgtcacctacactgcac

SEQ ID NO: 7022 - DNA, 1795 bp, Diabrotica virgifera
tcacttcgtagtgccatggctcgatgagcattcgaaagttttcgtatcatgaagtactaaagtgtcgaattctagtggttgtgtggaaaaatatgtgtatgttgctaaactaaggagttaaaattatattttaagatgaatgaacggccatccaacatacccttttctattattcgagaactaagatgcagaaattgccaaaatataatcagttgtgctcctgtgcacgtattaccggatgaaaatgtattatgtggaaggtgtaaacaatatgcaaaagaaatatatcggaattacccattcgaagcgttagcgtcgatgttcttctatccttgtcgaaactgggacggtcgttgtccaaggattcttagatggaatgaatgcatggtacacgaagatggatgttcatacgaaagtggctgcagtcggttctggaagcaccctaaagcttttttaaaaggaaagagagacatgccttatggagatattagactagtagccattccagaaaaacttctcgacttcataaaatgcatccaatgcgaaagttatctgtcttgtgagccagtctacatccgatctgatggtaaaaacatctgccatcgatgtatccactccaacggtgtcccaccagattgcatcagaaatttgggatacgagatattgtccagcatcataatatttccttgcgtgtttagaaacagaggttgtcccacgagattaaagtttggtacagatctctggcaccatgaggctgagtgttcctacaatcagatgttcaagaagagaatgcctgaaatggaatcgggtgtttttaaaagtaatgtgtatggcgagttatcagattttgaactaaaaaagaagttagtacagtcattaaaaaacaagcaagaaaagaagctcaaaaaagccgaagaaattgaggcagccataacaacaaggatgagttcagaggatggttccgaccgagattctgataaatctaattcctatgacaaacatttatccgaaggatccagctcaccatcaccaacaaggttggaagacaaagaccagaaacttctaccacctagtaatggagattttaaaccagcatcaccagtttttgtgaactcacctacagatttcctccagttcaattacaacaatatccggccaaacagtgaaaactatcaccaaaatataaatttggctcaaattcattacgcaaatcaaaacggtaatgccccaaaccaaaatgttgataatgaatacatgcgaaacgtttctgaaaataatcacttcaatcaacatggatactatgatgctcccttaagaagtccttctatactcaaaaccccgctgcaagaactagatttcaatccaatggatggtctgtcaccgatttacgttaacccttatggacaagggttgattccgaagccttcttttaaggggatcgtaagaactgatagtctgtccagtaatagggagttgattcaagagttgcgcgttaggcagagcaggttcaagaaacctaacgagaagaaagatgcagaaagtccttataaagagtgtcaaaacttggaagagattatacaagtacataaaacaatagatcaatagaaccatctccgccataactaccatttatacagagtgagttttatatatggaagcactcaattatctcgaaggcgacttccacgatttttatagattttgataggtggggattttctaatgcggtcgatattatagtgctaatcgcattgttgtcatgttttccgttttttctggaagtctaatgaacttt

SEQ ID NO: 7023 - DNA, 1792 bp, Diabrotica virgifera
  SmartBlast Evalue=1E-153; Info=ATP-binding cassette sub-family A member 3 n=1 Tax=Culex quinquefasciatus RepID=B0WD37_CULQU
cgaatttgacagcttggttcaataacaacccctttcactcaccagcggtatctttgtctttgatgctaaatagcatttaccgaaaactaggcggttgtgatgactgtactatagagtttaccaacagtcctctaccttacagcgccgcgacgcaagcgtcgcagttgttgacagtacaaaacattggattccagttgtcgtttaatataggatttagtatgtcatttgttgcttccttctatgttttatttgttattagggagaatcgttgtaagtctaagcatctgcagtttgtgtcaggagtgaaagtatacgtcttttggttaactgcagccttctgtgatatgttgacgtatctgtttacagtgtttgtactgatgatcactatggttatgttccaagaagatgggtttaagtcagggagtgatataagtcgaatgttttcatcctgttttacttcggatgggcattttaccaatgttttacctaagttcgtatttctttcaagttccttctacgggttacactagaatgacgcttgttagtatctttggaggaaacgctgctttccttgtggtacaagtccttcaaagtccaggattagacctgcaatatataggaaatgctttgcattggctgttccttatatttccgcattactcgttggcaactggaataaatgaaagtttcaaagtgtatgcttacaataacatctgcgtaaaccttcttaaaacgtgcgaggaacagcacattccgaagaaaacttgtatatcgataatgcgtaatgaaagaattcgtgaaatttgtgaagacgctgatctgaattactttaaatggaaggcacccggaattgccaggaacatggtttattcatttttaacaggcattattttattcgcgcttcttttggccattgagtataagattttctctagagtacactattacttaactcaaaagcattttaccaaaaaacctatacctgtcgaagacgaagattctgacgtttcgaaggaacgagaaagaatacatgttgctacagagattgacattaaacaaaattatacgttggcggtcaaagatttgactaagtactataagaactttttggctgtgaacgggctgtgcgttggaataagaaagttcgaatgctttggattgcttggaatcaacggtgctggaaaaactagtaccttcatgatgatgactggtgatactagtatttcatatggtgacgcctgggtaaatggtaaaagtattaaacaacatttggaagaagttcaaaaaataatcggatattgtccccaatttgatgctttactggacgacatgacagcagaagagtcgattataatgtttgctatgctaagaggtttacctttcaaagatacttttaaattagctgattatttgtctaaagaattcgattttaccagacatttgaaaaagaaagtgaaagaactaagcggtggcaacaagaggaaattaagtacagcgattgcgttgattggggatcctcctttgttgtatctagatgaaccaaccacaggaatggaccctgccaccaaacgtcacctctggaatgccttatgcaaaatccgagacagaggtaaatgtatagttctcacatcgcacagcatggaagaatgcgaagctctctgcacccgaatagccataatggtaaacggcaacttcaaatgtctcgggtccacgcagcatctcaaacacaaattcgcagaagggtacactttgacgatcaaattaaagaaaatcgcggagagttccagcgaag

SEQ ID NO: 7024 - DNA, 1790 bp, Diabrotica virgifera
  SmartBlast Evalue=1E-172; Info=Isoform E of Titin n=1 Tax= Drosophila melanogaster RepID=Q9I7U4-5
gtgttgttgtaccaccattttgttctaactgagtgggatgtttcacattctaattcgatggtctttctttctattgtttcgtaaacttctttcagttctttagtaaatttgacagtatctacttcaatagatactttggcaccatgcgaggctttgcctgctggattcacagcaatacatttgtagtctccagagtcaagttcagaattggtttctttaatagttagttcaatgttttctccatcgaaggtgatctttaccctatcggatggttccaaaggctcattatttctaagccagtatacttcaggagtaggattgccaaccactttggctttgagggtgagaggagacttttgtggtacagtttgctcttcaaatcgtttgacgaacaatggtggttcctggttttctgggaattcttcaacagttaggtttgcacttgtttctattgtacccatagaattggtagctcgaactgtatatgtagcagtgtcatctgtagatgtcttgggaatagttaaagtgtatgtgtttccgtcttttttgaattttggtctggttaaaggtttaccatccttcaaccattcgatagtaggttccgggtttccaaatatagtagtggaaagtgtaactggttctcctttccttacggtaatagattctagaggtgataagacctcaggtgcttctttctctgaagtaattactttcagagtaaatgttactgaggcttctccttccctgttcctggcgactatcttaaacttgccttcctgagtcttcttgattttcttgatttttagagtggttttgtaagtatatagctcagaagttgacacaatactgacgttttcagttacacgtctaccattacagaaccattttatttcaggttgtggtactcctactaatgtactttcaactacgacgtctgtttcttcaggaacacactgtggtagaggcttcttagcgaatgttggtggtataccttctaatatatcagccaaggaagatgttcttgatagactcttccttgaaatggaagtcaattcggatccatgagatgacaacggaccttctactatgagttctgttgtactggaggcgaatcctgctgagtttttagcaacgcaagtgaaagttccagcatcttctgggaatacttcccttataataagggtagcgacgttatcttcatcgtagtagatttggaaatctttggaagttttgattatgtgagtttgtctgaaccacgtaatttggggacgagggaatccttctactttgcattcgaattggacagtgtaaccatctggggttataataggcttcaacttcttgatgaattttggcgcagaagctttatctttggattttggtttttcaaatacaggaagtttgtcaatcttctcgttcaatttcttttgtacatactgcgcatactgttcttcattcatcaaaattttcgcaggcacccagcccgtttcctcagtcaaatgttttttcaccagccaccatccagaatctggattttccataacataaaccttttctccttcaaccatatctatagcttgatctgcttcggcatcatatatagtaatagaatagtatacatctccaacttccacttcttcttcatgaatgacgtcttctacgacctccctttcttttgtaatgctgagagatactggttctgcgtcaaaagtaacagatggcttcctctttggtttaaccgtgaagcttccttcttcttcaaaatcaacttgtttaataggtttcttgaa

SEQ ID NO: 7025 - DNA, 1790 bp, Diabrotica virgifera
ttagtaataaacattttattgaaaaatatatcaaattcagttataaaaattatattttgattatcatcatccactgcaaacattgtgatctaagttatcaaagagaatatgcatttccttcctatttatctaaaaaggttagtgtgtactctctgcagtgaaggaaataaacttacaactaattttatgaaaaaaactgtacattcgtaaaattttatacaaaaagtacatctcaactttcagtactcgcacaaccatttggaatgacgtattaagttcaaaagtgatattccaataaacgatacaggataaataatcagtctttatgacaatgaaacaacgatattctaattttacagtttttgaaagctgatctttaaaggttgattcagaccaacagtcacgtccatagatataataagaatagacaagataaggtatgggctccgtgcaccgaggtgtaacgccaatatcaaggacatcattggtcaatattcactttgagttatctagccatctttatctgtaacatgagcgggatcgcatagtaaaaagatatagatagatagattgtctatccatattatgtctatggtcaagtcacagtcggagacggtacagtcaagattgctcctgtagtttcccaatgacgtaaatcccacgcactggcacggtacagtcacagtcagtgcccgtccggtagcttagccagcgatcaagactgtgacttgttctttaccggaccggaatgccgaggtggtgtgaatatgacacagtcagtcagttaaggcacgtaaacactatgtttgcgaacctcttgcgctccgtgaaactgctccaatcgatataccatgcgctcctctacatataaaccgccaccgtttgggcgctgaggcggagcgcgaacgtatccacaacgtggagtagttgcaggagcgcgaacatgtggatacatgccttcacctattttcagttgtaccatattttcgtcgcttttgataatgatcgagggcgaaattactatacaagacaattgacattacagttgtgcaagaaaattaagaaagtcattaatattcggctcagcggggtactctggatggaaatttgtatttaaataaacaagggattattccataaaacaggtagatcccttgttgatagaatttcacaccttgattgaagaatagcactcagctgagctgaacattaatgactctcttatatagttctgctgagcggggtgccattgtccgagttgtgaaattccataaacaagggtttaattttataaaacaggtagatccattgtttatgaaatttcttaactctgacaatagcaccccgctcagctcaatattaatgccgctcttagatagtttaccagactttataaggttcgttctaattatctcgaaaaaaatccattcgaaaaaagcaagaatggagatcattagttgcaatactaagaactctatttagactctatctataaccttgcatcttgatcgacctgaatggtgaagtaggctgacggtgatctgcccggattgtgtgcgaatgggttgtcccttgactagggcttttcatcgactgtcatttgtttcgagcctctgtcatgtgccacacaacattaatatatctacgtcatacgtctttggtttgtatcattggttatatcaataacgtatgacgtagatatattaatattatgtgacacatgacagaagcccgaaacaaatgactgtgaatgaaaagccctcttgacggtgctttgattgtgatctgat

SEQ ID NO: 7026 - DNA, 1786 bp, Diabrotica virgifera
  SmartBlast Evalue=8E-32; Info=Y-box protein Ct-p40 n=1 Tax= Chironomus tentans RepID=Q8IT94_CHITE
ttttctagaacagtttttattttccacttatattgaacaaaatagcgaaaaaaataaataaataaaaagaactcccaattactgtatatttgtagttatctaaaacaaacactacagtaacgcaataaagaaaagacaccaatacttaatgactagcacccaaagattttgacatgagattactgtttacaaatgtcgagaaaatcatgttacccataatgtaagtcgaaaataaactgtcctgtgtttatacttttacggatttttttttgtatttttaaaacttttttggttcttttccttttgctcacaagatggaaaagacttttcaaagttagatgttgcaatcatatttttttggtacgacgctcgtcaatgttgacaagacaaggcgtcgaatttttacaatgtttttttattttattgttatgaaggaaaaattttgcagcatgacataaggtctcaagacatttcatgcacgttacaaaaaaatacaaaaagcagtttgtcgccattttcaaacgagttgcaatttgcttatctacaatttacaaatctctgtataaaaacatcaatgggaatataaaaagtatcaaaaatgttttcgaaaccccagttgaaaattgcggcgtcaaactgtagcaaattctttttgctggtatttttttttcttacagatgaattgacaaaaattattagtggtacaaacattcgccatgaaatgccttttgtctgcttttacttttacaaactcacgcgctaacgttgttaaatattttatgattatagagtgatggacttgagcgcgattacgcttaagcactgctctctgtagttgtgttctgcactggttgactttcttcggtcttatcagatacagctttttcgggaaccttggtatttggttggttccctcctgcagactctgactgagagttaccggctcttggacgggctgggccacgtctgcggtagcgtggtccacgaggtccacgtggtccaccttcttgaccgtttagctctccagcctggccctggctgtcctgggaacgtggtcttgcgccgccgcgacctccacgataattacgacggaaaaagccacgtgggggtcgacgaccacggggagcatctccattttgttctaattctcctggcggtccgcgatagggtcccctgtaatatgaatatcctccacgtccgcgtcttggtgcataacgacgtgggggtccttggccaccttggccgccttcaccgcctgattgtaccccatcctttaattcgccttcactttggctttcccttggcggtccgccgcctcggctaccgccacgacgtccacgtcttcctctcgggtaataccactggcggtatcctcttcttcggtcggcagcataaggcgaacctcttactgggtcaccattagggccggttacattggccgcctcgttacccttttcacctacgactacgctaaattctacgacttcaccgtcgcccactgatcggacggctttcttcgggttattctttattatggctgattggtgcacaaaaacgtcttctttggtatcatttctgttgataaatccataaccgcttttgacgttaaaccattttactgtgccagttaccttagttgcaagtacttccttctgttttgggactgccttaggttgttctggcgctgtttgttgttgctccgcttcagccatgatgttcgggccggtggaagatgttatccgctacctcaccttagatgttacttccttcctttcgaattcagttg

SEQ ID NO: 7027 - DNA, 1784 bp, Diabrotica virgifera
ccagttgggcaaattttcttttaccggcgaagcctcgatatactatgttctcacagtatcttgacaagccgtatccaaaaccaaacaacaaacaactccaggttatgaagtcattcgacatttttcttttggtaagcagaagcatactgcaactacataatgtcagtccaactatgaacgttgctcttaatttggtagcagaaaatttaatcagtataggcaacagcacaagtgacaggcaccaagaaaaagctatatatgacaacaaaacagccatatcttctttcctataaccatcatttttctgcagcgaaatgtacggtgtaagagttataaaaaagttataacttacagcgatggatactttggaaaacaaaatggggtaaaaatgcaaatcgctgaggcttctaagtaacggattaaataaaaagtctataaaaaaagtctcttaaggacctgaatcttctcctccataaaaatatcgtgtaaggagagcaagcacagcacggttttctcttgaccaagtcaacgtcttttaaaaatttgttcggtttttcattataattaggaatatactcaatattattaatgggttcaggcttaagaactacttcagtcaaaactacagcttctttaacactttctcttctttctgttctatttatttcttccaacgcagtacttatcctgcttaatcgcttgggatctataacgttaatgtttgtttcttcaaattcatccatttcttcaggtatctgcggtaagatactaacgccagcattgctatagtacaactggacagtatttggtgttaaaactggtaaatatccctcagtaactctatcggtaaaagccatattttcttcttgcatcagtaaatcatccgattcctcagtttcttcttcgctttccgtttcatcacaagaactttcttctttcacagaaaaagattcgctacgcttgatgtccgaagtatgactggaagaagtgaagactttcatttctttcatttgttgagaaaatattggaagggtttggtaacggctatatccaggcatattctcaggatcaactttcggcagtcttataatcagagtagcaggaataatgtttagaatgatggctgcgtgaatcaaagaaacatactgtattttgtaattaccaataagaagtagaacaacatgcggcatgaccaacaagcttatcgctctggcagactgtatgttaccttcgaaggatctttctgtactcttgtatcttcttcttgctatatgtttgagatgagtgtagattatattggaaaaggtgccaccaaatattccatatataataaaatgaggaggaataacgactccagctgccagtaatagagtacatactgatattattattttgtatgggaagcactgccttttttccagttgatttattaagaattttgaccatggtgctgtcagattccaagctgctatatataaaaacgttgtccatgatgctttctctatcgaataatggcccacatcaaccaattgtgcaaagattattccataacactggtacaaggatgaggttaaaagctcagttagtcctatcccgatcttcgtaacaaatttttcctttctgtttttgctgttgtcttccgcgttgttcgtaaaagtggacgaaacaatttccgataaagtgacacttctatgcatctcgcctttctcgcactcctatcatttattaaaaaaatgacatttttttcttaaacttccacataggtgattattattaaaggtttt

SEQ ID NO: 7028 - DNA, 1782 bp, Diabrotica virgifera
  SmartBlast Evalue=0.000000005; Info=Endonuclease-reverse transcriptase n=1 Tax=Bombyx mori RepID=D5LB38_BOMMO
atatctcgaaaaaatattcaaatatacagccgcagtcttggagcgcgttttcgctacctgttgatcgctgctgtttcctcttaactttttgaaagataggtatcataaatttcagaaaaaaaaagcattttacaagagtaaggaaagtaaaactataaatactgcagaaataaaaattataatctatttgttaaagcaatacaagctgctgtggtatttggagttacaaatatttccagcagctttaaatttgggtttcttttaccaatacctcgtgggtactccgcactttgcctgggtaatcctaagtttacccgttaacctcactcctcactttactcgtaacatttaaatttatgaaaaattattccttttcatatatttttagaagtatctaattgtttcattaggtctaaccaaatgacatccatgactataactcaacatattttggggcaaataaagccttcatcttgtagtacaatccgtggtacatctgttgtggaagaagtttacatattcattatctttcaagtccaataggtacgtgtttaaaccaaataaatttatattaaagctaatgtctgctaaaggattactaaatattttggcaagacagtatttttatgttctgtagaactgacagatgataccgtgagacaaaatctgctgaacaactccaattactactaaacaaaacagtttctgtaaaaaatatggactaaaatgaattagaaaaagaccagataccttttaataactaagaaaacaaatatagaaacaaacctacatttgagaactgtatcgacaaatagcgttgataaatacaaatacctaggaacctgcatttcagacaataatgatcaaacaacaaaaataagggcaaggatagaaatagcaagaaatgcgtttgtaaaaatcaaaaattttctctgtaacgaagactttagattagaaatgagagatgctacgtgtttttgctactgcattatggacttgaaagctggacattgaagcaagaacacattcataagctacagtcatttgaaatgttgtgttacaggaggatacttagaatagcatggacatagaagaaaacgaacacggagatattgcgggaaagaatacgaaataataaacataataaaaattagaaagttacaatatctgggacaggtaatgagggggcagcgatatgaattgctaagactgataatacatgaaaatataagagggggaaggagtataggaagaatgaggagtcatggctgaagaatttaaggggctgacataaattcagttccatagaacccttcagagcagtggtagatagagtaaagatagtgatgatgatatccaacctccgattttgtacacagcacttaaagaggaagaagtagaattgaaaggcagcctgaaagaattatttttttaatataaggatttttaacatatttcgacgcttcgagtatggctaatggttccgccgagaagattgaaaaatcattgcacgacaatttgtccagaatatcagccaatatccatttctcggtataattgatacagaagtactaagtgtgtatggtgttggttcttcctagctggcaattactattaaaattttactattttcgcatctaaactactattctaaatcaggtttgtacatacgatcacaaactgaaaatcaagtgtacaatagaagaaaaagagcaagcacgatgtcgacatcattacatcgttttttgaagatttaataaaatattgaaataaaacgttcct

SEQ ID NO: 7029 - DNA, 1773 bp, Diabrotica virgifera
aagcaaatttatttatctattaaccaataaaccttaagtctaaaataaataatgttatatatttacttaactatcctaataatatatatcaaatatcgattttaagctttttcgtcttcttcgtttaacatgtttgaagagatcgtactgaatgtcgtcctcagctttctcgctcatgtcatacttactggggtttctggtgagggtagccaaagcttctacaagagcagaccgattgggtgttcctttgaagctatggttgtgtccaaacacgtcatcatataagttgtgcaccgaaaacttatcggacaccttaggaaggttcaaactgccagttcgatatctgactgttggacttatattttcgagatggctgctggtgcttggtagtttgacttttacggtttgagattgcttctccaagtttttaaagtacttgatggtttgcttaaagtgaccgatgcttgatttgtcggactcttcggtttgctttgtagtagtacggatatgaaaactttttgcttttcgaatttgagttgacttgggtaacttcttttcttgcgtaggtaattgtacaacactattatatctcttgattttttctgatattggtgaaaatgtaacagtttcttttactttctcctgagaaacatcttttaaatctggtttatataccattttcttcatttgtttaattttttctttattagtcttttcgtgtacgtaagcttgttttaataacatcttcttcctttcttctatcgataagacagtacatttatttaaggagtcatcaacggattggtattttttgttatgttggtgagcaagactttcagtcatagataaaatatcatcggctgactttcccaacatatttccactagaagtaacgttttctttaaaagtctctttcacgctaatactttcatctggttttttccatatcagcttgctcctttccagctcactaaaagtttttttcattttatttggagacaacgatttattactgatagaactggagcttcgcgaagaaacattttcccaaaagaactttttgtctttgactgagctcatgggagaccattctgattctatggatagatttggcatgctgactgtactgcataaggaccaatcttcgttgggcgagacgacggaatcattcagggcatttaggaaagtgagatcctcaattttgaattttttaatactggatcctaaactactttcgttttccgaaaatgaggaattcttcgagttggactcacttcccaaggaagactgggcaaaaatctttcttctttccgccacagtcttcggaaatccttctacttcaggcacaatatggtcgaggcatatcggggaagtatctttggtaacaattttgaaattattggggacagagtttgtttctaaatacatttgaattcgttgcttgatcgaattattattcatttcatatttatcacaactttcgatacagtcgttcggagatttatttttaatcgaattatcacagctttcttttttatctagctcttctctggtgttagttttttgggtaaccttgttagattcatttaagatgttcttgaaatatttatcatccaacctgtacatacagtttttagtcggcgggtctataaacctttcaggaatcttaattttatttacattaacgttttccatatagcgaggctgacacacatagctagtacaattattatgatctaattgctttttatcaattgcagccacttgctgctt

SEQ ID NO: 7030 - DNA, 1773 bp, Diabrotica virgifera
tatacaagttttcaaatacaacagaaccaacaataacactagaaatatcgtagaagttggttaaaacttacaatatgtcatctttactaaaaaatatctaaacattgtaataaaaaacagtgtcgaaaaatatttacagtgtcattgttgttgcctttgtcattcactaaatacaaaaataatgatctacatcattttaacacaaaaaaaatctatacacatgggaaaattatttacaacgcgtttacaaactaagtcgacaaaataaaacatgtaatatttaaataaataatataatctaactatgactcgtttgctagatctgtacaacagatgctcccctttcattaaaaacaaaatcaggttatttttattcatcgaaaaaaggtttattcgcagaaaactgcaaaggggactaaaaaaattaaataatttctattttcatacgatctaatataaattttaatataaaaatattggatattgtttattatttaagaaatagctgaaaatacagcatttatcagtgtttgctataaagtcattcgtcgtacgaaaaatataatgttttcttttttatacaagagtaaagttgtattgatggtattaaacattttctttaaaattcttttgtttaaaaaatatgtagaaattgtttattaattaataaatacctgaggtcacattttttcgatgaacggtgtctaacccaattaatatttgcaaaaggattataatacattaaataaataaataaaggacaaacagaagaaacaaaaacaaaacacacaacttggttgaaaatacatgtttcatataagctttgtttttatacgtttaaatcagtacgtcattatatttttgataaaaataaaaatatttataaaaggtgatatgttcgtgtttaaatatgtcgaaaaatgtattttcaaaatgagattcttttgttttcttgtcaaattgtagcatatgggtaggaaaaaatgtttggtacagtttcgagagaataaaaaaatacatgtatatggatctatataatatgtgttattattaacttgaaagtactgaaagaaaattatttaaaattctttacagagacctttgttgtaagatatagaaaaccaaacatgatttcaagccgatatactacaaaattggactgttggaaaaattctgttcaaagagtattttaaaaacagtctatgaaaatagccatcagaatttgagatacaatttctgaatctaccaaaatgttgacttgtgttcccatagtaacaataattaccatttgaatacatgacctatttcggtcaatggatatacaagcttttaaacctattattgctgcttgtatgtaaaacaggaaatatctcaaattcaaatgacaattcgctacgtcattcgtacaaatgaatttgcaaatttcaaattcaatggaataaaattagaacaacatacgtacataaaagttaattgtcttttgaaataacacaacgacattcagagtaacacaaagaaacgtttttattctacaaagactattgctgtccgattttctgggctttccagactcttttcaacgtcatattggccgtatctacgtaacacttttgcacccttattgtttaatgagcgtttaatataactctatctatctatctaatcagccctaaacatccatccttttccttcttccatgcctctctatcttgggcaatttgtatccattttgacccagtgtgtttcttcaggtcatctcaccatcgtatctgt

SEQ ID NO: 7031 - DNA, 1772 bp, Diabrotica virgifera
  SmartBlast Evalue=4E-55; Info="Putative N2,N2-dimethylguanosine tRNA methyltransferase n=1 Tax=Glossina morsitans morsitans RepID=D3TQD1_GLOMM"
tacaaagtctaattaagtaattctaatatttcattttcagaagcaacactgtgaggagtacaaccatcattatcagttatttctttgttagcacccttctgcaacaacaatttaacacaatcagtatggccacaacttgcagcataatgtaaagcagtctgtccatcactatcttttatatttacatcagcccctgcatctattaacaatttcaaaatttcactactacctccatcagctgcccagtgtattagtgaaagtccatcattgacaagatctggctgatttgtttttaaataaagtcttacttctttcacattattttccttgatataatctattactgtgagctctgactgagggatttcgtccttggacatggaagatacttttatccactgttcctcagatttctccaagggagcatcatcgaatgtaggatctaatttcttaagagtgtctatatatagtgtcttagcttctttctggggtagatctcctagtttattccaagcatcccacttagactttgcacgaagatcataccaactaggtttggaagtcgtacaagtgccttcagtaccttgtttgtaatagccatataaggtaaggagtgtctgattatcgacattgggcaaaagcttctgtaaatgactggctgctttgttaaaagaaatagtcaagctgtcttcctcatttatatctatacctaattcttgtaaatcactaaaattatctactgcatcagccattttttaattttcaggatttgatggctgtactcttattgtatttccctccaatttatgtaaattattttttgtggcgctttctaagccttcacggttactaaatgtaataaagccgtagtttttagacagtcctgtttttctatcaaatacaacagtagcttgttgcagatgtccaaacttactgaaataagttcttaactcttttgaaccaacggtccaaggaatgttgctcacatacaatctgtagagttggcgaacaccattcgtagccattacttatgattttcttgaaatttcaagcaagtgaatgctgtgatctccaattaaatcgtgaatgttgagacctatactgttccctaaattgtttatattgtgcacaatacactccaagtcccactttgagagcaaatgttcaatagaccaatcagaacttctttcttggtaagtacagaagaatttagcgttaatatttatatctagcaagtatgcaactgtgacaagaatatcctcaaatgttgctggttcaaagaaacagtctgaaccaatgatgtaatcaagaggaccaagcagatctaaattacctaaaaacaatccccaagtcagtccaataactttaatgtgttgattaaccactagattgttaacttggcaacttcttctagtatgagatagagattttggtagtgtggctgattctgtcaatataacatcagcaccacacttagcagcgacgattccaggaagggcagtacccgctcctagttcaacaacttttttaccacaaaattcttcacgattttcccagataaaccatgcaagaactggtgctgaaggccaggtgtagaatgagtaacttgcttgtagcaacctacattttgaactattcagttcatgattaaaaaagtaatttaatcattaaaacacatatttagttgttgatatcgacctaacacagtggtaaaagtactaaacgtagacaggttagttatgtatttagagtaaatatttcatgcatacaat

SEQ ID NO: 7032 - DNA, 1768 bp, Diabrotica virgifera
  SmartBlast Evalue=1E-106; Info=Apoptosis 2 inhibitor n=1 Tax= Harpegnathos saltator RepID=E2BF81_9HYME
aattattttaataccatcgaataattatgagaaaaacgttcgtacatggctttaatagtagatctacaaacaggacaatcttctaaattaggggcgcagttgacgcaggtcgctaggtgaccgcacggtaggaaaactattcccacctcgctgtccatacaaatcttgcacagcctagcttctttcagaatcctattttcttcttccagcgatactgtttttaccagttggtaatgcaactgcggagtgccatctggagctgtggtgggggatacttcaaacgcctcgtccatttctggttgctgtgcaggctcgggttgctgcacctgctcaggttgtcgatcgatacactcttccattgctgcacacacaacattcctaagactacgatctattggagtgtaatgctcatgcgaattgggatcctcttcctcatgttgcagattaagagctgcctccactaaagcgtctggttgggaataggcccttccggtctgctccaacttttctcttattgcacgttttaccctttcgacattgaggcctatactgagagcggccaacgcctgtggactagtcaagtaactttggatttctcgttcggtaacttctcttcgaattcgagtcgtctgtattctttgagcggaaggtctcacactactatccgtagtttgtccaatggtacaagccgtaacgaaatcttgtcctttgaccaatttcacgaaggaacaattcggaaaccatctcgcgtgctcagtccatgggtcgtcgtgtggatcccacgttcttagccccccatcacaatggaaacatctaacttggtcgcccattccttcatagtagaagcctgcctcagcgagtacttcaggtgtttgaatcaaatccgaggaccatccaacataggaacgtagtcgggcttctacggtagcaaaattcgatttctttgggcccctgtgagcctgaactcccaactctcccaggttttgttcggttccgactacattgatgtttgggaatgaatccttaacgatttgattattttccggattatttctatcattactacctctccttgcttggagcctaggattaataacagccataacaaatgggcaattaggaaaatgtctctggtgttcagtatctggatcatcaccaacctcccaagctctcacaacgcctttacagaaggcacactgtgtattatcaccctctttaaggtagtaaaagccagcttgaaccaaactatctggtgtaacaatatcagcagcaggccaattttcaaaagaggccagtctagtctcagacgatctgtacatgtttatcgaagtggaaggtacacgagaggatgttataggaacgtttcctgaggtagagggattcagtacgaagggacaatctcggtttaaagctatgtgtctagtcatgacttgatcgccataattccattctgatatctttgcatggcaagcaaaacactccacttctaagccttgttttgtggcaaagaagccggcctttgctattctttggggacttacttgtgcgtcactgggccattcactaaacgtttgaagacgatttatttcttggtgcattttgaaggactggttctaatcatgctaaataactatgtaacttaatgaacaacattttaggagcttcttctgttataatcattccgaagagaaaacagacaaccgaaccatttgatctttttgggaaatacttaatttgattagtttttgactcttatcccgcaccacac

SEQ ID NO: 7033 - DNA, 1769 bp, Diabrotica virgifera
  SmartBlast Evalue=1E-166; Info=Beta-glucuronidase n=1 Tax= Camponotus floridanus RepID=E2AGJ7_9HYME
ctacactacagtatgaggctgatattttcgttagtactggtaatttcccagtactatgtcaatggtgggattttgtaccctcgtattaccgaaacgagagaactgatatcattagatggactgtggcacttttctctaaacgtcaatggcagttttaacgagaaaagtggtttgtcaggcaatgccaatgacaaagacattcacttaatgccagtaccctccagctacaacgatattcccacaactttagatgctagggatcatttaggtccagttcgttatgagagatcatttcgtattccaaatggttggcaagccgagaaacgaatatggttgaggtttggctcagtttgttactcagcgaaagtgtatatcaacgataagttagctttaactcatgccattggacatttgccattcacgggagaaatcacttctctcttaaatgacgccgaaaatgttattaaagtgatagtagatacgacactgacgagcactactgtaccacaaggatatattgaaactctacctggtggagagaagaaactcaaatatactttcgatttttttaactatggaggaattgatagaccagttgtcttgtatacaactcctcagacctatatagacgacattaggctcactactagcgtatatgaagataaagggctagtttcatatacgactaccattaaaggagacccagctggactcgcttataggataaagatcttggatgctactaacgaaatcgttgcggaaactgacacggataatggagtacttgaagttgatgatgctcatttctggtggccatacttaatgcacgatgatcctggttatttatatacttttaaagttcagctttatgactcaaacaacgagctcgtagactcctattcccaaccgtttggtataagagaactggcttggaacagcacatcctttacgatcaacggaaagcctgtttatttgcgaggattcggaagacacgaagactctgacatacgtggaaaaggactagatctgccactgattatacgagaccacaacttgatgagatggatcggagccaatgcttacaggacctctcattatccctatgcggaagaaatcatggatatggctgatagattggggataatgatcgtagatgaggtgcctgctgtaaatacggaaaacttcaattcggacttgttggaaaatcataaaaggtctttaacggagcttttcagccgggacaagaatcggcctagcgtggtaatgtggtccattgcaaatgagccaagaacacaactaccagagtctgaagattattacagacatatttctgcacatatcaaatccttcgatcaaactagacccataacaatagccaatatctatggatttgatgtagatcactctggacaattcttggacattttaggggtaaataaatattcagcttggtatgaatatgcaggcgacttagaaaccattgtatcaggaatgacgagtcaggctgaaggatggcataaaaagcacaacaaacctgtttttgttactgagtatggagcagatgcgatggagggtttacatattcttccagattatctatggtctgaagagtatcaagtaaagctcatgtctgaattttttaaagcttttgatcaactcagagaccaaggatggttcattggagaaatgatatggaacttttgctgattttaaaactgctaatgatataagaagggtaggaggaaacaagaaaggtatgttcacacgcc

SEQ ID NO: 7034 - DNA, 1769 bp, Diabrotica virgifera
caggtagatgtatttagatgtcagagtagcctgttagatgtgctaaaagtaacttcaacaattaattagttccttggatcaatgtattcaagagctagaaagtacttatgccggtaacgaatctgctgatacttatgaaagtgcaaatacaaataataatctacctcttttatcaactacagattctctgtactcattcaggacatctgaaagcggtgaacaaacagaaacggaaagatctagtatagttaatgaggcagctaatacagaactactacaagttgaagtaaccgatagacaagactatgatggagaactggaatcacttcattctgaatacgctaacagtgaaactcgtcttctatataattcagtaagttttgagacaccggaaaaggacacttctacctcgaagactgacataaagcaatgtttcaacgatttcatcgatgataatacccatgatgtagaagtttcttcctgctcatcatcatcttcttatcaatctttgaagccttttcatcctcctggttataaacctacggtagagaaaattaatcaccaatttgacaatggtagtaatcctttcttacctaattttaagataaaaccgtcggagacaactatcaaaaatgatgctggtgataatatgcattctttagcggatgttaagttagaaccaatggaaacagctataaaaaatgataatggtgcgaatactcgtcctctagaagatgttaagttaaaaccaatggaaaccgctataaaacacaataatggtggtaataatccttctttacctgatattaagttaaagccggtgcaacaaattgtaaaaaatgaaataactaaattagatgtcgcgaagaaaacgtatacaccaaagaagaagaaaaagaataataaaagcatcaaatatgaaattccgtccaaaagagagccagtcatcgacgaagaatgcttcgtaagtcatatcgtatcccctaatgaattttatatacatttagttgacgaagagagcttattggtcgatgatatatcagacgtaatcggtaaaaatataacaaaaagtaaaaaattaaatacaatagtaaagaagaagcgctcgatgacgtaggaagattcggatttttatttttagagtctaataagctttggtacagagtggaagtattggacggactgacagatcaaaaacacgataatattttagtgcaattggtggacttcggaaacatacacctagtttcctataaacatttacatacaatgactaaagacttgaataacattccagaactgcattatcccaaactagctgtgcgctgtcagttgccaaggctctaccctccacactcgaaacgtttgaataaattatcaaaatggccagaagataccatcgagattatgcatcaattatgcggattcaacgaagaaattactagttactttaagctagtatatgtcgccaaagaggaagatttttacgtcgttgacatataccgagttgatttggaaagtacgagcacactcagtcaaattctattggattatggtgcggctgtacaaattatcgatgaatgcgatactaataacatggagttggaaagattcgtggacgatatagacgacgcagaacagtacaacataaacgaagcaataacggggtacgatccgactgacgaagcgagaatatgcagatttaccagaccagatggaacatgtttcaaaaaaacattgtaaactagaacatattcagtcgcgaaaag

SEQ ID NO: 7035 - DNA, 1770 bp, Diabrotica virgifera
  SmartBlast Evalue=6E-23; Info="CG9134, isoform B n=5 Tax= melanogaster subgroup RepID=Q8IRH8_DROME"
tgtgtgtctatttaaaatctttatttacaaaggttttacacaatttagcattttcctgcattattgtcaacagtaatatggtagccaccttctggcttgacttcaagatattgggaggaaataagttccttggcattagttacctttccattttcgtttattaaattattagtcataataacgttaattatagcatctcccttatccttggcggtactgctttcatcgcttgcagattcgcaaatgaaaggtttcttttggtcgcaagatgctgcctcgtattttcctacgtttgtgagtccaagacaagacttactttcagcgtctacatgagctatagcccaattaaagtactcaatgggttcgtctgattgtttccagatccatttgccttttactttttctccatcaacccagaaaggtccagtagtaacgggatatggcagaagtttggcaaggacggtattttcttcaaaatcttttatatcgggaagttttaatttatggtacgcacagaaggctctagcttgagattgtgtaacgcgtaagtctctggatacatggaattttcttccttcctgaagaacagttggaatattacctgggacagtttgcgcaagtttgcttaagaaatcgtctccgtctttgttttcgcttccaccatgtcctccatttcctccgttgcttccattacctccatttcctccattgcttccattacctccatttcctccattacctgcgctacctccatttcctccgttagcaccatgtcctccgtttgccccatttcctccagcagacctctcacagattactctgttaacattattgcagttgatgtcatcccaaaacagaccattgttcttatccaaatgcaaacgaatgcaatgatcattgttgttatctggttgaccaggaccccagttggtgtaaccaacaggcaaacctttaggtaaccaaacccagtttcttccatctaataaacgtgtaccagaagaccagaaatcagtaccggcactgatgtccctgatgtgtctgtacaatctatcattttcttctttagaatcgatagatgctagtctcatgttatgaacttggcaataatctaatgcttcataataatttcctctgtactcctgagatatatagaattcctttccattaacgtgtaaaagatccaaatttggttgatttttgtgaacatttaagatattctgccaatctttttcttcattggcaaacaaatcttcccgtttttcatcgataggtctttcacaaacaaatggatattcaaggtcacatttgacatcattccacactaaaccattattcgattttatagttataagacaatattcgtttcctccgcttggttcaccagcattccaagcagtatattggataacatcgccagtggtaaaccataaccaagttttaccatcgagcaatcttgtaccagcagtccagtattcgttaccgccatttgcatcagtaataaatttttcgacagctttgttttcctctgcagactcgatggttaccaagttcatgtgtagattttcacaaaaatccatggcttgtaagaagtttagcctggtattagtaacaacgacgtaatttttgttgccgaccttgtggacgggaagggttgatgaagggttgtttccgaaaacatcctcccatcctttctcaagtttcgccgcatttagacacacaaaaagtgaaaaaaatataagcgacaatctacaccttcccagcatcttgttt

SEQ ID NO: 7036 - DNA, 1770 bp, Diabrotica virgifera
aaatataactaattatattcgaagttttcatcaaaaaatatcacaaatatacattaataacctaatattgttctctgcaatctccacttttgtcagctagatatccctccgggcagttagacctgactccattaataatactctttggatcttgaacggtcactgttgtttcaggcctatctgtggtctcgtcacaaattggtaagttgaatttcttcttgaattcctctttatcaatatcatcatccaataattcacgtttctcagaatgagtgagacgatgacagtttggtttacttgtagtactagtggttgaagcaatagttattaaaatctctggagtagatgacgtagctcccggtgttggcgtagtaatagtggtgctaggagtaggagtagtggtagatgtggtagaaagcaaagttggagttacatgtgtactattgttgctgtttaaaatacttctacctcctggaccttgactatcaggtcctggaaaaacaatacctgtattctttgagtcattttcatttggagagacatttccacgtactggctggttatttatgtttggaacttgaccattttgtccggttccctgatttggattttggttaccccaaattggttgaccattttgattaggatattgtccttgttttggattattattaggcagctgattagtttgtccagatccttggttagtgttcaaatttatattagtaccttgattgggtttttgaccgttttgatcttgatttggatttggattgaatccccaggggttaggaaattggccttggttgtgtcctggattttgatttgtattttgatttggcatccaattaggtactccatttacattcgggtattggccattatttatttgtcctggatatggattggggttataaggccaattagaactctgtccagtattgggttggttcgcattgggaaatgtaccttgattaggaaaattaccgttattgccccatacaggttgaccattaggataaaattgatttggatttggattatatggacctggataaggatattgtccagcaggattgaactgataattgggatatccagtatttggattccattgcccactaggattaaaaccattatttggaaaattccaaccatttatatagggattaaaaggttgtacctgtccattgggattttgagtatttgggataccagatccgatattacttcctacgccgttggtattttgtacttgtccattattaaggaaaggattgtttggaaaaagctgaccagtcttgttcttgtctgaattattggggctaagtgttactttatttactggaacatttccatttgtcaatatatctggaggtttgatactagccaattcaacatgaggatcaaatccttttgggagttcccctacctgaccttgtaatgaagaacatggatcaggaccagtatgttgaccattcggaaacattttcttttgccatttgtacatattgcaattaaattcatcgacctccttcttccatttattgatctgctgaaccacttcttgctgcgttaaggaatttacttcgtacagtacaaaaaatagataaagtacagcacatacacttctcgcccacatttttttaatatatctttatttttgtgcagtatttgaggtacaagttcagacggatggtgattagaactggggtcatcccacagaagtgttatttatgtatgtattaaatgatttacatatagtcaatt

SEQ ID NO: 7037 - DNA, 1769 bp, Diabrotica virgifera
  SmartBlast Evalue=1E-140; Info="CCR4-not transcription complex, putative n=1 Tax=Pediculus humanus corporis RepID=E0W0V5_PEDHC"
atattgatgttctgtgtgtgccatgcatgatgtaaaattatggcagagttaggatgatttcctaaaaatatggggatcaagttagtgagcaagtcgcgtcttagtaaagtaacttggccagaaatctgaagtaatgctaaaactagtacatctggacaactatgtactggtattttgaacagttcttgaacatgtgtatataacccacattctgataggctcaacaaaagttcaacaaggttcaaagatctccagtttgctaattctttactgtcttgctcaggtggagtttttagcacatcaactgccacaggtgcgtaagtatagtccacaaaacaaaacacatctggatttttaaggatattctgaattaaactaaactgtccttccacattttgccatcttttatatatctgatccactggaaatgtttctgggtgaaaaccaaatgtttgcaagccttgcctaagtccatttattaatagacacaatccttgcctatcttttacaatgaactcaggatgatctagttcagcaacaatactattccactgaaaattaggaacaatttctttaagagcttgaattaagttatcaatgttccatgatgttctattatcagatcctttattaaaagatcctggtgtttgaatggaaatagagtcttcaaggccactgtgtgttcggcacataacagcaaggatacgagatactactgcgggggaaatatctctgccacccagtttcatgaggttgttgcggcattcttcaacagatgacgtaaaattatatcctaattcagtcactacatctgataaagatgtttcaagcattcccccggataaaccggggccttcagatgacatttctggggccaattcactatgttctggatacactaatggcgcaagcactacaggtacaagatccttgggaaaatctcgttgtaaggtttcaagaaatgttgtatggttgtcgttagtaagacctacttccttagggttttttagaacagcagatataatgaggtgaagtacttcaggagttgtttcgtgaagtccaccttcgtgttgactgctacttccttctgtatcgatatatgactgaactaaggcaggtactgtagttcttaagtgagcttgggctagatttctggcttcttgtgtgagatgagtggcaaagagcaatggcaaaaacaacttcctggacagctgagaggcgaaggcacttgctcaactgatggaagaattgaggtccaagttttaaagtcttgtgatttatcaaaggattgtctgtaatataacaaagggctgttaacaatgatggcttgtttaacaaactggagcactgttccaataatgcttggttttggggagctggagctgatattttatttgtagactctgaaaagtccactgatgaaaacagacattggagcaagtgacgatccgcctccagaccatgcaaagaaacaagtttagttatgtctcctactacttgcttatagttttttttagttaatgtggcaatcaaataacttatttgtgacaaagtgaaagacaacgagtctaggttcatacttccatgaacacggcctcgaaagcttcaaatacgcttgaagctttcttaggtatatgctgagtttttatccaaaaagtcttatttggttttaaaaaataactaaattttttatggtccaagaccatcatcgagtctttaatgaactttctccacttaatttatcacactcattgtaattacagaactca

SEQ ID NO: 7038 - DNA, 1769 bp, Diabrotica virgifera
  SmartBlast Evalue=3E-39; Info=46 kDa FK506-binding nuclear protein n=1 Tax=Spodoptera frugiperda RepID=FKBP4_SPOFR
cacgtctaaaatccgttgaaaatttgttcatagttcaaaattttctaaaggaatagatcctgactgcgctaatagacctgatattactttttacttcattaaactttatattaaagtatcaaaatgttttggggtcttattatggaaccgcaaaggcggtacttacatgttgttaagaaagcattccacatttcaatggcatcactagacgtaggcacatcatcagacgaaccagcccaagttatgtgcagttttgaaggaagaaactaccttttgtgtactcttagtaaaacagtgttgcaatgtcctttggatttaaattttgaggtcggagatgaaatagcattaaccacaaatggaaagtgtcacatacatctaacaggttatttcgttgaagaagcacaagatttcttaggagaagaggaagaagaggaggaaattgaagaagaagttgaggagaaagaagtcaagaagaagaataaaaaacggaacaaacaagaactaaatgggccttctccgaagaaggtaaaaaaagaacagaaacaagaagaatcagaagatgatgatgatagcgaaatggacgttactgatctccttgaaaataccttggatagtgatgatgatgatgaatcattcaatggagaagaaaatgcagaggaagaagaaagtggtgatggtggtgaagaagaagatgatgatgaggatgaatctggcgatgagcaggaacaagaatcagagtctgatgatgagagtgaggaagaagtagtagaaaacaagaaaaaagcgcaactgaatggccatgttaaaaaacaagaacaacaaacaccaaaacagaaagataagaaaaacaaaaaacagcaacaaaataaagaagaaaaaagttcaccaactaaagaaaaccagtcccccaaaaaagattcaccaaagaaagttgttcaaggtggaatgattattgaggatttaaaggaaggacaaggtcaaccagctaaaaatggcagatttgttcatgtatactatgaaggaagactgaagaacaataacaagatgtttgattcacataagcaaggccaaggttttgcttttaaactaggttctggtgaagtaataaaaggatgggatgtgggactagtgggaatgaaagttggaggaaagaggcgaattacttgtcctccccagatggcatacggtgttaaaggatcccctccagccattccaggaaattcgacacttgtttttgaagtggaattaaagaaaattcgttgatttgcataatgcatgcatacttctgttttttatacaatacttgtttaatataagaaaccagttaaacggaacttttttccaattttgcagagcgggtctaaaatcgaatgaaattattttcatgtttgttaattggtattttgtacattttgattatccggaatccgaattttacgagaaaagaacaggtttcttttggcacgttaataaactttgttattattccactcaagtttgtttactctttttaacggttattcctagtgtgtatcttttcttgtttagtttatttagttaacagacataaatattgaggatacacgatatgaaaagtacagaagtacaaaaatgtgttcgaaagatacacagaaggataaaatatttttatatcattggttttataacaaagtttagcattgtatggattaatcacagatgcttaaaagtgtaggtactacagttcgccaaaatatattcaaaaattatgtttgaaataatttgataac

SEQ ID NO: 7039 - DNA, 1754 bp, Diabrotica virgifera
aataaatatgatttctttaaaataattattataggactgataagtgatattgaaagtgactttagtataaccaaaaagttaaaactattagaattttctctgaatgaatattatctatagatatgggaataattaaaagatattacttataaatagtagaataattcaaagaacaattcactgaataaatttacacatcgcacacatcagaaagaatatatatttcgtcacctggaacaagagtgacaacaggtggttataaaaactatttataaaaaacagatattgctatttaccgtgtgatacgatgatgttgtgcagaaatcccattggattaattacttattccttccacaaataagtttttggtgatccaaactccaaaattcacatattggaggtctaacctctaaatttgacctactatttgcacacgccacccatccatgctcgttgaatctccaaccacaagtgccacgtgccacggaacttttccctcaccttccaagaggagcatctcaaacgaccacagaacacgaattaaatgtcacggaacgattctacaattgttccgcagacgtcgacgtgtgacgtcacataagtggtcctttacgagaaagttacagtaattaattaagtgatcaaaagaaaataattataataattaaagcgctaaaaatgatattataacgggtggaccgttacaatgtctatggttaatatacacaaagcctattctaaaaatacgtgttcttcatgtcaaaagtacatatttgcgcgcctaaaattgtaggggaaatatttttttttcattaaaaacaaattcacataattgggtcaaatatctatataacataaaatattgtttaaaattttcttattgaaattttaaacaatatatctttataataataatttgagatttattcagaaccatcttcaatatattcgtctttaagcttcgctattatgaagtactacttttgtgtactagtttatactaagctttaaagctagctgtcgatggttattttataggtgagaatttaatacttgattaaccaaatacaaaagctaaaaccaagtaattacctgggaagttttgataaataaatatgtagataaagtatgataaatatatatctaaaatccccagagatttactgtattccatagctttgattctcagtgtaaattttttctcaatgtgtgtgaccataatttactacctatgctttgactaatttagcaaagtgggtgtcaaagtttgatgaaaaatattcctcacacttcagtttgtgtaatgttgaaatatactgctcactaaaaataatgcacttcaacaaaaaatgatacagtttatagatacggaagcaggaatattttttaagaaggaaatcaaacattgtcgttattcgtatcttaacggtgtaggggagatgactttttagaaccatttttaaccatcgaaactcatttttctacattacttaaaatatttataaaagttaagaaattagtgggtgtacagtatctgtcattaacactaaaaaaagaccaaatgtagtaattttttacgtaatttcgttattatgttccttcatatagtctctagctattccgaagtactattattacaagtctgttttgtttcctttcgtcatatacagttatgagcgcgcaaaataacgcaaaagatggaaaccataatacattgagaaaaaaagggatgaaactagtagatgtggaaatta

SEQ ID NO: 7040 - DNA, 1768 bp, Diabrotica virgifera
gatattcaatgactccaaaaatgttaaaaatcttaggtattgtactgctattgctggcaggcgcgtactgtgtagaatcatctgttatttcagaagatgataataccgtaatagtgaacaccactaatggaccagtaatgggtggttttggagctagatcacatgcaaatagatcccaaattctatactggtttagaagtattccatatgccgtacctccagttggagatttaagatttgctgcacctgtacctataaccaattggtcaggagttttagatgtacgatatagtccttcggaatgtattcaaggttcttcacctgtagccggtagtgaagattgcttgtatgtaaaaatatacagccctcacgaaccaaacaaagacctcaatcttccagtagttgtatggatttacggaggagccttcttcgaaggctctgcagattttgacgatcaccgacctgatttcattctttatgaaaatgtaatcgtggcagctattcagtatagacttggatatttgggtttcatgtcgcttggagatactgtagctccaggaaataatggaattaaggaccagatactagggcttaaatggattaaggaaaacattaggaactttggaggagatcccgaccaaataaccgtttggggccaaagcgccggagccgcttctgtggcttatttactgcagactaaccaaacaaaaggcctgtttagtaaagcaattcttaactctggatctagtttaagcccttggtcgttggcaaaaggtcttccagaggccactaggcaagtggcgatacagttaaacatatttgctttaacatcttcagctattctaagagaattaagaaaagtcgatgtcacaaaattgcaagatgcagtgaattctgtaaatcagcagctgacgatcttacgtaatccattggaaggtttggtttttgccccggtaatggaaccagatcacgacggtgctgtaataactgaatattcttacggactactaacagaagggaaatttcaccatgtgcccattttagcaggatataattcattggaaggatatttcgatgaattagaagcactctttagactatggatagcgaaatatgatttatatcatgcacaacttgttcctaatgatatgaacctgcttccaattacagaaactattatagcagaaagtattaagtatacatattttgatatatatccagtttctttaagtacagaaaaactcatgaggtatatcgcagacacccaatttgaaaaaccaattcatgaagctattagactttattccgcttacacaaaagtgtatgcttatcatttttcctatgaaggaccactatggggtcgcatagatcgcgaatttcacggtgttggtcatagtgaagatttgggctacttatttgactataatataacaggaagtaacgaagattacttgacaagagaacgaatggtgaggctatggacgaactttattaaaaatggcgacccaaccccaaagcctgaattattattacagaacgtcacctggccagcaaattctgttgtcataaagcctgaaaacttgaaattttttgaaattaacaaagatctaaaagtggtaggtcttccaaatgctgacaagattttactttgggacagtttgtatatggaatatggaagacctccatttactacttattgatatatattggcacttactgctgttgattttatgttatttaagttaaaataaagttactacacaaaaaa

SEQ ID NO: 7041 - DNA, 1768 bp, Diabrotica virgifera
  SmartBlast Evalue=1E-167; Info=Extradenticle n=1 Tax=Tribolium castaneum RepID=Q70WD0_TRICA
ggctcaggtatgctattttttggcttttagacactgatgatcgatttcttaatccgaaaacgttttgtcttgtgacccttattttgggtattccaaaatataccctttacaacaaatcaagcatttttgtaataaaatcctcgttgaaaaatctttatactaaaaaactgttcgtatactaacgttgtaaatcctttagactgtcacatttgctttagaaaccatcacaaactttatagaagatgtatatttaaaaataaaaatgtatataacaggaaacactacacaaaagtgtagtaatagtgtgcgtaacctaaaaaaataatcggtagctgccacaagttgataaatacacagacattgcacaaaatacaaaaagtagtatacattgaaattggtatacaagctttagtatacttatgtatcttgaaagagcgaaatatcaattgagggtgttttttggaacattgaactgttcttgacctatgagccaacagtttagctctcgcgttttcacatataacccgtttatcgaaatggaaacaatacttttagctcttactattttcgaatgtcccagaaaacgtcctgaaccgtatacggtaatcgtataattacggagatagttcttgagcgtgcatgggatcgtatccgcaactactggcgtcgtatgcggagctttgatcgtacgcggagcccatggagtatcccattgagtcttgcggaggcgctggagacatcataggagtcggcgtgccgctgtatggcgacgcgccggccgcctttttagctgcgtataaattgcctcttcctgtgccttgccgatgttctttttgtagcggatccgcttgttgccgaaccaatttgatacctgactgacggtgattccacacttcctggcaagttcctccttagcttcttcactgggataaggattggataaatgggaatagaaatattcgttcaaaatttcagatgcttgtttactaaaattacgtctctttcttctggcatccaaaaacctagatctaagtatcatgacagcttcacatgtggattgcttcagctgcatttgaatagaactgaattttttgtgaatgatctgaaccatccgttctatttctttaggagtaattggtctagtgcgactctgttctctaagtaggttcattacgtgagttgtaaattcattacaagcctgttcgtatttctccaattcttgatggtaaatttgtctaatttgtgccaacttagctctataatctgagtgttcaatagcattgtcgggttgtccagcttgagcagcagctgatccagaagctgcagctccggcacctcctcccttttcaggacccgcaactccttctgcaatcaacatgttgtctagtcgcatcagctgtggatctggaggttcttcttcttgggtatttcttagtgacaacactgtcttttcttttatttcacacagtaccgaaaataacgcaggtttcatccgatggcaattcaaagtatgtttccttgcttgggcttcgtctaaactttgatcggtaatgttcatgatttgctgtagaatctcgccgatgtcctgtttacggggctcattttcgtttccagcgggagcctcgttctgcggggtcatcccatacggttgtggagccatcaaaccgcccccgggatgaccaatcattcttccaggatcatccatcactccgaatgtctttactcacaggtcaccaaacgtacataacagaaatagaaaatggtggac

SEQ ID NO: 7042 - DNA, 1768 bp, Diabrotica virgifera
  SmartBlast Evalue=1E-118; Info=Sugar transporter n=1 Tax=Aedes aegypti RepID=Q16TA1_AEDAE
acatatataaatatctattatataataaaaatgaggaaacactcaatgttgttcaattttatgtttaaaactcttattttcctcacattattattaaacaggatgtcagatttgtacaaaaataaatttactttatttaaaatatataatattttaaatgggctttattctgtaaaaattatcatacagtacttctccttgaaacattgtcatcatcgtgatgttttcctatatacagccaccctttttttgaaattgttagatatttctgagagcttttttccttttgtctctggcatgaatatgtaggagtatactagacctgctgcgcagactgctgagaagaaccattgtaagtgtgttatacctcctaaaacgtcgtatagccagtagtaaccttgtagaccggcgaacatgaacaccatggacatactgtaacctatagtataaccgactcctctaattttcactggaaacagctctgatataaccataaaaggtaaatacatcagtccattaactgagcagacgacatacattaatagtgatactacgggaacccatttggctgtcgtaacctcttctttaatccatagagtgtattgtcccgaaaggtacatgaaaaaagccattccggcacaactagatattaaagctgttctcctgtttaaatattttagcaaaacgacattagtactggccataatgaatcgtactacaccaatcaatgcagatacaaaataggcattcaaatctgttcctgcttcctttataaaagtaatcgagtaaaacattgtgatgtatattcctgaaaagtgttgacagaagaataaaggacacattatgataagtggtttgtatcccgttggtttcatgaattcatgtagaatttccttaaaacttcctttgtttttgcttttagcttcttcttcttcgtgctgttttttgagcactttgaattggatttccgcaaatgtttcattttttccttcgggctgtggttgctttttatttaaccattccaacgactttttagcctctttcgttcgcccttttaatatcaaccacattggactttctggtataaagaatacgactataactggtaatacaataaatatattacaaatccaagctaccattctccaggttgtgtacattcctgccaaatacacaacaatcatacctagtgacacgtaagttggtgatagttgcatgagtgacattcttaattttggatgtgctatctctgtgatgtagacaatagcaggattcgtaccccaagatgctgcaattccagttaatatcctgcccataataattatcttcatgttaggagccagcgctagcgccacccagcccaaaacgccaggcactattgcaagttttatcgtgtttagccgaccgaatttgtccattagcacaccgctaacgattgatgcaaaaggggctattaggatgataatgctggccatgaacgcattttctgattttgttgctttaaaatcgctaccatcttcttccagttgtgaaatgagtactgcagaatacgccattgctgttccatttccaatgtgaaatgcagctgctgcaagtgatgctagaatttggggtaagaggcatcttaaacttgagttttcttttacattaagagatttactgttggcaactaaattttcctcttgttcctcttcttgatcttcttctcgttgataccttaagctgatgacgctggctcctaactccatgatgtaactgtaaatactac

SEQ ID NO: 7043 - DNA, 1764 bp, Diabrotica virgifera
  SmartBlast Evalue=1E-122; Info=Cgmp-dependent protein kinase n= 1 Tax=Aedes aegypti RepID=Q16JU3_AEDAE
aattgaaaagacttagtctcatttgttgttaggttactgatcaaaatgtgtttatgcttgcgtaaaaacaaaaattcgttttctccaggagaagttgaagttgaatatgataagcaaagacgtaatgctgtatttcaaagtggaattgacatatctgatcaaatacacttagaccataagacacaagacgaagaacaactcataagaaccgccatagcaaacaatgacttcatcaccaaaatcttatttggaaacatccttaagggtgtcattccggccatgtataaaaggaatataaaagctggcgatgtgattataaaagaaggcaacacaggttcccatatgtatgtctccataacaggaaaatttgaaatatccaatcaaaatttcatagatacctttgaagatgttagggtgttcggcgaactggctatcatctatgatgctaaaagattagcgactataaaagctctaacagatgcagaaatatgggttttggatgcagtcacctatcaacaagtgctgaggagatacaacgtgaaagaacaagaagaaagggttaattttttgataaataatgatattcttaaaaacgctggagaaaaggtgcttaagtctgctgcaaactcattaaaatctgaatcctttgttggagaaaaacctattgtaacagaaggggaaaaaggtgacaaattttatatcgtccgagcgggaaccgtcactgtaacaaagaaaggtgaagactttatccaaacgcatgggaaaggttactgcttcggtgagcgagctctactggaagaaacctgcagacaagctactgtcactgctaatcccccattggtggagtgtcttaccttatccagaaaatccttctttgaacttacggaatatcttaaagttattccaccaaaattgtccgtaatagaaaaacctaacatatatcaggatattaaactcgatgatttaaaaatttgttttacgttgggtgttggtggatttggtcgaatcgaatgtgtcaaacacaaagaaactaataaattgttcgccctaaaatacatgagcaagattaatatcgtccgagacatgcgtaagcaacatgccattaatgaaagaaaacaaatccaatgttcttctccgtttattttagatatgtacaagacatttagggataataaatatgtttattacttactggaggcttgtctagctggagatctttggcatattctttataaagaactccctgatagaagatttaaagaaaaagaagccaagtttatagtcggctgtgttttagaagctatcgagtacctgcattcgaaggaaatcgtatttagggatctgaagccagaaaacgtgttattaacgtccaacggatacttcaaactaacagattttggatatgccaaaaaattacccaaatttgaaaagacttttacttttgctggaaccattgaatatgtagctccagaagtagcatctaaacaatcatatgacagagcagtagacctatggacaattggaatttttactttcgaaatgctctgtggaaaaacaccattcgctagttctaaagagagcgccatcttcaaaaacattttagatggcatcgaaaaagttaatttcccaaattttgttccaccggcagccaaaaatttagttcttaaactatgtcacaggaatccacaaaatagattaggtatggatgacggaatagccaagataaaatctcataattggtttaatggatttaactggagcaaa

SEQ ID NO: 7044 - DNA, 1767 bp, Diabrotica virgifera
  SmartBlast Evalue=2E-27; Info=E3 ubiquitin-protein ligase HUWE1 n=1 Tax=Harpegnathos saltator RepID=E2BHC6_9HYME
gtttcacctcttcgtttcagctctctctcttaatacgcgtatttctcgttctctgttttcacgttgtattctttctcttaattcacgttcttcttgtgctcggttttcgcgtcgtactgcttctccaaattcacgatctgctctttccctcgattcgcgtaattctctttctcggtttgcgcgtcgttctgcttgataaatgtttgctattcgaacttcttcactcattgtcatcgcttgtctttctctaattaatcgttctgttaatcgttcggtttcacgttcttctctcattaaacgttctgtttctctttctctcattaatcgttcttctcgctgtctgtttagacgccgaaggctttccctaaattcacggtctactctttctcttaattcgcgctctcctctttctcttaattcccgttcttgtcgttcgaggttttcacgttgaatttctcttatttcacgatcgtcatctctacctctagtctgtctttctctcctgtcatgatctctacctctaatctcacgacctctatctctgacatcatgacttccatctcttatgtcgcgacctcttgtgtcagtatctcttccacttcctgtattagtacctcctgatctatttacttgatctgcaacagattggtcagatactgtatccatttgctgaccaattggctcatcaaatacataagtttcttcatatctaaagaggctcgaatcttgcaaaagagagtttgtcataacttcacgtattgcactagtatcatcacctcctctttcagtagatacagtagatataggcctagcaaatatgatgttacatctatatggaagagagagctcaaacggattagaagaatcactttctgcccttgtttctgattcggttctactgttggagtcatctgtattttgtgttatattatctgatgtatctgttgtctgtacagcagtatgggttgtttcagaaagattgttttgagaattttcatctccagaactagcaaaacttagttgcaatggacagcaatggatcatatcgtcattatgagtgtggccgtctctttcactagatgtatctgatatttcgataggaataccatccagatcttcttcatttgctggaacgggcatagctggatcataagcttcagcatcagcatcatcctctttattttgttctctggaagcagtagtattagcctcatcataattaaataatacagtttcaccactatactcatcttgatcttgatcagttgtggttcgcttgcgcttttttagataattcttcctctttttctttcttactccgtaactcttcatttctatattttatcaaatcagggataagcctattgcatgagtatgtcgtacaatcatatacagactccaaatcgagtaacttagattcaatattccaccagtgtaaaacaggcggtatgtgactcaaagttgctgccaaactaggcccaaagagaaagccagattgatcaacaaaatcaatttgctcttcattggaaggaatgataccgaagttatccataactactaccctagcagcttctcgactgtctggagcacccaatatattgtcactaggtccaacatgaggatcatgtggtctaaatagcctacggatactttgtaaaatcactggtgggtttggatttctggggttaaatagatactgatatcttctggggcgattagctctctgatttctactagctgtgctttgattattctccggaattcgag

SEQ ID NO: 7045 - DNA, 1769 bp, Diabrotica virgifera
  SmartBlast Evalue=8E-34; Info=Equilibrative nucleoside transporter 1 n=1 Tax=Harpegnathos saltator RepID=E2BT91_9HYME
gaatgtgataaaattctgaacggtatctcgctttttgtacttatcagattgttatacacaaggaaggatcgattcaaatgaatgtgtaagatgcaatgtgttattggatgaaattaaatatttacgggaataaactgcgaaagcgcaaaaaattgtatattagaaaaaatactgtttcaatatgaaggctctagcggatataagtgatagttacataataaacagcaaagtattttatttattagggataatggtcgttgtacccatacatttttacttaaattccatggacttctggatgtttaaatttaagccacctccgccaggaccaaatcatcctcctggtcctcctccacctagaggtaggataacacccagtacacaggttttcaattattttaataaggaacttacaactaaacatccagaaatcaagtataattcagaggatactacaagtagttttcgagcacatgaagacttaatttatcatgtattaaataatgataatagttaccaagctaagacccctgcaaaggaattgcttcagatatatccaattcaacttcaaggatctgtaattataaactctaccaccacctctcctgatcaacgaacaccattccaagccaattttgttgtagctttttcaataaattttaaggtggtattattaggatccttattattttgtacaatgtggcccaaaaagctaccaccaccagagaggcggttaaaattgtgtctaactgctttgtgtattctattttctgtagttacattgttaacacagatcgatactgaaaaagagcaaactttgtttttcgttggatctatgattttcgcaacaatgttaaactgtttcacaggtttggcgttagctagcttatacgaattaataaccaaatttccgtgttcatattatgcttcacttcagtcaggtaacaatatatgtggaatcttgtcagctgttttacaaataatccttcttagttttcggctaaggccaaatgaaaacggtgcaattcagttctccgttggctgctttatcctgatttttactacaatttactattttgttgtgttcaagaattcaaaatattttatatacaggatagatacaaaccatgaagatcaaagaaatttatctactgcagaatggatgcaaattatacctaaaactaaatggttttatgcaacaatcattttcgttgaaggaactacacatattgtttatcccgggttagcagctcttgtagtgacccctctcagaggtactctttggcgagacgtatatttcgttcctgttgttacatatttggggtaccaagtttgctgtttgattggtagagagtcagcgagaattgtgaaaacgcctaaaactggactaatactcttcattttatcagcaataagaatcgtgttcgtacctctcctgatattttgcaatgctcagcctagaaaacatctaccagtgctttttgggaacacaacgtatataatcctgctatcgatctttgcatttagtgaaggcattctcataaataccacgattgttgcaattccaaaaaaattaaaacaggatgaaaaagtagctgctatgattatggtaccacttatatcaacaataaccctcactatggcgactggattaaatattttccttacaaacataatataacttttagattttgtatattttattttgaccagtattctgttagttttaatgtgtaaaaatttattttaaaaatataagtgaagttcat

SEQ ID NO: 7046 - DNA, 1761 bp, Diabrotica virgifera
taaacatgatgcaggttcctattacctatacctgtttaaataagttcagtgttacaaacaagaagtttaaatccgaactaccctgtacatattgatcaattcatttttacaaaaaaaaagtttatgtattgttatttatattcatagtttattttatagttactaacttgtttcactatatagttatttgtttgatcgtttattcttgtgatagatgtaacatttcatggcaaaaaaaaacgctatatgaaatatgctgtatgaaatacctactattattgcccggccattggccacgtacgagaacatatagttcctatacccactaaaggatatatactaatttttattgcatatacatggcacattcgaaaagaaaatagtgaaataatgcaaatatgcccttttctatcttaattcaaagtttaactgaaaccactttattattgtgttccaaaaatgtaatgtaaaataagatctaaattacaggtgtcattcattttgtaagagtctcgtgcagtcccattgaatctattgtaaacctaaaacacaacaaaaaattagcaacagagaggtaacattatttgatatgcatttgtgattaggatttgcaaaccctacaccttattcatacaggaattcattcagtaggtacatataaccattttaagaaagctatgttaaatctacgaacctaccaaatgtaaggtacttctagatcagcaaataatacaagaaatgtagttaaccctaaatgcataatttttttgaagaccggccaaaaaaaccaatatatttttaatgtaaaaagtgatcctagtgcgcagggcagcccaactagtacttacatttatccgattactcaaataatcgtcacgaaactgtcactggacgattacaatttttgttggaataattcgaagcacgatgcaatgaacgatcatttttttttgttggaacgtattttctttactgcgcaggagcgtaatatataggtactatattgaaaaatgagcgagtcagaatattaatacgtaaatttgtcagaaagcggctcacaagtaagagaaaagtcgaaactgaagtagaaaaaatattatattttatatttaaatgagtaagtgaaagtatagcttgcaatcccatgtaaatgataaatataattaaaacaattgctttttgctttcacattattatttccaatgcccgattgcattcgagtgtgaaaaattagagcaacatagagtacaacgccgctcgatttatctcgagtgtgtacagtttggccagtttagcgcgctcgaatcaactcgagcgtgcaattaaggggttaaagcagttagttctgaagatattgagacatgaggaaataggttgcaaatccatagtaagcctaaacaatcaataggtcaaaataaacagttaataaaactacagttagacaaacaataatactacccacaatcagaaatatcatcaatgaacaggttggaaatgaagatacaaggacagttgacataaaataaacatggaagaggaagaaaaaactatttaacaaaaaatttaatttgctattatttaaagttgagaacacaaaagtagacaagaaggtatcttaatattgttctgaagatgtgttagaatataatgtatttaaaactaggtctggaagcggaaacggctaataaattattttataatttccaaaaatatattttatggggcatcatcctattctactacatgaatatattataatgt

SEQ ID NO: 7047 - DNA, 1762 bp, Diabrotica virgifera
  SmartBlast Evalue=1E-135; Info=Chrysoptin n=1 Tax=Chrysops sp. RepID=Q9U9I6_9DIPT
gcagcatgtcatttatttatttatcatttttaaactacaatttttcaaacaacaaaattatctccgaataacgtatgaattttcggcattatgtaaaataattctgcccccttcttcttcgaaaattggtgatctatgagcaatatagtctacaaatacatctacatctactagtcctttctttttattaatcaaattttttcctatgatatcgaaaccatcaccaccttcagccatatatgagttcatagccaagttgtacagtttgtccatctcaacgtcttcgtatacaggaacagtacaattgtgacatctcgcttttagggaaatgaccctttcaccttctggttttgcgaagtcgtattctactattatacctgatacttgaagcagagttgtactggcttctgttcgacctgcatgatattctaacgtacaacgttcaaatgtttcttttaaatattttccataaagttgaccaaaatcgatggtattgctaaatggttgagatgtttttatatcggcgtaagttatatttcctgttctaatagtagtcctaagacctccagcatttgcaagtccaatagaagcttctgtccatgctccttctggtggtgattttgtaaaagcgaaaacacttgcatcagcaataaagtttcccaaagtacattcgtgggtataacatccttcaaaagataagtcaaccagagtcgatcccaacactttatttccttgcttatctacttcttctttccaaggttgtaagtccttgttgatttgaggatcttgaggtaaattattagctaagaatatcggggctccagtgtagtctgcaatttctccattatgatctaaatataccgttatgttacctacatatttgcaataagccgacgcttgtgttactagcacattatgtccttggttactttttactatggttggatagggtccaccaacggggtctgggccaggaggattatctcccgtccataagaaagtatgtgagtgcccaccaacaataaggctgatcttctcatgagcattttgggcaatctcttgatctacttcatatccagaatgtgatagaactataattgtaaaaacgttttcttctttaaccagtcgctcagcttcagcgttaacgctggtagattcgtcgaaaaactttaagtctccagtgctagataatttggcacattctgaagttattactccgataataccgatctttttgccatctctttcgataatggtactcttttggtatattccttgcatgctgggctccaagctgtcgtcaatatttgatacgataattggatgctggatagatttaatatatgggactatgccggctactccatcatcaaattcgtggttgccaagtacctcagcatctataggtagtttgttcataaactcctgagtaatattccaatgtccaactgtataataaagagttccttgataattatctccggcgtttagtaacactgacttcggtttttcttccaataagctgtttattttactataaagtctagaaaatcctccaatacattctgtttcatttttacaggagttaccatctggactggtttgctcaaatctggcatggaaatcgttaaaatgaaccaccgacaattcgaagtaatcactggtaattgtttgtggcagagcgccaattttcgaaattacacaaaacagaagaaacgcgacggacaacataattttattgtctatctacggttgactggaa

SEQ ID NO: 7048 - DNA, 1762 bp, Diabrotica virgifera
  SmartBlast Evalue=2E-91; Info=Inverted repeat-binding protein n= 1 Tax=Tribolium castaneum RepID=D6WQR7_TRICA
tgctgctgcttgctgccattttcattttgccggcaggacgaaggaaggaattataattatagaaaagttacaggtaaaattgtgaaaattatctgattcaacaaacgatatcgcaaggatgtacgaaggagatgaatacgggagtgactatgaggaaggcgatagtgaaatctttagctcctctttcaaaccgtcctatgtcgtagtggccattgatacgcacccatgcatgttcaaaaaaaagagcgaaaaggaacaaatgccatttcgtatatgccttgaagccttggcagaagttatggaaaccttgattttcaaaaaagacaccagaatgtggagtccatttgctgttgttctagccggtgcagctactcccttaatcagttttaaccaaagcgtattggatactgttaagtttctacaagtaaaatgtagacaaacagatgctgaattgacctctcagcaccaaagaaaaacagctttaaatgtgtcttcattttttcttacctgcaagaaactattccatgaaatcaagtctgtttttcataaaagaacccttctttatttgagcaacgatgataaacctgtaactgacaaaaatgctcgttttacagcctttaacgagatcaagacatttgcagccagtcaaatagagtttcagattattcctacaatacaagattttcagtacaagttgttttacaatgaattgttcagcattatcggtaatccaaaacgagaagaaatctgcactgataaagaaggattagcagaaaaattgtcttctttattaatggtgtctataatggaaactagaatacttttctatccgtttccagatgatacggagcgctatttgaaatgtaaaagattcgcttatactacaaacattcagctgtataatcagtacatgacaaaagatggaaagaaagtcatcaatacagatgctcctccggatgaccaagaatactttagactcaagtctgaggatccaaaccaagaacacatgagattcgatgcgctagagaaggagcgtttgatggacagtgtaactcccaagggtcttactctagcctttgttggagatagacaaatcggttatggccatacattctttaatacacaaatactgaaagttgatccaacagagaccttgccgtacttcaataagttttgggatcattgtgtaaattcgaagaaagttttggtttgtctttcaaaacttagacaacctgatagaccgagatatgtggagctcattccagtcttgtgtaatgggcagcagatgtttttggaaaaacggctaccattcggaaatgaaatagtaatgccatttaaatatcctttccccttgcccgaagaagaagttgatgacaagagaaaacttgtcatagaacaattggtcgagaaacttacattcgactttaatctcaaaatgttaccagatgtcaatctgcaaaagaaaaaggcctacatcaaagcaaaactactggacatttttccagagccagttaataatgttgaaatagatagcaccgcattagatggagttcttgaggaagtagtagcagaaatacaggcaaagttccagttgactgatacattcaaaaggaaagcccctcaacattacaacagaagaaacaagagaggaaaataatcaacaaaaatgtgttttttaaatatttttataccattttgtgtttagtttctccattgatatgaaaaaaaaaattgaattaaatataattttgagatgctttca

SEQ ID NO: 7049 - DNA, 1758 bp, Diabrotica virgifera
atttgatctttgatcggtcacaatgttgtagtgtttttagtttattgtgcctcgaagagacaaaatctaaccatggctcatgtggtgcaactagcggaaggaaaaatttctggaggcactaggacagatctcaatggggataagtttcattcgtttttatgtatcccatacggaaaagctccagtaggcgacctacggtttaaggcgccattacctgttgaaccatgggaaggggtaaaacaagttatcacagaagacaaaacgccattccagaagaacattgttctgaaggaatatactggagaagaagattgcttgtctcttcatgtatttacaaagaaacttccccatgaagaatccaaactgaaacctgtgatggtgtacattcatggaggaggttttataatgggatctcacgaaactacgatgtatggtccagaataccttatgactgaagacatagttctcgtaagcatcacttaccgagttggtctactgggttttcttagtatagaagacgaatcactggacgttcctggaaatgcaggtctaaaagatcaagtactggctttaaagtgggtccagcgaaacataagaaatttcaatggagatcccaataacattaccatatttggagaaagtgcgggaggggcatctgttgaatttttgctgttatctccttcagccaaaggtttatttcataaagccatacttcagagcgggtcgactttaaatccatggactcttaaaaactccccagcaactgagtttgctgagtttaccaaactacataacttgcctgatattgacattttgaaaagcttgaggcgtatgactgttagggagctgtacgatcaacaaaatcaatatattaagtctaagaagctatttgtagatttcggtctaataaccccagtgatagaaaaacccaacccaacagcatttttgacagagaaacctatcgacatcatccagtcagggaaatacaacaatgtgccagtgataatgggttacaccgacagtgaaggtcttcttctagacttcttgtcggcacttggaatgaacggggcaaaagagggagaagatatacctattgagcagatactaccatacgagacaaatttaacagatgcacaacaagtcaaacgattagttgaaaagttaagaaatttttatcgtccagaagctgatccggttggacgaattaatttatctacggatgccttgtttgcggctggaataatcacttctgcaaaaaatcaagcgaaagtgtcaaagaaccctgtatatttttatagattttcattggacgcaggccttaacatgctgaagaaaatggtgaatgatacacgtccaggagcttgtcacggggatgaactgggatacctatttaaaaaccttttgacaacagacattggagatgaagataaaacttatatacatcgaatggtaacactatggacaaactttgccaaatatggaaatccaacaccaccaggaaataatctaaacattgaatggaagccgatacagaatggtcagttgaatttcttagatattggaaaacaactaaagatggatgtgaatccagacgctgacaggatgaaaatttggaatgagctttaccagtgtaatccactgacagctaaatattaaatttgtttgcaacaactctcagaaatacatgttattatattttatattataaaaatatttatatcatattttaagactatacgaataaaactgattacttta

SEQ ID NO: 7050 - DNA, 1760 bp, Diabrotica virgifera
  SmartBlast Evalue=0; Info=SNF1A/AMP-activated protein kinase n= 1 Tax=Tribolium castaneum RepID=D6WT75_TRICA
ccatttcttcaaaataaaatatataacatattaggtaactactactaagtacaatataagcgattttaacatttcaacgagctaattgtataatcagggcagcacacatctcaaaaaactccatagtatggtgccctgttggtttgccattgcttattgaaagattttgaatgggggtggcgatggcatccatgaggacagttccaatgtttgattccgcttcttcgttgcttaaactcttaaaatccaagagataacttttgtaatccacctgatagagttgtagtgacatcataacatgtctgttctgcatcttgttcgagtgcctcacgcgaatatgataggggttgataactttccattcgtaatctaacgctttcattgctctgtacacttccatcataatatcgtttggtttactctgtgatcgaattcccaagtgccattttgctctcttaactttgcctctatcagtgggagtcgtagtgggaggccatggtcgttgtggagcgattctttctggatgtggcttcatcggactgctcgtagtatcgtggggactaggactcggactggttggcggaggacttacagccacgtaaaaatctttgatttctgctttggctgcttcgtctgcgatacgtttattgtcgatgataaggtggtaggctatagcaagctggtcgtgaggatcaccactcaatagagcactgtggacttctgcttcctggacgccaaatttgtcacaaacttctctaattgcatcaatatcgataaccgatgaatcctgttcaacaggagaaggaaatagataggcaggacaatccttctgaaaccattcatgttttttgatatcctcaatgctggcacgcttcattggatctatttgcaacatctgacagagtaggttcacaactggtttatttaaataatcgggaataggaaatatgcctgatttgatctttctgaatagtgtaggtacatgctcatcatcgaagggtagagtgccacataggagggcatataaaatgactccacaggaccatatatctacttctgggccagcatacaacttccctgatataacctcaggagctgcataattgggtgatccacaactggttcttaggaattctccatccatcatcatatttgatagaccaaagtcagctattttgacatgcatgttgtgatctaacagtagattttctggttttagatcacgatgtacgatcatatgtctatggcaatagtcaacacctgaaataatttgttgaaaaaaccttctcgcttcatgttcctgcaactttccatgtttaacaatataatcgaatagttctcctccagacacatattccataatcataaaaatatctgtaggtgtactaattacttggtataatttaataatgtgtggatgcctgaataatttaaggttttgaatctcccttctaattttgcccacaacatccaaactttttatcttttgtctgtttaaaatctttactgcgactttgtgacctgtaagttggtgttcgccaatctttactttaccgaaagtgcctacacctagggtggcccccaacacgtagtggccaatcttcacaaggggctgcgcccctggttttgctgcttcagccatttttatctacaataaaatgagattaactgatgttataatacattacatttttgtttccaaatgccattccaaattacatttttgttttaaggataaattaaagaatcacatttctttc

SEQ ID NO: 7051 - DNA, 1761 bp, Diabrotica virgifera
  SmartBlast Evalue=4E-57; Info=Endonuclease-reverse transcriptase n=1 Tax=Bombyx mori RepID=D7F170_BOMMO
tatgttgcattaatatgcgaacttttatattgagataagactttttgtgtatacgtgacattgtcgatcagttgccaggtatcaaaaccagtgaagtagaagtatatttattaaaagaggaataccaaattaaaaagataaaattgttaatatcttttaactcgatgcttttctctgtacgagttttatcagtttaacatgccgaattttatcgagggtattattatagtcaataaaatataaaaatacactttttattcatctaacaataagtgcaaataattcttcacagatcatttattttctctagagaatatacattaaaacataataaaaagtattaaaaaatcaataccaaaatgacaaattaccatgtctgtctcctcaaagcttctggtgtgtcttcgttttcgtcactacttttctccactcatttcggttctcagtctttttttttccagtttcgaattcccataactcttaagtcgttttcgacttgctgtttccatcttgcttttggtctgcctcgtgctcttgtctcagggggtatccagttggtaataactttaatgggatcatcttcactttttctacttatacgaccataccaccttattcttcgtgcttttgcttctttcactatgttttctccttccgtccattgtcctatttcgtggttcatccagggtcttctttcgttttcatttattacttttggtcccagaatgttgcgcattatttttctttcaaatactttcagctgttcttcttcttttaacgttagggtgttggtttctatggcatacattaccactggccttatggtggtagtcttatatatttgcatctttgtatttctgcttaattttttatcttttattatttttttatttttgtggtaagctctatttgctgcttgtagtttctgtttcaggtctattctttcattatctctactaatcatcgttcccaagtatttgaatgtatctacttcctcaaatctgtaattatctattatcatttgtgttagtcttgttttcttgaatctgctggcgttcatgtactttgtttttccatatttacgtctagtcctcttctttttgcccctttttctatttcagagaatgccttaattaatgatcttttttcccgggctattataacgatatcatctgcataacctactatttgtactgcatttttattaattatttcgttatttgttgcttcttgtaatgcacaatctagagctgtaatgaataactcagttgacagggcatccccttgtctgactccgttttggaccctaatcttctctgttgtcttttgacctaaatctattactgcttgtgcctctttctttgtcatttttattaactgtattaatttgcctggtatttttatgcgtgttagatcttctattagttctcctctttttagtttatcgaatgcctgtttaaaatccacaaaaagcatatgcagttccatgttgtgttcatatgctttttccatgatttgtcttattatgtgaatagcgtctatcgtcgatttttcttttctgaatctatattggtaatttcctatgattttttcggtatgctctgctagtctgttttagtataagaaaatggcattttttatcaaactacaaaaattcgttattcgcttttaactccagtttttttaaaactagtcattctaagacagtcaaacttctagaatctattaataatacataaataaagaagaatgaatagggcc

SEQ ID NO: 7052 - DNA, 1759 bp, Diabrotica virgifera
  SmartBlast Evalue=1E-102; Info=Sorbin and SH3 domain-containing protein 1 n=1 Tax=Harpegnathos saltator RepID=E2B2Y5_9HYME
cctcgaatttgcgctcgagccctttacaacttcgttggtcaatcagctagagaactgacttttagaaaaggtgacatcatctatcttagaagacaaatagataagaactggtatgagggcgaacttaatgcaatggttggtctgttcccggctaactacgtagagattattccttttgaaggattaaaatccaaatctaccataagaaaagcacacgagggccaagcacgagctaaatacaattttgtagcccaaactcacttggaactgtcccttgcaaaaggtgaactagttgttattacccgaaaagtcgatgaaaactggtacgaaggaaaaattggtggaagaaaaggtatctttcccgccaattacgtcgaggttctcatcgatccacaaacgccacctacatctaataccaagccggtagcatctccagcagcccactctctactacttaacggatctgcgggcggtaaagaatctatgggtacgcacagctatactcctaacatctcgagctcccaacttgggcccagttatcatgcgaaacccgttcacgttcttaacaatggatctattggttcgtcacacacaagcagaaatgcggcactgaatcaagcgctgcatatagaaacccagaatgaacccacaccataccgagccatgtacaaatataagccccagaacgaagatgaattagaattactagaaggagacaccgtgtacgttttagaaaaatgcgatgacggctggtatgttggttccagtgaaagaacaggagccttcggtactttcccaggaaactatgtagagaaaatttagcaaaaaattcctttgctgtatcttgtttaaattgaatctgtctgtcatttaacccgtttcaattatggtgcctaataatttataaccatcaactgccaatttttgaaaaaaaaagttagctaagccgagatgttattaaccacgttaagcacaaatttcggtttcttctgccaaagaaatgtgttaccttttctgaaaagatgtttctaaatagggcttccgataatattaaaaactaacagagtagcaaatgctgatcaaaaattgagtcttcttgcaaatgagtgaaaaacattgcgactaacccagcttgtagattttgtatgatcactaatatttagttttcgtaaacatgcattctagtcattagccaaatggtaatttttagcatagtatcttattacggcgtttcgaaaaggcgcctaaaatttgtacaacagtacaacatttatttgcaccaaaaagagcgcttgagttttacatacatgaacaatgttcttccataacataataattgtagatgtatattaagaaagaatatgaatttaactacttatatgcggagttgttccgattagtttaatttttggcatatcgtatttgtaccttctgtagattgactgtgttctctagtttctaacccacctttataagacttaaattataggagtgccttttgaatacaatactgactttcaaagtagttatttttgagcaaatttggcaacacagcgaaacgaatttgtaaagagtgtgtaaattgtaaaccatatcgattcgacaacgttgccaatttctctgttgttattgtttaccgtctaatttatatttacaatgttagatgaaaattatattttttcgctttgtcagagagcattatacttcacctatgtttatttgtaacatttttgttttacaataaaaatatttaacgttg

SEQ ID NO: 7053 - DNA, 1758 bp, Diabrotica virgifera
  SmartBlast Evalue=1E-126; Info=Glycoside hydrolases n=1 Tax= Aedes aegypti RepID=Q16WF5_AEDAE
cataaatgatatttattaatacaaaattaattaaaagtttagtcatcacatgtttctaccagacatcttgtggctataacattcttgtaaaacattgcagatggtctgggtgttcttgttctgtttgaagaactaaaatctacttcatagagtccaaacttttggccgtaacccgaagtccactcaaaattatccataatactccatacagtgtagcccaagatgctgacattgtccttttccatggcgtctctcaaagcacttaaataacctctaatatagtagattcttctatcatctttatcgccataagaaggataaccattttctgttactataattcctggattattatatttgtccttgatccaattgactaaatatcttgcactccatgggactaccttcgtatataaaatagtggtattttcccattcaggtggataataattattgactgctacatcttgccacttactaggtgggttctgtactggtgggtcgtacccaaggtcagctaccaaacttccggtgtaaacatttaagccgaaaaaatcgtgggtcccctttatatattcaatttcttcctgtgtaaaggttggcagacgagattgttctcgtccttctgccttgctacgttccgctactcttgtttttacaatttctggatagtctccaacgtaaataggattggcatatacacctagtgtaaagtgctgcatcctatcagctgcctctatgtcttcagacttattagatgctgggatataggaagaagtgtcaagtgtaatagaaataacgcctttttgtgttgacctaaactcatcatcgtaaatatgccacgctttagcatgagccttaacaagattgtgtatgcattgaaattccagcaaatcttcagattttattgtcggagggaaatatccgtagccgtatcctccagagcagatctgctgaggttcgttgatagtgatccagtgtttgacgtcatcaccgaacagtgagaaaacaactctggcgtagttggaataccaatcgacgatggaactgtttaaaaaacctccataatcttgaaatacttgtggtaagtcccaatgataaatggtaactagcggtataatgttattggccttaagttcactgatcagatttttgtagtatattactcctcctacattgatttcatcagcgagacctgtaggtaaaatccttgtccaagacaaagaaaatctataatggttgacacctagttcctttaaaatggctacgtcctcctttattttatgatatgagtcacaggcgacatctccagttgaattgtcctcaataaagttgggatcagtatgaactctatgatcccaaaggctttctccctttccatcttcattccacgctccttcaacttggtacgctgaacttgctactccgaatagaaagtcatcaggaaattttttattgttgattggatcttctgccaagcttaaaccaagcaggagcgaaatcaaaatcaccttcatctcgaaaaatattctacacttttaaccgctgcacaaaaagtttttataaacacttaaattaatttatctggataacaaaaatttaaattcagtaagttggcctccatttaaaagtagatttattatagtttattgattataaaatgtaattttttaagattaatttacccgtgagcaaataatagataagcatctactttgagatacttcgaggaaaaattatttttgtgttttatttaga

SEQ ID NO: 7054 - DNA, 1758 bp, Diabrotica virgifera
  SmartBlast Evalue=9E-50; Info=Remodeling and spacing factor 1 n= 1 Tax=Camponotus floridanus RepID=E2AG14_9HYME
catcttcgttgtcattttctacttcactctctttgctgtccttttcttcctcttcgtcgttggccacgaagtcttcatcgtcgtagtcgtcactgaccagaccaagtctgtcacgtctacgcctctcatcttcactatctgatcctaatgtgtcgatataggtagttctctttcctctagtcctgcgtcctcttccaaaatcatcatcactagacgttaatcctccatatttaatcttaggtcgctttttattcaccttaatttctagatcagataattcgtcaaggatgctgtccttctttttcttttttctgcgtggttttttcttttttctgccccacgtgccttcagattctgaattcgactctgtctcgccaaaatacttaacttttttctttttcttcttaggaatatcatcgtcgtcatcattaataaaatctgcgtcaaaacgtgagactctggctctggttgaccttcgaactggacgtagagacttcccttttttaccaaccgcgtaatcttcactatcatcactatcttcttgttcttcctcttcggaactggcagaactcgatcccttgaaatcttcatctttctcgtcatcctcttcgctgctcatttccagattcttcaaagtgcgcctcttcttcctctttttcaccacaggtttaatcacctcattgtcagaatcactcttatttttgtcctcgttgtcttctttttttcttcttcgccctctttcttttcttctgggacctcttcagggatatctttcttttcggcttgttctctctcttttctgtcctcttcttcggctcttactatagtagcgatatctttaccgcggctctgtttttgtgtagctttatcttgcgccttctcctcaatctcatcctgtatggccgatttgataagctcatcatattcattaaacttgtaactcttcgcttgtctacgttgcctgagctgatatatcggttcactatcgctactttcactctctgactctgatgattctgattgctcgctactactgggagtaccatcatatgaatgccttcgtctctttttgcggtgttccttttctttagcgggtagtacgttgttaagactaatgccgacgtaggcgagacgttcttttcgtctgtcttctacttcctttttggtaagtttcttgtcgtattctactaatttggcgtgaagattctcaacgagttttagatgttggcaagggggacaaaaccaatcaccttcgggaatgcttaacagaggtgggcgaagacatgaacagtgccaaccgttatcacatttatcacagagcaacaccatttccggatgatcagatttgccgcacttctggcatggaaagtcctcttctttctccccttcatcagaatcgacttctactttttcctggcagttctagccctcttaggtggttggtatccatcagcggtttccaggtcactttctggtgaaaactcgtgatcagatttaaaaactagaggaggctcgtattcttcaataatctcttcttcctcttcgatttcttcatgctcctcctcgctagactcgctgctagacttccacggtcgatgttcatcgaagttatgagctttcttgtattttctttgtcttttcttcttggtcgattctttgatgggttcgggttcaggttcgggaatgacttctttaaccttgtctcgattatttttcttctttttgctttctactataataacgtccggtaacttcttg

SEQ ID NO: 7055 - DNA, 1751 bp, Diabrotica virgifera
  SmartBlast Evalue=3E-29; Info=Putative uncharacterized transposon-derived protein F52C9.6 (Fragment) n=2 Tax= Camponotus floridanus RepID=E2ALS0_9HYME
attttgtccttgatgatgccgctgctgatacaaaaagggttcaagaggccaatacatttttgagggaagctcacacttaccacagtaacgaattttgagcattgatatgacaaattcaacaataatacatcaaatctgttccttcacattttccactcccgatagaaacactgctacagttccagaattgctctgtttagtatatttcactgagcttccaaatgcattaatacaaaatgatattttgtaagaatgtatttgagttatctttgaaaaaaatcgttcgtggatttttcattttaaacactacgatttcgaatgtaaaggaatagattttgtttatgaggccataggatatcaggtttctcttaaattgcgtaaaatataacaaaaaattgtataagaatctgtaattaacttcgatttctgcatttaattacaatttaagctgttaatatgtgtcaagatagcaacacaagagacaagcatcagtcattttgcagactcgacttcatacgccgaagaatcatgtatctgcgtcttcttagttgacatgtttgcgtcgagtgaagacgtggttttaatatatatgtcgctaaaattgtgcaaaaggaagaattgtaacagtatggtgagtacgatttagaacaagaattagtcctattacatcaaaactcagaactatgtcagagagttactcctttattacgtaagtagaacacaaattacaggaaagctgtaggtgctaataatctgtaactgtgaataccaatgcctgtcatggcacaccgaagattatccattcgggtggcaccacacttcgctgtgttatttgttatacgccttattcggccgcataggacgaagtatggagggttcattcgtcaatattcgcttgatgcgcgcgcatagccagcaagcacgcatagtaaatacgccatccgcccggttgtcggttttgacacacttcaaaggacaaatatttgggcgcatacagcgaagacgcataacaaatagcacatagcgatgtgtggtcagccagaaaaagaaagtgcagtgccatggcggcgcaatctcagggagtggtttaattgactatctaatcaatttttttctattcgcactggataagcttataaaatcaaaaaatcttacaagaagttccgagatcaaaatctataaatccatcgtcacacctgtactaacatatggatgcgaaacgtggaccatgaccaaatcaaacgaagaaaagctcagacgttttgaacgaaaaatacttagaaaaattttcggacctcaccacgacattaacacaaaccagtataggatcagaaccaactcgaattaaaagcactctacaatgacaccgatattgtccaagaaattaaatcacagcgactaagatgggcaggccacgtgcacagacttcataacgagagacttgtaagactggtatgggaggagattcctacaggcaaaagaccactcggacgtcccagaatgcgatggagagataacatccaagcagatctccgaaaaatgaacattccatttgaccctaggttgatggaagaccgaacaaattggaaagaaagttgtacagtcagccaggacccacccagggttgtagcgctacgtgatgatgatgatgatgataaggtgaagattgccatgatgatcgccaacattcgtcacggataggcacatcaagaagaagaataaataatattaccatttttctcggtaaaggt

SEQ ID NO: 7056 - DNA, 1763 bp, Diabrotica virgifera
  SmartBlast Evalue=1E-102; Info=Heat shock protein 70 n=14 Tax= Neoptera RepID=Q6WAW3_LOCMI
tttcgataagtactgtctatagcatttatatggttatatataattttatagtgtatgtacgatatagtgtgtaatttttgttcataatgcctaagagtatttttgatgacgatcccattggtattgacttgggtacaacattttcgtgtatagcagtttatagaaagggtaaaggagaaattattcctgacaaaaacggtgacaggcttgtaccatctgtagttttttatgatccggagaatagaaatagaatattggtgggaaaagctgctgaagatgagggcccaagacgtcttgaaaactgtataagagattcaaaacgcattattggtcgaaaatttgatgactatttcgttcaagaatacatttccagagaagatgttcaatacaaactggaaaagggactctacgacaaagctgtttttaaaattaatatcaataaacaaagcatcacaaagaccccagaagaagttagtgctgaaatattaaagcatcttaaagaaatggctgaatcctttttgaacaaaaaagtttttaaagtcgtaatatcggtaccagcaaattttagcaacgcccaaagaaaagccacaaaaaaagctgttgacttagctggcttaaacttaatacgatttatttccgaaccttcggcagcaggaatacactatattggcgataggtatgtacaaggaaatataatggtttttgattggggaggtggcaccttagatgtttccttagtaagagttaaaaataaaacatttgaagtacaagctgtttacggagatacgtcactaggaggaagagattttgataatcaactatttcaatattttcataaaaaacatgttaaaaaagaaaggtccattaacaaactaagaaacgcgtgtatcgaattaaagaagaagctttcaaatgatgaagttgccactatgtttgttgacggatacgataattctgaggattatgaaattacgttaacaaaaaagaaatttgaatttctaaataaaaatcttctagatagagcaatggctgtgataattactactttaaatcaaaccggttttaaaatgtatgagataaaacgagtcttgttagttggaggtacaacaaggataccaaaaattagggaaaggatacagcatttttttaatgatatgaatctaacaacagatcttaatccagatgaagcagtagctgcaggagcttctcttcaagcttttcgttacaaatacgaccaaggaggggtcgagtcgtttacagtaagtgaggttacacctttatctcttggactagaaactttaaaagatcttatgacggttttcattcctcgaaatagtacattacctatcactgaagttaaaacatttacaacaacatccaatgaccaaaccttagttacaatttctatttttgaaggagaaagattaaattgtgattataataataaactaggagaatttaatataaccgacctaccgcctaaaaaagctggcgaagttatggttactgttagttttcatttggatgaagacggtattcttactgttagtgcaactgagtgttcatcaggcaaagagaaaaaacttgtagtccttatggaagagtttagacttagtaacaggaaggttacaatgtgtattgaagattcgcagaaaatgagagaggaagatgaaatatttaaagaattcgtaaccactaaacataaatttatagaattttgcaatcacatgttatatgacattaggaaaataaatagtatcgag

SEQ ID NO: 7057 - DNA, 1754 bp, Diabrotica virgifera
  SmartBlast Evalue=1E-159; Info="Septin-1, putative n=1 Tax= Pediculus humanus corporis RepID=E0W3N0_PEDHC"
gtataacacttatttttgccaaatacactcaaaataaataataaatagtttagtctaaattgtaacattgtggtgattttaaaatgtccagtgaatcagtgaaaaacttctcaagtttggaaacgccagggtatgttggttttgcgaatttgccaaatcaagttcacagaaagtctgttaaaaaaggttttgagtttactttaatggtagttggagagagtggactcggaaagtctactttagttacctctttatttttgactgatttatatccagaaagacttattccagatgctgtggaaaaaatgaaacagactgtgagattagaaccttccactgttgagatagaagaaaggggtgtaaaactgagacttactgtagtcgatactcctggatacggagatgctattgacaatagggattcttttgacgaaataattggttatattaaccaacaatttgagcgatttttaaaagacgaatccggtttaaatcgaaagaacataatggacaacagagtgcattgttgcttctacttcatctcaccttttgggcatggattgaaacccttagatatagagtttatgaagaagcttcataataaagtaaacatagttcctgtgattgccaaagctgacgttctaacgaaaaaagaaatgcagaaattaaagaaaactgtactggatgaaattgctcaaaacggaataagaatttattctctccctgaatgtgattcggatgaagatgaagaatataaggaacaggtacgtcaattaaaacaagctgttcctttcgctgtttgtggagcaaacaccgaattagaagtgaggggcagaaaggtgaaagggcgcttgtatccatggggtgtagtcgaagtcgagaatcccgaacactgtgattttatcaaattaagaacaatgttaataacgcacatgcaagatctccaggagattacgcaacaagtccattacgagaactacagatctgaaagattggccaaagagggtcccgtagctaagagaaatcccggtgaagaaaaaccagctccagttagtgataaagataggattctgcaagaaaaagaagctgagctgaagagaatgcaagagatgatagccgcaatgcaagccaaaatgcagcaaacaacgcagtaatttttactttataatgtatgtgttaagttctacatatcttgaaattgcctataccgccaatactattcattaagattttcttgatattaattcgatctcattttaacaactactgtaagacgtgttaaggtgagacaataaattaatattaggatttgttaaaaattaactaagatctgatgtgagttcatcaattaattatatcttgaattaaaagccccccgccctccgttaagaaaggtaaaatgccactacttccaaaaaattcaattttttaaaatgttacgataggttgtctttttagttttgtatatatagccataaaacaaacaatatatagacttaaagtactttattgcttttcagaataatgtcccaccaatatcgatataccgttttaaaggcattgatggcttcttctggcgactggaatcgcctcccactgatccgcattgaattcttgatctttgggaactgaagaagtcgttggaaacatcggggctatacggtggatggtttaacaattcgatgtttttaagctccaaaactctattgccttttagacagtgtgagcacttgcattgtcatgatgtaggatga

SEQ ID NO: 7058 - DNA, 1756 bp, Diabrotica virgifera
  SmartBlast Evalue=1E-90; Info=Oxidase/peroxidase n=3 Tax=Aedes aegypti RepID=Q16E76_AEDAE
cggtgcaaatggatctgcctgcatcgtatccatataattgctggttaaacaaataaatgccgcgacggtgaaacttctgatttcctttagctggtaattggtgaagacattagagtgctcgagaaaaaatcggtcgcaccgtcggcctcgcttgaactgctctgtcaatatacaatttgccgttggacccacctttgcaccagacacgggtctttcaagttgacatcccacatatgcatctacatcttctaccgatacgtacgattcaatcaacctttcaatagacaaagggtccataacgtcatgaagatcgtcgaaactgttagccctaggcaaaccgcagtaaactctcaaattattgtaagttggtacaagatgatctctgtttctctgaatatcaattgcaatcaaatctaatccacatttcagtgatcgttgaaacattctgtttgtaaccacagggtcataatccggacacatcttgtgcgctctttctgttaacgatcctgttaataatggttgaaatttttctttagtaatttgaggttttaatagacaatcgctaagtggtattgaacccgttggttgtcgttgttcattaaagaagccaagttgaccagtgataaacggatgaagtattcttaacccaaccattgcaaactcgttaagaacatttggactgcaataaggatcgtaatcgtcaacatataaataaaaatagctttcaaatagcaatctattttcatacatgttcgctctgcccaaaacttggggcaacaggtcattatacacaaaccattgatgcacagcaatattaatttttctggcctcttggaaaactttttcataattccagcatggattaagcttctctagtattttagcaactatgttgtgaaatcttatccaaagaatatggtgaatggtcaagtcagggttctgattcattcttatatcacctcctctgaaacaggtcgatacgtcgtaaatagaacaaaacatctcgcgttcggcatcatctcgggtttgtggcggaaaaggaaaattgagataattttcggttttcaataaagcggtgccagctattcttagatcgtcactttctcttttgctatttccataaataatgtttagatctaaacaagctgttgatctcgttatctttttagtatatggagaagttagatcgcaccctcggtcaacatttgtcagtgtcctcaccattggcatacaatttataccacattctaaagtcaatgggtcatttgcaggtaacgtaatacttctacaataagctggcgcattcggcaatagtttgaaatcaggtgtgcaacaggtaaaaaaattgtcgttcgcaaagaaagcactgctcatatcgtgggccataaattgtaaatatccagtcgaataacgggaaatgcccagttcaagttggagcatggtatcatctggaaggcaccttgaacgtacccttcttgcatttggaagtctattaccgcttatggctcttggcatgttctgtggaccaaatccatcattattggatgttaagttatcatacgctgaaaaaatacttccgtaccatgtgtagattttgttattgcattctccggagaaagttctgtattcatcagtgtctggaccacaaacagctggaactgtcccacaaacctgggcggcagcttctttgtagaaacttttatgaaaaagaagaataccaaaaagaagcaggtctgttgcttgcctcatgctgaat

SEQ ID NO: 7059 - DNA, 1750 bp, Diabrotica virgifera
  SmartBlast Evalue=1E-28; Info=Subolesin-like protein n=2 Tax= Stegomyia RepID=C3RX28_AEDAL
gaaggaggactgaaataattctaaaaatgtcagttctcgtatttcgtatcgccattttggattgagataaagaaagaaaatcaagaaacatccccttcgtagtgaaatattaaagcgaaatctactagaattggaatacaaagtgtgcaatagacttatttcagataatattttcgtgccagttacggaacaagtgaagttgatagttttgttttgattagttagcaaccaaactaaaaatggcgtgtgcaacattgaaaagatctttggattgggagcccgttttgggcggacggcctgcgaaacggaggcgatgtgtacctttctgttcgagccccacacaaagcggaattggatctccaggaccttcgagcagtccaacgggatcttcgtcacccaagagctcagtatttcctgacgttttgagcaaaactttgactccagaaaacttaatcgacaatctaaaaacagaaatcaaaagattgcagaagagaaaacaactacagtacaactgcatggaaacatcagatggaagcagttcaggtggagaatcatctgaatctccgtctagatcagagaagccattatttacttttagacaggtgggcatgatatgcgagcgtatgcttagagaacgtgaagtagaaattagagaagaatatgacaatgttttaacagccaagctatccgagcagtatgatgccttcgttaaatttacctatgatcaaatccatagaaattataccaatacagcagtaccaagttacctatcgtaagacgtgacgaagttttccaagtccgtatagcactaatgctctagccactctatacatttatttaaatatcgtttatacacatacgttcacattacattaatgacgaatacaagaaaaccgtatatatttgccagtcgcaagatgccttagaaatttatatatgtatgtatgaacataattataatccttacattcttgcagacagacaaattttgtatatatatacttaatataccatcatttttgtaatactttaggttgatacgcatattatacttgttatttttcttgtacatatgtcttttgatttgcgtatggctcgagattttttatgtcatagtgatcgtttagacagttagtttggcgcgaagcaaaaaatattcttacagaactagccgggcacgttttctcgaacaagatgcattcctgacgctaggccaaatggcgggtaacgagacccaagaacgcctatatatgattctgtatttgaatttctataataaatattgttccgacgatatcgtctttttatttatcataatttagcattcaaaatgtaggtaagttaataaaaataaagttcagaaatgacaatacacttccagacgtgttttaactgcaaaataagtgcttaacattaaactagatgtaatatttatcgttttactagtcatttccattcaattagtaaataaaaaagttctgctaataacctttcatacttaattacaagttaataagttatgtagcttttttccattggtgtataaactctatgttctcttcttattgtgtcatctccttttgaaggttggcaatctcttcaggtgtttcaaccaccagttctggcgactaatcttttgccctgtacattaccttccaatatgattcagagttcagagtatataattcatatctttcacctcaacacaggaccaactgttcctctctttgatcatgcttagcaattcttt

SEQ ID NO: 7060 - DNA, 1743 bp, Diabrotica virgifera
gtgctggatcttggaagttcgagcggacatttaaaaggaaaaatatataaaagcttttgtgtatttcaacgtagatttcaaccatcgcacgatcaaaatccttagtgtgtgaaacaagggtaacactgcaaatgtagacatactcattaaatgctaattgatcaacgttgaggaaagaatttttatatttaaatgataggcaatgtaaaaattaatttagatttgtttgattatgccatctgcaacaaaattctagcagctaaatattgacgttgatgtaaaatatctttactgatatcttgatgtacaattacagaacaattgaggtctagaaggcccatggcttggtttactattctttttcattctttcctgtttactgctttatttttccaatttgagattttaagttatatgtgtttttcaacatcattccgactagttttcggcccacctttcttcttctttcctcttattcctcttgttagtatcatttggatatgtctcaaccatctcagtcttcgtgattttatgatccctacgatattcagttctccatacatatttggttgtatatttggtctttttatccccatttccttccacagctttcctccaaatattttcttggagacatttctttcccacccttggagcatgactttagcacggatttattcatagtccatttcactagtatatagatcttatcagtcttacatattcttatattagcccttttagatatatgtttttacttcttaataacttgtttagagcaaagatacaacgattaccagccataatcctcgcttggatttcttccttcatatttggtctcctgatgaatgtctgtcgtaggtacctttttactttttcgaattgatatatttttctttctgtaattattgtcaagtgttgtccttgtatgtattatcgttctgcccattccacattttggttttttcttcgtttatgtatgtatatccctttccttcttgctttctactctttttagtatttcttttaattcttgtttacttctggctatcagtactatcccatcagcgaatgctaagcattggcgtttttgttgataaagtccagttctgttgattccagctttttaggacaatttcaacaaggatactgaacaacagtaatggcagtgggtgctcttatggcacccctcactgacttcaaacatcggtttttctaattgtcacttttatgattgttactaatttttcattactccccatttcacttagtgccttgtatagttctttccgttttactctgtcaaaagattttttaaagtcgatgacttgggtcactagaacagcgacgacttgtgaagaattttaaaacttaaacttattttatattgttttgtacaccaattcaatcatgttttttgggtatatacactaattttactcttaaaatccataataaatttatctagtattctaatgcggcattactccgcaatggagcttttatctgtttcactatgaataactttatatgcaatctaataattcgtttttgtaattagaaccacttttacccattttgttaagattccagtatataaactagctctggacaacgtcttaggaattcttaagttgtctttttatatattacttatgtgatatgacccaattaaccaaatccaagtcgttcaatgagacctaaagtatcttcaataattcgacacactactaacagaaggcg

SEQ ID NO: 7061 - DNA, 1752 bp, Diabrotica virgifera
attgaaaatttggtacaaattttaagtcttacaacttttacaaaatggttgattcaataggtagtactagatgacccaagtgaaaatatttcggctccataaaacgaataaaagttgttgtatggcggtgaaatgaatcccatgtttagatcgatttgcattacaggaggattaataatggatacaggagaccattcgactggcaaaagatcagaaattggaccaggtgtaggtcgtcctgttttaataaaattgcaccacagtgtagttatacgtcgaactataaaataatcatacacagtgggaactctttcacttgtgataaacaaatatgacaaatcttctccatgctgggctccaggactacatctcattgttactcctgccaaagttccctgataattaaatgtataataataacaaggtacaaatttacctacgtttcctaccatacgatatgtggctctaccaaattgatcgacgttgaaaaactgtactgcttttgctatttgtgtcgacataggtaaccatggattaaaaaatgtagctttaattttacgccaggcaaaatctctttgagaataactaagagctatacttgcagggaccaaattccaaggccttgcatcaagattgcttaatgcagccaaagtaatatcataattctcagggttttggaatgctcctaattcattatctgtcgtcccgattaatattggaactttattgaaatttccggtactaaattgtctatccgcttctcctgtgaaaaaagcattttcattgggaacttctgggactggtccaaattgaacaccaatcaatatgttttctgtaacaatcgcagctgatacaatagacgactttaattgtagatctcgatagtcaacattctttaaaccagctacaagctcttcagagttggacgcagcaactaaaagacttgcaccagttgcatatgctattcgccttgcatttctattgtatgcccataagcactcagaattaccactgttcatgattgccttttgaaatttacctgctgattttggagaaagtagatgatagccaacggatccaccaccagcacttagaccgcctattgtaatatcctttggattacctccgaaatgacgaatattgcgtatggtccaatctagtgccatcacttgatccttcaatccgagatttcctgggcaggctgaatccccagtactcataaagccaaaaattcctaatctgtactgtatcattactacaactacattttgattaatgaaatgatctggtttacacgcgtcgaaagagttactgccagcaacaaatgccccaccgtggatccaaaaaagtacaggaaggttaacgccttttatatctggagaatagacagacaaatataaacaatcttccgaaccaataactgtaggattcgtaataccttgagtttgaacacagacagatctatcgtacgtacaatccaatgtattagtccaacttgctttgggaagtggtggctcaaaccgtttaggtgtttctgcaaatggtactccttgaaatgcatagcagagtttattttcatacgcagttaaatatgtacgcccttcaattggtccctcttctgtgttcaccacatcacaagttatagtttgaaataaaacagtcagagcaaatcctaagtaatacatttcattgtttaggagcataattttttgtcacaacttttatcacagccggaattaactatattataag

SEQ ID NO: 7062 - DNA, 1749 bp, Diabrotica virgifera
  SmartBlast Evalue=1E-55; Info=UNC93-like protein MFSD11 n=1 Tax= Harpegnathos saltator RepID=E2BAB4_9HYME
gactctcacagacgataccttcatgaaactcgagacgtttgaaatgtggctttatcgtcaaattcttaagatatcttataccgaccacgttactaatcaggacgacatattaggaataaaaaaaggaaaaagctgttaaccacattaaaaacagccaaatcaaatacctcggtcacgtcatgaggaacagtgaaaaatacgaattgctgcaactaattttacagagaaaggtagaaagaaaatgaggaccagtaacgcgagagatttcctgtctgacaaatctacgtaggtggtacaacacaccaaccacaaatattttcggagcagtagtatgcaaattacatatttccatgatggtcactaacatcctaaacgaataggcactacaaaaagaaaaagaaaggcgacagtatttgaaagattaatttcaaataattattacttcaaaaccttctgtttaaaagaagcatcaactattaaaagacatgctgcactaactacacataatacaaacagtattaagagttgataataaagtcctataaatgtagcactaatgaaactaatcacaattcccacacctataaaaaattgataaattgcaaaacctgagaaagtattttcagaataaaccgtccccagtaagctaactataacgttgacatatatacagtcaccgaggcctaaaagaaaggaacaaaacattgcaagcacactactactttcaataattgcagcttggtcagtatccccaaatggagaatcgtttggaaggtttatgaaaattaatatgaagctcatgctatgtatgaagaacgctacaactactaagacccgtctacccaagtcggcaacttgtttaccaaaaatactaattacacctccagcaaatatttctccaattcctacaaaaactcctgacatgccaactaattgcttacgattatccagtacctttgtaaatccaattgcagatgaataaattccattgaagaaagcgtattccagccctccatataaaaacaaacaacttaataacaacatgtttcttgtacaaaataacttcaatgcgttcagaatagaatctactggtccgataactccactgtctttactatctttttcttttggcttatgtttaggaagaaataacattatcactaatccgactgcacatgcacctgccagaattgttaaaagcaatatacgcgtgtttcgatttattttttcttttccactgaaactacacaaaacaattatatttccaactatcatacttgaattaactattgttgagaatattgcagtgtttctgttgattgttttgtccgaagaattttgagccaaataatcaccttctcctatccacaatatagcgcaacccatacctgctaaaccgcagaacgtgtataaaatccaaacttcttctagtaaaaattgaaagataaataaaatatttataagaacacctaagcacatggatagttttaatccacaagcattgataactgatggtactgcccaggcaaaaacagcataagctgcattgttgatagcttgactgtaatagccactctctttgtaagacgatttgtctttctttatactatccacaataattttttgaatattactcatcgtttgtattccagtaaataataagagaaatgctatacttagcaataacacgtttctgagaccttgatccattaaacacactttcagtaagcattaataatcacaaatatt

SEQ ID NO: 7063 - DNA, 1748 bp, Diabrotica virgifera
  SmartBlast Evalue=5E-76; Info=Sugar transporter n=1 Tax=Aedes aegypti RepID=Q16N91_AEDAE
aatacttttattaaatataatcagtaaacattctagaaaaatatgttatgtttgttaaattttttaaattctttggtatataaactcatatttgagcgctaagtagtggatcacttttactggaagggatatatttctcgccctttaataacatctgtatctcctccaacgtttttcccttggtttcaggaatgtaatataaaataaataaagtaacgagaaaacttcctacactaaacacgtaaaatggtacgtgcattccataggaatgttcgagccaaatatataattgaacactaattacagctcctataacgtacatagcgtcggcaatggtcattcctattgccttcattttggcaggaaatatttccgaggttattacaatgggtactattcctaaacctatcttaaaggtacaagcgtataccattacagaagcaattggtatccaactgacgcttttaacatcataatttgttaacttcaggtgaaagtaaattgcaattgctagcaaacaaaaagatgtaagtgtcgttgatactaataacaaagcttttcttccgtacttgtcaacttgtagagaagctgtgttagcagatataagcattatcacagaaaataaaattccagcatgagcagaatccatataaattgaaccagctgaatttagaatatcatgcaaattcattagtattacgctgatggcaacaatatgctgtcctgcgtttaaaacagtcattataagcatggcctttcgattgcttttaactaaaattatgtcttgaaaccgtcctttttctgttttttgtctatcgatggctttggttatttctcttagttccaatgcgacatctctccctggtctaaaatactgtaaagactgtctagcttcttcagatttatttttaaaaagtagataatatggactctccggcatccaccaaaatattaacaattcggatactaatactactcctgccacaattggggtcgtataaaacggcaaatatggtccaacactgtaaactattacaaatccaactagcatttgaaggtatacaattgatgctaaaaagcctcttattttactttcagctatttccgctatatacatcggcatactaacaaatgacatatttccaataataccgaaaataaaacgagtaatatataaataaatcatattattagccaaggctataactatccaaccaatcagggatgtagctgcagccaatagtagtgattttcgtcttcctattttgtcgactaaataaatagtagttggtaaaccgcaaaatgagcccaccattagtatagtttctagccattctacctctgattttgtggtttttatgtgactttctttgcttacaagatatggcaacataggcgccgtccatccataagtcattccatcagatattgcaaataatgaaccgctcactgaagccaataattgtgttaatgttccagaaaaaatactgccctcaattttgtttgccatagccagaaattttgtctagctgcgacattaataaaggattgattaaaactaatttggaaacccacttgaacttgattgtggcgcacgcatttatatttaaacaataagaagctaccgatacgaataaaaactacaaaacaataattcgacggtataaaatgtcgaactgaactgtttgaatatttcgaagtctactttttgttgataaattcgcttaattggcgtttgtgcttacgcg

SEQ ID NO: 7064 - DNA, 1741 bp, Diabrotica virgifera
  SmartBlast Evalue=0; Info=Protein Malvolio n=1 Tax=Camponotus floridanus RepID=E2AP55_9HYME
cattagttaatgatgtaaagttgcggcgcgtgaggcctctatctcgaatctgccttgattttcgcatacaccaaaatggtcgggaccgaaccaaacgtgacagacgattgttgcagtgacaataatacaaaaaaatattgtgtcaatgacccaccacctccttattactatgaaaataatgataatgaagtggatacctatttttctaacgagaaagttataattcccgaggacgatacgagtcgcttcagttttaagaagttatgggcgttcacaggaccgggatttttaatgtccatagcatacctcgatcctggtaatatagaaagcgatcttcaatcaggaaccgtaggccgctatagactattatgggttttatttggagcgaccattttgggattcatcatgcagaccttggccacaaaactaggtgtcgtaacgggcctacatctagcagaaatgtgttatagacaatacaaaaaagtgccgagattaatattgtggataatggtggaaattgctgtgataggatcagatatgcaagaagttatcggtacagccatcgctctctatttattgacaaacaaatacatacctttatggttgggatgcctaataacaatcttcgacacgttcacctttctctttctggacaagtacggcctgagaaaactggaacttctatttggattccttattgctgtgatgggtattacctttggttacgagtatatagtagcgcagccatcttcagcagacgtggctaaaggactcttcattccaatgtgccaagattgcgattcgcaggtgttgctccaagccgtcggagtaattggtgcagtcattatgccacataatctatatctacattcggctctggtgaaaagcagagatattgatagaagtaaaccagccaaaattaaggaggccaatatgtattactacatagagagcgctatagctcttttgtgcagtttaattatcaacatttttgtggtttctgtatttgcatatgggttgtttgagaagtctaacagaggattggtggaccaatgtcaaacaacaaataatagttatcttattaacctggccgttgaggagtttgggactagcgaggattttgtagaggcagatctctacaaaggaggcattttccttggatgtgcctttggaacagccgcaatgtatatttgggcagttggtattctcgcggcaggccaaagctccactatgacaggaacgtacgccggccagttcgccatggaaggtttcttagacttacgatggtccagatggaagagagtcctccttaccagatccatagctatggttcctactttctgcacagcgtttttcacttcgatgtcggaccttacaagcttaaatgattacttaaatgcagtcatgagtctgcagctaccgtttgctttgataccgactatagcgtttacgagtaacaaaaagataatgggagagtttgccaatggagtaattctaaacgctgtgtcgatatgtttagcagtcatcataatctcaatcaacatcttcttcgtcacagaaaaactatacgaagccgatttgccgttatacgctctcgtgataatatatataatagcatttggctattttgtgctcgttgtttatatatctatccacctctatgttggaatggttggaataggactaaatgaaaaaacctctatcgtggaaaagttcataatggtacctatgaaaaggcctc

SEQ ID NO: 7065 - DNA, 1744 bp, Diabrotica virgifera
gcggcgatctcgtcgaatcgtttgtatttcgggctgaaattaactttttcccaacactggataaaacaaaatgcagaaaaaattaataaaaatgcgttaaaataaaagaaaaattaattattatacaatcattcgtgagaatactcatagttatatgtaaataaaatgtgtaagcatttcatttcctaatttattatcaatataaagtagtatgttgtgtaatatttcgatctatcaaatataaaagagtttagtaatatttttacccttttccactccgtctttttagtccttcaatacttgctatacaattctctaaattttcccttccattcatcttctcttcgtcattagttagcttcttcttattccgttttcgcctcgatcttagttttcacgctgatttttcttcacatgaacagataatttggagaaatttcgctaaagagtctaaaattatcagtcactcagtttacttttacattttcctaataatatatcaatataaaatagtattttgtataatctttcgatctggcaaatataaaacagtttagtaataattttactattttctactccatctttttattcttccaatacttgctatacaatttcttcacttttccttacattcatgttcccttctttatatattagcctcttcttattctgttttggtctctatcgtagttttcacatggacagatagcttgaagaaatttggaaaaagggtctaaaattatcagtccctcattttccttttatattttttctgattgcatatattcaaaaaattctgacacgatgtgtgggaccaagtaaatttaagccctgaaaatttttttaacatatttttataatgtgttaaaaaagtaggtcataaatattttatctaaattaaatgcaaattttaatttttttttattaataaattataaacatttgtagctgctccgtaaaaaatcacacttatattttaatcgtatttaaaaatattgtaaaagttagtagctgtattattttttagacaggcactttgttacacagctggaaggaatagaaaattaatatttataaataatatcgtgtgagttttagtccttaagaaacgccaacagcgacatctacgggaattttctattactactatatttgttttaattctatggcgttcaaaatttcatggtttatgaattaagatatttttctttaaccttagagtcagattcttttaaaaaactatatttttaaagttttgtttgattttttttgcaaacaaatataaaaaaaaatattagtttaaagtatactaaaatataatttttatactcttgtaacaatttaccaagatttatttaaagaaaacattatttacaaaagacgtaaaatttacgacacgcacccgttcatgtgatattaaagggcgcgctcgctggaatattagtagatgtcgctgctggcgttttcctgaaattaataataaaaattcaacgttttatggaatgtacaggtcagttcttattataaaagtctaaaaattgctttattaaatactgaatgtggaagaccgatcctgaacgatttctaaaatatcattttcaggccaataaaaaggctaaaatatcaattagacattaacgatactagtaaattcgtttttctacagcaaattttaaatatttcatgtaaaagtgttaaaattaaaaaaaataataatatggactgatgcatttacatgtac

SEQ ID NO: 7066 - DNA, 1744 bp, Diabrotica virgifera
  SmartBlast Evalue=8E-61; Info=Female neotenic-specific protein 1 n=1 Tax=Cryptotermes secundus RepID=A6Y7R8_9NEOP
ttttggtttttaattttatttcttttattggcattatatattatacatttcagaacgatattagtggttctcttgtatatggatccagaattgattcaatttgataatatcgtcgagggttttcttgaacttcaaatgtggaatcaatattcaaatatttcacagaaccaggtttaacttctggccaaataatattttgtaggtctttatcctctacaggagtgggattttgatacttaataaaattagtccaccatttaagtataggtttgcgaagtgaatcgttgtatccagaactatctacagataaattccataggtaatacaaatcgtatgcatgcccagtacctggaaaacggttgtttttgttataccaagatagttgatacatatacacaggaacataccgagaagcgccttcagcctgacgtattattgatcgaccaaaaacttcatcgctggaatattttataaatccaagtgagtcttcctgaaatgatgtgttagtatagagacttttcaatgttttgcccacattttctctaaattcctcagctatatttaaagatatagatataatatcctttgtattctcatcgaaaaattttgctgtttggttaaattcttcttcatcgacatcattaaaaaacaataaagattcttcagaattcaagcctataagtacaggaacaaagttgaagtcaccattgagaatggcactgtgcataggtccagtaacgaaagccttatcattaaactcttcctcaataactggcttccagactatcgttgacatgaacccttgtggcctaactccaacagaaaacgtagcttgtaaattaagtatatctgtgagagacgcttcctgcaacattgctagtaaatcactggatctactagaagtgaacgatttatttaattgtcttccaaattcaaatgcaatttctctatcatttgatggatagaagggccctgccaatggcgagccactttgttggatgattccactgtataatcctttggctgccttgctaagcaaatgaaatcctgcagacatacttccagcactttcaccacccacagtaacttgtttgggatcgcccccaaaggcaataatgttgtcgtgtacccactgaagggcaagaagttggtccttaagacccacgtttccaggaatattatcatcaatggttgttaggaagcctaaagatcccaccctatagttaattgttacaattacaatatcaaaatcaatcaacaatcttggatcatacaaagcggaatgtccactatcaaaacctcctccataaatccagaaaaacacaggtaggggcgtctgaagatcacttttcaatggtgtatatacatttagaatcagacaatcctcctctcctattacgacaggatcattatgggaaagcaattgtgggcacattttttcattagcagttgcatttaatattccttcccatggtgtttttattacaggcggctgaaatctgttctttccaatcggtggttctgcatatggaatactttcgaaagcatggaaattattaccttcaaaactctgaaggacgtgtcctcggactttacttcctgtagataatgttattattaagtcatcatcagtcaatccagtaacagctgaagttaccccattattagcaaaatttacaagtgcacaaaaaacaaacagattaaggtgtgccattgctcgtttataaaaaaagacagacacaag

SEQ ID NO: 7067 - DNA, 1744 bp, Diabrotica virgifera
  SmartBlast Evalue=1E-108; Info=Programmed cell death 4a n=1 Tax= Glossina morsitans morsitans RepID=D3TLD2_GLOMM
tttcatagaacatatacaaaaagtaacatttcgatcaattttccatgttaagcacctagtgctagtaagaaagaatacaaatgcatgaaaaactacttgtaggtatggtgttccttagtgttcgatcttatgattcttaaaaaattgttggtcgccctcagagacgaatcgtttgcggccgcgagatggcatcttctttataacgttttcggtcagaaaaccgacggtgtgacagcgttctacaaatcgatctaaaataatataagccagtgggacatccatcgaaatatcaggaagatcatcgaacactctcagaaaacctctttccatctgatccggggtaatcaaaatcgcatcggaaaatgatttcagcagtttgcacagctgttcctcttttgcggcactgttggcttctaaggccatgacgatggcttcgtagaccaattcgtgatggaaatggggaacttctagaagccgcaaacaacggccggcttcgtcgatgtcgctcgacgatagaaattcttgcagtagtagccacatttggcgagttaaagcttttaccggtcgtaaagctccaccaactccccatacattatccagccgtaccagaccatgtttcatagaaagtagtgtatctgcacggctaacagcttcctggaagtccttattgtcgctcttttctctaatagaaatgataaacttgggaggaatgcaatcgtctgcaatggcacgggctataaaattgcccaaaactgtaggggcgtctggaatatccagaatcaaatcgtttacgttagccagcaagttctcgaacgccttgctgatgtcagactcgtttatggtatgtgggaagagatcggagatgagcacggaggtcatctctctgtgcgaaggtttgtgatccattgctatttctatgagctgctcgaccagcgtatctcttcttttcacaggaatttgctcttcgatggtaagcactgcttcgtgggtgtcgccgttctcgaaatattcgagaatgattggttcgacttttttcttgatttcttcatcagaaacctcaggtacaactgccttaagctctatgtcaccattgctcatattttcattatcaaaatttggatcatcaacatcttcataagcttccagcagttcagatccagggagaccccaaacacctttgcctccggcgcccttcttcttcggcaaacctctaccaaatccattcctcgatcggcgactgtttttccaagacctaggtccgtgaacgaaccctgctgggagagccccttctttggaaccttgtctgtgaactttcttgggtcttcttcttatcaaactttcaccggcagtggcattttctttggccgcgagctcttcgttgacagctttttccatgtcgacttcttcggtagcatcaacatcaacactggcgtcccctttttctgaagccatttttgctacaacgcaaaaacgatgtttcttatgtcgttatcacctgccgaagtttcagttttactcgaaaataattggtaccaggtacttaaatgaaaaattggtaatgtataatagaaaataaaaaggtatttatagctagaaaatactttttgcgcaacacgctacacaacacaaccgcccgtacatgaacaatacattgatttttttcttaacgtcttccgtacaacgaattcgctatttcacagtattcgctatgggttagaaagagaagacatgcgtaaaagcgtaa

SEQ ID NO: 7068 - DNA, 1740 bp, Diabrotica virgifera
gggtcgtctggctctatcgctgttacttttttgctattctaatgaaaaaatgaaaccagcattagtgtactataaaaacaacaaatttaagtaatttttttaagaatctaataatattttatcgaaatgagtactattttaacgaaatgtttcaaaaataccttctaacggagtggaactccgttactccgaatttcagacggctttatttttaattagatcatgggtctcgacgaattccaaagctggaggccgctctaccaggcacaacacctcgtcaggtccgtcgtctacagacaattccaagttctaacatcaaaaagttttataatacccctgttcgtccgtctaaagatctagtctactggcaaagatcgatcccaccgtaaaccgataatctcaacggaaataggggctcgtgtgacaatcgtagcgagctacgattgcatagtaaagtcacattgttttgaccctttcgattctcggaactccaatagatatcgttgccaactttgtctagaaaggatacggtcttagaggtcttaagagctttgcatcattacccacttgagtaagtgcgtcaaccattttccgaacctttggttcctctcgtactgagcaggactactatcgcaacaaccaagctttattacgataaaacctgtcacacgacggtctacatctagcttacgttccctgtctatgggtgagcagccttcgcttttgatccttctccttagaagaaccaaaagcgacatcgctattaacgcttggccgccaagccagttatccctgtggttactcttcgccaccttttgctgaaaactcttcaatccaaaagaattgatagaccgtgctttctcagtccctatgcatgctgaacatcaggatcaagccagcttttgcccttttgttctacgtgaggcttctgtcctctctgagctggctttaaccctttcactgcgcatgacacggatcagtgccgggataagtgtccacaacgtgcgtggcacggatccgtgacacatgcacattcacacttccattaggaacaagccagcttttgcccttttgttctacgcgaggtttataacctcgctgagctggtcttaacagtttcactgcgcatgacacggatcagtgccgggctgagtgttcagtgtgcgtggcacggatccgtgacacatacacattcaaacttccattgccagtagaaaatgtcttccaaaaaaaatgtagcagtgaaagggttaagaaacgtgcgttattcaaactctccgtctgacagtctcatcgaatcggatcagggtgggggttagttgacgctcgaaacgaagcacacaaacgctagccgggtatccgaaaggcaagccttgtcggagccacgaaaccgacgaacgacacaacgcaacgaaatgccactccgtgctcttgacttaacagtactgtgacagtcaccgccttgtgagcgaacgacgcacgcgtttcgccttactctgttagtaaaaaatcggtagaacctttgaaaaatgtgtttggttgaactaatgtacacttaaaaaatacagcttatttacctgcgaatgacacgaatcagtgcagggctgagtgtacagtgtgcgtggcaccgatccgtgacacatgcacattcaaacttccattaggatcaagtcagctttgtccttttgttctacgtgaggtttttgtcgtcgctgagctggcgttaactctttcactgcg

SEQ ID NO: 7069 - DNA, 1737 bp, Diabrotica virgifera
  misc_feature (73)..(73): n is a, c, g, or t
  SmartBlast Evalue=1E-64; Info=Pheromone-degrading enzyme n=1 Tax=Popillia japonica RepID=Q2TIL3_POPJA
caacaagaaaaatttatttaagaaggagttacaacaaacaatatgttcctagaagttaatatacggttttcgngcatactgctcatataattctacccatttgaaataagtgttgctttttggatgatcctgcacaatagacaaagattattgaggttcaggtagacgaagttgtttggttgtactttgggccaggttatattttgcaagattttgctctcttctggagttggattcctgtattttgcaaaattggtaagtaacagtctccatctgtcgctagtcagaatgtcttcaggatcgtaagtgtccaaattggacctatttccagaagtcaaaaagtaattggtgtcttcagaatgtagtacccgatctgcgccttctacgtagttcttgattccgcctaaacctagtttaccatcataggaaaattggtagaaataaacatcgctgaatttggattgcagttcaccatgacgaatgaggggtctgttaaatgacatgtcactgaaatacctaattgctgctgagtgattgttttgcaataatccgttcgtaacaatttctcttattttctgaccaacttcatccagagttttattacaacttatgcgcatattatggttgacgagaagtttaacgtcattgtcgaggataggaagtacgcttgtccagtttggatccagagctctagctagtccttcttcactttcaatacccatcagcaatggaacttgattcatttttccttgttcaacagctgtatacatattttctgtaatgaaagcatttctgtgtttcggttcaatcacaggggcgtagaaatatccttggacgatttgttcgttgccaactgtctccgaaacagccgtcgcagaggcgttgttcaagacatcagcaggaacagatcttaagtacgctaccaattcagcagttgacgcatatgggttgaatgatggattaatagcttttgctaatttgtatgcaatagccttggagtctttttgatacgcccatggtgttaacagcgatccacttccagctatacctgcccagaagagaccctttgaccttggattcatgaaatggtaggtaaccgaagctgctccagcactagttcccataatggttaccttattgggatcaccaccaaaatattcaatgttattttggatccattttagcgcaagcctctgatctttaagaccatagtttcctggactggataaatcatcagtagccaagaagccaaacgcaccaagacgataatttatagataccacaattacttcattttccattaaatagtgaggtcctgatatatcaaagtttgaacttccagtaataaatcctcctccatatatccataccaacacaggtagattcttttgatgaactggttttttgggtgtgtatacattaagaaacaaacaatcttccgtttgaagtttttccaaacctaaaaaattttgcacctggtagcaagtcttcgtgttctttgtagcatctaatacaccccaccaatagttaacaggttgtggttccttgaatcttaagtggcctacaggagcttttccgtacggtatttgttgaaatgcataaaatggaacaccaggtttcctcagggagtattccattcgtcctcgtacttttccatttaacgtttgtactattaaatcatctgccctaacaaaatttaaacatagtatcacacagatgaaagtcttccaaatcatc

SEQ ID NO: 7070 - DNA, 1738 bp, Diabrotica virgifera
  SmartBlast Evalue=4E-89; Info=UDP-galactose transporter n=1 Tax= Aedes aegypti RepID=Q174K4_AEDAE
tccattctggtactacaaaatatgcacctgattatttaaataaataatcatagttatgactattaatctataatttaaaatgtgtgtatctttatcaaagagcatttaatttattaaccttgaagtttgcacccaaaagaatttcaagaatagtgaattttagttgtaagaataggaaaaataaaaaatgtccgcgaaagctgctcaagcaatagtattaacattaactggatgtatgctaaacaatgtttttcttgaatatattatcaaattagacccaggagcaggacatttgataacattatgccagtttttgtttattgctgtacatggactcatttttacctcaaagtttggaacagttaagcccaaaattccattaagtggttatatgacgttagtagtattattcttcactacaagtgtggtgaacaattgggcgtttgcttttaatattcctgtgccattgcatatgatctttagagcaggttcactaattgcaaatatgataatgggtattattgttctgaagaagaaatacacactagaaaaatacatatcagtacttttaattaccttgggtattatcatttgcacaatttactcaagctcagagaaaccaaaggtatgtgcagactgtgaattaggtgtagagactcattcagatgcagtagcagatcatttcttctggtggatcattggaataatcctgctcacaggagctttactactatcagcaggaatgggtattttccaagaggggctgtataagaaatatgacaaacatccagaagaagctcttttctacacacatttgtatcctctgcctggattcctaatttattcttcaagcctgatagagcacatcgacatagcaaacaaaagcgatctgataaatattcctatagtgaattttgcagtaccagtactatgggcattgctatttttaaatgtagtcactcaatttgtctgtatcagcaacgtgtatgttctaacctcagaatgcgcgtccctgactgtaacattagtaattactctaagaaaattcttttctttagtgttttcgattatatactttcaaaatcccttcaccattgttcactggatcggtactattatggtgtttgcgggtactttgatgttttcggaaacacaccacaaaattaaaaacttgatggtttcttctgaccaagacaaaacaaaaaagaagaattaaaatgactgtaagagaatttaatataatttattggttttattttgtataatataagttagaaattaattttctaatttcagaaatgtttctcgtcttgtttaatttcctactttccttttgtacttatgtacttctttacagaatattcaatacctttattcttgaaattttcttaaattatttaaatattttattgtaaatttgcagttttttgtttatgcatattttattaattttctctctttttccttaagttttctttattctatcttggtctactcagtatttacactctttgtagaaccaatttagctttttatagtgtctgttcattattttattttacttttaaccgtttttatagtttgtcagtactaattaatttttctttagatggaagagtcatcaaatatgttttaaggcacttcctttcaatgtgtagccaccttataaactttttgaaatgttaaattgagggtcatgtgatcatttttaagttatataacgaagtttttagatata

SEQ ID NO: 7071 - DNA, 1741 bp, Diabrotica virgifera
  SmartBlast Evalue=1E-116; Info=Mitochondrial import receptor subunit tom40 n=1 Tax=Culex quinquefasciatus RepID=B0W677_CULQU
tttttattaagacaaagatacttttaaccgttaatatttgattacaactatttttattcgctttttatattatggagaacgttattaagtattgtacacacttaataaaaaatcgaatgtgttacagggggatattggagtgttctactgaatacgaaaccattctataatctatattctatagaaactatattctatttgcaagtattgtttaatattgaggtagtgataataaagcgatccgctaaatatcgttattaatattaacagactcttagaagaaccatatttattttgggttttgtataatttttatataaaaaaatgttaattatggtttattggagagatgatatacaatttatttttaatgtatacgtgaaaaggaaaacagtcttatctgtattaaacaaaatatttccttaaatgtgttataaaaactttaaatactgttcctaaagttggacaccctgcatttacataaaaagtatttgaaaataaatgccagaaaacaaattaaaagatgcgcctaacttgtttaataaaactttaattggtaatagtcgcaacaatgaatttatgactaagattcatattttataaaatgtctatccgatcaatataccaactccgagcctgaattgatttttattatggttcattaacccactaagagctaacgtgaatggcagaggagttaatttcttttctagaactgcgcccaccgaccaatttgaatcgatgtgacctttaaatactacttcactctttggtaaatccacttgataaccaacagatgccacagcctcttgcattctatgattagcctctaattcaactccaatttgtaactgcttactagctctttggtagtaacataaatgaacgccttgtacgcctaatgtgcctgatatttgtgcgttgtcagttgaatatttagctgctgcacttaataaagctatttctccgcctggaatacttggtcctttttgataggccagttcagttcccagtgccagcttagctgttacagcttgtaaataatgtagaacaactattcctgaactattaattacatcaggattggctactgtacaactagcagtataatcagaacccttataattcattgttaactgacctacttgaaattttgagttctgtacctgtgctccaaattttgtttgaagatttggctgaatttggtgtataatagtggcattcagattccctgagggatcaatatcacccagcaatataggatatgcctctgttggtgatatttgttttgttcccacataagtagctccaaatctatatccactgggagtaacagagctcatatttattgtgtgggatatttggaagtgattactaagacctcttgtaagcataactctagcgccttcaaaacatgtggggaaaacatttttgcactttgaatgaatctcttctaatggtcctggattttcaatcacctccggaggactagctgcaggatcagtatccttcttccttgggaaggttgtacttggtggaggtggtggaggagggttagaagaataagcgtgtacattacccattacttttaatatatttacggactgataataggtgaatttcaactattaaaaattctgcatgtgcttcacactttcagtcaataagtataatctaagcaacaattttagaaaccaccacacatttttggaatttgcttggttttgacttgacactatag

SEQ ID NO: 7072 - DNA, 1741 bp, Diabrotica virgifera
gtgttggggtctctccagttatgatatggacaattgttaatgaaacgccctgtatagatatagatgagagaagactaaaatggtacggttacgtacgcagagcagaaagtacatggataaataaggttgcagaatggagcccaagatgaacaagaaggagaggaccaccgcgcgaagatcgtgaaagaatgaagtctacgaagccatttcaaagaaaggattggaagacggagactgggaagatcgtaaaaaattgaagtcctggttgacggaagggacacggcactagatcttcctttaattattattccttaaccttcagattgcaaggcttcttcagaaatggattcaatatatacattgaatagtaatggagacataatacatccctgtctaactcttgttctgttttcaatttctgaactgggttcgttatctattacaatttatgctctttgattccagtaatggtttgttattattcttaagtgccttttgtctaagttttttgtctttagaatttggactaatcaatcataaaattgtagattcctattttactaattgaggatattatatacctcttatcttttgtgtatgatctgtcttccttgtggtcgtattttctgtaaaagttagtcaatttatgctacagatctaattgttgcttaatatagtttgacctttgttcgggcttagactaactggcaatgtatacatagcgcatttatttgttattttttttattatatagtttgctttgattacgatgtgattttgagtataattccaatataaagcaaataaatttgtgatataacgatagtttaggcctgtacataagaaatattgtatgtttgttcaaaattaacttatgcccttcgtcttcagtgtgtttctagaaaacaacaaatgccattgagcttttcatttgagttagattctgtgaatctcaaccactttgagtcacttatcatacataaatcataaactaaacattaaacgtacatctttggcattttacgttatacagggtgttctcaaactgtcgtcatgacagaacaaggtgggtgctcataaagagggaaattggtactgtacaaaaataagatacagtacctactactttatttaaaatatatctttattgataagctttgtacagtctggttataggaattacaaagtctatcaattcaccattttttaagtaatcatggtatcacacgactacacaggcattttatagtatactgttgaatatattccaatgatttgcagatgatttaaaatgaaatatagatagatctgttcaatagattctagatctccatctttgtgtatactctgtgttcaacgttttacactatttacattgctgtagctatttgatgtggaaaatatgtttctagatgaaacaaagctacggcatagcttatacaggctgtgtcatgattaattggacattaagtaagtgcaaacaaaaaaaatcaaaacaaaacgtgtagattcggtattcttgcgccatctagcaaaatttgtaaaggtgataacgtttttcagcttattcatacttagtaataaacgtattatttcaatttaattcgttgatttttcaaatattttaaaaaaatatgaaaagtagttaataaaacgacttgtgagagaaaaaaaaatattttgccaaacatgttatacctaatgttataccagttgtcacccgttagctaatgtctaatta

SEQ ID NO: 7073 - DNA, 1741 bp, Diabrotica virgifera
  SmartBlast Evalue=0; Info=Belle n=1 Tax=Tribolium castaneum RepID=D6WM75_TRICA
gtcgtgtgtgaatgtacggcttttgtgattcactaaagacgcttttcctgaattttacattggaagtttttacattaaaaaacttctatcacacgtcctgaattgttataatatgagtaatgcacccaaccaaaatggatcaggtctagagcagcagtttgctggtctggacttgcagagtcgcagctcgaacagcagcggccgttacgtgcccccacacttgcgtaataaacaaagtcaacaacagtcgccatctaccgacaacttcgataaggatcgttacgacaatagagatcgtttcgacaacagggacagagacagagatcgcggagcgccagattcaagagatagaggcggcagccgaggaagcaacagaggcttcggcggtggcagcggcagggacaatagagatagtagagaaaacagagatagtagagatagtagggacagcagatctggagatttctccagttttaatacaagaaatagaagagattatcaaaatggagaatcttttgaaagaaatgaatggggtagtagccgcaataacgacagggacagggaccgtaacgccgacgttcaaccacgcaacgatcgctggcaggagccggaacgtcctgcgaggggtagcgagagccgagacggtggtagcggaggacgatggaacgacaacggaggcggcggtggtcgctggagcgaaaaccgccgcaacgtctcgtccgaaaacgattggactgtccctctatccagggacgaacgtcttgagcaagagctcttcggtactgggaacaccggaatcaacttcagcaaatacgaagatataccggtggaggcgacgggagacaaagtgccgcgtcacattacatcttttgaggaagtacagctgacagaaataattcgcagcaacattacaatggctcgttacgattcccccactccggtacagaagtacgcgataccgataatcatatcgaagagagacgttatggcgtgtgcacagaccggatccggcaagacggccgctttcctggtacccattttgaatcagatgttcgaaaatggcccgccaaacatacaacaaggaagaagtagacgcaagcagttccctctaggattggtccttgcaccgacgagagaattggctacgcaaatttatgacgaaagcaagaaattttcttatagatcaagagttcgaccatgtgtagtttatggaggcgcacatatcggtgaccaaatgcgcgaactggaccgcggctgtcacctccttgtcgcaacccctggtcgtttgctcgatatgatcgaaagaggacgcatcggactggattattgccgttacttggtgctagatgaagctgacagaatgttggatatgggatttgaagtgcaaatcagacgtattgtcgaaaaagaaaccatgcccaaaactggggagagacaaacacttatgttctcagccactttcccctcacctatacaaatgctagccagagatttcttggacaattatattttcttggctgtaggaagagttggtagtacttccgaaaatattacacaaaaggtggtctgggtagaagaacacgacaaaagatcgttcctattggatttactcaacgttgcagatttacaacaaccttcaccagaaagtttgacactggtttttgtcgaaaccaagaaaggtgccgactctttggaagaatttttacatattgaaggatacccagtgacatccatccacgga

SEQ ID NO: 7074 - DNA, 1736 bp, Diabrotica virgifera
  SmartBlast Evalue=0; Info=Carbamoyl-phosphate synthase large chain n=2 Tax=Culicini RepID=B0WJ24_CULQU
actctatgaacagcgccttttattttttttcctgcaaatggtgtccacttggccttactgtaactcatagcttcgggaatagtccattcttcttcccatatctacctcaacgtacgtgttatgctgttcgggcaaattaaatattcttttaggatttttgtggaacttattaataacgtcctctaaagtgatcctgccttcattgactgcgttaagtagaaggggtaaaattgtttctagtcctgggaagcctgggggagctttctcactaagcttttcttcaatcgtgtgaggtgcatgatctgtggcaaaacagtcgataatgctgagattatcccaaagagcctgctggtcttctggggataccaaaactggtctaaacctgactcttggttactccaattttctctatatcattagttgaaagaaacagatgatgaggacacacttcacatgtaacttttaatcctttttccttcgccgccttaatgagcagtatttcctcctttctggcaacgtgacatatatggactggtctattttggagactagctaaaagaataattgctgctgtcgtctgagactcagcgtgaacgcaaagaggggctctttttggccaattggctagatgtttggaccagacgtcaaggtcccttagacggagggtggtgaatgtctcattaagatacatttttaatcctgcagcttccgcggctaactcagagaccactgttgtgttgtccgaagaagcacctacgaataaagcatagtcacatctggcgccttctttagccaaccttttaaccaacgcaaaagattcctcgtcaacaatggcgggatttgtgttaggcattgcacaaatgagagtaacgcctccagctagagcagcagctgtacacgatgcatagtcttctttgtacgtggctcctggttctctcacgtggacatggatatctataaaacctggaagctttactatgttgcgagaactgatacaatcgatgtgggtcttcattgaaggggctcttccaataatacgtagagcttccactagtaatttagcacattttacatctgttatcagtgggatggaataatctatggcgagtcttctagttctgtatccatgcgtcataaaagaggacacccttcttgcaccgccatttctcattggcaaattgatgacaagatcgaattgttttttggacagaaattctgcaagaggttttagttcaccttgacttgtgatgtcgtctattgagtcgaaagtccattgtactgattctacttctactccatgttccgtatagaaatctgcagtccctaaacttgcataaagtttataacccattttctgtaacgaagcaatacttggcagaagttccattttatgcttaaacgttccaatggataacaaaattgatttttctggaatactaaatcctgtgctcatcatggccttcaagtaggcttcatatcgattctctccaaaacaggcaacttctcctgtggaggccatttctacacccaacatgaagtcagcaccagctaatctcgagaatgaaaattgtggtacttttactccaactctaccacagccttccagtacatctacaggttctacttcctcaccaaccataaccctagtagccatagcaacaaaatcgtgatttaaagttttcgatacaaaaggaaaagaccttgatactcttacgttgcactcgatcacttttagg

SEQ ID NO: 7075 - DNA, 1738 bp, Diabrotica virgifera
  SmartBlast Evalue=1E-179; Info=FGGY carbohydrate kinase domain- containing protein n=1 Tax=Camponotus floridanus RepID=E2A220_ 9HYME
cacagaccttgaaccggcattcgtttcgtccttactgttaactgtaacagccacaccaaccaatttacaatgccgagtacagataacatcgcttattttgtaggagtggatgtgggtactggtagtgttagagcagctttagtcacggaatgtggtgaaatagttagttctgcggtaaattgcacaagaacttggaatatccaaccggatttttacgagcaatccactgatgatatttggaatgcagttgtcacatgtgtcaaaatcgtggtccaaaaggttcagcccgacaaaataaaaggaattggttttgacgctacttgttctttggcatgtttcgacaaaagtggagcaccacttactgtgagcccaagtggaaataatcaacagaacgtaatcctctggctggaccacagagccgtgaacgaagccgcggaaattaataaattgaaccatcctgttctgcaatatgttggtggaaagatctctcctgaaatggaaacgccaaaattgctttggctcaaaaggaatatcaaggacacttgggacaaagctggttggttcttcgacttgcccgatttcttaacatggagagcgactggggcagattcaagatcctcatgttctctagtgtgcaaatggacttacgaaatgaatatcgccggcaccgaggcttggaataaatcctatttccaacaaataggcctggaagatctggctgaaaacaactggcaaaagatcggtagcgttgtattagctccaggatctgcagtaggcaaaggactgtcccaacaagcagctgcagagctcggactagtggctggtactcctgtgggtgcttccatgatagacgctcatgctggtggattgggtttgattggttgtagggttcccggagtagaccctgcgtttcacactcgagttggtttgatatgtggtacatctacatgccacatggctgtttccagagaagccactttcactccaggcatatggggaccatacaaaaacgccatgatacctggtatgtggctaaatgaaggagggcagagtgcaactggaaaacttgtagaccatatcattgatactcatccagctactccagaaattaagaagaaacttggtgatatgcacattcaaaaatatttaagtgacatccttaacggattagccaaaaaggaaaatctgaagtctgttgcttatcttacgaaagatctgcacgtttggccagacttccacggaaatagatctccaatcgctgatccaacactaaaaggaatgatatgtggacttacactgacaactgacgaagaaaatttagctttattgtatctagcgactatgcaggcactctcatatggaactcgccacatactcgacaccctgaaggattctggatatacagatatcaagtcaactttaatatgtggcggactcagcaagaacccaattttcacccacagtcaagctgacgtttgcaacttacctacggtgtgtcccaacgaagtagaatcagtccttctcggatgtgccattttgggagcatgtgcagccgggcatttcgaaaatatgactgcggccattatgagcatgggtggcgagggaaaagtagtggagccgaataaggaattggtggagtaccacaataagaagtacaaagtatttttgaaaatgtatgaagatcaagttgcatatagaaatgcaatgaactcctaattgtgtgttaataaattacttg

SEQ ID NO: 7076 - DNA, 1731 bp, Diabrotica virgifera
ttactatctttgtagaacaattttaatcttgatcaagatatatcttgttcatgttttcgcaaaagacatgtcgttctctcttggtaaactatgttgtcaatcttggtaagtcttattggtcctattatcactaaggacatcagttctagtaggtctaccatttacgtaacattagaaaaataaacacaacctattaataaattgtgttgactagccttcgtacgcctgactactgacaatctgaacaatctacaatgactactgaacaatcgaaataactttttataacaaagactatttccttaacacttaagcatatacatattcgctagactagagcgttaactgcactgcggaatttataaaaagttctgtacgcccctagacgtaccgtagcggtgttgccaatataagtatgatatctgtcttcccatttgagagcatagcagtcaatctgcatttaaattttatatgtatgttaatctcgtgtatgtacagctatttctcttccaggcctgtagagttttcgtcataacgttaaagattaacaatattttaccttattcacgtactgatactaattaactatcagtcatgttgacatttatactaatagattcataaatgttctctagttatttcatgacaacatagttttgttattcatggcgttcaaaagctttgataggaacaatattttttgatttattgtaatttgatgtattatagaatacaattttagatcatcaaaatcctatagtaatgtcctactagaattttacttaaaacaatttcgtatatacattttagttgtcatctttttgtctaaagtgtcctattccagaatttaactttttataagactttttgtacttcgaaatcttttgtacaataatataatgagaatttattggacgtggaccaatggtattcgtaaaaagctttgaatgaatttggaagtacagttgatagtcaaaatgaaagaactgtgcttctatatttattctaacgccactaatttagttacttactgtgctaagcgtaaagtgatttgtatacttgtgtgtttcccttatacagggtgttccggaaaatagtacgttcttaatggcatgggctgagtgcaccatttgtaacaaaaaagtgttataatattttttgtaaagttaaccgttttaaaatccatttaatatgtttgcttattgtccacagaaaagcaaatacagccggcaacgttgcgctccttattataatactacgttaaaaactttcatgaatcagcgttcgttaggcataattttgtattgatattgataacaaggatatagaaaaacacttcgtttttattaaatatttattaattaagagttatatactgttttaacttatataaaaaattattattacaataaattaatgttcgaagtggccactgtcttgtgaacaatgtttttataaatgccaaccattctagctacatacgggtactaactgttggattatcactgaatataaccaaaatcacatcttctgtatatttattctatggttaggtagtaactcgtgttctaccgctagtgggacacattcacaaaacatcgggaatagccctattattgtcacagtgagattcaccgtacgtaataatataggcgtaaccaggggggttttgcggctataaccccccccccattggatgtactttgagccctatacgcttaataccattac

SEQ ID NO: 7077 - DNA, 1739 bp, Diabrotica virgifera
  SmartBlast Evalue=1E-153; Info=Beta-N-acetylglucosaminidase NAG2 n=2 Tax=Tribolium castaneum RepID=A5YVX4_TRICA
gtaacaccataatcagcgattatctacaatcattggagtaccccacgcactccaatttagtatcgtcttttcaaaatactattcacagcatcgtgcagtctataaacagatattattgttcatacaaaaatgccatcgtacagtagtgttccgtgattttatgtttagtttgaaactgtataatttgcctactatttaaaacaatgattggtgttaatgtagtactagctgttttgtgggtagtagtcaatggtgccgatagttctaactggttatgtgaaaatagtcattgtataaaagaaaatagtcaacccgaacgtgaaggatatgtttcactagaactatgtcgattagtgtgttccaagtacttgaatatttggcctcaacctactggaacagtgcaatctacacaggagaccatttttattaatagcaagagcatagtgttttctttcaatggaccagcaaatacaatcggccatctaaataagttcacacattatttcgaagaacagttaaaaaaggaagaaccattctcctgtgaagataatgcatacaatctcaaagtgtatttaactcctataaacgatgatttaaggttagacttacacactgatgaatcgtacaccataaaaatggattacaaaggtaccgacatctacgcgaatattactgcgccgacagtgtttggaataaggcatggtatggaaacgttactacaattactgatacctataaatgaggatggtacgaaatgtttagttaccgtaaacaatctagtactaactgacaaacccaaatttcatcacaggggcctcctaatcgatactgcaagaaattatttaagcgttaaaactatcaaaaaacagctggaaggcatggctgcttctaaactcaacgtattacactggcacgtgactgattcgcaaagctttccattggtttcgcctaggttgccaaatatgacgaggtttggagcctatagccccaagaaaatttacacaccagaaaatgttaaagatattattgattacgcagaaactagaggagtaagggttcttgtcgaaatagacggtccatctcatgcaggaatggggtggaattggggttccggggccggtttgggatatctggcagtatgcgtgaataaacagccatggagatctttttgtattcaacctccttgtggacagttgaacccttctaatccaaaactctatgatattttgactgaattatataaagatattgtagatgtcaccccagatagacatatgttccacatgggaggtgacgaggtttacattccatgctggaactccactccagaaattctaaaatatttaaaaggtaaaccgttaacggaagaaacttacctaggcctatggtctgaattccaacagaaaaatttagcggcatttgataaagctattggacataataaaacttccatagttgtttggacaagtaccttaactgattccaagattatccaaaagtatttgccaaaggagaggtacattattcaaacttgggtaccagaaagtcaaaacaacctgataacggaacttgcaaatcttggatatcaaattattatatcaactaaggataagtggtaccttgaccacggtttttggggtaccacggagtaccacaaatggaaatctgtttacgataataaaatgtatgataaatatgtcaagtatttaggtggtgaggtttgcatgtgggagaattgg

SEQ ID NO: 7078 - DNA, 1737 bp, Diabrotica virgifera
  SmartBlast Evalue=1E-123; Info=Cysteine synthase n=1 Tax=Aedes aegypti RepID=Q16YQ8_AEDAE
caatttaataaaattattgattttaacacttatttatttattagttaatataacttatttatttttgttacatacatgtaaaccttaatctattatatttttcttaattttgtttctgtatgaactgtagaaaatccaaaggagttacgacacctacaggtttgttgactgtggaaggacctttaccttgaggatccaaaattaccaggtaaggttctcgttccaatacccttgagacgagaccaatgttggcagatttttcaagcctgggataaagtcggtcaagcgaatctgctattggatcacttagcttggcattaccagatgtgagcttgttaataattagctgcatggaaactactccaacaacacccccttgaccatctaatgctggtatctgattaagtccaagtttcttcatcaaattcaaagcctcttcaaaggtagaatttactggaaccgtttgtagtgctggaagacctaactgggagacatttaaatcccaccacggatggttattaacatttacgcaaggttgtaaatttcgttcttccatccactggtcgcacacaaactttgttaagtagttcctaatactatctggcaaaacaacgacaacctttttaccgcgaccgaagttcttagctttcgctgcttgaatagcagcccacatcatagctccactgctagccccaattaaaagtccttcatccttaatcaaccttcttgccattggcaaggccttctcatctcctactttaatccaagtgtcaatgactttgcggtccaaagttgagggaatgaaatcgtaacccattccttctatttcccaaaaagtgacgtcggttttattaatggcttctggtaaagcaaaggatgatccaaatggatctgcacaaacgatttctgtgttgggagagatttctttgaatttccttcctatacccgtaactgttccacctgttccagctcccattattatcatatcaacttgtttgtcgcattgatcatagatttcttctgctgtggtatcatagtgagttagtggatttccgggattcgaaaactggtcaaaaataacgctgttaggaatttctttcgataaacgatgtacggttccaaacattccatatggagaaaacgaattggcggttacagggcatcttatgacttcagctccaagggctctcattacgtattctttctcttttgatattttttctgacattacaattatacatcgatatcctttaatagcggctgccatagccaaaccaataccagtgtttcctgaagatggttctataatcgtacatcctggttttaagatgccttcattttcagcatctgttaatattctgtttgccatgcggtcctttacggatccaccaggattgaagaactcacattttacacatatatcacattccaatccttcctgctgaggtatcctgttgagcttgatcaatggagtattaccaattgcagccaaagcattcggtaatatttttggcttaggtgcgttccaatcgacctttgtatgaattgaggtcgatctgtcaactttcggattccatgggcacttttgctccctttcaggagcgcaaatagcgtcatttaaaggcgaacggtagacgtatttactcatgttgacgatatgttgttaaatcacgaaatcaatgaagtgagtgctctacttaaagataataatatattttatcgtaccggtttcacgac

SEQ ID NO: 7079 - DNA, 1733 bp, Diabrotica virgifera
  SmartBlast Evalue=3E-20; Info=Peritrophic matrix protein 5-B n= 1 Tax=Tribolium castaneum RepID=D1MAJ6_TRICA
tctacatatttttcgagtgataaaaaatgcgcacttttgtactaaattttgaaaaaagttggttatacatcgtgctatattattattttggatgtgtatttgtgaaaactcaccctgtgtgtccgccacgagatggtcaggaatcaatctaccatcctcatgaagattgtacaaaattttggcagtgttccaatggggtcccttatttattcaactgtccaccaagtctttattttaatacaaaattaaacgtttgcgactggccgtacaatgtgcaatgccccccacccacaactcaaccaacaacaaccttaaccaacaaaccgccaatagtgaccaccaaacaacccccacctttgacaacaacaactcaaaaaacaccatggagttctgaaagcaccggaacaacagatacatctgaaataacttccatcttaccaagttcacaatttactactatagaaacatcttcaatcggaacaatatctgataatacaaaagtatctattagtacctcaaaagctactactcctaagattactagtacatcaacagctgcacccaatacttacgacacgacggataaatctacagatataagttcaaaacctactataagtaccagctcaaaacttagtactctatcaacatatgttactactacctcaaacattcctacaatatcttctattaaaactagcacttcacgaagtactttagagcccttaccattccagactacgtctttactaacttcagatggtagtaattcatcctcagatctaccaagtactgctgaagcatcgacggtcacaataccaatagtctcatcagaatatacttctacatcttcaccaaacactcctaaatcttcaacactatcttctacacaaagcagtccaaccgatacgactaggataagtaccaaatctacaactgctacttcttcagaaaccaatacctctgagtcggattcatcagtaactacaacatcacatactactgatgaacttgatgatacagatacaactcaagatagattgacttcatcggatacttcaaaaattacatcaaccactgaacttgttatatcaagtagaatacctcaaagtaccacaagcataacgacaatgctagaagatgatattactacagatgaatttacagaaactactgatagtataaatgatacaagtcatacaacagacagtgaaaatataccaaattctagtaagataactacaccagaagaatttatagaagaaacatctaccacagaaacaaaagaagatgcaagtatgacttctacttcaacaacagggaatgataatataccaagttctagtaaaacaactataacagaagaatttacagaagaaaaatctactgcagaatctacttacagtactaataatcaagggaataatacagaaacaaaagaagatggaactatcatttctacatcaacaacagataatgagaatatacccaattctagtaaaaccactataacagaagaatttagggaagaaacaactattacagaagccagttacagtactaataattatgacaatactacggaaacaaaagaagatgaaagtataacatcaacaacagatggttcaacgagcacaagtataaaacatataaccagttctagtacggaaacaattggatctgagagttctattgatatatcttcaagtagtatagaaatagaagaagataca

SEQ ID NO: 7080 - DNA, 1730 bp, Diabrotica virgifera
  SmartBlast Evalue=1E-134; Info=Putative aminopeptidase W07G4.4 n=1 Tax=Harpegnathos saltator RepID=E2C718_9HYME
taaatcagaatatttattaggaattataccaatcggcaattatcgcaaattacattacaaaagaaaaaaacatgtattataatataaagaattttgtgatatttataacagataagcttgtgccaatgcgagtactggagcacctgttccaggaagaggaaaggtaccggcggaacctgctatatccagatgagtgtaccttagaggcacatcacttgctgagccatgcttgtccaaacccgaagccaccatgagaaatgctccaggaccttgatgtcctctcgaaaccagcgtcgatggttttgcagcactttggatcaaatcgtctccttcgcattctcctttgtgatgcttaaaatcatctcgacgaattctggaaatttcaaacatgtctccgatcttgtctccagcagcttgcaacttttctgcattctgtgtttttttcgctggcccattgtccatagcaattgagtaaccttcgccaacagttctatgagcgtgtccagtcaaggtggctatggtgtatagatgaggatttactgcattgactgcatcttccttcaacttgcacaatacgtcagccattatcattctaccttcagcatctgtgtttatgattcggactctggcccccgatctggcagtgataacttcgtcactggtatatccattagatcctatactattccgtaccatactcattgcagcaaccactttaagatgtttgggctgaagaagattcacgactgtcataaaaccagctgctgcagctgctccacacttatcacgtgacattcccatcatagctccgccgattttgacgtctataccaccagtatccattgttactccttttcctacaataaataacgtttccttaacagcctgtggtggattgtattccaaataaataattcttcccctatgcctggcattaaggctagctgctctgttaacagctgcaaacaatggatatcctttattgaattcttcttcatcacttactacgcttaatttgatgctggttccctggaatagattccttacatactcttctgctctggctggagtcattcgttccggatcggaatcaccaatgtcgcatgccacacgtctgctaatttccagtacttgggcctgcccaacaattgctttggttttgtctggattttcggtgtatactccgacgagatcgactttgttcgtttttgaaggatcatgttctctgacttgaataggcgtatataaggcatccaatactcccaaaagcgtaaccaactcggtactttcaaatgcgggatattcctcaaggaccaccaacaactttttaacaccagcctttagcgccctcttaacacccgccgcagcactgtttttgaaaattctcacatcatcgtagtccgtatcgattggaccagtaggagaataaaccactcgtctcgccggtaaatctgtctgtaaaacgccgatttctgtcttgagggattggtcgaaacttagagcatcttgaacaagagaattcaacttcgaattcttcactttttgatccggtgcagccactaacaagatcccgtcatattccggcgattctatcgatgtttctacgacaagtttggtttcaggtggaccctttaagttcattttgttcggaaaaatgtgtttacaaagttacaagttcatacaacgcttgcctcaccactcagctgatttcccaaattgtgaatttctat

SEQ ID NO: 7081 - DNA, 1732 bp, Diabrotica virgifera
  SmartBlast Evalue=3E-87; Info="UBX domain-containing protein, putative n=1 Tax=Pediculus humanus corporis RepID=E0VQP5_PEDHC"
gcagcttagcgactgagtagccaagtaatggtatcaattttttcaaattattttgagaatacatcaattttagatgtaattcaagtatattacagcagtattattttatacgtatcagatttttttgaagttgcccgtgacaaggaagtatttacctacttggaaattgtgggaaatatatttgatgattttcagtggaaattcttacagatcttattcggattaatactgtttaatctcatatcgattctcattgtctggaaatatttcggtgactcaatttatgagcggttcatgtccaatcctacactacgagaaatcgaagagcttaaagccagtgtttcaaagttaaaacttccaaaagaacatacacctaggatttaaaattcctattaatatggcggagaaaataaagaaattctttgccaagaaaaaggcagatgctaagttcaaacttgctggtccggggcataaattaactgaatcatcatcaactgcatcaaatcagagtaagccaagcaagggtgcatatgtgccacctaaagttgaacctacagaagctgcaagacaagctgctgaagctgcattggttcgattacagggacagaggaaagatacagctttcaatacgtcgtttgcagcaattcaagctaaagtaagaaaagaattggaggcggaaactaaaaatcaaaaccaaccgcaagttcctgggtcaccaacaaagagtacagatgattatgagtgttcccatcacttggctgttaaaggtgtatatttcaagtgtccattaattagtgatgaagtgttgcccaaagaagaatggaaagtaaaaataaaagaatttttgtttaatacattggaagaggaaagaggaatgacatctgtactgcttatatattcttgcaattacaacagaactaaggtaaccgattgtgtgaatgttttaataagatacatagacaacatactagcgaatccagaagaaaccaaattccataaaattagatgttcaaatgccactttttgtgataaagtaatgcctgttttgggtgcactagattttctaaatgcagccggtttcagagaccagaaaatcgataataacggcacagaagagaactttttggtgtggtcggtggaaaacattgatgggttagaaacattgcaatttctacgagatactctaaaggcagaggaaagggtggacctcgagatagatagaaatattcaagtgttgtcgccagctcaagcagcagagaggaatgaattgccccaagatttctttgcaatgacagctgaagaactaaagaaggagagacaacagaggtcggaacaattggagaaacaattacaattgcgaactaaagccatgcgtgaaaaggatgaaattcgggaaattaaaaaatacaaattttgtctaattaggataagatttccagatggtttattcctacagggaactttttcagtgtatgaaaaattctctgaagttgttgaattcgtcaaagaaaatttggagcacgaaggtttgccttttgtcctgtcactttccacgggccatcgattagaagaaagtgacaaagacaacactctaatggatctccgtctagtccccgctacgattcttctattccaatgggacgcctcgatcgaaaatgatctgaaagctgcaggagggaataccgcttatctaaaaccagaaatcatgttgttggttcagtcattataaaag

SEQ ID NO: 7082 - DNA, 1732 bp, Diabrotica virgifera
  SmartBlast Evalue=0; Info=Aspartyl-tRNA synthetase n=9 Tax= Sophophora RepID=Q7K0E6_DROME
agataaccaatttttatcttgatacttaataattttgcagtgaattgcatcattaattcctatccaaggagccaagagcaagtctgaagatggttgacggaaaaccaaacgagagtaccactagcaaagcagccttgaaaaaggaagcaaaaaaggcagagaaggcagcaaagaaagcagaacacaaacaagctgctggtgaaactcaacagaacgttgtagaagaagttgacatatcagttggaaaatatggaaatcttccccttataaaatcagaaactaagcacaacgagaggactttcacctcagtaagtgacctaaataaatccgtgtctggaaaaactgtatggataagagcaaggttacatacttcaagatcaagaggaaaacaatgctttattgttctgagacaaaaagaatttactgtgcaagccattttaaatgtctcagacgtcgtttcaaaatctatggttaaattttcaagtggggtacctaaagaaagtatcctcgatgtcgaagccaaagtatcagtagtgcccaataacatagcaagttgtagtcaacaggacgtggaactagttgtttcacagttatgggtagtgtccttgtctgctccacagcttcctttgcaaatagaggatgcatccagacctgaaaaaccagaggaagaagaaggtttaaatatccgggtaaatcaagacacaaggctggacaatagaattttagacttgagaacaccaactaaccaagcaatttaccgattggaaggaggcgtctgtcggctgtttagggaagcgcttactaagaaagggttcgtagaaatacatacgccaaagatcatatctgctgcttcggaaggaggtgctaacgtatttactgtaagttattttaaagcatccgcatatttggctcagagccctcagttgtacaaacaaatggcgatagcagcagatttcgaaaaagtgtttactgtaggtgctgtattccgagctgaagattcaaacacgcacaggcatttaacggaatttactggtttggatctggaaatggcgttccattatcactaccacgaagtcatgttgacgatcggcaacatgtttacagaaatttttaaaggtctaagagatcaattcaaaaacgaaatttctataataaatcaacaatatccagcagaaccattcgccttcttggacccacctcttgtattagaattcaacgaaggaagaaaaatgcttgccgaagtaggagttgaagttgctgaagaagaagatttaagtacaccttcagaaaaattgttaggacgtttagttaaagccaaatacgataccgatttctacattttggacaaatttcctttggctgttcgaccattttatacgatgcccgatccacaaaatccaaaagcttccaattcgtacgatatgttcatgagaggcgaagaaatccttagcggggctcagaggattcacgatccggtatttttaacggaaagggcaaaacatcatggaatagatatatccacaattgcagcttacatcgatgcttttaaatatggatgcccacctcacgctggaggaggaattggattggaaagggttgtaatgttgtatttgggtctggacaacattaggaaaacttcaatgttcccacgtgacccaaaacgcgtgaccccttaaaatagttatgtatttaatatgtatacatatattttataaataaaaatgtagatatc

SEQ ID NO: 7083 - DNA, 1732 bp, Diabrotica virgifera
  SmartBlast Evalue=0; Info="Actin, indirect flight muscle n=356 Tax=Fungi/Metazoa group RepID=ACT6_DROME"
taacgtcgctgagcgtcgagtccatacacttactcagagtcgctgtaccaccaaaccaaaaaaccataaatcatgtgtgacgacgatgtagcggctcttgtcgtcgacaatggctccggaatgtgcaaagccggtttcgccggtgatgacgcccctcgtgctgtctttccatccatcgtaggtcgtcccagacaccaaggtgtcatggtgggtatgggtcaaaaagactcctacgtaggagacgaagcccaaagcaaaagaggtatcctcaccttaaaataccccattgaacacggaattatcactaactgggacgatatggaaaagatctggcatcacaccttctacaatgaacttagagtagcccccgaagaacatcccattcttttgactgaagctccacttaacccaaaagccaacagagaaaagatgactcaaatcatgtttgaaactttcaatacccctgccatgtatgttgccattcaagctgtattgtctctgtacgcttccggtcgtaccactggtattgtacttgattctggagatggtgtatcccacacagtacccatctatgaaggttacgctctcccacacgccatcttgcgtttggacttggccggtagagacttgactgactaccttatgaagatcttaaccgaaagaggttactctttcaccaccacagctgaaagagagatcgttcgtgacatcaaggaaaaattgtgctatgtagctttggacttcgaacaggaaatggccacagcagccagctccacctccttagaaaagagttatgaacttcctgacggtcaagtcatcaccattggtaatgaaaggttccgttgccctgaagctctcttccaaccttccttcttgggtatggaatcttgcggtatccacgaaactgtctacaactccatcatgaagtgcgatgtcgacatccgtaaagacttgtacgccaacactgtcctttctggaggtaccacaatgtaccctggtattgccgatcgtatgcaaaaggaaatcactgccttggctccatcaaccatcaaaatcaagatcatcgctcccccagaaagaaagtactccgtttggatcggtggctccatcttggcctccctctccaccttccaacagatgtggatctccaaacaagaatacgacgaatccggccctggaattgttcaccgcaaatgcttctaaactactttatatatttatcgtatacatattaagtacaatactgagagttggagcatgaatgtatgtttttatttatggttatatatatgatgacttgttgatattgatattgtaacaataaattcattttgtattactctggtaatattttatttatgagaacaaccagattgaagtcgtaaagagccaataacaacctgaagatatcaattgtcaattgctactgagtaatagtttgaggtacttagctccagctccttttcacacgaaagtaagaagtatctgagcgagaatacattctgtattgtactttttaaatatgcgacttttgtaacatcaatttcattgtaaaatatcatcatcattgttttatggacctacgtgacagtaggagacacctgacaagacttcttttcctgctgtgtatacgcacctttacaaacatcctgctggcctaattgtagtcctgtaagggacatcctttgttgggcatggagtttgtttgtgggaattgtattgactactatta

SEQ ID NO: 7084 - DNA, 1733 bp, Diabrotica virgifera
  SmartBlast Evalue=2E-37; Info=Tubulin-specific chaperone A n=2 Tax=Aculeata RepID=E2B5Y7_9HYME
gcgggatccaggtctatcatatttattttaataaattataaaaaaagcaaacaagctgtctaatattggttaattctaaatgcagatcaagtatttgacaaatatttcgcccaaccttcatttggttctggtaaaacccaaccaactggaattttcgaacccatctcattggtgggagatactaggaatgtgtcccaacttttccttatagcaataaacgtttccgtgtccctttcagcggcagtcaaagcccaataagtctcatgatcttgaggtatcaactgtttaggtccaaaaaacactgtatgccattcatccaacagtcttcgttttttagataattttgccgtttttgtatcttcagtagcattcttttccaacatcagtcttaaaccttgctcttccttgccatacacttgaagagatgactcccacatattctttaactttaaaacagttatgttgaatgcattctgatcttctaaagaaagtttctcgcccctttgtaccgccatatgatgtctaataaacctcaattttgctagggagccaataagtgccatttgttttctagcatcggattttttctttgttacttccgacaatacacagtcagcgtccttttgcatagcttctgccattttgagtttttcttcgtcttctttcttattagctaaccattggtcgatacttttatgaagtttctcccttgcttgaaacttttcgtccatctgctgccttctaaattctttcttcttcttgtgattcgctctctttttctttcgtttgtcgatgcttttcttcaaacggaatatggcgtctccgcactcgaatttagaaatgattcttgtaaactgatctttgatagtaccgatttcaacggttttttgcttccattctgtagatggcattctatctacttggctttctaggtctttgtgtgttttgttaagtttttcgagtaattttaagcattctttcagtgagttttgggcttcgtggatacctattacatttgacgctttattaattttaattttgggaatgggatgatatacattattttgctgtagccacgattctatccacaactcatcattcgactgattatagagactctgtaaaatattagtccttggatctgtagtaacaggcacttcaatattaacactacggttagaaatgttctgatattttaaaaaattcattatgaaaaaattaagtctttaataactagaactatacataaaaaaatagatatctgtaacttttaacacatatgcacttcagctgatttgggcaattgcgcttttgcctcttccaaaactttttgtgcagctaagtaatcttctgattcttgtaaatctttttctgtttccaaaatgttctttaaatcctcaaaagctacagctagtcttctttgacaatcaggaaccatcatcaaactttcattcaaaacttcttcttgctttctaaggtcatattcatcttttccatcagctttgtatttctcgatacgaactttttgtgcctctacctcacgttcataaacagtcttttcttttgctaaccttctgacaactccagttttaatcttgatggttcgaatgcgtggatcggccattacacacctgcacctgatatttcgcttagaaaaaacgttcacaaaaacaattcctttattttattactaataaatggaatcccattcaaaaacagcaagttcaagggtg

SEQ ID NO: 7085 - DNA, 1730 bp, Diabrotica virgifera
  SmartBlast Evalue=3E-42; Info=PirB n=3 Tax=Photorhabdus RepID= Q1PA45_PHOLU
aatagatgctagtcctgttctatcggttttgataatcgttatttcaactagttgcaattgtactgccaagtagtgttcatgttttgtgtgtagaaaaacgctaaaactgtgtgcaggcacatcctttcgcgatgagtagacccaacacaaactgttttcaagtcttaccgaacaatagcagatggctatcgacacaagattctggaatttttcccaaacgtcacactgactactatgtatttaatatgggaagacaggaagtgttagtggaaggatggtggggaacaaaactgggatggactggggttttggatggagtgaacctggcgcctggcaatggttacagaattgtagtcagtgataaaccatattttgtaacagctgtgaaaataacaaataaaacaaatgtaagggctctcatgcattgttctaagataaacggttatcctctgcggagtcaaggaactgacagtatcagaccagatataagttcgattgcaaaatactttatcccttttggggtaggaaaaatttccgaaatcaatatgggctttaaatcgctggaaaatttcttttggcccaaaggaggtgaaagtgtttgggacaaaatcgctaagcagatagtttttttactaaatgaagcgacgcaaaaaagaatcaaacaaattctaagagaagatattttgcttgtacaagaaaatttgagtctactccaatcgcaaataaactccttccaaccttccgttgtaaaagctgagtttttcattaaaatggcagaacaactcgtattcttggaaaagaagttctctgattgcggagattcagatattgaccttaacttccacttgttacctttatactcggcaacagttaactttaaggttcttttatataccattgcttgtgaaagacatagagaggttggactaaatgacgaacagatcggaagaattatccagttctccgaaaaactgatcaatgatccctatcttggttcagtggctcatataacgaaaacctttgaagacaaatttcatcttgaatatagaacttgcgaccaggaacttatttataacatcttggcaactgttcgcacttggtgtggcattaacggagaagaatatgtgccattctggaggagcctacttgataagaaaaaaattttctataatggcgtcattacctattctacgtactttggtacacccagtccacagttgtattatcagctagttacagatgacgtatcaccaccactacagcctagaataattaatgaaaagaggaacgtcatgaatggtatctacgtatacatctggagaacaacaaccaatgaaggggcagcaaaaataggaggactcaaaataatgtatcaaaacggtgacagtgtggaaactggaaaagctaccggcgaatcaaactacgtgaatcttaaaaaaaccttcttaaagaaagttatcgtttggggtggagaaggaatcaactgcatagagttttatttatcaaacgggaatgtagagtgttttggaacgaaggaagggtctcaaaatagtgctaaatttaaattgttgggacacaagattgttgggttgtgtatgaaaactgacatacctgaatcaaatggacaagcagttaatatatcagtagcttatcaggtacttgcaaaacatgaatgttaaatgaacagtatttctaataatttgtaatacattttacaatgtaaatatatt

SEQ ID NO: 7086 - DNA, 1730 bp, Diabrotica virgifera
  SmartBlast Evalue=1E-123; Info=Protein tweety n=3 Tax=Aculeata RepID=E2AXN3_9HYME
tgccctctgaggtgtgccatgtgggcgctgttgcggtgatgttctgacggacgcatgtcacacccatctaatagaaattctgcttcatgctctggcaggggggctgttgggggcgcatgcaatggccggttatgcagcaaagcggatgtataactaggcgggggagtatcagggggataggacgacccttggctgcgttgtaatgtgcgtgctgcaatcgcctggctcgcctgagggggtggaagatacgagtcgttttctgtcacttgttggtagtctttcttctttcttatgtaaatccatgtatgggaatcaacccataccagcacagtcagcagaaaaccagctacgactgaagaggctaacattaatgttaaaccaagcaagccaacgtaacaaagagctctagctcccctcaagtaatgcatgtgtagagttcggcagtcgactaaagctgtcaaagaatgtatgtagttgtcggctgtattaatatcatttcgaagagagctaaatttggtatccaatcctttgtctctaaataatttctcagctggtttaaccatcgcagttaaattagatctcatgttctctacggtcgttttcgcttctcttaatctttgggtaaaaggattggcccgtgctctttcacaattggtataatatcttagaatctctttcgacaattcagtgctggcctgatcttcaataaatttatcaggtgccatgcacaaatcgctcaaagctacactggaagctaaataaatactggccataatataggaggctatgacggcgagcagtccacacaccgaaaaggctataagagcgcacctgttgtgcctcgctacgccaactaataaaatcacacataaaatgagtaaaacgctcaaaattcccatcgtgaaaggccatcgcactgcctcaattttttcaccaattattattgtcgatgtaaggttgactcccactaaaggttggcgtatatctctagctgcgtttgcagtagcgttgcggttactgacaagtttcttaaaataaccttctatttcgttaaataaaggtttatcactgtgatgtgttccgaacacgtttgcaatttcttttatttgtctctctgcttgtatcctcaactgtcgctcgatgtcttctgtttggttgcgtattttggatattaaaatgtctacttgccttccttcactcaaagtccggactacgccattgtgtaaatcgtcattaccatagagtcctatgcctatgccggcacaacacagaaccgatacaacggctaaagtgagtttaagggccgctatcgactttgaggctctcggtttccgatcacaacatctcgtcaacaggtaaatgagtaggacgaacagcgttaatatcaaccatattgccgggatagagccgagaattcccaaactctccaagtatacgggattgttcggttcaaaggagctgttgacatgttgaaagctgacattgacgtggggcagagaatgtaggaagcgtgctatcagaggatagctgtatgcgtcgtcgggcgatatcatgcccatgccctcccaactggagagtggcccccccaaatatcgggagttacaccactatgaaggaatccggcttttcaatcacaccatttttattgaatgtggcttaattgagaacttctttcaaaataattgttaatccaaataactggagcaaatacacccacccacaaacagatc

SEQ ID NO: 7087 - DNA, 1729 bp, Diabrotica virgifera
catagttagtttttttagtatttttataggacgttttagagcatttaaccattgttattgtctctcggataatatcttatttaggcgtgttatgtttttgtgtctcagatgataacttatttagttgttttatgcttaaaatgtagtacatactgatggtaaccgataaaactgaacatacttagcattccacaacagaaatgaggtgtattatctttttcgattaattattttaatgagaatgttaaattaatccttgtacaaaacaaaattacaaagaaacgcaactaaaatgatctaaaacacattaagaactgatagaataacatttatgtttgcctcccggctgtcagattgatttaattttgacagcatgttggaatactctattttgatttgacatttattgacatttttaacatttattaacatttaaacactgaatattgaatgaaataattcattagaaggatacaaattgtttcaatcttttttaaaaatgtccattttttttaattttgtagaaatttaaaaagttcggtctcggtagtgctaggtttacttaaaacgaaacagtcattacacttattgattcttcttctaaaccttaagtaatataataccttaactgtgaagataaactataaattacatagatgtcggagaccaaaaattcatttctcttaattctgatggtttggctcgaaagacaggtggagttgtcttgattggctgttgttgctgttcgctgagactcactgctgaggaggtgcgttcgagatcttctttgccttcttcttttatttgaccaactgattgggagatttctcgtttggcgtatagattcgacaatatccaactacctttagatttgtccacatccgtaaatgccccagtgaaatacttattgacccttctgtgggctttaggactgcttccgggagaagtaagaggtgaagccggtaaagacttgctgttgcgtcgccttgtgccgtcgtatttctcctccatgggctccaccggataacaggttcgtaggcccagaccttggttggaaatcatctgcgacgccaccttgattatggaagaaccgcatttggccgcttctcctttgaatccgtcgtcagtaccgggcgatttgattttcatttctgagctcgtttgaggtggtacgtcttgaccgcttcgcagatatttttggcaagggactggatgttgcgagaaatcttgctttttctttgtcactgttgccaccgtgatgttttcaggtagattagtggttgttatggtggtggtggtggaaaagttcgattccggtttcggtcttctgtagtacaacatgaagctgtcgtccagttcagttggtgaaaaagtacttgggtctaagtcgaatttgctactcttggtcttcatccattgtgggatggagatgcctgatcctagagaacggtccttggtagccatattctcgatttggtagataacgttccaaaataagtaaacaggatgtagaagttcttaaactaagcaaccaatcaagtaaactactcggtcggttgagaattgatctagaatccaaacgtagacacgtctaggaataggcttcacttaatatccaaatcttgcataaattgtcaacaattgtagaaaaacaactttttaaaacaagcatattgaaaaatttgtaacaaactattaatgaaaatgaaacaaactgtcttctctagga

SEQ ID NO: 7088 - DNA, 1722 bp, Diabrotica virgifera
  SmartBlast Evalue=1E-107; Info="5-azacytidine resistance protein azr1, putative n=1 Tax=Pediculus humanus corporis RepID= E0VKY2_PEDHC"
gtgtgattcgatttgtaagaatggatttagcctaatagtgtttgttgtgctgtgaactcatcaaaattaaaactgtaaaaatgagtgtgtaatatcctcgttatttagtgtcgtataatgcactctttattagttacgggacgattgttatccagagcaatttggaatggaatcgcaaatgtctcaactgcaacagatcccaatatccaaaagaaaactgagccacatttagtatccgctgtttgtggcttttctaaggagagaaaaattcaaagactgatcaaaggacaattcggtgacgatgcctggtttacagcgaaatacaaaactgcggacgtcctgggtgtggcagatggtgttgggggatggagggcgtatggcattgatcccggtgaattttccttacacttgatgaaaacgtgtgagagattagttaggttaggtcgttttactcctacgaacccttcagaactgttagcgaaaagttactatgaacttctaaaccataagaaagctattttaggtagtagtacagcatgcgtcgtagtcttaaatcgagaaaacagtaccttatatacttcgaatattggagacagcgggtttatgctggtgcgacggggtaaagtaataagaaaatcagaagagcaacaacactactttaacaccccgttccaattgtcgttacctcctcctggatacagacaggaagtgctcagcgatcgaccggacgcagccatgacagataatattcctgtcgaagacggagacgtcattctagtcgccaccgatggtgtttttgataacctgccccagactcttatcgtcaacgaacttataaagatacaaggcgaaagatgtgctgggcgtgtccaaatggtagctaattcgatagcatggatggcgaggaatctttcattcgatgaaaatttcgtatcgcctttcgcagaaagtgcttttgccaatggtattaatacaataggtgggaaaccggatgacattacggtactcctagcaacggttgcaatatgaagccttagaaaattaggtagttgatgattttgacgtcttttccaacgtttagcaaattacgatttttgcatttcattataattgtactaccaaaaaccgtcaatataatgtgatctttttcgtgttttttatttgttgaatttgagtgtttttgatattccataggacaaacaaaatataatttaaaatgtttgataactatttatactttttatttcattactttatatttcaaaaatattatttagtagttgatcaattattggggtatattttacaatctttctaagagactcttgtatattttacaatcttaatattcagttcagcgggtgctattgttggaggtgtgaaattacataaacaaacctaatataattattgcacacctcgaacaattggcactcagctgagcttaatatgaatgagtctcttaaaaagattataagactatatgtgaatcttttgctagtgagcagttctcgaaataataaagatatatgtttaacctcacataacactaaaaatggatcgtaccttgatttgaacttaagtgcttcactgcgcgacccattatagaaaatgagaaatacgagtatgattatactgtgcacagcacaagtacaagaaagttatagtttatgttcagctagaagctcaatgtgatcagtacacttgaaaataatacattat

SEQ ID NO: 7089 - DNA, 1725 bp, Diabrotica virgifera
cctctccgtctataaataacatctcaaactatgagaatacaaagaaaaaataatcagtcctataatcagaaaaaaagtactataactaaacgcctaatcctaaggaacgaaaacgattacattgcgggacataggaaaattgaaagaataagtaaggcttgtccgaagcttatactaattaaataaaatgaacacaacgaaaattctttaatgcccaacgcgattcacaaaaacatcaaaatcatatttccggcagttctccaatttggagtttccttcaaatattatatacaaaccaaaatgcaaaaagacgaagattttaaatgcgtacacatttatatctagtaggaggctatccatattgacaataaagggctaataataacgttttgaagtttgttattgtagtgctctttagtttgtaatttactttgacaattccttattattaccttttgcatatccactgttaacgcaaggagttatggtgtagacaatcgccattaaataacgagactgacagttagagaagtagaatttttaagtcacctgctcacaaatgaatcctgataacgtgcagaatatatcgcggcggtccgataactacttagcctaacagcaagatggcgctaccatcgcaagacaagtttactatcctatagtacattctcgttgacggattatgcgaaaacttcagacgaatcgtactcgcatttttgttttgaccacgtgtggaagcaaaatcaaagagagttggatgctatgtgtaagtttcaacgcggtcgcatgtcggtttttgataagtcactcccaggtgccccgaaaacggctaccacggaggataacgtgacaaaaatgcatgatttcgtattggctggtcgccgattgaaggtatgcgagatagctgatacagtactcctcttaattgaccgcgtcggttatctgtaggcgtgacaagcgcaaccgtaagaccactttagaacagtttttgacagtgagtatcacaagttgaaggtgaagactatcatatctggcggaaaggtgatcgccacatttttgtggcaaaatggttacaagacctcttgagttgattcgatgccgaattgcagaaaaaacgaccccgttttggcgaagaaaaggtccattatgacaatgcaccagcttacaccttcgccacggctaaattgacctactcatcccctacattttccatatttggccctgtgtgacttacttttgtttccaaacttgaaaaagttttgtttctcctcgaataaggaggctatcgccgccacaaagacttactttgtagactttgagaaaacgaacttttcagaagcattaaagaagaagcaattaatcttgcctcggcatctccccaaaaaaaaagaaaccctgttatacttacttaaagtaagacagagacacagcgaacaacgaaaaaaatgatggtgtcatcagtttgctctgtagattgctcagtctatagtgacaaatcgtgtatttgcaggtactcttcttttcatgagcatttttcagtgcgtcacaaatgatagaaagtaagtccgtgattatagggcttttcatcgattgtcatttgtttcgagcccctgtcatgcgtcacataacattaatatatctacgtcatacgtccttggtttgtatcattgatataagatatataccaataacgtatgacgtagatatatcaatattatgtgacac

SEQ ID NO: 7090 - DNA, 1727 bp, Diabrotica virgifera
  SmartBlast Evalue=3E-49; Info=Cation transport regulator-like protein 2 n=1 Tax=Camponotus floridanus RepID=E2AVE7_9HYME
atatcatgatgattaaataaattcaaattattttgttcaagaacaaagatcccagtgcttgttttaatcagagtatttaaatgttctttgtataaaaaatcacgacgtaatgcattctatacaatagtttctttattcaataatgtgggtttttggttatgggtctcttatatggaaaattgattttccatatgaaagaaaagttttagggtatattaaagggtacgatagaagattttaccagctcagtacagatcatagaggaaccccagaaaatccaggacgggttgtaacccttgttccatccgaggtaaattcaaaagtttatggagtagcctacaaaatttcggagacagatgtaaaaaaagtagtagatcacttagatcatcgagaaaaaggtggatacgaaaagaaaacacttgagttcttcccaatatgtgaagaccaacaaaccttcaacatcaccatttatctgggggatcacgaaaacgaaaattacggcggcccagcagatttgaacgatatagcagctcaagtagtagcatctgaggggcctagcgggcctaacgtggattatgtttgtaatttagctaatgcaatgagaaattttttcccttccgttcaggatgaacacttgtacgaactcgaaaagaaggttcttaatttattgaggaaaaataacggagtatgtactagtacataagtgatatttggaggaaatagtaatgtatttgttaatgagatttgttagatctttggctgtttaattttaggttttataaaattgtccgttgtattaaatgagttgctaaaatttctttcagaggtcagaggtttagataaattatgtagagaaaatgtttttcgaaaacaaacttgtgattttaatcagaaaacccttgtataataaaaaacagatattttcagaagagttaaaatcatattttaaaaattaccaactgaaaagtttttacataccctagaaaagaggtaagggaaagtgtgggaatggtgcgcagcgggtaatcgtgcgctgcattgtatttaaaattccgtggatgctcttaagaactcaacaagtcctacaccttttggatgatctcgtgaacggttgacgccattatctttagtcgaatgttgcacgttgactaagtgagatcggattattgaaaatcgcaagaattcttttagtttttctgctccaaaaattaagacgctaagttcgtaggttttattaagttgctttgagcttactattgatttaaatcatgttgttttccgtacattttggtccatctgttggtttatatggtttagtagttttttgtttgtgatgacgtttgctatttaaggcgcaaagggggtaatagtgcgcacgtttccccaacaaacaatgaagtggtaaataataaagttaccattttcgtttccagaggccacaaactacactagaaaatctatgattcttacatattatactaacgaagagttacaaaatcctctgtatgcaatcagaaatgacggcaaaaaaataagggaaacgataaaagctttcgacattcaagatcgacttcaagaaaaagacgaacgggtttatgttcctaaaggagctacatatgtaggctctgtctgttgatggtgatataactatcatggccgtttattacatgagtgctggagaaaattatattccactcgtgttgatctatcacgagttaaaccagaaa

SEQ ID NO: 7091 - DNA, 1726 bp, Diabrotica virgifera
  SmartBlast Evalue=1E-143; Info=Cytochrome P450 9Z4 n=1 Tax= Tribolium castaneum RepID=D6WWU4_TRICA
aaattacagtttattatttacaaacctctacaacaatcttaaaacaaaaattaaacacttgtcttatattttattgattattcaatgcgtttcaatcctaaccaacatccatcttctactccaataagtgccggactcttcgtcagtttcaagggtatacaggtcttttccacaggcacaattttcaacctcaaaagcacactgtagaagaatattttcgtttctaaaatggccaatctcgaggctatacaccctctaggtcccatcccgaaaggggtgtaactaccaggtataattttgtgtttgttctcgtcgttgaatcgctctggatcgaaacggtctggatttgggaacaaatcgggatcacggtgcatgccgaacgtggggattaccactacgtggcctttttcaaggtgtagaggagtttcttcaggcgtggatggttcgatggtgtaaggttttgtgcatacacgttcggcaccagcttgcgcaggccattttcgaagaacttctgatgtgaccatatcgaggtacttcatacggacgagactatcatatgtcaattttccgctagagtttttatcagtttcaacaatttcttttctaagcctgtcttgaatatctgtgttaacagctaactcatgagccatgcagcacatcatggttgaaactgattcatatccagcgaagaagaagagaaacgattgagcttgtatgtcctcgtcggtcaactttatattcagtttttcccttacaattttaacctcctccattgcagcaaatcctgtatcttcagtcgttgcgtcttcctcaggtttttcatttttcctagtttctaacagcaattgtattgtgtctggtcgaacgatacctttctcttccctttgcttgatggaatcattgacaaggtttacaaaaaatgaagtttcttctttgtcggagagttttaagccaagaaatctgtataacttcggagccaacaaaaatcccatgaatctgataagtttactaaatttgttaagattagaaaccctactgaccatggcataaaattcgttgtccttttggtctagagagtctaagttaataccgaacgctatggaagctataacgtcagtacaaaatcgaccggatgcgtctttgaattgtacttcttgaatgtgagaaccttgcttcaaaaagtagtttgtgaaattgtcacagcattcctttattaaaacaaacatgtatttcatcttgctgctggtgaatgtggggcttacaatggatctcatgttcttccatcgttcgccttttaaagaaaagatactttttccaaataaaggatcaagatcttcgggaatatatgtcctacgatcagtaaaatgctcaaaatctttaatccaaatttgtttgattaaatctgggtctctcaaaattagaactggatttccaaactggtaaatgccactatacctagtgttcggaaactccccgtaccaagttgttaccagatcggccacacttttctttttcaaaaacacgaaagtatccagaaaagaagcaaacaaacctttctgctttacttcatttttcctccaaaacgttagaggcacaaatacatagtaatacactgctgcacagagagcaacgagtagtagtaatatcaataacattttcctcaaatacctacttttattttattttttataatacgcaagtcaagtgtcttagtgcattgcaaaat

SEQ ID NO: 7092 - DNA, 1725 bp, Diabrotica virgifera
  SmartBlast Evalue=2E-77; Info=Female neotenic-specific protein 1 n=1 Tax=Cryptotermes secundus RepID=A6Y7R8_9NEOP
ttttctgattgtatttttttatttagtataaaattttaaaaagtggtgtatggtttctgagcatatctgttataaatatcgacccaaccgtcttgcctctgttttttaagatcagtctttatagtcagagtttcgttgaggtccaaatattggaagttgtttggtttaagggttggccagtagtttattcccaaaatgtcagtagattcagatgttgggttcaagtttttggcaaaattactaagtagaattcggtatctttggcttgttaaaacatctcctggtggaaaggtattcaaattcgtgttattaccaattgcccattcgtattgaagttcatcaccatgagctaccttatatgctccttcgtagtatggacgaacccctgggatagttccttggtaggaaaagtggtaaaaatatacgtcactaaactgggattgtagcttggcatgttgaataataggtcttccaaatgaagtatcgctgaaaaattcaacggcatctccgagatgatcttggaattgtccatttgtataaacctttttaacctcagcacctacaatttgtttttggtttgcatcatgtatctgcatatcttcttcgaccagcttggtcaggtcattgtctagcccaacagcggtccggtacatactctcaggatccattccattccaaagcatctcttctgaattaattcccatgatcaaaggaactcgctgtgcgttaccactttcaattatggtatacatcctttccgttaagaaggcagtctcatgttcttgttcaaggactggcgtgaaaagaaatccggtaatggggtcgtttttatcccagacgtctagaagtgtaagagatgcatttactaggttctccggggcaacactttgcaaaaaactcatcaattcctcagaagttgaatttgggttgaaatttggatttatgattgatgctatcttgtaagcgatagctttgtgtttccattgatatccccatggacaaagtgcagatccactttgtgatattgcagctctaaataaacctgtcgatttttgatttagcagatgatgagtcacggacgctcctcctgcgctttgtccaaatatcgtcactttatctgggtctcctccaaaggattgaatattttgttgaacccacttcaaagcaagctgttggtctttcaaaccgtagtttcctggtataaccgtatctccagtagaaagaaatcctaatataccaattctgtatgaaactgttacaacaataatgccttgttccatataataatgaggcccgtaagtgtaaaagttagcggtaccgccaataaatccccctccgtaaaaccagaccataactggcaatccttggtttggcaatggatacagcggtgtgtaaacgttgacaaataaacaatcttcattttctcccgaaactgggtcggcaatttgttggtaacaaactttgtcattacgagtagcgtcaaagacaccctcccatttatcgactggttgtggttccctaaatctcaacgatcccgttggaggtttagcgaacggtatttgttgaaacctatagaatggttcaccctgagtaccagcttcctcacttccttgaacttgaccatttggtgtatcaacaataatttgtgcattggtatacacacagataaataaaaaataaattaaatgtaataacattgtgataagttaactcaaataacttaaa

SEQ ID NO: 7093 - DNA, 1721 bp, Diabrotica virgifera
  SmartBlast Evalue=4E-62; Info=Pheromone-degrading enzyme n=1 Tax=Popillia japonica RepID=Q2TIL3_POPJA
atggtgatcattaaatacctgttttctttgtttttaacgtatcatttagtaaaaggtgatgacgttatagtaactataccaaatggccaactacgaggaagattagaatattctctgagaaagaatgtcaccttttatgctttccaacaaattccttttggaaagccaccggttggagaattaagatttagggaacctcaaccagccgaaccatggagtggaatattagatgcaaatcaaaataccaaagcctgctaccaagttaatgatttccttaacataagcagtatacagacagaagactgtctgtttcttaatgtttatacaccaaaatacccatcaaccactaactcctatcctgtactatttttcctctatggaggaggatttatgggaggagcctctacctttaccgcagctggcccacattatcttattgaaggtgaagtaatagtagtgacggctagctacagggttggtccatttggttttctttcaactggagacgcagcatcaccaggaaattacggattgaaggaccaaacacttgcgcttaaatgggttagagacaacattaaatattttggtggagatcccgataaagtgactatccatggagctagcgctggaggagcatcagttactttccatctagcaagtccacaatcccgaggtttgttcagagcagggatttcccacagtggatcactcttgatgccttgggcttaccaggatggagctaaagaaattgcttaccgattagcccaagctatcgatggcaactttgatccaactgctacaactgaagagttagtacagtttttgagatcagctaccgctgaccaagttaatatggctgccaaaactttccaggaaagcattggtaatgaacaaatcgtccaaggatttttctttggtccagttattgaacaaccgagtgaaactgcttttattactgaaccaatgtattcaactatcgaaggtggaaggatgagcaaagttcctttgtttatcggtatcaactcagaagaagctctggacagaatcacatattcgtatttcccagggtctgtccaagcgtacgatgctgatgtcaagcagttagtaaatagaaacatgcatatacaagacgatgctaccaaagaaaccatcgggaatgaaattagacgcatttatactgatggacgtttgcaagacaatatggctgctgctataaagtatttcagtgatatgtcatttacacgtccacttattcggcacgcccacatgcagtccatatacagtgacgtttacttctaccaattttcttaccatggacaattaggaggaaacagaccatatcttgaaggtgccgatagggtagctcacagtgaagaaggtaactatgtttggtgttacggaaactggtcatatttggaatactggccaccagccgatgtcttgaccagtgaaagatttcgtaccctaatgaccaacttcgtaaaatatttaaacccaactccaaaacgttccaaacttttggataacatcatttggccgacagtgaaaaactacgatttcaagtacctaaacatcaatgatactttaagtattgagactgatcccaaaaatttaacttatccccagtgggttcacttgtacgacgatgacagctacagaccatttattacttattaaatgtaatacataatatgtaataataaaggagtattttattaaaa

SEQ ID NO: 7094 - DNA, 1724 bp, Diabrotica virgifera
  SmartBlast Evalue=1E-144; Info="CG3209, isoform C n=1 Tax= Drosophila melanogaster RepID=Q9W1B5_DROME"
tataaataggtgacgtaatatgtaggattctttatttactctgctttcaatcttctggagaattcttcttgttgcctctccttccattctttctttgctttgactctcttcaatcctccatcccagactagatctactaatcctccctgtttcgctatcacactttttaccctgtttgcaaaatctatagctgattcattttctctttggtacatcggaggtaaataccaaacatcgcacactattgcccagctagtcatcatcatatacaagtattgtaccatggaaaatctgctgctgttccagaaagcatctccaaacctaggatcgtactttatagccactgggtaaatcacactgccgacttcaaaactgccctttttgaattgcatgaccgaggtgttgttaatgcaagtaccttcaggaaagatcaaaatcggggggttcttagggttgctgacgtgttcctttaacctgtttgcaacggcacttctgtctctagtctccgacctttcaaaccagatatgcggtgaagctctggctaaggctctttggaaaattcctaagaaaccaccatgacgttgaccaatcagagcataacaattatccgtcgataaaatcataacgtctataggtgaagtgtgattggccacacatactgatcctttagctggcctccattgtttattgtgtacactgatttctgctgaaatacattggcacattaccctaaatccaatcttgtaaaatttctcattgagccatcttcgaacagatccgcccgggcatgctgatagtgcgaatgttgatattatcagtgagagaaacccaaagcagcaaattatcagcctcaaaggaaataagaagaaatatctaatgaagaatccaccgagccaaaggaatgtaagtttccatgatatgaattcataaccacgatttgtgcgtatcaacaagttccaatttttcaattcttcggcttcgaatctcgaagtgacttgatcttcaattattgcttctactccagccttaacatactcgaatacgtttgaaagctcataatctttgaatttttcctccttgacggcttcttcagtcttactcgtgggtggttcgggtacaaatattaatccttcgtctcggcttatcacattatttcctccatttaccagaccgttggctaaaggaggttcctctgcgcttttttcagattgtgtaatttcttcactgtatccttcatctatgtcttctggcacctctttattcctatgatttaacgacgattctatgtcttttcgaccgtactcgaaaatcatcaacaatgttttcacatagagtcgtcgaactcctaaactcttgccaatagatgccaaaaatataatacacactaagagcattaaaaagggggttaagaggatagatccagctatagacaggaccattaataacattgccatcgtctttaagttatcacttatatttacaatcactaaaaacgaaattttacttttaaaatacttataaacgacaccgagaacttcacttcatcttatcaaaaattaaattgaattgaaattaaaatcggaacttgttaaacttatgagcatgcgtttgtgatctttttggacttaaaatcaacaaggttttgacacttttgtttgacgtctacttggcatttggtgtacttctggtgttttttaaatgatgacgttgcgtccggagaataa

SEQ ID NO: 7095 - DNA, 1720 bp, Diabrotica virgifera
ttacttttactaattaactatcattaaataaagtaaagaaaaatattctctcacaatactaattaactatcattaaatagtattgtgagagaatattttatttttataaaagaaaaatttattttttgtaccttgtgtatcagggattattaattaataattatcccctcagtaataaaaaagaataagttgagattgtctagaaaataacaagaacaattgaaaggttttaattttgaaagttgaatttataacgtcctcataaatatcacaaaaaggtgttaaatatgtctcggatattaaaaatattaaaaagaatgaaatcgtttgaattttagacatatttaacggttgatcttttaataatcactagttaagtaataaccgaaagatctgacagttactacacataaaaatctcctgaaattcattacgtatgagcgtacactatcacataatcccccataaacaattgtcacttttaatcacttttttggagtctcttctctcccccacacttttttatagtctttcgttcataaaaaaaaagtgaaaatccaccactgatcactatgataatcgtaacacgatagtactgaaaaaacggagattttgttggactaaatttcttcagcaatatcataaacaattttaagttagcatttttcaagaaattaaaatagaaagtttgaaactacatgggtaactttgttgtttcaaaatgacgatagaataattgctcataatacattattatcatatatatcaaattttatttaacataaaatttatttaaagttacttttctgtcaagtttatagaagcaaatgaaaagtacggatttgtatttgaacaaaatatcacataaaatctattttttaatttgcaacattaatacatacctacacagcactagaccaaaaattaaacattaactggtcaataaatagaatgcacgcaaagaactatttcttgtattccaatcattattacaagttagcagttcttagttgtactcagaaaaggttttattttttattataaaccatgggtcttgtctaaccccccaaactggaggctgagtatcaataaatcgcggcttggaaattgttctacgaggtacaataccttgccatgcacgtcgtctatagacaattcctagttccaacatgaaaagattataatatccatgtttgtccgtctaaagatctggtctactggcaaggatcgatgccaccgtaaaccaatcatctcagcggaaataagggcacatgcgacaattgcctagtaaagtcagattttttttgagcctttcgactctcagaactctaagagatactgctgtcacctttgactagaaacgatagagccttagaagcgttcaaggatgatcgcaaggatggtagcttcacaccattatccgctcaagtaagtacgttaaccaaatgtccgaacctgcggttcctcacgtactgagcatgattactatcgcaacaacgaatcatcagtagggtaaaactaacctgtctcacgtagtagtcaacaaaaatgtaagtatactagtattacttacatttcaaacatttataaatatttaagtttgatcacagacacaataaatattttagataaaataatcaataagacaataaagaatcaaataattgtctaatttaaaaaattatctttttatcttgatttcacttttaataaatttccg

SEQ ID NO: 7096 - DNA, 1717 bp, Diabrotica virgifera
  SmartBlast Evalue=2E-91; Info=Glucosyl/glucuronosyl transferases n=1 Tax=Aedes aegypti RepID=Q17GE2_AEDAE
gcacaatgtgtcttgccagtttttatcagtttgccaacacgtaatagttttataaacatgtttatttatttaatctgaaaatactttcgaagataaccaaagaaaataataatttttctctaggtagaatcactcattatctacaatgaagtccacagaagtgctaacgtttctatttttatcatgtgtgtgttgcaccagtggttataaaatcttgggaatattccctttcgctgccccgagtcactattttttagggaatgaacttatgaaagggctggctagagccggacatgaagctactattttgacggtttttgaagaaaagaaaccacctaatgataactataagcagatttttatggatgggttctacgatcaacaaatgcagctttttggtcatttgacaaatatgtctcaaacagacaatcgacaattcttcaaaaaccctctcaaggcgatgttcggtttcttcgaaatattgcaccaaataactgaacaaacattaaatcatacaaaaacccaacaattacttcaagctaaaccgaagtacgatgttgttatagttactcaattcaactttgaggcggtaaaagctattgctccatatttaggagctcatctagtggtctttaacaaccatggtgccggttcctgggtaaaccatcttgtaggaaacccatcgctaccgtcatatgctgcagaactgattctaggatttacgggacaaatggactttaaacagagagtaataaatacgatgttttctataatgcaatatggatacttccagatctttcaatatccacgacattctgaactagtgcataaatatctttcaaaagatattgacatttacaaagttgtatacaacagttccttggtacttcttaactctcacatcagcctgaccaaatccagtgctttggtaccttgtatgagagatataggaggatttcacgtacagcctcccaaaaaacttccagaggacttgcagaaatacttggatgatgctaaagatggagtcatctacttcagtatgggatcaaatgttaaaagttctacgttacctctagaaattaggcaagctttgatgaaagcgttttcaaagagaaaggagaaagttttgtggaaatttgaagatgataatatgcctggaaagcctgccaatgtgaaaattgagaagtggctgccacagtctgacttattggcccatccgaatattaaactatttataactcatggaggatttttgagtacaattgagacggtttatcatggagttccaactgtagctattcctgttatcgccgatcagatgaagaatgctagacagtcagaaagtgatggctacacaaaagtcatagaactgcaacagctaacagaagaattactttcctctactatcgaggaagtaatatcaaatagaaagtatcgtgataacgtcaaaacccgttcaaaaatctttcatgatcgacaagtgaaaccgatggatgatgcagtgtattggatagaatacatcgtaaaacataatggagcaaaccatttaaaagtgaactacctcaacatgccttggtatcagtattatttagtagatgtttttgttgttgtatttagtgttatatttatagtgttatttgtaatcaaaaaaactgtatgttttatgctaagaaagctatgtaaaaaaagtgataaaatgaaagtgaaaaagcagtag

SEQ ID NO: 7097 - DNA, 1714 bp, Diabrotica virgifera
aagaagtttgtgtagaagtagaaggggaactgatgttggtaagagaggagttattgttggaaagaagtttagttttgaatttgttgatagtttggatgcaagagtttctgattgaagttttttgtgtgagtgaaatggaaagattctgaataaccatgtcggtctctatggaaagactctcaagatctttgatagataaattgctaggaatggagtgtttgaggccgaggtttaagagttttaattcgtcatcagaaaattggacatttgagagatttttgattcttgggtggaatcgaaaattggaataatttttattacgagaagctttttgttgatcaagtctaatcttattgttgattaagtgttttaatttattattgactctattaaatttaactgaatgtgaatgatctaccttatcctgaacgtctgacataaaagaattaagattaataaattgtaaagtttcaagtagagaatcatatgttacctttagcttacattctatgtagttgagtttactgtaatgtttacaaatctctttcttcatgagtttaatctgcatggaggtcctgatgttaggatgtacattattggatgttctaactctacaaaatgttgggaagactttatgatgtaaacatcttgaaatgaaccatatgtccagctttatgttgctccgttgtgtggctaatcgcaagtattgtagcgccaagttgaccatactgtcatatataaactaaaagggaggttccctaggttggctgtataccatatagttaaaaaactctaacaagaagtaaaaccacttctatgtaaattggtatatttattaaaacttaaaaatcccaatggattgaataaaaatgtccaattcagaacgttttcagacctatcggtccatcatcagtgaatctacaataaaataagtaatcccactattagaattgaaagatggttgaaatttttaaaagctaaaaatgtggttagattacttacgtgcatacttgctaaatagccccagaaccaaacaatggttgaatttaaaattcaatttacattatttaaaaataatattaaacaggctaaacgccgatgttacaggatattgcctatgggaacatggtgaaaccctaccaaaacctcaatcaaccatcttaggccaactttgactataaagtgacactaatgactaaggaactgtttgaagtgacattgacagtagagaaaaaggtagtcgattttcaatgttaattaaccaaaaggtcatgacccacaacaaatgataaagattttaatatctgaaaaatgtctaacatttcaaatctattggttattgaaaagaaattgtgatatacaaaattaatttagaatataagattatttatattgactgtataccataacattagattgatcaaattgatagaaagaaagtaagctgctgtcaataaagataaaaagataaaaatagatgaaggtgagaaaagagaaaaatcaatattagttggaaagttattgtacaaaatgaataaattggtaggcaatttaatctagtctatattgtattggtggttgtatatgtaaaaggaaaatattgttatttaaaaatgcaagtttttgtaaataaatggatttgagttaggatacagtcaaataattaaaaagtgtgtaatatgtgaatgaaaaagaattgtaattattatgagat

SEQ ID NO: 7098 - DNA, 1717 bp, Diabrotica virgifera
  SmartBlast Evalue=0; Info="Tyrosyl-tRNA synthetase, cytoplasmic n=1 Tax=Camponotus floridanus RepID=E2ABW5_9HYME"
cttttactcaaacttgccgaaatttcatcatttgttgcccaatttgtttcaatattgttctgattttatttaaaagcggcacttaaacatagtatataaccatggttgagaacagtacattaactatagatgaaaaatttcacctaatatccagaaacctgcaggaaatattaggtgaagatagaattaaagcagtattgaaagaacgtgatttgaagttgtattggggcacagctacaacgggtaaacctcacattgcctacttcgttccaatgtccaaggtagcagactttctcagagctggtgtagaagttactattctttttgctgatcttcatgcgtatttggataatatgaaggcaccctgggaacttctagcgcttagagttcagtattacgaacattgcattaaagctatgcttcaatctattggagttcctttggacaaacttaaatttgtgaagggaacagattatgaattgtctaaagaatacacactagatgtttacaaaatgacttcagttgttactgaacatgatgcaaagaaggctggagctgaagttgttaaacaagtagaaaatcctttactaagtggtcttctatatcctagtttgcaagcactggatgaagagtaccttaaagttgacgcacagtttggaggaatcgatcaaagaaaaatctttacgtttgcagaaaaatatttaccccaattaggatacaaaaagagggcccaccttatgaatccaatggtgcctggattaacaggaactaaaatgtcctcgtcagaagaagacagcaaaattgacttacttgactcccctgccaatgtaaaaaagaaattgaagaaagctttttgcgaacctggaaatattgaaaacaacggccttctttcttttgctaagcatgttatatttcctttattaaaaccagacgagaaattcgtgatttctagaaaacaagaatatggaggagacttgaacttttcagtatatgaagatctggaacaagctttcgccaaagaagatgttcatccaggcgatttaaaaggagctgtggaggtatacattaatagattgttagatccaattagaaaaatttttgagtctgcggaattgaagaaactatctgaaaaggcatatccatcaccaagcaaaaacaaagcccctgccaatcaaaacgctactaccgatgaaatcgttccaagtagattagacattcgcgttggaaaaattgtcgaagtatcgaaacatcccgaagctgatagtctctacgttgaaaaaatcgatttaggagaggaaaaacctagaaccattgtaagtggtttagttaatttcatacccatcgaagagatgcaggaccgaatggtggtggtactctgtaatcttaaaccggcaaaaatgagaggagtggaatcccaaggaatggttttgtgtgcttcggtggacgatcccaaacaagtagaaaccctcatcccgccagaaggtgccgtccccggtgaaagagtagtaatagaaaatttcgaagacggaaagtccgatgacgttttaaaccccaagaaaaaggtctgggaaaaactgcaagttgacttgaaaacaaactcagaatgtatagcacagtggcagggaaataatttagttacgaaatctggcggcaaagtacgaagtaaaaccatggttggtgctccgattaaataagtgctacttaatttgtatatgta

SEQ ID NO: 7099 - DNA, 1713 bp, Diabrotica virgifera
tgccttttataagggattttatcgtttttgttattaaataataaaagtatatttttgataaaagtatatatgtattgtaaaagtttaagagcatcgaagctgttcatcaatttaggaatgaatctaaatgtacaatcgtatgtaatttagatctattaagacgcgacgttatacattttacggtgttcaagcgatagttagtgacgatgcatcctaatgcaatacttgtagtagtatagtctctatagactgtcttctggtgcaattttctattctagtttgatacacatatttttatttgttcactatacatatgggttgtgctttaaacagcttcgaacagaatttattaataagatggagataataaggctgtgttgaaaaatcaaaaaaatctttgtgcttatttttaacaacgtttttgtcgtctgtacaaaaatcttacacaaacgcaaagtgtgacttatattatagatagatctatagatatagaaatatttgcttcaaatgttcgtacacaaaagtaagatgaaatttctttatatacacgacagtttctttgttagaattaaaaacgaatcactatatattcttactatataaaaactgctacgttagaaatatttatcaaatatatattctatgcatatatgcaacaaatggcagctcactcaacaaccaaagcaccaaggacagatgtattatgtagtgtttggttcttgaaatcatgctatttttgcaagtgttatatcaataaatactagcttgtttagaaagttttgtagcgaagtaaaccatcgttattccttaaaataaaatcattattctatttcagtgccaaataaaacaaagttaactacaaaatttgctaaataggatttgtgaatagttggtatgtctatgtctatttactaagatttattattttttagtgtgtaattggaaataaggccgctatgaaatatgtgatctccatctgaaagtattgtattctgtttcattttatatgaataaacttattttgaaaatgtatcatatatttatgatttataaatatcgcttttagtatttgataaaacattcctttaatatattgttttgtgatttatatggcagctagtttaagaatcttgaattttgatctcatggtgagatacgtgcaggtttttgctgcttacagaaaacttttagtttgaactattattctataccacctttatatcctagaatatttttttcttaagtatgctatccaaaactgcagctgtgtataaatcttgaggtattaactctctaaagtttatggcgaacatttttaagtactgattttatgcatttgattagattctgctgtagtgagagttttcgtaaaaactacatcttcaattgtttccattcttcaattttcctgtctcgtcaatatttatctttgcatataaaatatagtcaatttttgtgttatattctctagggaaaaaatttagctacgttgaataaaagtactgattaatttagattaaagtattaatacaatattgtgtaacgtaaaattgacagtgtttatttacatcattggtctactaaagtatttttgagatgtgccttcaactgagctgcaataagagttagcttagcaatctagtagtagaaattttgctcactgccatttgttaaaagtgtatatcttcgatttttaaataaacaacgtatgat

SEQ ID NO: 7100 - DNA, 1715 bp, Diabrotica virgifera
  SmartBlast Evalue=0; Info=Similar to CG3590-PA n=1 Tax=Papilio xuthus RepID=B2DBN3_9NEOP
tatctacgtaaaaggtcaaatacgataacaaatcttcaagtaaacccaagtattaacaagttactatctataaaaggttatataaaggacacttgtacaaaacatcaaaaatacttagttgctgtatgatatctgacgacacagtgatcataaacttgtgctgaaagacgggcataaagtgtcatcttaacttttacccagtataatcagtgtttgttttgaaaagtccattaccatggccgttcctgaaggtgctgcagtcttgaggacctataaatacagatctccattaagtaccagatatgccagcgacgaaatgcaatacaatttcagtgatcacaataaattttccatgtggagaaaactatgggtgaacctagcaaaagcagaacaagaacaaggtttacaaattacagatgaacagatcagagaaatgcaaaataatgtaactgatatcgattttgaagaagcggaagcagaagaaaaattaaccagacatgatgtgatggcccatgttcacgtattcgcaaagcagtgcccactagcagctccgattatccacttaggagctacatcttgtttcgttggagataatacagatttaatagttatcagagatggtctaaatatcctgattccaaagctagccaatgtaataaacaatcttgcccgttttgccaatatgtacaaagatttgcctacgttaggttatacacatctccaacctgcccagttaactaccgttggtaaaagagctacactttggctttatgattttcttatggatgaagtagccatggatagagcaataaatgatctacgttttagaggtgttaaaggcactacaggtacgcaagcttcttttatgcaattatttaaaaacgatagtgaaagagttagagccctagatagaagagttgctgaattatgtggatttgaaagaacataccctgttactgggcaaacttattcaagaaaagttgatgtagagctggtatctatgttggcatcacttggtacttccattcacaagatgtgtagtgatcttcgattgttggccaattttaaggaaattgaagaaccatttgaatctagccaaattggaagttcagctatgccttacaaaagaaatcctatgagatccgagaggtgttgtgcattggctagacatttaataaccttgttttccaatgctgctaatacccatgctggtcagtggttagaaagaactttagatgattctgctaacaaaagattaaccctttccgaagcattcttgacagcagatgcagctttgatggttttgatgaatattacccaaggacttgtcgtttaccctaaagtgatacaaaaaagaataaaccaagaacttccatttatgtcagctgaaaacataattatggcaatggtaaagaaaggtggagatagacagatatgccatgaaaaaatcagagtcctttcacatgaagctggagcacaagtcaagcagtttggaaaagacaatgattttcttgacagggtaagagcagatccatattttaaaccaatagtacctgaactacaatctcttcttgacccttccacctatattggtagagcttctgaacaagtcactgaattttaaatgacgaagttaatcctattttgtcaaaacatttaaaatatatttacgaagctactcctgttaatctaaatctttaaatatgatttttata

SEQ ID NO: 7101 - DNA, 1715 bp, Diabrotica virgifera
  SmartBlast Evalue=2E-89; Info=Sterol O-acyltransferase 1 n=1 Tax=Harpegnathos saltator RepID=E2C2T4_9HYME
ccctcgtatgtttattcctattaaatatcagtgattccaagtcttgtaacaaccaaaaattaatattagaggttacgtcatctacctctttaaatatttcttggctcacttctacaataaaccataaaatctagaaaaatcatatcagaccctcaaattgtttgaatatttgcaatatcacgcaatacagtcacacaagtaccatctgggtaggaaccaatacttaaaagtatactcaggagcagggttgtttatcctagcgtagtactccaacgtgtagaggcttgccatcaatccggcaccaaacatcataccataccagaacagtatgttgtagaacttcaccttgggtactctgaagttgctgatgacagcagcaattaagtagcagtagaggatgacgggggtgtagaatttgaactggtatgccaatacccattcgtggataattcctgatagagcgaatactgctagtttgcctaatactttgttgcctttggttaaaatatgaatatctctgtagacgtaggtgtacagccagtcgtggaccacgcagttccaagttctaaagaattcttccgtcgaaacacaattccaccaattcttataaaactgtctatctgcaaatctaagtatctcggcaaacaaattttggacggaatgtatgacctggtagaacccagacaataaaagcagtagtccaggaagagagttttcaatgatgggaataattacttcaccccatgtgaacttccgcaatccaaactcgcggtatgctgggaagacgaacctgtgcaggatgaagcattggtagatgatgactccgatgatttctagaaaacggaaggctacgaagttccatcttatatttgtggtcctgggatattcatctctgtagacaattgttggagcaaacaagaaatacagataattcttaaacttgggtaaaatcaattcttggtcgctgtgtggtttgtagttcacaactctttcagcgttgtgtctaatgtaagcatggattttcattgacagtctcgtctgttctaaaaggattattgatgaacaggctactggtagatcgtagtgtactgttataaatgaagacattacgaaggacattaggtagaacgcaaatgtcaacaccagccataatctgtcccatgttttcacagctgaattattagggatcaacttcacacgaacgagagcccagaacctgaagacgatatgtacagaacttgttacaatcacaaatagtacccagaaaaatgccgagatgtggatttttgcaaatgaatctcttattaggtggaaaccaagactgaattccccctttaccatatagtcatttgccaaaatactcgtgaacaggcaaaatattgtggcaataaaaaagttctgtatcgatgctatatgaggtaccttgttgcatagttcttcaattagcgaatcccttgcttcaaactgcttctctggtaatggtttgtactgttttatttttatatttccattcatttgtttattgcagtgaccattctgcggaatggcattcgttgaattaggactcatgattcctaaagcttcctttccttctaatgtctaaccgaaacacaagtccaccaaaccagtgatgctagtgatgcgcctggaaagaaaaaactctaaaaacgtcagatctacacgcgtactttccaagtacgacactttcactatcc

SEQ ID NO: 7102 - DNA, 1716 bp, Diabrotica virgifera
  SmartBlast Evalue=2E-99; Info=Ras-like GTP-binding protein Rho1 n=21 Tax=Metazoa RepID=RHO1_DROME
taggaaaacaatttatttaattttagaatacattatattgaaaaatttaaagctattacaataataggcaactggcataatactagaaatgttgccaacaaataaatatttttatttcaaaattaattttgagacttaaaggacaacaggtggtagtaactacccttatacaagagatgacatcactgttagtccttttagtcccagtgcaataactgcaacacaaacatttttttgtgtatctgttagtcaaaagttttaatccacttgtttcatttgcagtgacttctaatcaaaacataataaatgtgctgcagtcattgaactaaataaaaatcaatgggtactctgaatatctgtaaaagataactatagatacagaaaaaaatttttgaaacaaaatatattgatcaggttataaaatataaatactataaaatgaatcaacgtatgcttgtaaattagtactacaatgatgatctaagtggacgttcaataagttttgtgcacatgacactgattatatcatttaccattgtataaaaaaagcttataagttacacacccctcactggaagttcatcaaaaatcgagacaactaaggatatttcaaaaatcaaaattttacattaatcaattaaaattcatagccaaataattgcaatgtgcaatactagtttggtggggaataaagaaacaaaataatgatctattctatattaaactctaaaaagtaacttgctacatcgttgtgttgttttaaaattaaatttctgggtcgtgtaactctaagaaccaataaacaatgggttaaatacatatgaaaatataacttaatacttaaatttgtccacaaggagaaaaggagtttgaacaaatagaactgaagagaaaagtaggggtttattttgttagtcaatacatcatgcagaagcccccttgaaattaattaacacacgtaacgattattaatataaaatatagaatatgtagtggctcaaaacattacacaacggggcttcttcttctttttgacttgcagtgcagctcgggtagcattttcaaaaacctctcttacaccctccttacttttggcagaacattctagatatgcaaaagcattgattttctctgccatggatcttccgtcttgaggttttactggttcttgtttcatctttttaagttcgttaatggtagtaggatcgttacgcagatccttcttattgcctaccagaataattggcacatttggacaaaagtgttttacctctggggtccatttttctgggatgttttctaatgagtcgggggagtctactgagaagcacattaaaatcacatcggtgtctggatatgaaaggggccgcagacgatcataatcttcttgacctgcggtatcccataaggcgagttctacctgctttccatctacttcaatatccgccacatagttttcgaatacagtgggcacgtatacttctgggaactgatctttactaaatactattaaaagacatgtttttccacatgctccgtcaccaacaatcaccaatttttttcttattgcagccatcggaccttttccgtagtcctccttatcggaacagcaacaaaacattcagagagtctctttgcagtgttactcctaaattggttagcgttattctaccactttctaacaaaatcatacaattttagaaattaatggataag

SEQ ID NO: 7103 - DNA, 1713 bp, Diabrotica virgifera
gccttggtgtgtgttatctatgtccagctgaaggatttacttactatgttatatttctacaggtatatagatatgattttgcagatctctttttattttcctccgtttcagttcattaacaaaataaattctttctattttgctcataatccctctggagcagatacaaaaatgttattatttgatagaatcaaagaaatggtttcaagttctgatataataacataactcaagtgagaaattgacgtttaataatttagcttaggtaaaatgttttgtactattgtcgttgtgttttctttcaattacgcagaactaaaaaatgctctgaaaaaactgtgttaaaaataacaattttgttaaaaagggtgaaggacagcgatatgattcagatacctctcaaaaagggtttaatactataatatattcgatattaatgacatctagtatcgatttaaaacatctaatactcctgaaatacttgaaccaataaaaaatattctttgtggcatgttttgtcctaccacaatgaaaaagaaagagaagaaaaataaaaatatattaaattttacaaacatacgaatactgtttatagttcaaataatcagttaataaacacaccaaaacctgaaaaagtaaaataggacaacttcaaaaacaggataccttttgaaacgttgatcattcaattcgctgtgtgtcaccctatatgctatttagtataatttacagtaagacaccttgtattttgtagcgcgtttattggatattttgaggacttttaaatcctgttagcggtgtagtgagaaagtactcgaaaagtacaaggtggtctttgtataaaggttgtcacttacttgcccgttgtcagtcgcgacagtttgttccgtgtacactgtatgatttaagttcgctgtgaggtgtcaaatgtcatgatgttttcttttcgtttcttattatttccaaaattgtagttagggaataacttattctgcaaatatactatagcccatgatgttttttcgtggtttgtcattaaactcaaaacatcctagcaaaaacagaatatgatcgaataatggccatagccaccactattttgcaacaaatctattgtcttttgcttataaggcttttcatcgattgtcatttgtttcgagctcctgtcatatgttgtataatctgtgtataatattaatatacacggattatacgacatatgacggaagctcgaaacaaatgactgtgaatgaaaagccctattgagatctaacgtcatttgtggcctaaatttgagacaaatctccctatcttgtcgatctgtttctggcaagtacgcgacaaccttttgcgaaagtttgtaatactgaaaaacatgtagataggacctttagatttaacaaaaaacagtaactctagatggtcatttttatattaaatatctaggtattttattaagtttttctattctagcgcttgttttaaataaaaaaagttcatattttaaagtgattattatatactgatagtaggtagagattattttgttgtatgttctcgtttatgttaaaaaaagtctaattgttggatattttggtaaaatttttaaaaatctagatgttaacaactgtgaaatcaaaccaaaaaatctgaacgtctattgatatgattgagaatttctaggttatgagattatgatattttaaagattaa

SEQ ID NO: 7104 - DNA, 1707 bp, Diabrotica virgifera
  SmartBlast Evalue=1E-45; Info=Transmembrane 7 superfamily member 3 n=3 Tax=Murinae RepID=TM7S3_MOUSE
gtgacgtttccgttggattcctagtctctctaaatggtcgattaggaggaaaaggtggttttcctctttgcagcctaacttgagtaaacacgccaaaaattaataaggcagcccaaagcaggatgtgcagaatatctgttgtctgcatgggaggagaaataacagcataattgaagtctttaacagcaactcttctgtaagtgtttatcaaaatatatggaaggttcccacctacatagaaatttaaagccatgacgcatgcgtaggagctcgtaaaacttatagatgttatgtgaccatacattgcgtctgccatggatattataacgcatgataccattatggacacgaacaccacccagaaatttatgccattaataaagatggtgatatcagctagcacagtataaaataatagagaggctgtcaaaaatcctgagagaataaatgcgatattgatgatcaaaaacggcattccacacgttcgccatatgattaaccatactataccatatacaaagcctaccgagaaggcagtaattgtttttcagtcatagaaagatattcttccacagatataacaaaatacgtagccattagaccaaaagtaaaacttacaacatacaatgtcaatctaaaaaatcgatgtccaaagaaacacagaaagattccaaaaattagttgaaaggcacatagcactttccagtgtacagcaacaggtccaacacaatcttcctcccaccttgtcacatcacagccatatgaaactgcaggaatatatgctgacttgtggtttttaaatgtagaaactatagcaaacacttctccagttccaatataagaactaaataatctcatatacttccttcttccgggaatactaggcaccattgttccatatttctcaatatcattaacagtcaacatcttctcaatacttttaaaatacgtctctggtgatttatcatattcgtacataaaaagatgatacatatctacttgtactgtttggttatcacagctttgtcctttggttgatggtggttgcgacttaacagttatcagttcatctgtgtgtgatgtaatttgatatggagccacctcaacatcaaaagaaaggttgcatccaccaggtactggagcttgatcatcatagacagcaactactatcaatacatgtacaacaggatttaacttatgtgatctttttaagtaaaaagtgtcaatactatcgttggatactaagcctacgtttgctccagtaactgatgaaccatgtgtaaagtttggactattggataaagttatattttccagatatgtatgcacttgaattatgaaaaatccaacatcattttgaatgttggaaatacttataacagtcaagttatcgttcaaatcatagtattctttaaaagcatcgtatttgtgtgtgttgggatggtaaacagctaaatttattggtatggtctcacaactaactaaacttataatagcagcacaaaaaaataaaataataaacttatccatgtctagtactattttaaatagattagaagtaatcctacacaatttgaaaattcaacacttttaaatcacattttaactgataatgggatgattttatgcttagaaaacttaggaatcaaaatttagcatacacataacaaaataaaacaaaacaatttaaactgcgactgcgatgtt

SEQ ID NO: 7105 - DNA, 1712 bp, Diabrotica virgifera
  SmartBlast Evalue=0; Info=Glycerol-3-phosphate dehydrogenase n= 2 Tax=Bombyx mori RepID=B0EVL7_BOMMO
gagcaccgagccgaaaacgtcgtgcagtgcggtgcagtgcacacgtgatttcccacataacgcatcgcataataaagcagttctacattctactgaagtgtatgcatgtcatgaactaaaagaaagtaaaaaccagaacttcagatggcttcaagatttaaaaagatcgcagtaagcggcataacaggaactataggagctggaattgccacttattatcttctgcgagatgacggcaaacaaccatggcctacagctgtcagcgctaaagaagccagtttgaagccaaaacgtatactgccgacgagagctgatcaaataaaatcactgcaatccgaaaaatttgatgtcgttattattggtggtggagccactggagcaggatgtgccctagatgctgctacaagaggtctcaaaactgctctaattgaagcagatgactttgccagtggcacatccagtcgaagtacaaaactatccacggaggagtacgatacctacaaaaagctattatgcagttggactacgaacagtacagaatggtacaagaagccttacacgaaagagccgtcatgttgcatcaagctcctcatcttgcccatcctctgcctattatgttacctgtttatagatggtggcaagttccttattactgggctggtataaaaatgtatgatctcatagctggtcgacaaacagttaaatcatcctactttctctctaagaaaaatgctctagaactgtttccgatgttgagaggtgataaattggttggtggattagtgtattatgacggtcaacaagacgacgctagaatgaatttagccgtagcagttacagcaacagttcatggcgctacaatcgcaaaccatgtgagcgccacaagtttaatcaaagaaaagagagatggcaaagatatcatttgtggtgttaacgttaaagacgaagtcactggaaaaacatggagcattcccgcgaagtgtgttataaacgctaccggtccattcacagattctattagaaaaatggataatcctaaagttaaagaaatttgcgcaccgagcagtggtgtgcacatcactttgccaggttattacagtcctgagcagatgggtcttctagatccagatacaagtgatggtagagtcatcttcttcttgccatggcagcgacacaccattgctggcactacagatttgccatgcaaagtgacgcacaatcccaaaccgactgaagatgagatcatgttcattctggaagaagtcaagaattatcttaatccagacgtagaagtaagaagaggagatgtgctctcagcatggagtggcatcaggccgctagtttcagatcccaacaaaccagatacacaatctttagctagaaaccacatcgtccatgttagtgaatccggactggtcacaattgccggaggaaaatggacaacgtatagatcaatggctgtcgaaactattgatgaagctatcaaagcttgcaacttaactcctaaatacaaggacagtcagactgatatgatggtactctatggcgcccatggctggacaccaaccatgtacattcgcttggtacaagattttggtttggaatgtgaggtagcacaacatttgtcaaaatcatacggtgacagagcctttgccgtagctaaaatggctgcattacaggtaaagatggcctataatcggtaagaagctcca

SEQ ID NO: 7106 - DNA, 1711 bp, Diabrotica virgifera
  SmartBlast Evalue=1E-141; Info=Yellow-1 n=2 Tax=Tribolium castaneum RepID=D1LZL0_TRICA
attctcatcgcgtaggtacacacacaaagttgaaaactcgcccgatcaaaatgcgccggtactactcgcactattctttgttgttgctgtcgttgtttttcgctgccgcgaattccgaaaggtttagggtcatcagagaatggaagtacataaacttcacgtggcccaatgccgatgtgtacgataatgccctttctaggggcttttacgtgcctgaaaatatcattatctcgggaataaagttcttcgaagattactattacataacgctcccaaggatgaaggatggagtacctgctactctagctagaattcccgcaggacctacagctgttactgctccagcttttgaaccttttccgtcttgggagatgaacgctgaaggggattgtaacgctttccagaacgtacaaaatatagaaatagaccctaaagggcagatgtggattattgacagtggcaggactgaaaccttgactagtccatcgtctcggtgtcctccgaagttggttatttttgatattaagaagaatatgaccacgaccgcttacacttttcctgataatgtggctagtttaaattctaacttcttgtacgatattgtggtggatgatacagactcaggattcgcttatattacggataacagtgctaaagatccaggtataatcatcttttctgtaaaagaccatcattcatggaaaatccgccattcagagagcatgcgggcagatccaacagcaaccacttttagagttaatggtgtcattattaactctccgctgaatttggcaagtatctcattaagtccacgagttcttactactagcgagggaaaacttgttgtggatgacgacagagaagtgttttacagtcccatatctagtcttaagatgtactctattaataccactgtacttaagaacgaacagaatggagctaataatggagaataccagggaaatgttaatacaattggtatcaaaggatcacaatcagcaggtatgttaatggataataaaggaatcctctattatactttgctgggaaccagtagcatagcaaaatgggacatacaaactccattcatgtcaaaacaacgcattatagcaagagacgaaaaatacttacaatggcccaactcattcaccttcgacaacagcggcaatcttaccattttggtaaatcaactcaacaagttcatctacgacagaattgatatcaaccactggaactatcgtcttatatcatcgcatacaggaggagaaagttatatttacagccaagcctacgattacgacgttcaaccaaagcacaacgaagaaacaggaagaactggtacatcaacacctaatccagatgaaattctagagcataaaagtgaacccgccgtaagtccagaacctacagctgaacccatcgcaacgatagtacctaaaccagcaccagagcctcaagccgaacctgaacccaccgcacaaccagagcctaaagctgaacccaaacctaaggcggaacctgagcctaaagcagaacctgagcctaaagcagaacctgagcctaaagcagaacctgagcctaaagccgaacctgagcctaaggcggaacctgaacctcaagcagaatcaacacagacgaaccaaacagtcacaacagaagaaaataccaaagataaatcatcagcttctacgacagtttcaactattttagg

SEQ ID NO: 7107 - DNA, 1710 bp, Diabrotica virgifera
  SmartBlast Evalue=6E-58; Info=Female neotenic-specific protein 1 n=1 Tax=Cryptotermes secundus RepID=A6Y7R8_9NEOP
ctaatttattttttattatcatccaatacatgaaatttctaaaatgtgtccaatggtttaatagcgtattttgtatatatctccaccatctttggatgcacatcttgtttaagatctcgttgaacttctaaagtgttgtttatgttcatatactggaagttctttggctttactgtgggccaatattctactcctaaaatgtctgtataatcagagcatggatataatctttttgcaaagttggtaacaagtatccttaatctttcactcgctaaaacatcatcctttgtaaaagtatccaagttcgagacgttattttttacccagagataagggtctatatcggcatggtttattttatcagcacctgcaattgtaggcctccatcctgcaaaatcaggaccgtaataggaaaattcgtaaaaatagacttcactgtactccgactgaagaagggcgtgttgcataatacctctagcgaaagacgtgtcactgaagaacttaactgctcttccaaaattatcttggatcagtccatctacgtaaacctttctaatagcgttaccaacttcttctctaagagtttgatcagtcaggtgcatgtcatcgtttacaaatttcgttacgttgttgtcgtatgtttccagaagtgctttaaaactagtagcgtttgcagcatcccaaattctttcctcagacgatattccaatcataattggtacttgcagcatgtggccgttatcaagtgcagaatacattggttcagttattaaagcatcttcaccttcaggttctattacaggtgcaaacatgaaaccgctgatcaactggtcttcaaatgctggtagtttccaacttgcatgttttagatcgtttgcagatactcttaaaaataaatctctaacttcgcgggaaggagtattctcatcgatacttgaatttaaacttttcgccatcatataagcatattttctagcatttctttggtagctccacggcgacaatgacgaaccactgagcataacacctccccaaaacaagccttgatttttcttgctcataagttgatatgctacagaggcactaccagcgctgtgtcccatgatcgtcactctagctggattaccaccaaatgcctttatattttcctgaacccatttgaaagcgagatgttgatctttcagaccgaagtttccaggtatagattcatcttcagtagacaaaaatcccatgagcccaactctatagtttgctgttactacgatgacatcatgttccatcatgtaatgaggaccaatctcgtcaaaggttgcatatccaacaacaaaacctcctccgtatatgaaaaatatcacgggaagcgactcatttgaagagggatacctgggtgtgtagacattcaaatataaacaatcttctgtttcttctagagctggatcatccaccactccttgtgatacgcaaacttttctgttttctaccgtatcaagaacgccttcccagttatcagcaggttgtggagccttaaatctcaaatctccaactggaggcttagcaaaaggaacctcttgaaaagcgtaaaacgatattcccctttgggagtactcttgtcgacctcgaataacaccatttgatgtcgtgactaaaatatctgcattcgcagatataaaaatgcctagaaacaaaaccaatcttataatatacattttt

SEQ ID NO: 7108 - DNA, 1708 bp, Diabrotica virgifera
  SmartBlast Evalue=1E-105; Info="Exonuclease nef-sp, putative n= 1 Tax=Pediculus humanus corporis RepID=E0VYV1_PEDHC"
tcttaatttatctgaatttatcatctacttttttttccatgtgcaatgtgtataaagaacgtgaattaaaaattaaattaaattcacattcaagcttgagacctcttgaattattacgactaataattataatagtgcatgtgtaaaaaatcaataattacgtgttgttaaatagatgtcagacttgccatgaatcagttactggtatggcaaaagtatgacaggctcttcgaaaaggaaatttcgtttggaaaataaaaagaaaaaaatggcggcgttaatagatattgttaaattaaatgaatatgatcgaaaccagaaaaagaaacatctaaatgttgatgaaaatcttagtgtgcctccagttagggagccgagccccaagcgattgaaaactgaagatagtgacgaagaccaaccaacactaacatccgagccacctcccctcataggcgaaggcgtaaaaccaaaactcgaaggtgaagcctttctcgaattaaagagaatgttacgggaaaaaagcaaaaactaaagaacatccccacaatccggcttcgggagctaggagaaaacgccagtttgaacgtagaactggacgacagaatacccctcttcttgtccgatctccaacacctcgtcatgtattcccagataggcgtccacgccccttacttgcctagtagatggtgtgctctggagaagtacaacaagctcgtaaataccaatttgataatcatagaaaatgcgtcgctttaccattatatggggtatgaatcgatgttcccttttctgagttcgacctttgaaattaaactggaaatgatcactcctggttcgtataatagtgatattgttaaggatttatcgatggtcccacttactggtacacaaatgaagaaatttactaacagtttcggtagcctcgaaaaagccgttataaaatgcgaagaagttttcgacacggttaaaaacttcttccccataatggacccagaacctagcgaagatagcacgtcagcgcataggaaacttcccaaaaccgacaagttttcccgaacggatttgttgctctcaggttggcaaatggtcgaagagaatttccctcttccgattaaaggattaatggaacgaaagtatcagggatacgtgttaaccaaggaaaagtacaaagatgccacgtcgttcagtcctatgtttgctgtcgattgtgaaatgtgtcggacctctacaggtgatttggaattgactaggatttcttgcgtgaacgaaaagctagaagtattttatgacaccttggtgaaacccgacaacgaaatcatcgattacttaacaaaatggtccggtataaataagagtatgatgaaaaacgtgtctaaaaaactgaaagacgtccaagaagatctacaaaaagcgctaccaccggatgcaattctaataggacagtcgttggccaatgatttacacgctcttaagatgatgcatccctatattatagacacaagtgtaatctacaacctgatgggagacagaacaagaaaaacgaaactccaaaccttggcccgagaatatctaaaggaagacatccaagttagtcgcaaaggacattgttcgtcagaagacagtttagcctgcatgaaattggtccagttgcggttaaggaaacacctatttttcggagatgctgtgatgggtggcgtaaagaacgacg

SEQ ID NO: 7109 - DNA, 1709 bp, Diabrotica virgifera
  SmartBlast Evalue=1E-100; Info=Cell cycle progression n=1 Tax= Aedes aegypti RepID=Q16U20_AEDAE
aaaaagtgtggttacgtatagccccaaaaaatattaaaaatatccaaaataaaatgtaatttaactttaatataaacaaatattctccctggacaaaatgtttaagttaacgaacgtatttcaaaagagttgtagcagaagtaatggactagtgccatttataagattcaattttgcctcctcctcatcaccacaattaaagaaaacgaatacagaaagtgaagatgttagtgaaaaggcggaaaatcgtaaaaggctcgtgagggcacctcagccgcataagtcaatggtggcagcagcatttgcatcattaaattctgaggaagttaattcagcaattaaaacaccacaaacagatgggaaactctcgaaagctaccaatattgaagaattactgtctgtgtcagaaggtacaggagtatctagacgacatgctcttaaagttgtttcaatactatccgaatggtcatctacgggtaaagtaactatatcagagtttgagaatgatccaaggttcattaaattgtgccacattctaacaaaatcaaatatagccataaagaatataaagacaaattcacgcagtgaagatttgtcaacagtcctaagtgtcacagctgatgatgaagctgctaaaatggttgcaaacattactctccctcagatggtgaaagtaatgtcaacattgtcactaaagaaaagaagatctacgttgctgttaagatccttatcatataatataactagaagtactgatcaattgaatttgaaacagtgcagtgatttgctattttctatggctactctaaatttccttgatgataatttgttgtcaagagtggcaggtgatattacagttgaacttgagaagaatattaagaggagttcagtaataggttctattttgacaagtataggcctccttaagtataaaaatccagcgttgttggatattcttagtgaatggatacttggtaatcaatcaatttgtagacctcaagatgtctttagcttattaatgacgttagctgttgtaaactacaaaccaaacaattcagaaaatttatttaaggttctgttaccacagttgacattgtctgaggcagggaaaccacaagtttggttagatattgtctggtcattaactctactaaataaagccaacagcagtcatgtgtccagtgttttagataagtcgtttttagatcaattagaagagccgttgagtttttccacaaaattgaaattattaaatatcgatggtgctgcacagtatttgttaaataattacgacggcccgagattaccgtcagattcagaagtgaagaaattggacgtgccacaggcaaaggataaaacagaaatggtgacgtctattctggatactttaaaaaatttgattcagtcagatcaacttattcgaaccagggtgaatacagaatatgggttctgcattgatgcagaatgtgtattagacaaaaaatgcagtcctttgcccttagaccaagctaaaataaatgaagatgctacaagggtagctatattggcgtttgactaccacgacatgtgcagggggaaagtagaaccaactggagtaaacaactttgccataagagttctagaagcacaaggttataagatattgaccatacctttcacggaatttcgagcaagagataaattagtgaatcgagtacaatacatagagt

SEQ ID NO: 7110 - DNA, 1706 bp, Diabrotica virgifera
  SmartBlast Evalue=1E-117; Info="Vacuole membrane protein, putative n=1 Tax=Pediculus humanus corporis RepID=E0VMP9_PEDHC"
cggtaatgtgcgtaataagtggctttttgtccatatcattataaagttgcaaaggttgggaaaaacgatggcaggccatggaaagaagaaggacgcaacgggaagccaccacatgaacggcggttcgacaacacaaaccaaaaacaaaaaacacaccgacacacagaaaaaagaaaaagagaaaaatgagcgggaatctttagtgttgtggaggaagccgcttaggactgtagaatattttattagagaatgtatagagttagccactatttacggaaagaaaattttagcaagtaaagttatcctcggagtgatttcactctcagtattattattgtacatattagtaaattccaaaggaccacaccaagcgctggtacaaggggtgtataaacaattgttatggtgttcatattgggtagggttaggcattttgtcgtcagtaggtttaggtacgggccttcatacatttttgttatacctcggaccccacatagctcaagtcactttagcggcgtatgaatgtggtagtttagactttccagagccaccctatcccgacgagatagtctgtcctaccgacgggaaggttggagtaatctcgttccttagtataatgtctaaagttagactggaagccatgtgttggggtgccggtacggccttgggggaactaccgccatattttatggcaagagcagcaagactatctggtattgatccagacgatgaagacgaagacctcaaagctttcgaagaactagaaaagaaaaagaaacaccacagaaacgagttgaccttagtagaaaaaggaaagttgttcgtagaagacattgtacaaaaagttggcttcttaggaattttggcttgtgctagtattccaaaccccttgtttgacttggcgggaatcacctgcggccattttctagtcccattctggaccttcttcggagccaccctaataggaaaggccatcatcaaaatgcacctccagaaaatgttcgtcatcatcgctttcaacgaaaccctaatagacactgccttagactggttaaaactagtccccgtcgtcggagaaaaactccaagtacccttcaaggcgttcttgaacggccaaaagcagaagcttcacaaaaatgccccagtaaccacggagggtggaaacatcttgggatccattttcgaaaaattcgttatcgccatggtgctgtactttgttatttcaatagttaactcgttcgcacaatcgtaccacaagcgaataaacaagaagaaaaataccaaagctagcaaagattaggcaaatttttgatagacaagttcctagtgtacataatttttctagaagatgcaagatgtattaaaaaaatgtttgcgcgaatgaaaaatagtttatattatcagtgataatttttatagtctcaacaacaataatttaatatttgaattttacaacatcaattacataaatatacaggtattttcgctgcatattttggtgcttttaatcgctatgtatataaaaaaactgtacaatatatccaatggctgggtttgctacttttgttctctttttatttgccacgtttgcttccacttcgctagtcttcagtctttttaaatattattattcttttttcgccgactttttatcttctttccttttttttaatgacgtcactaataagctctcttgttatttcagc

SEQ ID NO: 7111 - DNA, 1706 bp, Diabrotica virgifera
  SmartBlast Evalue=1E-136; Info=Tropomodulin n=1 Tax= Harpegnathos saltator RepID=E2BYX3_9HYME
aaaataaggagagtgtctgctagattcggattctgattcatatttattagtttttcagtggaaagccgcgactatgtgcctctgaaaggtcaaacttttcttcttcgggactttcttcgggtgttgagtgcgtgtttccgggttcgcgggtgctacagtgggctatgggccatggagttctttcaggaatggtcgtccctccgagagacgtccacaaagactactacaaccacaatgaccacccctgcaaaactatatggaaaagatttgagtgtttacgatgatgtagatgttgatgaactactggataaattaacggctgaagaaattagtattttagcaaaagaggctgatcctgatgatagttttttacctccctcccaaaggactagttatgaatgtgataaggatgcaacagggcccatcaataggaaaaagttaatagaacatataaataaggaagctatggaaacccccgatatacctgaattggaaccttacgttgctggcatggtacgagggaaaaaatgggttcctccgcctccgccagcgaaagaacaagaggctgaagaacagattgccgtagatttaggagatgaatatgaacaagccttgactgatgcttcacaggaggaaattatagacttagccgctatccttggtttccattcaatgatgaaccaagaccaataccacgcgtcgctcttaaacaaaggccaaccagttggtttaggttgggacggtatcacaaaagcctccaaacccaaactattccccatggatccacccaatatgacagatacagaagaaacggtcaagaaagtacaagacgacgatggcaaattcatcgatttaaattggaacaatataaaaaatatatcagacgaaaaaatcgacagattgttcgaggccctctgtagcaacacacacctcgaaacgttatcgttagtgaattgcggtctggccgacagacacatagagaagctgggcagggcgatcgaggagaacggtaccttgagggtgatcaacgtcgaaacgaactttatttcgccccaaggcatcgtacggttggttaaagccctgctcaagaagaagactgtcgaagaatttcgggcggcaaaccagaggtcacaggtgttgggtaacaaaatagaaatggaaatcacccaactcatcgagaaaaatccgacgatattaaggctgggattgcatttagaatacaacgatgcccggcatcgtatcgccaaacacctacaaagaaatattgacacaaaaaggcgtctgtctagattgggtgccaccagctcatagtctggtcattgccgttttgacccgcagacgccgtactgggcaattgcccagaaactatttagtaggttatatcgcttgaagctaagagctgtttgcgctgttgtcacatctcatgagccctgtcacgagtcacgtaagaagaaagaaggaagaagagaagacagtccgtgccgaattttaactggtagttttctctacattagttttattttttaattgtacagtttacctctgctaaaatttttcgaaggtggcaaatgatctgccaaatacattttttgatatgacaaatatatattatcattcgaataattatttatgtaatcaactattctaaatgggaaataagccacaatttgaactaaaaaaagtgattgctgtcgttgtcaaggtac

SEQ ID NO: 7112 - DNA, 1700 bp, Diabrotica virgifera
  SmartBlast Evalue=2E-98; Info=Transposable element Tc3 transposase n=1 Tax=Lepeophtheirus salmonis RepID=C1BSK0_9MAXI
gacactatgttttaaatatgatttctggcatatgaccgcctcgtctggctctgacgtagtctaatctggaggtccagttttcgactttttccaacatttgtggccgtatatcggcaataatgcggcgaatgttgtcctccacttggtcaatcgtttcaggcttatcggcatagactagcgacttcacataaccccacagaaaatagtctagcggtgctaaatcgcacgatcttagaagccaattcacaggtccgaaacgtgagattatgcggttaccaaatgtttccttcaataaatccattgtggcacgagctgtgtgacatgttgcgccgttttgctgaaaccacagcccctgtacatcatggttgttcaattgaggaataaaaaagtcagtaattatgactctatagtggtcaccattgactgtaacgttctggccagcatcgtttttgaagaagtacggaccaatgattccaccagcccataaggaacaataaacagtcaatttttctggatgtactggtgtctcaacatacacttgaggattatcttcactccaaatacggcaattttgtttattgacgtagccattcaaccaaaagtgagcttcgtcgctaaacaaaatttgcttatgaaaatcgggatcaacgacaatttcgttttgcgcccattcaccgaatctacgccttgctaggtgatcgtgtggcttcaattcttgtacgagttgaattttgttagcacgcaaaccaagatctttccgcaaaatcttccataaagtggatggacacagatccaactggattgattcgggtcttaatctatgctacgctcaacagcagcaacatcttctgtacgacatatctgtggatgcatattatcatttagagtacacgtggtgcgataacgtttcacagttaatcgaattaattgctctgatgggcgattatgtatatcataaaatggacgtagtgcttgatacgtatttcaaacagaaccataattttcaaaataaatttgcacaatttggaagcgttgttcaggcgttcgtctattcatattgaaatgtcaaaccaagctaaatataaatcacttgacagctgtcaaaatggccgccaattaaaaaagtgttatcaacttatatttctatacctctgaaaaaaacacctgtatacttttatatgtattagtatccaatgtaatctgttaggccctggaatttattatctcttctatatatgtggaattaagaataatatttcacggtgtttttatgtacagctttaaatctagcagatgtgaaggataaatatcaaatacttcagattttagacatagctgaatgttatttacaggatcatatcattcgaccaacacctgttgcttatatggcccactaattatgacttctatggaatagatcaatttaaaattctaatacctaaaacaaaactacagatctgattacattagcctttatctgatgtgaaagtagaacttgtaatagagaggaaacctttgctcagaaggataataaaagcttcatttagtcatggccaattgtagaaatcacaaataaattaaaatacataatacatttggcttacttttttattagtccacttaatgcttcccggctgtacctaataaaacaattttaagtaatatttgacccaattcatcaacacagtcatctaggaatt

SEQ ID NO: 7113 - DNA, 1706 bp, Diabrotica virgifera
tccattttagaggtttataattcttactaatatttttatggatgaaatccaaactgtggaagtagttgttaagataagcagagcttaaagtttatttcgcaaaatttagaatgtcttataattaagagtataatagaaatattttggaatacattttacataagaaattttcgtattttgatatatagcgtttttgtatgattatataataatatcgtatggtatttttaccggggtgatcctttcggacagcttccggtcaattgcagctttaaccctgtttcaagtagctagtgtcaatgcacactagcctaaggggaccgacagattttcgtgtcctccgaagtacggtgcacggctcgtatcatttatagaaatgaaaatgtcgttggtgtcgagatttgaacgataagcttatttctgtgtcatattaggtccccctaacattggcgctaagcagaatttaaaatattatgttgtgtagcgtactttttaccaaaagcacaatgttaataatgtcatggtagctcgggaaggacccatttgtgagccctttagacattctaaggcgggtcagttgtgtcgctcctatcgtccagactatgcctataagaacctactcttcgccgtttctggggtccaagctatttcgagctctcccatatctgctagaaccagcagggtctctaaatatgagctctttcgtgccgttcctcacgtctaatgctttaatatacttgtggtctcacagaaagccacaattctatttagaggtaactccttcattgagctcggttgcgtaaaggtcgaatccaggatctttcacctctgaccaatcagacaatgctatcttgcattcaagaatcaacttagagctgatttgcttgggtgcttccagagcctttagaggtgcttgactgttcgaacagatataaatggatctatctggacaagccctatcattaatttgtctgaatacaatccttttacagttgaaaataatacatcctgtaatgtcgcattactgtgtccaaaatgttgcttttggcaacattgtggatatttttctgctcggattattttcgggtaatttatcgcagctcgttcaatcctaattcatcatttaatgaaaatcttctgattttataataatttaaataaataatattgttataatatggcgtattttgactcataaaaaacaaatatgagataatcataattcatcagcaatatgttctacattgtcaaggttatttgccaacaggtgacctaaaaagctaaaaataatttttcattttaaataaaaatacttgaatattgtttgctatactattccagtcctactgtggatacaacaaaaatgcttgattcttgacttttgtcacattgaaaccaataccaaaacaaataatatttttaaacaatcaatccaacaaacgaaaaaaccatcaaaaccatcgaggtacactattttaaacatactgatctttttatggttcatataaaaaatgctctatatcattaatgcgaaatcttacagtaaataattatagtgcctgaagctgggaagaaagggtatgaagagaaaagcatgaaatgctgggatttttagagattatgtaaaaatttagtcatataagagtagttctaagaatccatgtgttgatactataagatttattaagaaatatatatcatagctg

SEQ ID NO: 7114 - DNA, 1699 bp, Diabrotica virgifera
  SmartBlast Evalue=1E-162; Info=Cytochrome P450 9Z4 n=1 Tax= Tribolium castaneum RepID=D6WWU4_TRICA
agtgattagacggctgatgtattgttatttatttaattaagattgttctcacgagatcaacatgttgtcattaatactatttggggtagccttggccctcttttattatgttgctataaaacctttgagctactggaaggaaagaggagtaattttccaggagggagctctatggttgctcggaaatcaatggaagttctttttaaatcgtcaagatatgtttgaagtatttgaagatgcttacaatgttgcaccaaatgctagatatgtaggtttctatcaatttacggtaccttctttgatgataagagacccacaactgttaaaacagataactgttaaggattttgaccatttcgtcaatcatcgaacgtttataccacaaggtgctgacccactttggtcaaagaatctactttcattaagagatcaaagatggagagatatgagatcagtactaagcccatcattcaccagcagcaaaatgaagatgatgtttcatctcatggcgggctgctctgagaatatggtaaaacatttcttgactaaaaaccaagaaatcatcgatgtgacgtttaaagatgttgcaacgcgttttgctaacgacattatagcttccactgcttttggaataagtacgaattcttttcagaagcctaaaaatgaattttacttaatgggaaaagaaattacgagtttttccagtttctggaagaatttaaagatcatgggttttataacaattcccaaaatttttaagcttctaaagatcaatctctttgatgggccctcaagggagttcttcattcgtctcattgaagacactttaaaaatgagggaagaaaaaaacattgtcaggcctgatatgttgaatcttctaattgaagcaaagaagggtatacagcataaagatgagcaaaatggagtcgatgatgggttttacacagttcaagaacatctaccaggaaaacacatgcaagattctaaggaaatcacaaacgaagatattaccgctcacgccttgatattcttctttggtggttttgactcagtttccagtactatgtgcttcgcagcacacgaattagcaacccatccagatattcaatccagattgagagaagaaattgaccgaggatttgaagaaggtaaaggaaaaatgacatacgaagtgttgatgaaaatgaagtacttggatatggttatttcagaatgtttaagaaagtggccaaattttcctggtattgacagagaatgtagcaaggaatatgtaatacaaccagaaagtccggatgaaaagccattaatcgtggaaaaaggatctattctcgttctacccattatgtcgattcaccacgatgccaaatactttccagatccagaacgattcgatccagaaagattcagcgacgagaacaaggaaaaaatcggggagtatacgtattttcctttcggattgggtcccaggaactgtataggatccagatttgcgttgcttgaaatgaaggcattgttttcacatctcctgcatcattttgagatagtaccgattgcagatacacttattcctccgcagttaatgaagagaaattttaatttaatgcctgttaatggaatgagattgggattgaaaagactataacaagatttatcaatatgttactaaaactgtatttgattataattttaatgtataaac

SEQ ID NO: 7115 - DNA, 1706 bp, Diabrotica virgifera
  SmartBlast Evalue=5E-59; Info=Female neotenic-specific protein 1 n=1 Tax=Cryptotermes secundus RepID=A6Y7R8_9NEOP
agttaaactatggctcatctaaaattgttggttttttgtgctattatttattttgccaaaacaggagttacttcaccagcagatggatctactaatgatgatttaatagttacattatctacaggaagtaaagtacgagggcatgtacttcaaagttttgaagggagtgacttccatgcttttgagaatataccatatgcagaacctcccactggcaagagaaggtttcagccacccataccaaaaacaccatgggaaggaatatttaatgcaacttctaccaataaagtttgtcctcagtatggttatgatactgctgaagaggactgtcttgttgtaaatgtgtataggccagtgaaatctaatcatcaagagttattacctgtatttttctggatatacggaggaggtttcactaatggacttggtagtctctatgatcccaaattttttattgattatgatattgttattgtaacatttaactatagggtaggagctttaggtttcttaaccacaatcgatgataatattcctggaaacttgggtcttaaggatcaacttcttgctcttcaatgggtacacgacaacattaatgtctttgggggcgatcccaaacaagttacagtaggaggtgaaagtgctggaagtatgtctgctggattccatttgctcagcaaattagcccgtggtttatatagtggaataatccaacaaagtggttcaccattatattcaggcttctatccatcaaataatcgagaaaaggcatttgagtttggaagacagttaaatagttcgttcacttctagtaaatcgagtgatttattaacactattacaagaagtaccgctctcagaaataatgaagcatcaatcaacgcaacctatgtcatgggctccagtcatggaggaaaaactcaacgataatgcttttgttagtggacccatgtacagcagcgttctcaacggggaattcaattttgttccaatccttattggtattaattctgaagaatatttgttgtttgctgatattaacagtgatgactttaaacaaaaagcaaaatatttagatgataatccaaaggaaattgtacctgcatctatcaatatggctgaagaagttagagaatatgctggcacagcattaaagagtctttatactaactcatcattctcggaagacgttcttggatttataaaatacttcagtgatgaagtttttggacgaccttcaacacgtcaagcagaagctgcatctcgatatgttcctgtgtatatgtatgaattatcttggtataacaaaagtaacctccttccaggtgttgaacattcagcagatttgtattatatgtggaatgtaactttcgaccaaacagcaacatacaatgatgcccttcgcaaacctatacttaagtggtggacaaatttcattaagtatcaaaaccctactcctatagaggataaagatctacaaaatgttatatggccaaaagttgaaccggggtctgtgaaatatttggatattgattctacatttgaagtcaaagaaaaccctcgaaaatattatgaaattggatctattatcgatccgttcataagagaaccttttatcacttattaaaataatatcactgtaaaatgtatatcacttattgaaataatatgtaatgtaatgagtctattaattgtaatggatagtat

SEQ ID NO: 7116 - DNA, 1703 bp, Diabrotica virgifera
  misc_feature (1583)..(1583): n is a, c, g, or t
  SmartBlast Evalue=1E-140; Info=Otopetrin n=1 Tax=Aedes aegypti RepID=Q0IFL7_AEDAE
gagtaaggttatgctatgagtgtcgcagtgagatatgattttgatattgttcgttttgtggaactattcaatgattcttctgacacatctaaaaaagaaggattggattcaaaagaactgggaaaattaaaaagaaaccgaagaattggagaagatgccctgtctatcatactatcagcattatatgccaagttagttgttgtgctggggatcgcctttcccgtaatcgaagttatctctaatgaaaaaccttacttctaccagagtttttacatttatctttaccttggaagtattctcttcgtaacttatatgtatgctacattgattaaggaaaaagccttggtagagatgattaacagctataacaatgaaaaattgaatgctattagaactcccaacaaaatagttccaaaatacggaagtttttatttgagactaggagcaattgcgttcggtattggaagtatggtctactcaggtttagaatttggccgatattttgagctcaagaataatcctgaatgcaattcaaatatccttcaagctctaactcctgttactcgaatggtccttacgttagttcaagtgcagtttatatttctaaacagtaaggatattgactttaacaagcacaaacttgtagccagatttggtataatgcatatgatagctacaaatttatccgaatggttgtatgttctggttgaggagaccaaacacgaaattgttcatttagcagaacatcgaaatacaggtaatatttcgctcaataaaaaattctgccaagagggacttgtgatgagctcgttagtggccaatgcgagtccttttttattcccgtgtaccattgaatacagtctaatctgtgccgtaatactctttgaaatgtggaaaagagtcaagatgaccgaaaaaggaaaagatggagaaaaggataagaatgtccggtttgataccgggaaccaaaaagttgccacgcattttcaattcaatcaatatggtggtaaagtagttaattcaaatcatcattttacaattgattgttccaatgctcataaagggctctttgcagggatattggttattgttttaactataatatcgcttataatgttctttgtatttacaaatactccaaaaaacagtggaaatgttgcaacatttgaagtaaatattgtagaattaattttgtacgttgttaccagtattgctgcatttgtcgctgcggtgaaaatgagaaatttaaaatacgatcgaaaaattggacatgaaggaaacagtacaggaattggtctagactgcatcctgcttgtcgttgcccaaactggaatgtttatttactgcgttttttccgtcataggttgctgttttactgtaggtaacaataacgaattggaattggcaaccgaaattttttcgttcatacagacttgtattcagaccatcttcgtgctagatgcctggtggcgcagatgtaaaaaacattgagcaggttcgagtcaaacctggaaaggagttgattacgtttttgatcattgctaatatggctatgtgggctatcaatacattggagaagaacngagcagagtttatgccgaatcatctgcagttctttggagattgggcttggacgatcattacccacgtttctatgcctttagctatattttatcggtttcattcgactatatgtctgttcg

SEQ ID NO: 7117 - DNA, 1694 bp, Diabrotica virgifera
aaatgttataattaaaactgttcagtttttgggaatttaaatattttgcagtattattttttatataaaaaggttagataatatccataaactaagtataaaacaggagttgctattaaatgaattttaaaattaaaattactttataatatattttttaatgattgacagggcatacattggtccttcgactcggatatagattgtattgtacatattgaagtactgagagccattaataaatacagtatacagataaaacactataagatataatactattttttacgtaaacacataaggactgatatttatccatctaactaaagtcaaatattaaaatacatttttttaaacgtcacttaggataaataacgctagtacgataatatcggtatcgtaaattactctgtattatatatataaaaaaagaaaataaatatgataaaatatacatccaaacaatgttaaatagtaccattacgtcttaaagtgtacctatggcaaagaaaaataagtataatgtttggtcttattcaactattttaaagaacttcacctgaaaattcgtaccaaactactgcaacttgcacttttcacatagaaaccatatattgtattacaagactatcacagaaaatgaaaaatatgaacagatttgtacttattacttacacacatcagaatcactgctgaaataattgcttgtatacaatgatgaacaattgacaggtgcaaataagaatctcacaaatacaacatttagggccggttgttcgaacgctaatcaaaaatggaatcaactgatcattatcaaatatttaattactatcaccaactgtcaatgtcaactttgttagggttgctgaaaacataattgattataattatgagatttattaatcaattatgttaattatcataatgaaaatgataataacacaaatgattacaatcaactgattgacgaacgaatgaggggtgttgttatttgatggttgttaatgggacttacttataatcaacttcttgattagcgttcgaaaaaccggcccttacagttcgaagaaatttttttggtacacactgacatggaaattcaaacatctttataagatatagcctcagaaagaccctatgtaacatgcagctgaacattgatacaagaatacaagtcttccgatgttgttttccatccttttataaggaggagaagcctggaccttgacaaaggtaacatctgaacgactacaaaacttcgaaatgtggtgatattgctgctttgctcagaattgcatagtttcattatgtcacaaataacaacatgatctaatgtgcaaaaaaaaatttgaagaaatatgtactaagaaaatcagaaaggtattaaacttagagtgttcaacaagaagtaccaactaattcagataattaaaataacttattgcgacaaacgacatcggggctgaaaaatatgatgacacgtcaacaaagtcacatggaccaaagagattgcaaacatccacagagataggcatcatcaccagaataggcacacaaaagaatattataatttcccatgatcgtaactataagatatcacaaattctatgaataatggattgggtagccaggtgagtaaaccaggacagagagtatggagagagagaaagatagataagacagagagggcgatg

SEQ ID NO: 7118 - DNA, 1704 bp, Diabrotica virgifera
  SmartBlast Evalue=0; Info="Fumarate hydratase, putative n=1 Tax= Pediculus humanus corporis RepID=E0VIN8_PEDHC"
cgaaaataaatattgtaatgagaaaacataaaaatcaaaagtatatatacaaaaaatccttgtaaatccgtatttaaattactgaatatatattttttacttaggtccaagcatatcttcaggtttgacccacttcgcgaactgttcttccgtaagaagtcctaacctgatagcagtttccttcaaagtgctattttccttgtgagcagttttcgcaataagagcagcattatcatacccaatatggggattcaaagctgtaactaacattaaactctcgtgcaataacttatggattctttctttgttggcaacgataccgtcgacgcagttcttggtgaagcacttggagctgtcgcccagcaatcggatagatctaagtacgttcgacacgatcatgggtttgaatacgtttagttcgaaatgtccattggagccaccgatggtgactgctacgtggttgcccatcacttgagctgctaccatggtgatggcttcgcattgggtgggattaactttgccaggcatgattgagctaccgggttcgttttctggaagggataattctcctagaccgcatctgggaccagaagctaaaaatctgatatcattggcgatcttcattatggatactgctattacattcaaggctccagaaacctcaaccatagcatcgtgggcagcgagtgcttcgaatttatttggtgctgacgtgaatggcaatccagttagttctgagattttggctgcacatttttcggcgaatccttttcttgtattaagaccggtaccgacagctgtaccacctaaagccaacatcctcacccttggtaacgtagcattgattctatcgattgcaaaagctacttgttgggcgtacccgctaaattcttgccctaacgttaaaggtgtggcgtcctgggtatgggttcttcctatcttgatgatatctttgaactctttggcctttttatccaaagcttcgtgaagcatcttgagatttggtaatagagtgtgttctatttctactgctactgcgatgtgcatagcggtgggataagtgtcgttactactctggctcttgtttacgtgatcgtttggatgaacgggggttttggatcctagtttgccgcccataatttctatagctctgttactgatgacttcgttggtgttcatgtttgtctgagtaccggatcctgtttgccagattacgagaggaaagtgttctgagtatagttttcctgagatgacctcgtctgctgcttgagagatggcatcggcgacttttgggtccaaaccgtagtctttgttgacaattgcggctgctttctttaagactcccatggcagtaatgactggatacggcattcgctcaaattctcctccaatggggaaattcataatagatctaacagtttgcgccccataatacttgtccaccggcactttcagctctccaaaggtgtctttttcaactctgtagtcagccatatttgctatttgaggggtgaaagattctctgtaatttctgaacaaaaacgtaattctcgctcccaatcgccggctgggactgtataaacgcgataaagccatgattattttcttttatttatgcgattctagcttcacccctgaccctttcacctcccgaagaaaagcaccagtttttcgttcaaaacactacacacaaggacacctagc

SEQ ID NO: 7119 - DNA, 1708 bp, Diabrotica virgifera
  SmartBlast Evalue=0; Info=Protein kinase C and casein kinase substrate in neurons protein 2 n=3 Tax=Apocrita RepID=E2A2F4_ 9HYME
ctcaaggttcgagttggttgtgtcgttgtgtcaggaatttcgtaccttcggggttttagactttttttatttctgaaaacaaaataaatatcaaagcaataaaattctgttgagttgaactagtttattctaatttcgagcgagtgaagacggtactactagaacagcaagtgtggatacagtgatcaggcgaaacactagcatatcacgtttctatcatgtcccaccatagcgacgacaacatgctcatagcgaccagcgactcgttctgggaaccaggcaactacaaaaagactacgaagcggatcgaggacggatacaaactctgccaagaactgatttcgttggtgggcgaacgggccgacatcgagaggaactacgccaaatcgctgaaggcctggtcgaaaaagtggaacgatgccatcgagaagggaccagagtacggtaccacggaggcggcttggaagggagcactcgtcgaggccgacaggagatgcgatcttcattctcggatccgagacagtttaactaacgacgtgataaataaagttaaacagtggcagaaggacagttatcataagtcgatgatgaatattaaagagaaaaaagatatggacgataattttaagaaagctcaaaaaccttggacgaaactgctacagaaagtagaaaaaaccaagaatgactatcacacggcctgcaaaacagaaaagtcagcctcaaatcaagaaagaaacgctacgggcgacacatctttttctgcggatcaggttaaaaaaatgcaagagagggtacaaaagtctaaagatgaagttcagaaatgtcgagaaaagtacgaactatctctacaggaaatcaatcaatataaccccaaatatatggaagatatgactgtcgtcttcgataaatgtcaagaaatggaggctcaacggctcaacttcataaaaacagttcttttcgaaatacacaagtacctcaatttatccgatgatatcacgttaaatcagatatacgaagaattctaccacacaataaataacgcagactatgaaaaagacttaaaatggtggtcgaacaaccacggcgtcaatatggccatgaactggccgcaattcgaggaatacactgaggagtttcgtgacatccacaaaggcaaatccaaagatagctcgccgtcgggaatcactttgatccatcagcgaccagtgggagaagatttgcatgattactcgactcagaaatctatcaagaaggaagtgccaaacaaaccctcaactgtggtaacacagagtactgaagttaagccaagaatagaagctagcagtagtccttccaatacaataacaaatggttcggtgaacaaagccaatgaatcaaatccatttgaagaagaggaatgggaagagaacgatgcccttgtagaccatggtgaaccgggtgttccggttaaagccttatacgattatgatggagctgaaaacgatgagcttagttttaaaattggtgacgtttttgaaaaattggaggacgaagacgagcaaggttggtgcaaagggaggaaagacggccgagtcggcctctaccccgccaattacgtcgatgtggtttctcactaaaataacgtactcatcaataagtattattaaatatgtaaaaatgttataaattattgttatttttttagacataagtaaaatatatatgtact

SEQ ID NO: 7120 - DNA, 1699 bp, Diabrotica virgifera
  SmartBlast Evalue=2E-26; Info=Muscle-specific protein 300 n=1 Tax=Tribolium castaneum RepID=D6X2J9_TRICA
tatggtcttctcagaggaggaagaaccaccaaaagtagaaaacatatgcgaaaaagaagttcctacagtaaagactgacaaagttgtggttgatgactttttgaacacagagatatccacgcatagcgaccgcgatactaagaaagaaacattcgtcattactgaaaccacaacgaccgtccaaactgaagtagaaaaagaacctattgtagtaaagaaacaggaatataaaggtttgcctattgatgaatcaagtactttgtttattgatatattagacgaacctatggtcttctcagatgaggaagatggaagccaaagagtgccaccaaatgacacagctatagtttcagaaattcagcaagcggaggtatctaggcctagcgacgaagatactaagaaagataaagttgtatttactgaaaccatatcagtacttaaaacaggaacagagcaagaaccgattgtaataaagaaacaggaatataaaggtttgcctattgatgagtcaagtactttgtttatggatatattggatgaacctatggacttttctgacgaggaagatgacagtcaaacagtgccaccaaatgatactgttgcagctattcagcaaaagactgatctcaaaaaagatgagaatacaaatcaagaaatacaagaaactcttgatgctaataccacatttatagaagtagagaagtctgtaacaatattgcaaaataaagaagacatattacaggaaattccaactgaacacatctctgtaactcctgaaaaagtagaaacacctgcggcaaaattagagaacaatttagctgcagacacattcacaacagtagtgtacgatgtagttagtcaaaataaggcagaagcgacttatatagtagaaaaggaagaagaaaaactaccagaggtgattcaggaggtagttcaagaaactgctgatacaagacatttggaagatttcctggttttagatcaatttaccactatgacatacgatataatctatttaaacaaactagaaacagaatatgttataaacaaacagaaagttgtaattacaaaggaagaaacgccaaatgcagaaactgatgaaattgtaccagaagaaaaagaaaaagtcgaagacataccaactgtaacaaaacaaagaaaaatccaaaccatctgaagttgttgaagtaatagaaacaaacattactacagaaccatcggcgtctgatattaaaattactgtagacgaaactgtttaccactatgatgttataggaatgcgccatgaagaaaccaaatactatgagttactgtctaaacaagttattgataatgaacctagcaaagaaccggaaaaaataatagaacctgaaattactgcaaaggcagaaaacaagccagtcctagaactagaagatagttccaaatatgacctaagccagctgcttcaagctgaaatcgtatggtatgaacgaaaagcacaagaagataagatcatatctgagacacttgaagttgaagataatgttgtagaaacgaaacccatatctgaagatatagaagtggtaatcaaagaatctgaaatcacgacaattggtcaagaggtagatttggaaagtatagaacaaacgcctgatatagaacagacaccagctgaatcagtaacgaatgcaatcgaaaatattgaaaccgttattga

SEQ ID NO: 7121 - DNA, 1702 bp, Diabrotica virgifera
  SmartBlast Evalue=0; Info=NADH-ubiquinone oxidoreductase flavoprotein 1 (Ndufv1) n=4 Tax=Culicidae RepID=Q171D1_AEDAE
aaactgtactgtcagactgtcagctgaaagctgccctaactttttataattgcatggtggaaatataaaaatatacaatatttaatagcatggctgcagctctaggccgaattactaatttaacaaaaacacaagttggacaatttctccccgcgatatgtaacaatcaaattgtcttttactctggaccgcccccaggtactcctccaccacaaactaagacgaagtttgggccccttgctgatgaagacagaatttttaccaacctctatggcagacatgattggaggcttaaaggttccatgaaaaggggagactggtacaaaacgaaggagattctattgaagggatcagattggattattaatgaggtaaaagtatctggtttgagaggtagaggaggggctggtttcccatctggtatgaaatggtcttttatgaacaagccaggagatggaagacctaaatatcttgttgtaaatgctgatgaaggagaaccaggaacatgcaaagatagagaaatcatgagacatgatccgcataagcttgtggagggatgtttgatagctggcagggctatgggagctaaagctgcatatatttatattagaggagagttttataatgaagcttcaaatatgcaggttgctattgctgaggcataccaagctggatttttaggtaagaacgcatgtggttctggctatgattttgatgtatttatgcacagaggtgctggtgcatatatctgtggagaagaaactgctttaattgaatcaattgaaggtaaacaaggaaaaccaagattgaaacctccattcccagctgatgtaggtgtatttggttgccctacaactgtaactaatgttgaaactgttgcagtagcaccaactatttgcagaaggggaggaacttggtttgcttcatttggtagaacccgtaactctggtaccaaattatttaacatttctggtcatgttaatcgtccatgtacagtagaagaagagatgagcataccattgaaagaacttattgaaatacatgcaggaggtgttactggtgggtgggacaaccttttggctattattccaggaggatcatctacacctcttataccaaaaaaagtatgtgaggatgttttaatggacttcgatggtttagttgcagcccaaaccagcttgggaactgctgctattattgtgatgaataaacaaactgatattgtaaaagcaattgctagacttattatgttctataaacatgaatcttgtggacaatgcactccatgcagagagggggtgaactggatgaacaaaatgatataccgttttgtagatggtaatgcaaaaccagatgagattgatatgttgtgggaaatcagcaaacaagttgaaggacactcaatctgcgctcttgctgatggtgcagcatggcctgttcaaggactaatcaggcattttagaccagagcttgaagaaaggatgagaaagtatcacgaaaagaagagtgctgcagtttaatgataaatatattattatatagaacttaagaataaggataaattaccatttttaaataatttcatttttttattttgtccttctggttgtttttataaattgcaggatgtcatagtgtaaattatttgttaatatatcgtatgtaaatactgtcactatatgttaaataaattaaaatatat

SEQ ID NO: 7122 - DNA, 1694 bp, Diabrotica virgifera
  SmartBlast Evalue=1E-155; Info=Cytochrome P450 9Z4 n=1 Tax= Tribolium castaneum RepID=D6WWU4_TRICA
cgcgatctccttgaaggtcatgtaaactcgtttattttgaatttgattgtttttatctatttctaataatataaattatctgatgttaatagtgtttattgatcattgtaagatattttgaaatcaaaaagtgataagcaacatcaaaagttagttgtcaattctcagaggcgaaatgttgcaactcgtcttaatattcacagcagtagtcctcttctactattttgctatcaagcctatgagctactggaaagacagaggagtagtacagtcaaaaccagtatggttttttggagatcaatggaaacaaatattcagactagaaaatatatacgagtttttcgaaagaggctacaagttgacagatggaagatatgcaggaatgtaccaatttaatataccaactttaataattaaggacccaggacttctgaagcaaattgccgtaaaagattttgatcattttgtaaatcacagacccttaattccagaaggaggtgatcctttatggtctaaaaatctctttgctctcacagatcaaaaatggagagatatgagacccgtcctaagtccatctttcaccagcagtaaaatgaagatgatgtaccagctcatggccgattgtgcccaaaatttagtagaccacttctccaaaataaacgaagaagttgcagaagtttcattcaaggacgtatctactcgtttcgccaacgatattatcgctacgactgcttttggattacatacagattctttgaagaataaagacaatgaattctatttgatgggcaaagaaattacggattttacttctgttagttcggtttcacgaattttagggtttttgtttattcctaggatacttaagttattcgatgttaagctgttcagtggtgcatcacgaaactttttcattaatctcatagataaaactataaaagcaagagaagaacaacacattgtacgacctgatatgatccatttgttactggaagctaaaaaaggaaaccatcacaaagatgaccataatgttacggatacaggatttgccattgttaaagatgaacatttgggaaaagcgcctactacagttgcaaacgaaataactaacgaagacatcaccgcacaagcacttatctttttcttcgctggttttgattcagtatccagtttgatgtcgtttatgtcatacgaactggccgtaaatccagatatccagaccagactaagagaagaaattgatgaaggtttccaagagtgtaatggaaaattgaactacgagacaattatgaagatgaagtatttggatatggttacctctgaatctttaagaaaatggcccaatttcgcaggagtggacagagtttgcaacaaggaatacgtcatagaacccgaacaaccaaacgaacctcgcctagtaatagaaaaaggtacaatattagtatttcccataatgtcgatccaacgtgaccccaaatactacccgaacccagacaaatttgaccctgaaaggttcagtgacgagaacaaggataccatcgatccctacacgtttctgcccttcggcttagggcccaggaattgtatagggtccaggtttgctatgctcgaaactaaagcattgttcgcgtatttactacacagctttgaaatcgttccgacgaaaaattcaactataccggtggtgttgtcca

SEQ ID NO: 7123 - DNA, 1700 bp, Diabrotica virgifera
  SmartBlast Evalue=0; Info=Signal recognition particle 54 kDa protein n=2 Tax=Culicidae RepID=B0WQI7_CULQU
cttgacacaacatatggcttctgaaagaagtatcaaatggcaattcaaataatcataaaaatatttaacaatcatttattaccaaagcccccataagattacctaagcccctaaaccaccagctgcgcctgcttggagttgtctcatcatattttgcaaacctgccatgccgcccatttgttggaggactctagggtccatcattttggccatttgttgattaagttttgccatttggttgtggttgacgtttttagccatatcgccacctttgaagagacctttgatgcctcccattttctttaccaccgctgcgaattttgtgtactgcgtaatgagatcttttacttctctttctgttacaccagatccttgtgcgaccctgaccactctaccaacttgtttagtaaacaattttgcgccatccctgttgtccaactcgtaatcattcatactgtccattattgtcattaatctttttaatcgtgccattgattcctgttcgcttccttttgacataaaatcttggctaaatcctgggatcatacccataatttgtgaaaaaggtcccatcttcattatattttgaaattgttcatacatatctctgagcgtaaattgaccatgtttaattttttctaacaattcttcattatcttctaactttaattcgtttactttgtcaattaaaccttctatgtcacccatccccaataatttactaatgaaaggttttgttttaaatggatctaaatcgtctatgtgctctcctgtaccgataaatataactggactgttagtagctgcaacggcactaagtgcaccacctccttttgcatgaccatccaattttgtgataattacggatcctacatctactttttctttaaaggcttttgcttgggcttcgcaggcttgaccaattgtggcgtccataacgaaaataatattgtctggtctcacagcattagaaactgccaacatttcttcaaacaaagattcttcttgcttgtgtctaccacttgtatctactattataatttcaaaaccttcctttttaaacatatcaacaccatcctgggctatgactacaggatcaacttctgtgtaacttccataaaagggtatcctagcttttgtacagttctgttttacctgatcgtaggcaccagctctgaatgtatctgcacataccaaacatgatttccagttctttttctgataatgataagctagtttggtacaagtggttgttttaccagaaccttgtaaaccaacaaacataataacatttggtttgcctttaacaggttgatatggctttactcctgggtctaccaatttgacaagctctttaaatactgcactttggatcatcctcctcttgttgagaccaccagccatttcatcaaagtcaataacagatttaacattttccctgagagatttaactaatttgatattaacatcagcctcaatgagtgcccgacaaatatcatttagcattccatttaagacctcttcattaataattgttgccttgcttaaagactgcaaggcggtcgtaattttacgacctaaatctgctagtaccatcttgatttaatatctgaaaatattatgttgtaaaaaattattttctcatgtcttcagttgatgcgacaaatacttttgacgttttgttaatgaaaaacagggtt

SEQ ID NO: 7124 - DNA, 1696 bp, Diabrotica virgifera
  SmartBlast Evalue=4E-86; Info=CG2909 n=1 Tax=Drosophila melanogaster RepID=Q9W2W5_DROME
ttaatggatccaagattttattagtacatattgttagttttatataatatactttttaattattgtttgtactattataaaatatatcaaatacttgatataataattaattggataacatatcccaaatttcagactttcccttttaagttttctttgtcattggtcaacttcttataatcttctatggaaaaaacaccatcttccgtaaccacatgtaagttatcggcacagacaagagaattaatgtgaggattgtgtatttcacatatttgagtagagcacgcagcagctggatctccactacctgctaagcttcccagccaatattcgtttcctggtaaagcatttccatcccaagcataagaaacgactaatagttttcctgcatcttcgtttactagtttggcatgtggttctctgttaaatatgtgaatttttattcctccctttgcatgattttttatagaaaaaatgtcaccgtttccgtaacttccacagcgactctcatggatataggcaaaacaaatatcactaacgtattgtaatttttcaccaaggcactgtaatctttttgcaaaagaatccataaatagtttgttctggtggtcggaaattttccatacacccaatccaagtccgacaacgtgtatatatgccgtggtggatttctgttttgctcttgagttagcttcaatcaataacgtgtctattgatattgttagccttttgtagtacaaatcgttatcaaacaagatatcattataaatgacgtgaaattttccatccactttcttttttctctcgattgcttcttcgtatgtgagacattcttcgtcataaaacgatgtaaacaattttggagtagtatgttcaaccgaagtaccaaagccattactggtagtattttgctttttaccaatcacaatctcctggtattccataacattactcttttcgaatctcggtcctattagtccgattattataccctcttcttcaacaatgctcctgtctgcctcatattttccaatattggttctatggcctttatttatgaaatatgtcatcgagctcacagaaagcaaagctgatagttttatttcatcgtatgacatacattctttaatagagatcacttgattaggagttccaatggtttcccactttccgcttccacttttattattaagaagcaaataactatcgtcttcgttcaagaaaactacagcccttttaaacaacatcttatttatgaggtctttaagactcaagtctcgataatagtctttttcgattagatttccatggcttctttttaacaaaataaagtgacaacataactttaacacgctttcgtgtaagactggataaactgagtttatatttgaagttaaactttcttcctttacgatagtcttcagaaaattgcatctattagatttggttggaaattttataggaaacttgtcacttttctctataatgctattaacattttccacagaggcaatattcgaggaaaattcatttaatacttttaaggtattcttattccaacgtgtttgtggagaccaatgaggtacagacattgtaattgtttaaaactgttcacttcacttggtattaattcacagggaaatacgagccgctaagtctacaactagaaccggtaagaactgaaacaacactaatt

SEQ ID NO: 7125 - DNA, 1696 bp, Diabrotica virgifera
  SmartBlast Evalue=1E-178; Info=5'-3' exoribonuclease 1 n=1 Tax= Camponotus floridanus RepID=E2AEG9_9HYME
actaattttctcgtggtattaaaatatctgaatacaataaagtcttcacttctgtgtgatttttgggaatttctggaaaataggctggtgcttgataaggttctctatctcttggcgtgtacatgtaaattaacataggtccgtgactatttcttcgtctttcctctgttgttaatttatcgttgcaatagctcatagcttcaagaagcagtttctcgtcgatgaaaggtatttttactactgcttcccacgcttgcttctttccattcagatcagtttcaaatttttctggatagtaatcgattatgatagaattttcttcagtcatcaacccatgataagcttcgggcagaagctttttactggctgcaggtaacacccctaacagctgttcatatggcaagaatggtttgcccatatcgaactcgagttttaagtcggtaaaccctttgatatccgaaatatatggggcataatgatgtggataaaaccaagaccaagaacaacaaccattgtagtaatagtttaaattccactgtattgctcgaacatacccttcagcttggtccctcattacttcgggtgtaacgtcaacatattccattttctctttgtaatactcctttttaaaattcataaaatcatcactattatcgtcactgtcatcatccaaacacagctcatctgcagacttcaacaaactcgccaagccactgtccttacaaggtgtcgagacatctggttcaagaagttcagaaatctcatccccctccgctttccactcttgtaaatctcttgtggacttaatgccccttttcgtttctagatacattatgtcgtctcgtacctgctcatagtgatctagatcttgctgaccaagtttttccatgaacatttcaaaccgccttaaatttaaagttccaccttcatttatataaccatctagcgtaggaagtatttccatataagttttatacaggaggggtaacgcaccctcggagatgtgtaaatttggtaaatgaggaatgaaatcgtttccaactaaaaaccccatcaacacccaatcgtcgattattttttctaaatcgtagtcaaatcctcttagctcataccttattggggcgaattctaattctaaatactccctcattagagataagtgcaacagaaaaaatgttatctcttcaggaactgttatacgttttgtcgattttttgccaaattttacctcttccctcaataaactaaaatgtggttcatgtgaacacagtcctaacataattaaatctgcatcaagtccatataagcaatgcctagtgtttgggtcataaccgggctgcgccctagtatatctaatatagtccattattttgtgttccccttctccaggtgtctcgtgtccagacagtatcactttacacttttgccatagaggatcattggaaattttatcaactacaaaatatttcaattgttcttgcagacgagccataaaaacagtaccgggtgtaatgcaattggaatcaaaacgttcttcggctggcaatgattctcctttctttactgcctctgcttcagctttggctgcatcagctgcagatctaaatctcctacctctttgctgattcattttagctctaggagctactccatccactgccataacaaacacctttgcggtttaatcattcgaaac

SEQ ID NO: 7126 - DNA, 1695 bp, Diabrotica virgifera
  SmartBlast Evalue=1E-176; Info=Isocitrate dehydrogenase n=3 Tax= Culicini RepID=Q17P79_AEDAE
gacgggcctaaaattctgataatatttaaaaataatttaaaatggcaaatattttaaggaaaattgtgagtatttaataatatacatgaacgttttgttttttttttggtaataatagcagtaaattaagtttgcctgttttaaaaaatcctatctgcatgtgattttttggtaccccttcaccatgagactttttacaaatttatctaacattaaaaccgaaacctcgatatggacaaaactcataaactattttaatcgaaccccttcaaacaggcagccaaatgaaattgatttatctacatcacaagctttgggtagcagattatttagtagtgaagttaaaaaatgtacacttattcctggtgatgggattggtcctgaaatttcagcggctgtgcagaaaatcttccaaactgccagcgtgcctattgaatgggaaagtgtagatgtgacacccgttaggggcccagatggaaagtttggtattcctcaagctgctattgactcagtcaacaaaaacaaaatcggtctgaaaggtcctctcatgacccccgttggaaaaggacacagatctttaaatcttgctctcaggaaagaattcaatctttatgccaacgttaggccctgcagaagtttagagggatataaaactttgtacgatcatgtagatgttgtgaccattcgtgaaaacactgaaggtgaatattctggtattgaacacgaaattgttgacggagttgtacagagtattaaattgataacagaggacgcatccaggagggtagctgaattcgcttttcaatatgccaaagagaacaatagaaagaaagttactgcagtacacaaagctaacattatgcgcatgtccgacggtcttttcttgagatgctgtagggaaatggcaaaaaaacatccagaagtcaagttcgaagagaaatatttggacacagtatgtctgaacatggtacaagatcccacccaatatgatgtattggtaatgcctaatctgtatggtgatatcttgtctgatatgtgcgcaggtcttgttggaggattaggtcttactccttctggtaacatcggccttaacggtgctctatttgagtcggtgcatggtacagctcccgacatagctggtcaagacaaagccaaccccaccgccttgctcctttcagccgtcatgatgctgaggtatatgggccttaacaaccacgcgaccaaaatcgaaaacgcctgcttcgagaccatcaaggaagccaaatacctaacaggcgatcttggaggcaaagccaaatgttcagagttcacgaacagcatctgcgagaaaatagcataagtccctaaaggaaaaaacgtcgcagtgaccctcgttaaagaagatagacgttagtgtgttgattttaataatatttgtacataataagcaaaacatttttttgtagtaggctagcgagcgagggtgtcttttttgtaacatgctcagtatttatcaatgaaataaagtttctcattacgtttaggtccaacctagtatttctttattactgtgaaacttgaaacttgaagttaccccctggatattttttatattcaataggattgtatttttatttatttttgcgtccgttgtaaacatatttatataatatttatttaaaacgtgtcgttgctgaattaaaaatttacctgttc

SEQ ID NO: 7127 - DNA, 1695 bp, Diabrotica virgifera
  SmartBlast Evalue=1E-154; Info=SWI/SNF complex subunit SMARCC2 n=1 Tax=Harpegnathos saltator RepID=E2BNI2_9HYME
tgtggtggtgaggggcttggggggaggctacagccgaagcttgtggggatgggggagtgggggttgtacttggtccagactcggcaggaggagttgagtgggaagcgggtacttgctgcgcagcccactggccttgttcagcttgtagtctttgatgtgcttgctgtctagctctaaactctgctgcttttaattgttccaaatggaattgctgtctttctgttataagttgttgtctctgatactcaagcccttcgcgttccctctccatggttgtttctagttcttcaaaatgccgcaatttaatttcaagctttttcatttgagtttctactaacagcgctaccagagatttgatcttcctttcctccacagcagctaaatgcttcgctttaactgcagctgcagctaatgcagccgctgctgcactctgcatttcactatcttttacaactttgtctgttttaccgtccgatatatccattttttcttccttttcactatccgatgcttccgattttaacttatcactagctttgtcttcctgactatcaccattctttttgtcttcgccagatttctcgtcatccttatcctctttcttaattttatcttcttcctctttatcaggtacggtgccagctataccagtgagagctaagtttgcggctgggtcaaatttaccatcagcattagaggcttcaacatttttaagatgtgcgtccatcacagacgctggcacttcatctttaatactagcaaactcgttcatagctgatttagcagctgctgctgctactcgcggatcgacaatagacgctaagaaggcgacggttgacattatcgggtttccagctttactaaacgggattggttgataggctaagggtcctaaagcacctccagcttctggatcttctaaatacggatcttcaattggtaatctaaggaaatgaagtatgcattcatcttgtgtgcgagaaccaacatgttcacacactttattccagtcatctttatacatttccaatccttctaggagaagcagcgtctcctgttccgtccagtctcttgtcagagaagcagcacttttatttcttaaaacagcaggtttcttaacatactgatctaacttcagtccaaagttggacatttccgtagcgggttctggcttaatcttagtctcactcttatcgagatcaaggaaagttttggctgcgctaggttgaggtgttttaggagggttaactggctgtagaccagacggggtatctgaaagaatatgaaaatgagaagtaggcggaggccccatggccgtcggtctggattcggtatctacttggtagttgatcaaaccccattgctccaaaaacgcatgaacccgcattatggcacaaacatctcctgcaaggttgcgtctacatgctgtactagttatgtattcagttgggttaagccggtaggtatcgatcatgaaatttctgtatgctaagtatatctcaggagttttcgatttgtttctaccgttaaaaaattccggcatcgcacgcttttcaacttcatggatagagttatagtcgaaccacgcagaatacgatggaataataatgtgatgcgtttgctctgtgacattatcttcttgtccatcgtcttgtgtgttggtgtcactgttcttgccagtttgggaatcctcat

SEQ ID NO: 7128 - DNA, 1696 bp, Diabrotica virgifera
  SmartBlast Evalue=1E-110; Info=Cytochrome P450 12H1 n=1 Tax= Tribolium castaneum RepID=D6WP99_TRICA
tgctgtcgagacgcgcacttcgtttgaaatgttcaacgcttttaaaaactgcaacttattccacagcgccagcctccacagcgactaaccgagacaatttttatcaaaatatagcaggtgctcaaaatgacgacaccaatccagagggatgggagaatgccaaaccgtttgacagcatacctggaccaaaacctttgcctgtgcttggaaacatgtggaggttttttcctggagcagaatttcataatataaacacggataaactctttctactattccagcaacggtatggggatgtagtacgtttaggaggaatatggggacgtagagataagatttttctgtatgatacaggtgatatggaggatatgcttcgcaacactggtccattcccttcgagatttattatggacgccattttctattatagacgtaaactaagaaaagatatctataaagggaatcttggacttgctttattgcaaggtgaggagtggtataagttaagaaaaattgtaaatccaatactgatgcaacctaaaacaattcagcaatacaccacaagaatggatggggtagctaagaacctcatgaagctaatttcacatcgcatgacaagtagtgggaccaatactacgcctgatgattttgagaaagatttgtacaaatgggcattggattcagttgcgattattgctttaaacagacaattaggagctcttaatgcacatgcagatgcagaaactaccaaattcgttctatctgtattgaggttattcgatcaatctttctatttagaacaaatgccaccatactggaagtatcttccctccaagaggcttaaagattattgtgataaccttgactttataactgacgtcctcacacgaatgattgataaatccctagccgaatttaaaaatgaagacggcgtaccagatgaagagcttggtgtactgcagcgcttagtcaaattggataagcaaactgcagttatcatgactatggatatgataactgcaggagttgatacgacgggaaaaactcttggagcggtgttatattttctggccaggaatccagataagcaaagcatactccgtgaagaaatattaaaatacctcccagaaaaagacacagtgttaacagccgacaatttgaatgaaatgcagtacttaaaagctgcagtgaaagagagtagtaggattgccccaattgctatcaccagtctcagaactgcctcaaagaacatgatagtacgaggttaccaagtcccaaaggggacggatatactgccaatgcatcattatgcatcaactttgacggacaaaaatttcaaagaaccctctaaatacataccggaaagatggctacgatctgtcagtaacgagtactccgcgaaaaatgctcatccgttcgcttacatgccatttggtcatggtgcccgttcttgcatcggcagaagatttgctacattggaagtagaagttgccgttgcaaatatgatcagaaattttgaattatcttgggaccagccagacttgagatttgaagctaggttgttatacggtttcatagacccacttaaacttacccttaaagaactaaagtgaagaaaaaaacctaaactaagaagactgagttatcttaattggtttattttaatatgtagatattgtgtgtttatggaaaactg

SEQ ID NO: 7129 - DNA, 1689 bp, Diabrotica virgifera
atgggacgaaaagtttcaaaaattatgtgatgtccaataaaccataccataaactttcctgctattttttctgaatttcctcttaggaaaacggagataattaacgttattcgggttaacctcctaaccaagttagataacataatattaaatttttgatgaaacatgatactaataggatattttatttagagacctgtaataatcgatttaaactatttaggatgataatacattggatgatacctacaaaataatttaagagtaaaaatatgaatgatctacgatctaacgttacttaaagggataataaaatgaatttgaatgaggaagatacaagtaaaggaataaaatgcctccttgaaggataaccggctctattttcagctttgacttattcctatttgcagtactactaaagcggcctgataagtacttgatctggctaacagatcgcagccatactcgtcggattttttcatttacgttgatacacgtattagtagtcgcctcgtaaacttgcaagtcgttccacacggcaagtgtttgtagacaatcaaaaaaagtagtttgagtacgtgtggcgttaaaaaaatctcagcaatcgaattcggtttaatacctagcgaaattaatttccggctaccaaataggttcttcagatcaaaaaagcaccgacttaaaaaacgataaattattttcaatcagggcaatggaatttggaaccatgaaattggggatctatccggagcatataaagtggtacaacatccatcgtattctccctagtagttctagtctcaaaatattataacctaaaaccggtttttttactccgcaataatcgggttttccggttgttttttgtcccgattataaccggtttttcattttaaagtaataaccggtgaaaaaccgaataagtggaaaaaataatgaattcagagaaaaaataagaaaatttttcgccgctcgcacgcgaacgatcaagtttaagttgactgaaaccgatttgacaacactgatgactgatatcaattcgaatggagtatcgcaaagtaaagagcaatgtaattgtaacctactgggtattggctattgactaaaaaaccgaaaccggtttttggaataatcggtttttggaataaccggttttttgaccggttataaccgccaggttaaaccgtaggtaaaaaaaccggtataaccgaaaaccggtgttttgtcaacaaccgccatccctactttgattcaacccagaagcaatgtcgactgaaaataagtactttacagcactttaaaacaatacaaggagtggttaaagagactgaaatactactgaatgaaaactattgctgttgaggagattatgctatacaatatgacttttttgaaagcatatattgtcgttttctcatcaggccaaaactttttcaaattacccatgtaggtattggtaaaatatatcggtatatatacaaaccaatttggtgttggttcttacttaaaagatacaaatacactaaacacaaaacttaaagtttgccttttaaaatccactacaaaaatatacaaatggaaaaaatcagtgttgcatcttaaaatatattgtttatgtatttttttaaaactggtttgggcatatttcattaaaaactattctacatcataaatgaaacacaatttaca

SEQ ID NO: 7130 - DNA, 1693 bp, Diabrotica virgifera
  SmartBlast Evalue=0; Info="Aldehyde dehydrogenase, putative n=1 Tax=Ixodes scapularis RepID=B7PZG8_IXOSC"
gctgacctattacaagtgctgataacgaagtgtagtaacagagacataaatatatctacttaagtcaatagaacaattccacgtctttatagtaacaaaccggtacctaatcttgtagttatgcgggttccaatcacttccactaagttactgtccgcgttgaaacagtttgtagctgttaggaatatggcaagcggagaatttcttataaacgattcaaaatattcctttctgaaggatttaggactgaaagaaagaaatttgggagtatacgatggagcatggaagggatctggtgcggtagtacaatcaatttgtcccagcaatgggaaagttatagcagaggttcaacagggctcaataacagattatgaatcctgcgtggaagcatccaaagcagcttggaatgtttgggcagacttaccagctccagcaagaggcgaaatcgttagacagattggaaacgccttaagagaaaatctcgttccgttgggaaagttagtatctattgaaatgggaaaaattttacccgaaggtataggagaagtccaagaatatgtagatatttgtgattacgctgtaggattatcaaggacgttagccggatccattttcccatcggaacgtcccggacatgtacttctggaaaaatggaatccgttgggggttataggagtaatttcagcatttaacttccccatagcagtatacggctggaacagtgctattgcaatggtatgtggtgatactgttttatggaaaggagctgaaactactccacttgtatctctagcaacaacaaagatagtagccgatgttcttaaaaagaataatctacctggagctgtagcatccttgtgttgtggtggtgcagatgtaggcaaggctatggctgctgatcacaggatcaaattgttatcctttacaggaagcactcatatcggtcaacaggtgggagtggaagttcaaaaacgttttggaaaatttttgttggaacttggcggaaacaatgcaatcatagtagctgaagacgccgatttagatatggtggtacaagcaagtttgtttgcatgcgtaggaaccgctggacaaagatgtacaactacaagaagactgatactacatagcaaggtatataatgaagttttggagagattaaagaaagcttacggccaggtactacacaggataggagatgctttagaagataatactctagtaggtccacttcacagtaaacaatcattacaaaaatatatagacactatagaacaaattcaaaagcaaggaggcaaaattgaatttggtggcaatgtattaaacaaaccaggattctatgtcgaaccaacaatagtaacaggacttcagcatgacagccctcttttacacaacgaatgctttgcacccatagtatacgtattaaaggcagatagtgtagaacaagcgatatcctggaataacgaggtaccacaaggactttcttcaagtatgtttactcagaatatcggaaatatatttgagtggattggccccaaaggctcagactgtggtatcgtaaacgttaacattcctacatcaggagccgaaattggtggagctttcggtggtgaaaaagccactggtggtggcagagaatcaggcagcgattcctggaagcaatatatgagacgatctaccattacaatcaatcatt

SEQ ID NO: 7131 - DNA, 1690 bp, Diabrotica virgifera
  SmartBlast Evalue=3E-25; Info=Protein Dok-7 n=1 Tax= Harpegnathos saltator RepID=E2BM65_9HYME
gcttattagtaatttaaggagatatggggtagttgaggggcgattctgcttcgaagggggttcaaggtgtataaagggtgaagggttgtacgtactacttaccgatcagggagaagagatcacgaccactttgaaggcggcttctgtagggaatttgcattcttcaaggagaaggcctgtttcaagaaatatgtcagtgatggacagtcctcgtagaggacctatgcgcgcaacaggaggaataggattagaattaagcgaatcgtcccttatttcacgggcggattctccttacaccgatatggagagcaattatggctgtggtgatagtatatcaaatgatggttggggacccccgcctatagaaagatgcatgagttgtatcagcaaactcggtgcaatgtccaggtcctcgactgcaactgtaacaatgggagctccgccatgttgggagcacacttgtgatcgccattcaatcagcagcagctctgacagcagcggatggagtcaagcagttaccaaaccaccagctagaccaccaaagcctggagtaacatcaccttcagcaaagaagcctgctgctctacttcctcaaccgtcctatgataactacgacattcctaagataccctttccagtggaacccaaagctgatgaacactacgatactcctcgcaaactaaaggaatgcattcaaggatttggttttgatacggttcacaaaccatgtggttgtgtagtaagaattcgccaaccagaaccagagcggccatgcgtttgtcaacgtctaatgtcttgctggtcaggcaccgaagatgtccatgccatatatgccactgtcgattattcaaagaagacacaccgccagcaaccagttgccaccgcagcaaattatgccaatttagccccaattccgacggttactacaacgactgccccaacatctaccaattacgaaaatatggaatttgctcaaacacttcaattatacgagaatagcaaagacatcgctgagaaggcaagaacactgtgcacaaaatgtggacatgctcaagaagactacctcatgatggagccatccaataaaccatcacagcctcatccagggtacataccaatgtctcctgctgtcaaacaacgcttaggaaaagtgctttcaaacagcaacccaaatcttggcccagccttagatcgttccatgaaaccatctggttcttccatgctacaaggtactatctatcaacggaagcagattttagacagtgctgataacttggatattcggagaagaagatcgaactcagcagattcttctacaggtcgctatgaaccagagccagaacctgaaacatcaccgtgtcactgtacccatgccatagccgtaagacgatcatcttcagttccttgcaagtcaaatcgtgactcctctagctcaaacgattcaggggtattcgaacttcccagaaagcctcaaatttgcgccaatcaaactcttccaagacgttccaagtcatccgatcctcttagagatttgacgtttcagtttactaaaacagaaactaaatctgctagtgctgaggctgaggtgccagtatgtcctaacggttctactagcagtgggacttctgatatgtccgactactttgaaacactgtctttgtcatcccatagctccagtgatgcgcctcct

SEQ ID NO: 7132 - DNA, 1691 bp, Diabrotica virgifera
atgaaacagacgagccactctactcggctactaagtggatccacaaagtggcttaaacaggcgactttgtagccccgatgattttgtaatggacgccactgttagagccactttgtggatccacagagtagctctgcagagtggttcgtctgtttctgcgtttaatctccttattttatatcttaggaaaactaaattttcgtatttatctattgttatttctcttagaatattattaatttatattactaatgttagtcgtggaagagacattttggtttattttggaaattcagtcattgtttagtaaattaaagttaatacagtagaaccccgataatccgaaccccgctaatccgaaccaacagaaagagaaaaaaattgaaaaattcacgacaaaaacttgaaaacatgtttatcatacagagtaaaaccagaaaattgaacaatgtaggattaataggactttgacatttaaaatttcttcaaaacgaatatgtactttatacgtagtacttataaaggttacatattataaacgtacgtcggttcccttgcagtcaacttaagtccaaaaatattatccacgctcttgcgagatcgttttgcgacaacgaaagctttgaatttattatttattactagttatgcttggttaggctaactttcggataatccgaacttttcggaatccgaacagggtgtccccccaattagttcggatttgcggggttctactgtatattgtgttaggttagttgaaagcaatgtatgtctcgaaaactgaacatttgctgttttttgtttcgtagtttatcaactatgccctcttttgaatattcaatctacctaccgttcaagtaataacttaaaagtgcgtcaagtactttttatgttccgaaatttaaacaatcccactgattgccttatagtttaagttaatcttacatactaaactgttgaaaaatgtttcctatgaattagttttgtatatatgccattcttgaataattcttcatacttactgtgtcaagtagatttttccaaaccaaattcacacattagttgtttctcgaatgtcgtacaataagagttttctttgacacatgtataataatcttggaatattgctcgtctcgatgtacatttgcgtgttttgaagctgcttgcaagccatgtggacctaaagcacgccagtatctcctacgccgcttgaaaacaagtcaggcggtttggcagtctgtgatggacaatcattcagtttacgttgaccgcgcgatcgatttcaacgtagatacagagctgtttatttctggcgtgtattgacgcaaagaaaccgctcaaaggtttgttgacgggaaacttagcttgaaaacaagcagcttgatcgtagtctgcacgcaacttgaaaacacgcaagtgcctagggtcatgcaaacctaacgatacctgtgaaatttaagttcagaatggtttttatattatgattctcaagtagaacaccagtgtcagtaaataatgattgaatatccaaccatgtcaatatacatcagtgtcaatgtaaaatgtatgtggctgctagatgtcataaaattatatatctgttaatgtcattgttttctaccagtttctgttgtgtttgtgttccagctgtagctggaattatatagaacttttgaaaatttatcttt

SEQ ID NO: 7133 - DNA, 1692 bp, Diabrotica virgifera
atttcacgaaaacaatggagtccccagtgataacggtaacagaaggtcagctaagaggttatcgcaggaagaatttagacgggaaagagttctatgcatttttgggagttccttatgcaaaaccacctgttggggagctgcgatatcaggcaccggaacctgcagaaaaatggaatggggttagagatgccacggaagatggtaagccaagctaccaatgggatggtcaaaataataaacttatcggttctgaagactgtctacacctaggtattcatacaaaaacacttccatctgaagactcttgccttaaaccagtaatggtatggatacatggtggtggattcgcctttggttcaaacagttctaccgaatatggacccgaatacctgatgcttgaagacatagtcttggtatctgtcaattatcgtctaggattcctaggttgtctgcattttgaagatacgtccttgaatgtgcccggcaatgcattacttaaagaccaacaactagctttgaaatggattcaaaagaatatccataattttaacggtgatcccaacaatgtaacaatctttggagaaagcgcaggaggtgctagcgttcattatcatgttttgagtccgtcgtccaaaggactcttccataaagccgttctacaaagcggagtcacctgttgcccttgggcaagagtcacggaactaaacgttggtcttcaatttgcgcaaattgttgatcaacacattcaaactgaaagagaagcactaaagatgttacgcagcttgacagccgaagaactatttgaggcacaacgaaagtttatcgcaaaatatggaagacaacttaaaatagctcctaaaattgaaaagccaaacgattcagccattataacatccttatcccaagacataatagttaaaggtcagtacaacaaggttccattaatgatcggctttaatactatggagggaatattatatggaatatatcaacaaagggaaaaggaacaaggacttaaaccagattatttcaatctcgacaagtatgtacacccacatatgttgataggaaatgatgaccctaagaggaagctaattaaagagaaagtcaggaagttctactttactgaaaacacagtggaaatggcaaattatctaatggccaccgatggtacctatacggccccagtagttggaactgctaaacttcatgcaaaacttcaaaccgaacctgtttatttatattgtatgagtctggatgctggattaaatgtccttaaacgttccagtggttttactcatataccaggtgcttgccacgccgacgatctaggatatttgttccaagcgccgcttaaacctaataacctagacagaggggaaacggaacttacagcaattagaagatttgttaaactatggactaattttgccaaatacggcaacccaactcctcaaggaaacgatttaaacctaacctggaatccagttaaccaagaagaagtaaattacctggatatcggagaagaattaactatgaagatgaatcccgagccggaaaggttgaaattgtggaaggaaatattccagcttagtccatatactcaatattacctacaataaagtaataaaactcaaacttagaatattggataaatatgttaaaattatttgaaaataaaatatttgatga

SEQ ID NO: 7134 - DNA, 1692 bp, Diabrotica virgifera
  SmartBlast Evalue=0; Info=UDP-glucose 6-dehydrogenase n=2 Tax= Aculeata RepID=E2AU70_9HYME
ttcgaacatgaaaaccaatctcaattagttcttgatggtcaagtattttccttccatcgaagatgtatgcaggcttcatcatatcagagtatatttttttgtagtctaaagcaataaattcgtcccattctgtacagacaatgattgcgtggcactcgtttgcagcctcatatgcatccttgtacgaagaaatatggttcttatacaattcagggtcatcacaaatctccggtttgcataattctttaataatttgttccttggaaacctttgggtcataaattcgaagtgatgctccttcgtctaacaaagttttgcctacgtaaatagctgggctttctctagtatcagcggtatttttcttaaaggcaaaaccaagcatgcagattttctttccgctcaaagtattaaaattagattgtataatttgcttggtaaaccgacgcttctggtattcgttcatatctacgacctgttgccaataagcagcaacttctggtaggttaaaacattcacaaatatatactaaattaaggatatctttttgaaaacagcttccgccaaaaccaattgaagcctgtaagaattttgaaccaatccttgaatctaaccctacagctctagccacttctgatacatccgctccggttggttcgcatatggcagataaggaattgatactcgatattctctgggccagtaaggcatttgcagcaagttttgataattcagatgaccacgtattcatggtaacaatcttttcttttggtatccacgtattgtaaactgaacataatgcttctattgcttgcctaccggcttcagtattttccccaccaatcaaaaccctatcaggattgagcagatcattgattgcagtaccttccgctagaaattctggattagacaaaatctgatgtgtcacttttggctttttattagctgttaagatatctgaaatactttcagctgctcgtactggaacagtacttttttctacaacgattttgttagtttgagcagtatcagctatgattcttgctgctccctctatgtattttagatcaggtgcccttcccttgccatttccgttcagttttgttggtgtattcactgatataaatatcaagtcagcatctaatattgcttgagtaaggttagtggtgaagaataaattcctacctctgcactcttgtactactttgtctaatccaggctcataaattgggagtctgtcggagttccattgagctattcgttcttcgctaagatcagcaactgttactttaatatctttacattttaaagctatcacactgcaggttggcccacctacgtaaccagcgccaaggcaacaaatattcttaatcgtcatgttaataactggtctagatattcagctctatattatcacagactgtttataaattaagtacactttcttgataaatgtgacaataattcaaatttattgtcaccgtatcgctaaaccataatcgaattgaattctctgaacttgacagtgcacccatccatctgttttaaattaatgaaacaatactggtccttatcagcatccggtgtttttggaagaaaacgcggaggtggtataaagatcgagcataaattttgatttctgccacatggctggctgattgactactatcctaccaacaaatcatattataattc

SEQ ID NO: 7135 - DNA, 1691 bp, Diabrotica virgifera
  SmartBlast Evalue=0; Info="Puff-specific protein Bx42, putative n=1 Tax=Pediculus humanus corporis RepID=E0VDD9_PEDHC"
cataatttactaatttatttcttgttgtagattgtggtcatctttccaatgagtttatttaattcaatatatatttagtgtacaaaaaagttctgtttaaaacatggaattatcaagtattcttcctgcaccagtacaatcgatttgggaccgtgatgatgaacgacgcaaaaaatcagcatttttatcgtctaaacagctaataagcacccaaaacgttgcgcccccatatggtcaaagacgtggctgggttcccagaagtgtaacagacttcggagatggaggtgcttttccagaaattcatgttgcccaattccctttggatatgggcaaaaagaaagatgcttcttcaaatgctttagctgttcaactgggatctgatggtaaagtcaaatacgatgccatagctagacaaggacatggtaaagataaaatagtctattcgaaattatctgacttattacctgtggaagtagtagatgaaaatgatcctagtcttgaaagaccagaccaagaagaaattgatgatctgacagaaagaactagacaagcattgatgaaaattacgaactctaagatagcagcagctatgccagtaagagccgctgataaattagcaccggctgaatttattcgatatactccgtcacagcaaggtgctgcatttaattcaggagcaaaacaaagagttattcgacttgtagatgcccaggttgatccaatggaacctcccaggtttaaaattaataagaaaattccgagaggtcccccgtcacctccagcgccagtcttacatagtccaaccaggagggtgacagttaaagaacaaaaggaatggaaaatacctccttgtatttccaactggaaaaatgcaaaaggctacactgtgccactggacaaaaggctagcagctgatggtagaggtctacaacaactacatattaatgaaaattttgccaaactggcggaggctctgtatatagccgatagaaaggccagagaagcagttgaaactagagcgcaattagaaaagaaactagcccaaaaagaaaaagaagcaaaggaagaacatctacgtcaattagctcaaagagccagagacgagagagctgggattaaggcagctcctagtcattccaagggaggcgtggacgaggaagaacacgaaagagacttgcttcgtcaagatcgtcataaagagcgagctcgagatcgtaatttagcgcgtgcagctcccgataagcgcagtaaacttcagcgagagcgcgaaagagatatctcagaacaaattgccctcggtatgccagcgaaaggtgcaccatccaacgacactcagtttgatcaaagattatttggtcaggctcaaggtcttggtcacggctatggggatgatgaagcttataatgtctatgataaaccttggagagatggaggatccatggcaaatcacatttatcgaccaagtaaaaatattgataaagatatgtatggtggagaagacattgaaaaagctattagaactaataggtttgtaccagataaagaatttgggggtactgatcgttctggagcaggccgatcaggtcctgtgcaattcgaaaaagaagaagatccgttcggattggatcagttcttgtcgcaagctaagagagccagtaaaagaaaagaacctgaaaagagagacgacaggg

SEQ ID NO: 7136 - DNA, 1677 bp, Diabrotica virgifera
  SmartBlast Evalue=1E-83; Info=Probable cytochrome P450 6a13 n=1 Tax=Camponotus floridanus RepID=E2ABJ6_9HYME
gcacacttattattgtaatgacgtgtgacgtgtgtctaatatctattttggcttctttgccaatactgttttacttcttcataaactggcgactatcctattggaagagaaaaggagtatcacaaatagagcctgagtttctagagggcaacacaaaagatgtcaaccgaatggaaatccataatagtgtcgtttttcagaaatttcacgagtatttcaaaaacaacggtaacaaatttggggggatatacaagaaaatgacccctgttttgatggttacggatctggaattgataaaatcagtgttagtgtctgattttgcccattttgtcaatcatgatattttcattaacgagaaaggcgatcctttatctgggaatctcttcaacttgagggatgataaatggagaaatatgagggctaaacttacaccaacatttacaacaggtaaactaaaaatgatgttccaaactatgatggatgcttcatctggtctggagaagatattagaaaataaccgcacatctaaagaaccgatcgacattaaagactgcttgatgcgtttcactgtagacataatcacttctgtagcatttggaatagaatctaaaagcatggacaatccagattcagaattcaaagctatcgctaataaattattaggtcctccaccacgcgcattacaaaagcgtactatatttacggaaattaaaagaaaagtgaagctgctagtagatctggtgccggaatgggtgtggatcaaactcaactgtagattgatgccccagtttctgaagactttttcgtgaaagttgtcaatgatgttgtaacttacagagaaaaataacgtatataggaaagacttcatgcatcttctaatccagttgaaaaatattggaaggttactgatgatggaacgatcaaaacagactccagtaaagatgttcatctcaccatgaaagaaattactgcacatagtttcgttttctttatagccggctttgaaacttcttctacagcgatgacatacgctttgttccatttggctcaaaataagacatccaggacaaggctcagggatgaaatcaatgcagtattggagaaatacaatggagttataagttatgatgccattatggaaatgcagtatttggaacaaattatacttgaatctttgagaatgcatcccccagtggtagtgatcgaacggttgtgtactaaagactatataattcctgaaacagatattttaatagaaaaaggaacagtactcaacatatcaacacgtggaattcactacgaccctgatatctaccccaacccaaacgtgttcgatcctgatagatttagtccagaaaataagagttctacatccccgatggcctttttggcatttggtgaaggacctaggctatgtataggattaagatttggaaagctgcaagccaaagtaggattgtgttcaatattaaggacatgcagagtaaccttgaacgaaaaaacacagctacccttgaaatatgactcaaaaacacattttcccaacgtcgaaggtggtgtatggttaaaccttgaatccctggaataatctctaaccattaggcaagataacaaacaaaaagaagaatgagtattggtatcagattagtattagcgattagtataagtgtatggtag

SEQ ID NO: 7137 - DNA, 1691 bp, Diabrotica virgifera
  SmartBlast Evalue=1E-93; Info=Glucosyl/glucuronosyl transferases n=1 Tax=Aedes aegypti RepID=Q17GE2_AEDAE
tttgttgaagacaatctagtacactgggttattcaattttaagaactttgcaggaatatacttaacctaaagtttaaaatactttttaaaaatgaagaagaaatatgttttactcattccaattctaatctgcatgttatgtctacaaactactcaggctgcgaaaatattaggcgttttcattctttccgccaagagtcactacagtttgggaaacgcactgctaagaggacttgcagatgcaggccatgatgttacgatgataagcccttacgaggatatagtacccactaaaagcggcagctacagaagcgttgttttgacaggttttgccgagcgatatgaagctataatgaagcacgtgaatccttttgaaaaagcgtacaccaacgacttcacacacttcttaaaattccaaaagatagtctacccaggtctggaaagaaccttgtcgcatcctaacgttcagaaacttatcaattctgacgaaacctttgacgtagtgattgtagagcagtttgcgactgaagctttcaaggcattagctcaccatttcaaggcacatttagttctgttttcatccataggagctgacagtaaattaaactatgtagtgggtaatccaactatggtatcgtacgtaccacaagtagatacagatttttcaagagaaatgactttttgtcaaaggttgtataatactttgctgtatatttttgaggctgtagtcacccactaccactggcttcctttacaacaggaaggattggtgaagaaatattttccaaattcaccatctatattcgaactcaactataacgtttctttaattttggtaaattcgcatgaaagtctgcaaccatcgattcctctagtaccaaacattattcccataggaggattccatgttaagaagcccaaaccgctaccaaaagatctccagcagtatttggatgatgcaacagaaggagtaatatttgttagtttcggatcttcagtaaaggctgtcaatttgccaaaagataaaaaggaaattttaataaccagttttggcaaattaaatcagaaagttttatggaaatgggaagacgacgatttaaaaggtttaccaccaaatgtaaagacccagaaatggtttccacaaatggatcttctagctcatcccaatgtcaaactatttatcacccatggaggcattctcagtttaacagaaactgtctacaacggagtcccagttcttgtagtaccaatttttggagaccaagcgatgaatgcccaaaatgttgtattggataagtatggacttactatatcgttccatgatgaagatttttcggaatccaagctgcttgaatatacatcaaagctgcttaacgatccaacattcaaggaaaacgcccaacacagatcaaagttataccacgatcgcccgatgggtcctatggaaagagctgtatattggatagaatatgtgatacgtcacaatggagctactcatttgagagttgctggtgttaatcttccttggtatcaacattatttggtagatgtcactactgtagttcttttgtttattgcgattgttgtaaaattgctgtgtatgtctataaatctatttttaaaaccttgtactaaaagtcataagaaagctggttttacccaaaacaaagcttcaaaagtaaagaagaact

SEQ ID NO: 7138 - DNA, 1692 bp, Diabrotica virgifera
  SmartBlast Evalue=1E-105; Info=CG6574 n=5 Tax=melanogaster subgroup RepID=Q9VGV5_DROME
cgggttacaacgtcggtctacttttagtatattatagaaaatatccgttttttttctgattttatttataatgtaagcaaaatactgctactgtactgttgtcattacataataacaaaatcatgcaggaatggctgaagatatctttaattttgtgcatttttggatttctgaaggagattcgtccatcagaaccctttatttacgagtttttaatagacagtagatggagaaatgtcacagacgaagaagtcactcagcaagtctatcctgctggtacttacagttatttagcccatctagttctagtctttttaattactgatttgtgtagatacaaacccctcattattttgctgggtgcttctggtattgttatttggagtttgctgttatggacgaagactcttttctatctactgattgtagaggctctctacggaacgttttgcgcaacagaagtagcttattattcctatatttacaccaaagtgaaaacagagtattaccaaaaagttacctcgcacacgagagctgccatattggcaggtcgcgccatttcaggaatattggctcaattgttgatctccttcgatttgatgaactatagagatctgaactatatcactttagctgccatgatcctcgcaacagcatggagtctgtttcttccaacttccaagaaaagcatttatttccatccggaagaagaagtgagcaagccgttgtctagaaaagtgacggatgcttttacattaatggctacgcactttaaaacatcattcacaaacggatacgtcgtgaaatggtctctctggtacgctttagcaacatgcggattcgtacaggtacagacgtatatgcaaccattatggacagctatagtaaacgatccctccaaaccaatatacaacggagcggtcgaagcagtattaacagtaataggttttctgggagccttggttgccggatttctcaaaacagactggaaaatcaaaggggagctctgccttaccatatgctctctcttccaagggttcataatactttttgcttccaggactaatcacgtcttttgggcttacgtgtgctacgtcttgttcggtggaatgtaccattttatgataacagtaacttgtagcgagatagcgaaatgtatcgaagatgacagctacggattagtctttggtgtcaacactttcatagcagtagttttccaaactattttaaccgcggttgttgtgacagagggcgttgggttcgcgttgaaacccagagatcagtattttgtatatggttgcgtccatatagtgatagcggcactttttatttgtataggtcttgcagtgtggatgaagagatcaaaggactacaagaaagcaattattttagaaaacggtagatgaccaataagaattttggtcgtgaagacttttgcagatgaagtctgatgtaagtaatagttactgacaacactctcgtaggatattaatgacaagtacaaatagaccagggcattgagaactaaaaataccggaataaatcgatttttaaatacagcacctagagacttacaacttttttgcattgcattcaggatgatgtcaggaaaaaagttacaatagaaaaatgggttgaaatgcataattgcatacagtacatagacatgccaaaataagtatattaagggcc

SEQ ID NO: 7139 - DNA, 1687 bp, Diabrotica virgifera
  SmartBlast Evalue=1E-153; Info=Protein extra bases n=4 Tax= Apocrita RepID=E2B6Y0_9HYME
aaaatttcttgtatattaaaaaattgaccataaatcattaatatataacattgagttgtgattttattggcgacgttttagacaaatatcattttttcccttgtactaatatttttttatataattattgaatacattttagtgaggtcaatgttacatgtccccagtcaaaactattgcctgccactcaccaacatagtaaggcacctgaaaatttttatacaatataatttgaatacattggaaaaaatgctactttttaatattttacaatgataggtggcactgatatttatttacgaccaacaaaacccatttccctattcactgtcaccttcagaatcactctcttcctcggcattctgtaaccaattgatgaattctttcatttgttcgacaaacatcattttaccctttacattgtaatcttgtttataccatttcagaatggtctgttctgagatcacgtcggtcttgtaaaacaacattatgattttctgaaatgccttcataaaggtcatgtttgaataacagtagtcttggactttcaacaacagattgatttctgaacgagctgattccgtgaatgcgccaaagagattagtgtagtacttgaggtgtcttacagcttgttctgttaccaattcctcctttttagaccattctggaatgtccatgacagtagtccatataatacacgctatttcgtgttcttgtatattatctttcaaggcaatctctttgatttcattaattatatcacgtagaggcttattctcactgaggttatcagctaatagcacctgtagctctttcttggctaattgttggtgctggtcgttgtacagtttgagtatttcctctagaccgttatcctgaaaggcatttcggaagtacagctgcgattgctttgtatccggtatgaagctcgtaagatgagattcaatgttggatttcttgatagcagaatgcagtgagttgacacctttttcttgacgccatgctttgaatatgtcaataaggaagtctaacgctaggtgatctttcaccagatgagaattgttcaggacaagaacggctgtgaaaggtatgctgccattcgcaatccatatgtacagcatcacagacagtttcttgcgatcggacggtaggaaatacttaacaaacaatagtattttcttgatttcgtcctggaaaagtttttccaaatacttatagcgacgcatcagtttgatgaacacctgttcccagttcttcattatgtccatattgatttcgtccggtgtgttaaaaatacatgcctccgttctgtacggaccatcaccttcctgtgatagtgtacctcctggaaccaggatgcccccagcgatgagtacatcgaagagacattcgccatagcgacgataatctaatttgttaccagcactgtccaaatatcgagatatagcttcaaaatcgttagaacatttatcgagtccagagattattgcatccctaaacccagttggatcatacctctctttttcatctctttttctggtcttgatgcgttgaccggatagaactggtttttctaccttctgactcatacaaaaaattgtgtatactttttttgaagaagcacacttcacaacagaataagcactctctcagaaaagagactggtgctccgctgcgccgtggtgat

SEQ ID NO: 7140 - DNA, 1683 bp, Diabrotica virgifera
gccctatgatacatcaaattctgattatcctgtgtttgtgcaataatagggaacttgcataaatttttaaatattaaaatgatattaaaacataaggtaacatgatcttaaaacgcttgcatgcgaaaaaacaaatatttttaacccgtacgctaattacgacgctttgaaaatgctataaaattcaaatatcttaggaggctcttgaacgtccttctattggttgacgtcacgggccacgtcaaccgggctagcagtcggaaacaacgcgattagggtaggtatcacgggtatattacattttaatcgtctttaatggaaaattcctaggtattatttatgttcatcttatatattgtaataagtagttccccaatcagcttagttttaaactgaaattgataaagttgagtgctactttgtaaagagtttaaaacgcataatatgacggacgagggtttttcaaaaggtcaatctgactaacttacctaccgttgatgtcttcatcgtggcaacttttataaaaagtagtgaaagctattctattggagaaatgcgaggtgtcaaggcaaataagtaagagttattaataagcatgtttaaaccgtttataacaatagtttggtaccattatattatagtatacggtttaccccgtgggtttgatctacctacctctaatcgaaggatttcgtatatcctggaaaagattacggtgtaatttgcattataataaagattatattttattgtaatgtttattagtacctactggagcctttcattattgtgttcaaagccttctgagaaaagattatggtgattagcagacgtaccgatagaacgtgtacatagccaacaaaatccttctttacaaagttaataatacgcataaataagaagaatcattattgtaattttacaagttaatatctttatcatctcagcttatacttacaccgcatccctcggtagaccgcaagctatagtagaaacccgactgtagaccgcatactatagtagcaccaatactttttagttactcttacttttattactaaaagttttgtttatttttaagttacttgtttcttctttgttcttcaacacaagaaacgacaaaagtaatttcataaaaaagaactttttgatacatgtcaacagagataaaatgttaatattttgcctgtcacagaaaaaatcatttttgccacagagtaaaacaagatatttcaactatattatttatctatgggcaaactgcattaaatgcaatagcccaccgaacgggcaaacgatacgagtggcctatgacgtcagaccccagctctcgcttttgaagttgtttgaaacggaaattttaggcgcggaactttgatcagatgttgtacgtacactattcattgttaagacgtaatattttgaatataacattttaaaacataaattaacaattttatgcaaaaaatttttttagtgcaagttccctattctgtgttatgtgattctatgtttatgagtgttcgtaattatgagtttttgggcaaaaaggttgtgaattctattttcatgtaggtattgtatattacatatgtgtagtgtatgatagagatatgtgcttcgcattttcctatcctctattgtttgtatgtttttgttgtttacttcttctttaagtattgg

SEQ ID NO: 7141 - DNA, 1678 bp, Diabrotica virgifera
tacacatatgaaggatgatcaaatatctgattctacggaatctaaagatgaactttcatcaagataaaaatgcagattccaataaagaaatttactgaaaaaaacggttgattctaaagcaggagaagctgaatccaacaagcatattgaagaggagaatttgttaaacatttctgtaataagagacattgatgaagataatacttacgccataagagaaatagctgaggcgcaaatagctgcgatcgaaaatgatgaacaagaaaatgaacaagacgaggaaagaggagataatgatgaagaaatggaagtagatcaagatgatccggatgatccagatgatcctgatgatccagatccaatttcaagtgataaagatgaaaccattgaatgtgatgaaggaaactctaattcgtgtgatcaagatatgagtaatgccgatatgatcagtgttaacactagtgatagcgagaataaagaaaatgaagcaactgaaaatgaacagagtgagactgaaagtcatcttttgagcgctgacgaattgtcagaaatgaacagcaatgataattccattttgggcacagatagtaagactgaatcagctttagatgaaactcttaaaggagatttaaatgaacccacggaaaagactcccacggaaaaaattactgaagaagaaccaactgaatccactgaatctactgaatctgctgaatctactcccattggaaaacggccgttaccagatagtgatactgaaacaggagctaagaaaaaactaaaaagatctgaagatgacaccgtgtcagaaaaaagcaaagataaaaaagacaaaacaaaggcgaaaccgggggaagaaaaaaagcgtaaaatcaaaacccttaccgctttcgaaaaatacatgagggaaaagaatttaggagaggaaaccctaaccaggtcggatttagaacaattttgtctacaaaaaaatttgtgaagcaattattcataaatcagaggctggagaactacatcaaattatattaagacaagcacaaataatagataacttacgaaaagaggttcaacaaatctctaagcaagccaaagatctcgatatcgttcataagaaactcatgaacgatattcgtgttcatggtaccatgaaaccgttagttcctttgaaaattacacggtcggtaggcttacaggttaaactgaatgtttcggaagacccaaacaagaggaagacgttcacagtacctgtagctactaataaaacagcaactactactacaaatactgctgcaagtggtgtgaatcgtccaagagttgttcaaaaacctaataatgttcaaggagcaaagactactataacccctgcctcgccgagaaaaacatctccagccgcaccaatattatcccaagctctgcaaacacgtccatcacccacccctacttctccagcaaccaaacgggttcctcctttgaggaataaaacctagtgaacctcaaaagccatcagctccaggagtaatcgacttaaccgacgaagatgaaaaaacagccacagccaaaccagtagctgtaaaaaataatgtacaaaaaaaaccgataaataccaaattaggcacatcagtcaaaattattagtaaaaataatttaatacaaaagaaatccccccgcgcaggtcgcg

SEQ ID NO: 7142 - DNA, 1680 bp, Diabrotica virgifera
  SmartBlast Evalue=2E-88; Info="Cyclin-K, putative n=1 Tax= Pediculus humanus corporis RepID=E0VQY8_PEDHC"
acataacctgtggttttaggtgttgtgtttgattttaggtcaaattatttattacttccttaactttctataatacattagtgataaacaagaacaagctccagacggctccagttattgatattgtgtgattaaaactgtaaaatattatcagtttcaaatttttacattaaaagtagtgtgctcttagccggctttaaggttataatttaaagaattacattttaaagatgaaggacgttatcgatgtaatggaactgcaacgtgagaagtcccggaagaacgttccgatggattacaaatcgcttgagttcaataatggatacacggctgccaggtttatattcgaatgtggcattaagttaaatggacaaccacttacagtggccactgctgccatcattatgcaccgattctttaaagaagttgatcctaccaattatgatccgtttttgatagcttcttccgcactatacctggcaggaaaagtcaaagatgatcccctgaaaattagagatattatcaacgtagctcacaatacactgcatagaggaagcagtctactggaaattggcgacgaatattggagtatgagagacgccattgttcaagccgaattgttaataatgagaatattgaagttcgaagtcagtacaactcatccccacaagttcatgttacattatctgaggtccatggaagggtggttgggtaaagaacagttggaaagcgtcccagtagcaagagcagcagcaactttccttcaggactaccaccacgatcccagtatccttgactatgaccctcgacacgtcgctatcgcttgtatatctttatctcttcaatgctatggaatacaattaccccttatagaagacaccgacgatgaggcctggtacaatatatttgttaaagatcttcccaaagagaagcattgggaaataatggagaaaattatggaagtgtacaacaaggaaacagaataggttatattttactgtcggtattgtgtaccagtcgtatttttcacatgttcgtattaggataaggtgatattacgaaattaagttaagtaagtgaggctgtataatcatctgatggattttttcaatttataagtatttacaaggaacttacttccactttccagttgcactgctgaattattaaatacttcatatcaatgtaactttaggttgttattttgctgaagttaggtccattttcataaaaaaaatgaagttttaagtagactttctttattagttcctgtccctaacactagactaggctttcgtgcctgctgtccagtctcttttggattgaattcttgctgtactatatgcttaaactgcgagtttttggtaattcctcttcatccataatatattgctgattcatatccagcttgaaggaccagaatacttactaacctaaacttcttcgattatattggactgtatattttcagttcagaacttttctggaagtgcaaatgtaagataataataataaaatgtagttttacagtggaagatccatctcgttatattacacacttctcgtataaaccaaacgttcctcgtaaataaatatttataaataagtaagattcatcattcgatattatatattatgtacttggaatttttcaacggagatctgtgaagacaagtatac

SEQ ID NO: 7143 - DNA, 1684 bp, Diabrotica virgifera
  SmartBlast Evalue=0; Info=Tubulin beta-2 chain n=18 Tax= Fungi/Metazoa group RepID=TBB2_ECHMU
cccggggacgcatcgaagagagtgttctgtgttttctagtaatagttatttaatacattttataaatcaaaatgagggaaatcgttcacatccaagctggacaatgcggtaaccaaattggagccaaattctgggaaatcatctctgatgaacacggaatcgaccccaccggagcctaccatggagactctgacctccaacttgaaagaatcaatgtctactacaacgaggcctccggcggaaaatacgtaccccgcgccatcctcgtcgacttggaacccggtaccatggattcagtaaggtcgggtcccttcggacaaatcttcagaccagacaacttcgtgtttggacagtctggagctggaaacaactgggccaagggacattacacagaaggtgctgaattagttgattcagtattagatgttgtaaggaaagaagctgaatcatgtgattgtttacaaggattccaactcacacactcacttggaggtggtactggatcaggtatgggtaccctccttatctcaaaaatccgtgaagaatacccagacagaattatgaacacatactcagtagtcccctcacccaaagtatcagataccgtagtagaaccatacaatgccacactttcagtacatcaattggtagaaaacacagatgaaacatactgtattgataatgaagctctctatgacatttgcttcagaactttgaaactcacaacacccacatatggagacttaaaccatttggtatccctcacaatgtccggtgtaaccacctgtcttaggttcccaggtcagttgaatgctgatcttagaaaattggctgtcaacatggttcccttcccccgtctccacttcttcatgcccggattcgctccactcacctcaagaggcagccaacaatacagagcgttgacagttccagagctcacacagcaaatgtttgatgccaagaacatgatggcggcttgtgatcccagacacggaaggtaccttacagtagctgcagtattcagaggtaggatgtcaatgaaagaagttgacgaacagatgctcaacatccagaacaagaacagcagctacttcgtcgaatggatccccaacaacgttaaaacagccgtttgtgatatcccaccaagaggtctcaagatgtctgccactttcatcggcaactcaaccgccatccaagaattgttcaaacgtatctccgaacaatttacagctatgttcaggaggaaagctttcttgcattggtacaccggagaaggtatggatgaaatggaattcacggaagcagaatccaacatgaacgacttggtatcagaataccaacagtaccaagaagccacagctgacgaagatgccgaattcgacgaagaccaggaagccgaagtcgacgagaactaaatttcatacgttaattttggatctgaaatcaaagctttataacttttatatttgtctcctctccttttattttttatttaagcatgttttttgtacagtctctacattcccgtttgtaaatttcgaatacactacttaaattattccaagactgactttttgttgcttgtgtttctggaatttcaggaagtgtttagatatttaacatgttttgcgaactgtttttttatgaataggcattaaaactgctgccattacttatactaaaa

SEQ ID NO: 7144 - DNA, 1681 bp, Diabrotica virgifera
  SmartBlast Evalue=0; Info=Arylsulfatase B n=1 Tax=Camponotus floridanus RepID=E2AZK6_9HYME
ttgtattgattcaagatatcagttaaccatcgaacaatggatgggttgttggttgcaacattgtttagttcacatggatcattttcaatattgtataagcatacttcttcaagtagattacattccttatgcttcgtcacagcacaatcaaccgtagcttgttttcttaaaattttgatttgggttccattggctgcttttttaatatgttttaatgcctgtcctgataacgagttaattactttagtttcgttgtactcataatctcttccagatggaccataccacgaatcccatgtgccattataggttgttccttttagcagcttccaaggaccaactgttaaagcagcattaccgtaaatgtcatcaatattgtgtaaaatttcatttcttgttgacggttgatcattagataaagtcgtccattgactttttccatcaatgttagtaattttactagaatctcctccagcagcatcaacaagtgttggtaaccaatccgttatatgaaatcgttgagaagctactctttggggttttttaattaatggactccacaataagcccgctgcccgtatccctccttcccataaagtattttttacacctcgtaatggataatttgaagctgcatttaaattaaatccagcagcggggccaccattgtcactagaaaatattataatggtattttctaattttcctgcattataaagagcctttgtgaccgatccaactgagtcgtcaagttttgttaaaacagctgcaaatcttcttctgttataatcttctatatgggtaaaatctttagctaatacatcgggcgctacaattgggttatagggattcccagaatgaactgcagcatgagcaaggtataagaaaagaggtttggatgaattgtgatttttgataatacgtacagcttcctccgtaaatacgtcagtggaatatttgccatgtaggtcatacgctattgataagtttcttcgcatgtctaatccccatcctggattttcagatgctgtatgatcgttgtagtcttgatgaccagtccaaaatccaagatgtgatttaaatcccctaaacattggtgtatactctagtttatatgatccaaggtgccattttccaacaatatgattctcatatcccaactcttccaaatattgcggtagaagtttctcggtaagcggtaatccacgagcttctgctccgaacaaaactgtgtgttgcatacccgtatgtatcggatgcttcccagtcattaaggcacttcgggaaggagtacatattggatttacgtagtagttttgtaaaataaggcctgaataagctaacgcgtctatgttgggagttggaatttggccagatccatgaaaactcacatcgttccatcccaaatcgtcagccataataaaaacaatatttggcggttttgaagcagaacttcctccctcaatatctataacggccaccaagagtaaaaaccatttaaagtccatctcagcaaataaaatccttttattatgcgacacaatattattctattaagtattagaaaattactaatttcactaacaagcacaattaataaaactccaccttgtgtttcacaccactctaatcaaataaaaataaatattaaaaataaagtaattgcatctgaatatattta

SEQ ID NO: 7145 - DNA, 1684 bp, Diabrotica virgifera
  SmartBlast Evalue=8E-92; Info=Interferon-related developmental regulator 1 n=1 Tax=Camponotus floridanus RepID=E2AMV6_9HYME
tttaaattgtgtattccaaaaacaaatgattttacaataattattaatatgtcacacctataaataataatagttacataataacttttaaataatttaataaatagcgatcatatacaagaaatagataatcactataaaaattgtgctaaattaaagtatatagaaaatagatcctgctgatgatggtaactagaaatctgaccgtttgtccctattcctcgccctcgataaagttctcgccttgaagttagctgcatttatcaatcgctttctatacctttccatttggtgttgagcatgggcgggcatttcgctgctgggagcaggaagggcgatttcgaaaatatccctaagcagatcattttcggtcaaatgcacatttatacttggtcctaagatattgcacaacatctcgtattgcttccttcttatccacgaatcaagcaccaacgtttcctttccaaatttaatctgcaattcaggtactatgtcactctctataaattgtagtatatccctaaacgtggccctctgttgtttcctgtctttcttcgctctgtatttatgagaatctgtagctaactgttttaaagtttctgtgacatctagtgcaaactcttcttcgaagtcctcactttcttctctacctaattcgtatattagtgctaaagattcgcctgcggccattctgacgtctaaatgtgccgattccaacagttctgagagtttttcgagtgagggtaaagctttagaattgttaatcatggttccaatatttcccggagagagtaacgtgaaaagtaaattccaagattggatggcagccgcgtgaagtactcctagatctggactgatggtcggaacggttccatcgccttttaagtaactggcggaatagatagcctccaattgttgcatcaggagaagaacgtctcctatttcgcctcctgataagaatatgatgtttcctaaagcagtgcagcattttgctctaacaggtgcagcaaccgagttgtcgcaaatcaaactaagcaagatcggtttcagcagcctgcaaatgtcttcggttgcatcttcgcctccgagctggacacaaataacggtggctaactcggcagcagctattttttcgggacctcctccttttttcaaactcctttctatgctgtcacagattgtgaactgacgatctctgataaatccaggcatacatttcttgacaaaacctttggttagcgtatcgaagcaattgattctgccctgggatgatttctgggtgagtccatcgaggatttctactaatttttcttccagttgttcctgtgcgagaagatcagcgtcctcgcactcttctccgcttttgttttcggaatagttactgacaacacttgcgttgtccataaaagattcatcgtcggatgaatttagggagccgtcgtttcgcccgcgatcagaccttccctttcgttttcctttcggcatggtcacaaaattaaataaacttattcttaaatttactaaataaaacaactaatttagcacttaatcaagacggtagactgttttttaaagtgttttgaccacctatactcgacacttgacatttaactttagatgaaaatgttgtaaaactcaataacatggtttcagttgaacagaatgtgatcaacttcgcttcttt

SEQ ID NO: 7146 - DNA, 1681 bp, Diabrotica virgifera
  SmartBlast Evalue=0; Info="Probable 2-oxoglutarate dehydrogenase E1 component DHKTD1-like protein, mitochondrial n= 1 Tax=Harpegnathos saltator RepID=E2BWB8_9HYME"
gtggtgaaggagctgaaagtattatggtattttttttctgaactatttagacttgcagccaaagacagtattgaacaaatagtgttaggaatgaaccatagagggaggttaaatttactgacaggtttactaaattttcctcctgtcgaattattcaccaaattaaaaggtaaccccgattttcctgcacattaccaagcaactggggatgtcataagtcattgtgtttcttccactgatcttacttacgacgacaaatctgtccacgttactatgctttataatccttcccacttggaagctgctaatccagtttcaatgggtaaaactcgagccaaacagatgatgtcaaaagatggagattatggaaatagaagatggtccgacaaaattttaaatgtgcaggctcacggagatgcagcttttattggacagggcataaaccaagaatgtttaggattaagtaatacgccacattttgaaaccggaggtggcattcatttggtaattaataaccaagtaggattcaccacccctgctgagagagggagttcttcaaggtataccactgacttagccaaaataatttcagctccggtgatacatgtgaatggcgattttccagaggatgttttaaaggcaacaagactggcgtttgagtaccaaagaacattccgaaaacaaattttcgtcgatattaattgttacagacaacatgggcataacgagttagatgatcctacgtttactaatccagctctataccgtattattaaaaataaagacaccgttccaaatgtatacaagcaggtattaattaacgagaacattataaccgaaaaggattgccaaaaaattgtacaagaacatgaactttggttaaatgaagaattgcaggctgcagaaaattatcaacccaaggacgtgtattttaagaaacaatgggaaggaatgagccaaccaggtgaggtgattagtacttgggacacaggaatagacacagatttaatgacattagtaggcaatgcatcagtaacgattcccgacagttttacaatacatccaactttattaaaaactcacgttaaaaacaggtttaataaaatatcaaatggtacaaatattgactgggcaacagctgaagtcttagctctaggttctcttctattccaaggccataacgtaagaattagtggtcaagatgttggtcgtggaactttctcccacagacacgtaatgcttgtcgatcagcaaacaaatagtacctatattccactgaataatctccatgaggatcaaagtggttttctcgaggtagccaacagtattttgtccgaagaagctgtattaggtttcgagtatggtatgagtattgaagatccaaggaatatgataatttgggaagctcaattcggagatttcttcaatggagcccagatcatttttgatacatttgtaaattccggagaagccaaatggttgtggcaaagcggtctgacagtccttttaccacatggttatgatggtgctggaccggagcatagttcctgtagattagaaagatttctacaactgactgactccaaggaaagcaaagctgacggagataatatcaacatgcaagtgtgccaacccagtactccagctcagtattttcatcttctacgcagacagatggtta

SEQ ID NO: 7147 - DNA, 1683 bp, Diabrotica virgifera
  SmartBlast Evalue=0; Info=ATP-dependent RNA helicase DOB1 n=2 Tax=Culicini RepID=B0WF10_CULQU
aagaacaactttgcgccggagttagaggattaaagacaccgttaaatatcagttcagtaatcaataattcgtcggcactgcttaattcacaagctactctgccttttaactgaatgacatcagtactggagcaatactccagccttcgtaacaccctttttctagatttcaactcgtccagttgcagtacggatttggcttccattagtttcgatctagccgattccagttccgtctgtacgataattttcttttcgaattttgggtattcggtagataaaatctctgttttatgcaaggggtgactatacattttctgttctaaaatctcaattttctctactatagataaaaattcttcttctttaatcttcatatccgtcacgggatttagtaggggcggtccttccggaaagcgtttcttcacttccttaatagctttgtacattccttttcgactatctttcgaccttagatcgttgggacagaacagccgcacggacgataaatgagttatcagcgtcgaatctacagtcactacctcgatttcgcctttctggtcttccaaacacggtttcggtatcatcgtttcatcgctattttctggtaatacgtgtaacaaaatatccactttgactttagtttgggttttgctttgtccttgtttatttttgcgccccggaataatctcttggacctttttgaagttaaccacagcgccccaatcgtattcatcttcagtcgattttatctttaaaagtctaccaggttgaagaaacggcaacaaatattgcgagcttgtgagatatgtcctaaacttgacacccaacaggtctaactctgttctaattacgtgataagactgtattcgctcttcatctttgatttcaagcgaattgaaaagttctaatttttcgttataatcatcataatatccgggtattgcagcttgattctgaaactggaagaacgatcgctccaacatatactcaggattgatttcttcgacccttagcaagttcagtaccatattgtaagtcaaatggaaggcggagttgatggggtccggcaaacctttaactatgttcctaccggctgccggaggcactttctcgtccaccatcaatattacgatacctttatcgtccaggcctcttcttcctgcccttccagacatttggatgtattctccagaagtaatccatctgtactcactgccatcaaatttcctcattccagtaaacaacacagttcttgcaggcatatttaaacccatagcgaacgtttctgtggcaaatagcgcttttatgagcccctcgccgaataaaatctcgatggtttccttcaaaatcggcaacaaaccaccgtgatggatgcctattcctcttcttaacaacggcagaaggttctcgacttgtggtagttgtttatcgtcgtctgataatacgtccatggcattgttgaagacttcatcgacgagttgtttttctgcagttgtgttaaaatctagcttggtcatctgcatggcatacagctcacagtcctttttgctgaaactgaacacaataactggtgcaaaattccgttccataatcattttgaccactttaaaaatatcagtttgagtggggtccttgttggcgaacccccctttttttcctttctgatcacctttggcagcat

SEQ ID NO: 7148 - DNA, 1682 bp, Diabrotica virgifera
  SmartBlast Evalue=1E-108; Info=Proteasome activator complex subunit 4 n=1 Tax=Harpegnathos saltator RepID=E2B9B8_9HYME
aatcctaacacggcagcatgtttttctttgatgttgttgttattgctggtagatggaacagctttctttttgtgcttgtacctcgccttctgcttaaactgagttagcaattgagtaggatctggaatgaactggcagtgcaaaagtccgctcaaatctttcgctgcttggactctaacttcgtgttgaggatcttctaataattctaatactattgattgaatctccagcacccattctttcctggaattgatagcggccatattgtagaatatataaataggcaaaaactcagctatgaccgctctggccgaccaggaaggtgacccggcgaccctcttgatgacgcctatggcatcgggaatgtctgttagagaggtacccgtctcggaaagtataactagcagattggttgacaacgttgccaactcctcgtcgacttcgttgttctggaacagcgccgctaacggtatcagctcgaggaactctttacgcgcagaatggttagatcgtaccatgtaggtcatcacgaatttggaaactatcttatagagtctaataagggattctttttcttcgtttttggcgtttgattcttggtctttatctgttttgtcgtcatccatttttgctaacgatatttctaatagttctttcatctttggttgtaggtatgcaaatagatttcttacattcgtcatctcgtcgccatcagcagcgtgcacctcatgtctcgagttagcgaaaacgatgactaacaagctggagatcctttcacgaatattcttgaacgggtgggtgagatgaggccggagatattccaataaacgaccggagatctcatggtttcgccacgattgttggcttaaggcgacaaacagcaattgcaggcgagtgcaagttactaggatcgtggggtctctgaatggatcctgtaatagatactccaccagccaatgatgtctgttgggatccctagattccagtcccatggtgatacagagcgcccaatcggtttgagtctccgtcgaaacattaacgatggctctctctaatagaggcaaaatggtcgaccacaagttcactattttattgtactcccagtgcttggaccctctgattattccgctgatgatttcggcggcacatcggttactggactcgagcttgtcttcaaccagtcgttgtaggtgaggtacgaagttcggtaagagagagtcttcgaatatcttaaataaattcttaaaggccaggaatctataggcgttgaaatgatcccgtcccttcttttcctctaacgatagaaacttaataagcttttctatattttccttattgttaaaaaacgtataaacatcattttctatctccgtcagatcgtccagccttttcgcggcagtttttttgcgtggaaggcggatcgtataattctaaggttttcggccaacagtagtaccctgtatattggtcgtggatgtacctcctttcctcccactgttccacattcttcggaatattcctatcactatatatcaaccatttattgtcttcccttacaccaggtttaacatcacgattaatcacagattgcttcgaaaacgaaaaaggatctactacagtcttagtatatttaactttgttctgtagcaaaatgaacacaagaattttcagcgacgacttcc

SEQ ID NO: 7149 - DNA, 1683 bp, Diabrotica virgifera
  SmartBlast Evalue=1E-153; Info=Cytochrome P450 6BQ7 n=2 Tax= Tribolium castaneum RepID=D2A099_TRICA
aaaattatatctacttactaattgattaaaaagaaataaaaaatacacctaatttactaattgcacagttagccatacgtcaccttctactgctgatattatagacttggggctgtacttgattgggagttttgttttttggtgaagagataccgcaaaatcttttattatggacgatattcctacttttgactgtagaagaccaaatcgggaaccaatacacattctaggtccttctccgaaaggtatgaaagcaaactgatgtcgttttgctttgttttcttcgttgaatctctccggatcaaatacattaggattaggataatgatcgggatctgtatgaatccctatgattggtaccaatattttaattccattcttgattataaggtccgtgttaggaactttataatcggtattacaaattcttgcaatggctgaagctggtggatgtattcgcagagtttcatttacgactttgtccaaatatttcatttccataatagcatcataagtaaattcgttgttatgcttttttaaaacagaccttatttcttctctcagtttatcttgaatttctggatttttggataactctaacaaagcaaaggatatagtagtggaggaggtttcaaatcctgctatgaaaaacacaaaacactgggcagcgacttcgttgaaggttaaaaagttatcgtcattttctctagtagtctctaaaccttcatccacaggtttaaaatctttatcttccgtaacttttcctttgttcttaagctgcaacattaaatgcaagaagtctcttctgtatacattattttgttctctaaatttaatcgtgctccttacgatacccataaagaaatcttcgagtgcctggtcgaccatcttcagacgaattaaatctagtaaccacttaggtaaattggtagaaattagacgctttaatctcttccaaaaggtaacttcaaatacctgctttccaaattgtctaaaatctgaatttgggtcttgaagactattacagtcgatgccaaaggcggcagatccgatgatatctgtggtaaatcttgctatgaggtcttttatgtcaacagcgtcttgaatactagcatgatcttttaacatttcgtttagaccttgagtacaagcaaccatagtggggaacatcatcttcattttacctgtagtgaatgttggtgtgagtttggacctcatcttcctccattcctcaccttccattgcaaacagatgattcgagagaggatctacttccggattggtgtagttaccgtggttcataaaatgaccaaaatccttctgaacaatgcctttgataatatcaagatcaactggcataaatcccggtttaaatacctggtaaaacccgccatactgccctcctttagctttgatttcagtgtacatttctctgatcagttctgcaacagacatcttccctgtggtcatcggtttaaagtttccatagaaaaactccggtttcatctgatacactcctcttcgtttccaataagtgtagatccattttttgtaaagataaaaaaatgcaacgagtatgactaatagaaacaccaacatacttcatcgaatgaaacaatataaatgattcacgttatttttttattgttgttattcttataagaatgaggtgacttcgagtcg

SEQ ID NO: 7150 - DNA, 1673 bp, Diabrotica virgifera
acaggttacaagacttctcatacatactgacaaatttaatagaccaagtgaagtatacaaaaatactttaaatatacttactatattactattattataaaatatcttattcccgaggaagataaatccaaagacacaaaaattataataaatatatttactaaaacactaataatatattcttttcacgcacaccttatttgcgctacataaagatgtagcgactaatacatactgtcggtgtgcgcatgcgccagggaatgtaaaaattcaccctcgtacctaaagaagtataacttcaaaaacatcctatctttatagtaaagggtcataagattagatatcaacttttatgtattacgacctaaaaagacctttgtccataactctttcgtattttattttaggcaaataacactgatgatgctctctttagagcgaaaacgttctgttttgtaattgtagccctttattggggttttaaaataaatttaccttttacacagatttttcttaaatttttgttttataaatgtttctttagtaaatgccttgttattatttaaagtggcctttattgtcttttgactcccttattttaacaatacgactgctgcataaccacagttatagtataccatgtactaaagattatcttcaaaataatagaataaacggagctagtattacaacacgttcctattgtgttattatttatatatgattaaaacaattaaaaatatgcttcaattaaattaactacctcatcaagatatatacattttctaaaatttaatcgaaaaataccgaaaataaatattttaaaattcaacaaacctagacaaagcttgcaatgtcactttataaagcgtattccaatttctgggtttgaatatatttaacactggatatataaacaaaaatataaacggctaaattaaattttacatgaaaaatgattaggttttgggcaatattttgagcttaagcggacttggcaatcaggaattatcgtgtttttcgtatatgtgattttatcgtttttagtgatgtatattgtgagtattttggctcgtagatacgttgaaagaagtgcagaaaatagtcaaagttagatcatatactcaaagctgagtagatgttaacgaagttgaggatgagtaaaaccattaaatttggaaccttttgccgattaatagcaaattaataaaagaggcaaacattgatgcaactaaaaagagacgccaaattttacttccgaagatgcactaatatggcgatggcatctgtcaattgaatttcaagtcgatcttgtcaatctaatgtcaccaatggcacgcgtttctatacaaaaaattttgtcattcggtagcgattcaaaacaataaaaggtggcgaatccttaccgacgctttctcagtcttcagtcttgacgagcacctgacgtgcctctagtgggccccggcttacgccgttgcggccatgtggccttgttgcggccatgtggcctttttgcggacacgtttgtcctttatatagaatttgtgctgccagttctttgttacaactttaaaaactgtgttttctctaccctatttcctattttaaatgtaagaatatgagatgaattctcaaaccagagatacgcctagaaatggcaagttccaactcaa

SEQ ID NO: 7151 - DNA, 1666 bp, Diabrotica virgifera
  SmartBlast Evalue=1E-146; Info=Vacuolar protein sorting- associated protein 13A n=1 Tax=Camponotus floridanus RepID= E1ZV01_9HYME
cgcttccgctttggacaaagaaaatataaagacacaggtcatagaatctccctacaaggtcataaatgcattaggagaagatataacacttcttctggaggagagctctttcaccggaccaccgtctggcgttggtgatgtcaataccttacaagatgtgccactggaactaaagaaaaacctaaaagaaaacgaaaagctacatctaggtcaagaattgctgtccaattcaaaaagaaaatcgtacacattgaaactggagataccctttttggattccacgttaacccttccagtaaatagggcagacaaacgctacttccctttgaactatcgtagttctattcatgacaactgggctcttatatctgatataagagtagaggaagcagtcactattataactttacgaagtactgtgcaggttcataactacttcaacgtgccaatagacgtctattatatgacttccaaaggcaaccaacttctgctggtcaatacaattaagcccaatgacaaactgaacgttccgctcaaagctgtctatacaccaactacagaactcttcttcggcgtacccaattactctgtaacagcgacgccatttacttggaaagaactggaaactaacttgaaggtcacgaagatcctgcagtgttaccccaaaactggagacaacgaaactatgccgttcgttataaaagcagtgggtgagatggagcaggtttactacgaacataccactcgacatacaatggctagtacttgttacaatattaatttgagaccagctgttattttcaagaactctctgccttataacgttgtctgttgtgtggatgaatctcctgatgagttcactgtagaacccggtgatacattacagttacctacagtggatcctggaaagaactgtctcgtgttcaggattcctgaatatttagaaaaagagtggtcctgtaggaaagccctagatggcgaaccggaggaattttcggtgtggagtttcgaaagtttcgacagtgctaccaaaatgatcctggatctgggaatgtatatcgtaagaaagaacgactcgcttgagttgatgttgtattgtccgttctggatgataaacaagacgggactcatgttaggatacagaagctcggatgaggcgctaaacgtattgtaccatcctcgtgacttccaaggccccattctgttttcatttaacgccaaaaacttcttcggtaagaaaaaagcgtcagtcagagtcgagaatggagagtggtccaacaaattctccgtggatgtggctgggtcttcaggttttgtgaactgcaagtggaacgaacaaacgtaccagatcggagtgcagaacagcctgacccacaacggtttaaccaaacagataactttcattccgtactacgtgatcataaacgaagcaccatacgccatagaatgccaagaacataacagaccagcagaccattgggtcacagtagaaccaaaatcatgcacagccttgtggccaaagagcgatgcacaagacaaattaatgaaaattagggttaaaggcacccaagattcttcagcgcccttcctctacaccgagagccataacacattacttaggcttaacaacaaatatggtggtgtcaacgtagatatacagttgact

SEQ ID NO: 7152 - DNA, 1681 bp, Diabrotica virgifera
  SmartBlast Evalue=1E-133; Info=Serine/threonine-protein kinase rio3 (Rio kinase 3) n=1 Tax=Aedes aegypti RepID=Q16VU9_AEDAE
cacgtaacttgctttatattgcacaacattaattaatttgttcgaaaacaactttaatacagtacagtattacctaccatattattacaataaaagcaacattacacaaaacaacatgtcgtgtccatgggcaacaattgaaaaaccagaaccagtaaatctggaagaaataatgtctgaagaagtcgcaagagaactgcaagccaaagaagacaagaaacttaaaccagaagttaacgaacagttagaaaatgccgaacaattacctactgatattccttctgatattctaaaagctttatccaatgatgcatttgatagtgatgaaactattgcaaagatgctccagatgcagtatgataaggagtatgatgatcaattgaagagaacggaagaaaagtttaatgggtcttcgaaggtgtcgatatcatttgataattatagaagagcgcctctcaatgaggattttattagtgattcagaagaagaagaaattgtagatgtcagagacaggaaattctgggatagatttgaaagtttagaacgtgaatttgcttccataccacaatgtggttataaagttcaaccagatggacaaatggtaacaaaacatgatgtagtgatgagtggaaggaagaacgcttgcaagttgctctcatttccacctgaatttcaaacaggagatggagaaaattttgatttgaagttgtctaataaagtttttaatagtttaaaaatgtactctaaaaatgaacaacatgccagaagacataaggtgcatgataaaaaagaagaccaagccactgcagaatttggtgttgatgagtttactcgtcttctattgtataagatgatcaacaatcaacttttagaaagggtcaatggtgtcattagtataggtaaagaagcagtaattctccatgcagattcagacccttcgttcccctttgactctaacttaccaaaagaatgtgtgataaaaatctttaagactacactttctgaattcaaacaaagggataagtacatcaaagatgaccatagattcaaggacagaataggaaaacaaactgctaggaagactgtatacatttgggccgaaaaggaaatggccaacttgatgagacttcagaaagcagaaataccttgcccaaaagttgtgacacttaagaatcatttgttagtgatgtcttttataggagaaaaccacaggcctgcgccaaaattgaaagatgctgtcatgtcagatgctgattacatagttgcttatgaacaggttactgaaaatatgaaggccctctatgacaaagcaaatttaatacatgcagatctatcagaatataacattttgtggtatcaagaccaatgctattttattgatgttagtcaatctgtagagcctagtcatgaaaacgcattccactttttgtatagagattgtactaacgtgacaaaattcttttcaaagaaagatgtaccagaagttgctaccccagacgaattgtttacttccataacaggctgtgattttagagaccaaattgctcttgctaatataagagaatctttcaaaatgaaaccacatctagttgataaacccggaatagaactaacttacaattttaacactgcgtgggagaaaactaaagcaggagaaatttctggtgtggtatctgaagga

SEQ ID NO: 7153 - DNA, 1678 bp, Diabrotica virgifera
  SmartBlast Evalue=1E-38; Info=Histone-lysine N- methyltransferase SETMAR (Fragment) n=2 Tax=Camponotus floridanus RepID=E2A795_9HYME
aaatataatttgttactgatttatgtccatggttatgacctgtcgaaaattaaaattaatggtaaaaaaattcacatttaacagtctgcttatactacatacaaggcaatatccacagatataaactgcttttgtttacaaaagttttattgctcaaaccctttgctctaaactggaaactatgcaccaaatcttcgcaaactatcgggaaagttgagtatatttcttattttggactccactgaaggaacttctaggcaagaatattaaataaattaaccgttaaatatcattacgcgatttttgtctacaatttaaaaatttctgcaagaatcttatcagtttatcatatcaacaataatattgatctatgaattacgtcctattttttaaacaatatgtttgtctattattgtataaaaattgtttgtaataatgcatcaacgtattacactttttaaaagctgttttcaataacgttagggatcttgatctaggtgagcactatagctatctacgaaacattcgataaaatattacaagtatagtacaggtaaagatataatgttcgtacgcctgtcaaggctgtagacacgtgccgattgtgcattataatgtgcggcattcatcggcacgtgtcgagatccatgacgtctagaattaaaaggggttatagttgtaaaaagatttaaaacaaaggccataaaacactatcctaccatgcactatactacatccgcacatggtacgcagcatatctctcaatactagtactaatatatttcaatgtaaaaagtaatatacgaacaatatgctcgccaatgcgcaatctaaatatgaaccgcagcatgctccgttgggtgaattgttctactaatgcaatccactggttcgtatacgtaagcggtcggataagtacttagcctcactgtccgatggcgctactatcgcaagagaaatctgctaacgtgtaatacattctcgtagacatcggactcgtctcgtagaccgcgaatggaagcgggcgcgtctagaaatatcggttggtgattcgattcttgtttttggaaaggcaatcgcgcagcgaaatcaaagaccgtttgggtgatgtgtactcttcttcgatggcgaccgtcaaaaattggtttcacgagtttcaacgtggtcgcacgtcggtttttgataagccacaaacatgtgccccaaaaagagctaccacggaggataacatgaaaaaatccacgatcttcaattggcagaccgccgactgaaggtgcgtgagatatctgagatagtagctgtctcaaaatactgcgtgggtcatatccagcatggcattttagacacgagaccgatgtcagcgcgatggatgccgcgtttgttcactccggacaacaatcgcaaccgtgagaccacttcaaagcagtgtttgaggctgtttaagcgtaatccgaaggagtttctacgttgtttcagaaccgtcgacgaaacttggatccactggtacacatcagagtccaagaaacagtggacgtcaacccgcgaacgtgctccgaagaaggcgaagactgtcgtgatagccaccgttttctgggatccacaaggtgtgatctacaccgacttcctgggaagggcaaaatggtcacatcaactataccaattattggaccaattcgac

SEQ ID NO: 7154 - DNA, 1679 bp, Diabrotica virgifera
  SmartBlast Evalue=0; Info=Shaggy n=1 Tax=Tribolium castaneum RepID=D2A009_TRICA
gccccaattacaagaattttacagtgataaatttgacttaaactatatatactatatatgcttctgtatataaagattatataggtgttttcaaaccaagctatatgtgtatatcgattatttaaactaaaacatatcaaatggtggccaatagacctataaagtgatacatcagccttgaaattatctaaatcgacaaacaaataaacataaatgggtcgacccctacagtagagtgaagtattttaggtattatatttgacaagtgtaaatttaaacattctagcacgaataaactaactattaactaagctataccagaagcggccgctgcttggatagttgctgtcgcctcggaggcttcctgactagcagctgacgtactctcctgaggattagctgcctcctgcgttcctctcggcaacaatatactgttcaatgctggttgaatgcttaactcttgttcggtaaaattaaataaaggtggtagcttgtttccattcggaagtcgagtatttggttctctaagttcattgaaaaaagaatgtgcacaagcctgtaacggactaattctagaagaaggggtatactctaataatcttgctactagttcaattgcttcaggaggtgttctagctctgaatacctgttgccaagggtgtgatttgatttgaggaaacttgaactcggtgtagttgggattcatttccttgatctgttctttggtaggtgttcccaacaccttgataatctcgactaattggtctacgcctgaatcaccaggaaatatgggcagacctaataaaagctctgctaaaacacagccagcactccacacgtcaattttcgtggtgtaatcgatagcaccaaaaattaactccggtgccctataatatctactgcaaatataagctacgttaggttcacctttgacgaggtgttttgcacttccgaaatcacacaattttaacactccagtctctggatctaacaataagttctgcggttttatatccctatgacatatacctaaagaatgaatgtaggctaaagaacgaaataactggtacatatataactttatgtggatgattggtatcgtatgtttagccttactgtaatgcctcgccactttatacaccgtttcagggatgtactccagaaccaaattgagatacacttcatccttcttgtctccgctagagtaaaagtagtatttaagtttcactatattgcaatgttctaacttctgcataatttgtaactctctgtttttaaacctcttgtcttgcaggactttcttaatagctactaactcgaaagtgtcacacaacttagcctggtacacaaccccaaaactgccatttccaattactttggtgtcggtgtaggatacttcctgaggtctgtcaggcccttgaccaggcctggccactacagtcgtcactttacttccatctttacctatataacctccactgctaattttcatgtctcctaaaggtggattcaatgcttgcttgttaccttctgcgaaagaagtggttctcgggcggccactcatattttccgtccgattttttaacaattctataaatatatcacatttcttgctatacccttcttccgattgagtgatcacagtattttcgcacttgtagtagtcatttatgacacct

SEQ ID NO: 7155 - DNA, 1676 bp, Diabrotica virgifera
  SmartBlast Evalue=0; Info=AP-2 complex subunit alpha n=1 Tax= Camponotus floridanus RepID=E2A8U3_9HYME
tttaatactgccaaataaagcggagcagaaattgaaattattttaaagaaatattattacaattagttaagtataatcggtattgaagaaagttaaggtttctgtaaatattaattgacatactttggatataagttgctggttattggagtaatcatgccagctgtccgtggagatggcatgagaggcttggctgtctttatttcagacattagaaactgcaaaagcaaagaagcggaaataaaaaggattaacaaagaactagctaatatccgtagcaaatttaaaggtgataaaaccttagatggctatcaaaagaaaaagtatgtctgtaagttactcttcatatttttattgggtcatgacattgattttggtcatatggaagctgtaaatcttctctcctcgaataaatattccgagaaacaaataggatatttgtttatctcagttctagtcaacacaaatagtgaactcatcaaacttattattcaaagcattaaaaatgatcttgcttcaagaaatcctatccatgttaacctggcattgcaatgtattgctaatatcggtagtaaagaaatggctgaagcattcggaaatgatattcctaagctattagtttctggagatactatggatgttgtgaagcaaagtgctgctctctgcttgttacgtttgttcagaacctctcaagacattatcccaggaggagaatggacttctcgaataattcatttgttgaatgatcagcatatgggtgtagtcactgctgctactagcttaatagatgctcttgtgaagaaaaatccagaggagtacaagggatgtgtatcattggctgtctctagactaagtagaattgttacagcaagttatactgacctacaagattatacctactattttgtacctgcaccttggctgtcagtaaagttgcttcggttactacaaaattatacacctccagctgaagatccaggagttagaggaaggttaaatgagtgtttggaaacaatattgaacaaagctcaagagccacctaaatcaaagaaagtccaacactcaaatgctaagaatgctgttctctttgaggccataagtcttattatccacaacgatagtgaggcgaatcttcttgtaagagcgtgtaaccaactgggccagtttttgagcaatcgggagaccaatttgcgataccttgctcttgaatcaatgtgccatttagcaacctctgaattttcccatgaagctgtcaagaagcaccaagaagttgttatactgtccatgaaaatggaaaaggatgtatctgttcgccagcaagcagtagacttactctacgctatgtgcgataagagcaatgcggaagaaattgtacaagagatgctaaattaccttgagactgctgattattctattcgcgaggaaatggtattgaaagttgctatccttgcagaaaaatatgctactgattatacttggtacgtagatgtaattttaaatttaatacgtattgctggtgattacgtatccgaagaggtttggtatcgagtgattcaaatcgtaataaaccgagatgaggtgcaaggatatgctgacaaaaacagtatttgaagcattgcaagcacccgcatgtcacgaaaatatggtaaaaggtcggaggatacattctaggtgaa

SEQ ID NO: 7156 - DNA, 1679 bp, Diabrotica virgifera
  SmartBlast Evalue=0; Info=Serine hydroxymethyltransferase n=1 Tax=Zea mays RepID=B6U5N6_MAIZE
tattaaaatattttattgataaatcttaaaaatttaaaaattagaatatgacacaataaataaatgttgaacggagattctcaatattcaggataccccggaagagggaacttttcgctgtatctgtttatttcatcctttaaagttgctactttcttgctgatgtcagcattttcatgaatcactttcttaaaatcggcaagcttgggtccggaaagggctgttgcttctttggctattttcaaagctctatcaatgaagtctacaacctgatcgatatccttttctttcatgttgcgagttgtcatggcaggagttcctaatctaattccagagggattaaatgcactcttatctccaggcacggtatttttgttgcaagcaatattgacctcttccagcacgtactctcctttggatcctgtcaagcctgcggatctcagatcgactaacaatacgtgaaggtcagtgccaccggtgaccaccttgtagcctttggattgaagaccgtcgcttagtcttttggcattggctacgatttgtttcgcgtacgcaacgaattctggagttttggacgctttcatagatgttgcgatgcctgcaatactattgttgtgtggaccaccttgtaatcctggaaatactgcttgattaattttgttttccaagtcgtacatgatcttctctcctttgggagtgactttccgtactcctttacggaaaaatataacaccagccctaggtcctcgaagactcttgtgtgtcgtcgtcgtgactatatcactgtattcaaaaggacttggagttacacctgctgcaactaaaccagaaatatgcgccatatctgacattagatatgcgccaacttcatcacatatttctttgaatcgtttgtagtctaatggtctcgaatagcaacttgtaccagctactatgatctttggtttgaacagtcttgcggattcttggagtttatcgtagtctataagacctgtttctgggttcaccttatatggcagtgattcaaagaacaaggaagtagctgaaactttcttagatggggtgtagaaaccatgtgttaagtgaccaccatctggtaaatccaaacccattattctgccgtgtggttcagcaacagctgtgtagactgcaaaattggtaggtgacccagaataaggttggacatttactccccactgttcaggatctaagttgaaggcttctaaagatctcttttgggccaatctttcaatctcatcaatatattcatttccaccataatatctctctccaggcaatccctctgaatacttattatgtagacaagtacttaggcattgtaatactgataaggtggtaaaattttctgatgcgatcagctctattcctgtaatttgcctcctcttctctttcttgatgatatcccacaactcaggatctgaatcccaaaggttggcattcaacgtcttggagatatcagcattagccattctgttagtagctgtactaaaacttcttggaactaactgggtgaataacactttttggacctcaaataaatatctacaaacgtttagcttgctttataacaccgattataaattatttactactaaaattcgttttatatctcactaacttttgattgtattaatcaattgtaaaaagacgtctataaa

SEQ ID NO: 7157 - DNA, 1675 bp, Diabrotica virgifera
  SmartBlast Evalue=0; Info="Titin, putative n=1 Tax=Pediculus humanus corporis RepID=E0VID6_PEDHC"
aaaaactgaaagacactgttgctgttgaacgagaaaaactagttttggacattgaactacaagatcaaacagccccgtgcgagtggttgttcaatggcgaaccaatcaagccctctgagagagtcgagatcaaaaacttgggaggtggcaagcaccaactcatatttaatggtttagatatggcagatgacggtgaaattaagtgtgtatcaggaaaacttgaatcttccatgatgctttccgtcaaaaaaggtgaaagcaagcctgaaattgacttcccatcagacttcgctgcaccaattagcaaacctattgtccttgaagtaccatacaaaattagtggaaccagacagacacctttggaagctaaacttatcaaagacggaaaggtactacctctaaaagacgtagagacaataatttcagacgacaaagtcatattcaaattaaaaaccatccagagaccaatctggtccataccagatcaaattatcgaacgggcaaggtgaggatgttaaagatgtcaagatcaccatgcaggacgttcctgctccaccagaagacgttaatgtaacagatatattccaagacaactgtaaaatatcctggaaaccacccaaagataatggtggagcacctcttctccattatgttgttgaacgacaagatctcagtctcaaagctggttgggaaaatgttggtgaagtaaaagccaatgaaccaactacattcaaagttgaaaaactaattcccaagaaagaatataaattcagaatcagagctgttaaccagctaggtcctagcgaacctgctctattcggtaaaccagtattagctaaagatccttgggatgaagccagcaagcctaaagatgtagaagtagttgactgggatgttgaccacgcagacattacttggaagacacctgacagcgatggtggagctcctattactggctacgttattgaatttaaagaaaaattcgccaaagattggaaaaccggtgttgaagtaccaggtgaccaactgaaaggaactgttcctaaactcaaggaaaacagtcagtacgaatttagagtaagggctattaataaggctggaccaggagaacctagtgatcccaccaaacctatcatagctaagtgtagattcgtaaaaccatttattattggtaatgacttaaacagtattattatcaagaagggacaagttgtaaagtacgatattaagtacgggggtgaaccagaacccgaggtgcaatggttcctcgataaaaaagaaatcaaacccgacttggaagaaagagttactatcgacaaatatgacagaaacactattattacagtacgcagatgtacaagagctgacagtggaaaatatcgtttggtacttaccaacagctctggtacttgtgaaggggtggcggaagttattgttttagataaacctacaccacccaaagctatgaaagtcgaggaaatccgtgcagatcacgttaaagttgcatggcaaaaaccagaagatatgggtggtactgacctaactggttatatattagaaaaaatggatatggacacaggaagatggattcctgcaggtgaagttggtcctgatgaatcaaactttacgtttaagaacctgacacctaagaagaaatacaaatttagagttcgag

SEQ ID NO: 7158 - DNA, 1677 bp, Diabrotica virgifera
  SmartBlast Evalue=8E-73; Info=Heterogeneous nuclear ribonucleoprotein H2 n=1 Tax=Camponotus floridanus RepID=E2AKZ1_ 9HYME
cttgactactccgccatttttattaaagctaaaaatgtcttcaatcggcggcgataacgacgatgcattcatcgcaaagttgcggggtttaccttggtcggcgactccagatgatattcttaatttttttgacgattgcagtattttggacggaaaagatggtgtacacatgactacatctagagaaggacggcctagcggtgaagctttcgtagaattcgaatctgaagaggatttagagacagctttgcaaaaggatagagaacacattggaaataggtacattgaggtttttaaggtgaacaaggctgaaatggaatgggtggtaaaacggtcaggcacttcatctggcttgaacgatgatggatgcgttaggcttagagggctaccctttggctgttctaaggaagaaattgctcaatttttcacagggttggagattgtacccaacggaataacccttctcactgactactcggggcggagttctggggaggcgtatgttcagtttgttaaccgagaagtcgcagagaaagctctgctgaaacatcgagaaaagatcggacacagatatatagagattttccgaagtagcttgtccgaagtggacacggtgatgagtttccaaggaaactctatgggagtttcgggaagacgcatgggcggcggatccagcatgttcagttccagaccagggccgtacgatagagacccaaggtacggtggtggtggtggtggcggcggtcgctttggtagctccagaggatcgcgcagtttcaaagattacagtagctacgacaggccctctccttggggcggcagtcagcgcaatggaggcgatatgggttctagaagtagctgggattcttggggcggcagcggtggtggtggaggcggcgctggcgtgcattgtgtgcatatgagaggcttgccttttaaagcgagcgaacatgacattgctgatttcttcaagccagtggtaccaatcttcgttcgaatgatccaagactccagtggacgagcttcaggagaagctgacgtagaattcgtcaaccacgaagacgctgttagagccatgagcaaagacaaaggccacatgcaacacagatatatcgagttgttcctgaactcttcaggaggacaaagcaacggaggattctcctatggaattggtcgaagacgaatgtaaagatctgttccaatttttttatcaagcacacaaagccagtagaatatcagtttgactgtagattcgaatttaataattaattcactagtgttgtggtccgttgataatttttttttgtaatttttggtccctcgagcaggataatgacgtcataatgctgcactatctatatatcacttgagattcgtaaatacattaagaaagtagtcagacttataggcttttgtacttaatgttgttaatattttataaatgatgcagaaaaatgtcattttttcgaaaaatgactctttgattctttgactttttatctttttctttaaacgaacaatttagcgggaccaaataaaaatagataatatacggtaaatccttaagatattctactggccaatgccaatttaatatcacttaatttaatagcctttggtgcagtattttttatttctctataattgtaaatgaatatgcaagaattccaatagatt

SEQ ID NO: 7159 - DNA, 1669 bp, Diabrotica virgifera
taggatccacacccaattttttcgtatatactgattcctaacattatcttttttagttattcgctagttctagttattaataactgcgggtttaatacggaacttaacctaaccctaatgaagctctgctttcacacaaaattttccagtttcagctgcatttgctctctctaattgttaccttctgatacattttttataccactctcacatattcagccggcactcctttcctacttagtaccattaggtttctggtaactttgctatatgccttcccaacattaataaacactatgtgcaagtctttctcttccactcataagtttttccctcggctgtcataaaataaaattgatgttgtggacctgccttgcataaattcaaaatgacctttatttctagaaccgtacactaaatttatactgttgcaaattaaattaaacactaaatagctatgtttaaattgttttttttttaaaagcttaattaaaaatctgggaataaataattttaatagataggtacgtatatggaatcacataaatgtttaaaaagaactttctctcattgccctacccctacgatcgtttacctgctacgatttctcggtactgaaaagagaattatttgttcacgatctagtggggcgtcccagtacgaaccacacaagaaaatccacctttgcgtggagccatcacaatgagagtttattttaacaatagatatgtttaatagtattatccttttttctacaattagaaaagattaaacaacacaataattttacaacaaacagctgtaggggttaggttgagatataagaaataatacatgaaacatgccggatcgtacatgcgcaaagaaatttggatcgtgaaatagtcgatgctttcgcttcttgttggatggagtattctttggtgtttctaagttgctttcaaacggtagatagaaacagggttgccggattggtgtgttttcccaaaattttgggttaatttgaaagcgtctattgaaatttttctaagcagaaattgtagtgggattttttgggggcggaaaattatggatgattttaaggggtcatggtaaattaaatttgcgaatgtacatagaactgtatattatactcccatataatcgaagacgataggaactatgaattatttccatggccctcgttgatattgtagtatgaattttgctttactgttcttcatttgactagtaatttattaaaatgcggcaacaatttaaatttggggactttggggtatttgagcttcaatttcagggaatttcagtttctaagtgggggatttataaaatatcatctggcaactctggatagaaagctcagtaggtacttaaaataaaatttcaacttatatcgctcgatttgattttgtataatttttaaaattgtattacccttctattcttaattattaaattactagcttctaaattcacttgatttctgtctaaaaaaagtcaaaagatgaacctaaccttgcataactacagagttatctcataacttgaggtttaacgtcgcgttataaagtgaccagataactcaagaactgtcatgaaataacgcaaaaaagttaagttaagtatgatagatcacaccaatttgatggttataacataactacaggat

SEQ ID NO: 7160 - DNA, 1674 bp, Diabrotica virgifera
  SmartBlast Evalue=4E-93; Info=Glucose dehydrogenase n=1 Tax= Aedes aegypti RepID=Q17DV6_AEDAE
atgggagtagctcattgtcaactgtctaattgcgcaataccaataatcatccgagttaaattcgtactttagacattctggaacttggtaggaaatgtaggagtcgatgttgccaaattgtttccccgtaaataactgtataacataccttacgcctttcaacatggtatttatatctgtattgttgtcgtctgtgtaaaatcctaagttaattaaagggaaatctcgcgaactgtttgattgtaacttaacagatcctgttgatttcggatgtgctaaatttatcatcacatgaatacttcctgccatatttagtttgttgtaagcagcagtattgttgtcattgaaattaaacaatgtttgtacatcacctcctcttggtggtgcaaaagctataaattctatatctggaacagtagtactatcattgttgacatttgcaaaagctatattttcagctccaaagcatctagttaaaggagtattagcactttgatattcgtgcacctgttccggtatagaaagctctggctgagaaagtttcgtggtaaatattagtcctacaaatactgggtgatctacaaagtgctttcctacaggtaaatccttgattaccggtacaccacgatttcttaaatgtgctttggggccaatgccagataacatcaaaagttgagcagaattgacggctcctgcagtaactaatacttcttttgacgccgtagcgagatatcttcttccatcttttataaattcgacggccacagcttttgttccttttattacaatttttgtagcaaatgaattaagagacacgttaaggttacttctagttccttcaatagggttaacatacgctgatgcagctgacgctcttttgttaaagtttatagtggactgcattttacctacgccaatctgctctttaccgttatagtcaagtatgtttaagcccatatcgaaggcagcagcttggaagtaggtgtcattgattacagaagaaggacccgtatgattaacgtgaactggtccagtagttccgtggtacgttagatctgggttaagaaaatcggccgtttctgattttttaaaataaggtaagcattccccgtatgaccaacttggatttccaagcttaacccattggttgtaatcatcagcattaccacggacgtaaagcatagcgttgatcaaactggatccaccaagacctcttcctctgggaaagttacatgaatggtttctcatgccctggcaacactgtgattgcggtgtggacttatagccccagttgtatttagagtttattgagtataccaacatagcaggcatatctgtcatattatttcctctatcacctgcttctatcagcaaaattttccagctcgaaatctcagaaagtcggctagctaatacgcagccagcgacacctccaccaacaataacgaaatcaaatgtaccaaaatcatataatgtagaatcacttgtattcactaatgcggcattatttgttggttgctggtaagttgtataattggctatatattctgacatttgctgcaaatactccagatctgtttgacatttcgaagaaccaaagaaaaaagccacaattaataatttcaacatactactcatctcgtgcaatacatcaaagacacagatgtaaatgct

SEQ ID NO: 7161 - DNA, 1672 bp, Diabrotica virgifera
  SmartBlast Evalue=0; Info="Hect E3 ubiquitin ligase, putative n= 1 Tax=Pediculus humanus corporis RepID=E0VFB3_PEDHC"
ataatttctctaatctgtttcaggaaactagctctaataggatctatatcatacaagtcttcttctcctaaaatattataataccaaggcctcttttcttccataattatctttggaggatcgagttctaactctttctcactttcttcggaaataaaactcgatgtcattatatcttcttccacagttttcttaactccagcaaatccaatgcgttcgtttactgtgttttgtatttcaccatgacacatcagttttaagaagctactgctcagaggcaaatcgaccagacgattatcttgtaataccttagctaagaatacacccagaaagtagaaatactttacagctttatcacatacgtcagaattctgaagtagaggggcagggaacagacctgaagctctccggacatagtatcctggaggtttcattccttctcctaagtctaccggttcgttcaggcttatagcttcatcgtcacaaatccacatgcctaaatctctcctctgtagttctgcggctaccagagcataaaattcgagtgttgggcctaaacctgttccctcctcttcagcgaattcaacttccaaaatggacttcctagctgcgtgaattttcatcacttgcattgcccattccagcaactgctctcctctaggaactttcaccctttcgtgctttaatctccccactctgaactcatgaggatcgtcccttcgtggagacaaaccaggcgttctttgcctctccattgtaacatccctttgcgtctgcaaccagactatgcttcgcgatgcaccgaaagcggtacaattaaagtatagctgcctcgtttcgaatgggaacaggaaaggacatgaatggtttagttcttcacaccatgctggcaaactagagctggacaaaactagcggatcttggatctgttgtaaaagtttgttggtgattttcttgctggaatattcgtctgccggtatatcagcattttcaagtattttgagatcgttctctttcgaggttgtaatgacaaataagtgtcttagaagctgtaaaacatcttcaactgtacaatttgatactgaaggagtgccaggcactggtgtactcggtgataaagtggtaccagcgatagaactgctgccactacgagaaaactgggtcgctactggagtagctctgccttcctctatgtcgtaacttccatcgtctttcaattccttatatataattaaatatgtgggttcccaaatccttctaactttttcttgtttggaattaaattcagtcacttgcatcaattcttgtactgctctaaatattgtccaacaacgatcattcaattctatttctacgtcaggaattccaggcatatttggacccttcagtaacaactgcaatttgggctgaggcagtagctcatgttctgatattgagggagcttcactttggccaggagggggtacttctaaatctgtagtttgattgacattggtccttcctggtctgggatcgaaggcaggaatcaaagcagaaaactgcctctttaaaacaaattcatcgtcccacgatcttctctttgtaggtctagcttcaaacgtttcctcctccataaatgacaacaaatttcttgaaaccatcacttcttcataatcggcgtcatcttcgtttt

SEQ ID NO: 7162 - DNA, 1674 bp, Diabrotica virgifera
  SmartBlast Evalue=2E-56; Info=Glycosyl-phosphatidyl-inositol- anchored protein n=1 Tax=Bombyx mori RepID=Q2F695_BOMMO
cttttcaatggagatcctcattcctaaagtgctgtcaatagttttgtaacatttcgactattttactgcaaaaataattacaaaggcgacctgtatatctctctaatcatcgagaggtatttatattatttggattttttctaatattagtgataaaatgccctcagcggctagtgtcaagattgacaagcaaattaacccggaaaatgcattagcagaatctgcacaaaatttaacacctcttaggcaagctattactgttatcgaacacaaaattaggaatttggaaaaacgaaagtcaaaattagaatcttacaaggacttacaaaatgccggaaaagaactgaatgccgatcaaaagactgctgtggctaaattcaatgaagtgacgaatacattagactttgctagagatttatgtaaacagttcctagggattgcagtagcgtccgagaaggaagcgaaaaagattgcgaaaaaagaagctgctgcgaaatatcaggcggaattggcgaggttaagggaaattttattggtccaagatgcgcttaaccagatgggtaacgagactgttcgagaggactttttgcaagggagaaatggagctgctcaattaactgaatcagatctcaaactactagacgacctataccctgaagtgacaccaaaacatgaagctggtaatgctaccgccttcatgaatgaagtacaagcggctgctgagcatctgttagcagcagttgatggcaaacctaaagaagtatttggaggctcctatagccagattaaggaaatattaggaaagattcatgaaagtggatattttgatcaggcgcaggtatatgaggagttcgcagttgtcgaacccgaattagtggaagaacccgaggttctcccatctgagccattaaacaaccatgagactggagctgtgatggtgcctccgcctccacaacccctaccagaacccacacagccgacgacaacagcgccaccacctgacatgccgttgattgaaagtttgacaatagaaaatcgtgctaccttacatcaagcgccgccaacgccggtggaacaacctccgttggagccgcccaccttgacgaatgaaccgcctatgttttatcaacaactacctcaacaaccgcctccgccacaaccgcaaccgcctagaccaataaccgaaatgcttggaactggaagcttctttttcttacaggactctgaaattgatcctccggaacaaattgccagccagactttcacgaaccaaaatttcaccggccatccatctcaccctgttcagttaccaccacctcattttgcgaatatgcccaataatttgacaccaaacaatcaccaacttccccaaatgcagatgggcaacaacgggatagacgatactttgaggtcacctgaagaaacgcttcagattggcaaagacggaggagcaccaccaaacagaggtccaccaaggcctaacaacaaccagtcttactaccaaaacaacggttacaataggccacgacagcaaaaccagaataggaacgctagtggacctaggcctactgctactagacatgcataatactaaagcaacattattcggtttatccctacacatgatattaagttatcatcctgttatgtattttttttattataagttaaatc

SEQ ID NO: 7163 - DNA, 1673 bp, Diabrotica virgifera
  SmartBlast Evalue=1E-139; Info=Thymus-specific serine protease n=1 Tax=Culex quinquefasciatus RepID=B0WJZ7_CULQU
ttttaatatataaatgcctttattaaaaacaaaaatctttctacaacaatctacactcttataatatcatttgtttgttcaatatcaattttgtatactggtctctttaattgtaataatgtgttgttttcttagaattagattaaactacaacttaataacaaattagaactaggttacgaatctatccaggtacctattaattcttctatttggacacgagctgcctttaactgtggagtatcatcatcggaagggttaaacatatttgcggcatgggcggccccttcgataacaatagcaggagctttatcatttaaggtttttgtaactcccaaaacgtgccatggatccaatgaaccctgaacgaatacaacgttagaaacttcaatgtctaaaccaccatatagaacgttggtcctctctatagcatggtttagaaacgtttcattgtataaagatccgaaagtatctaggcattgctgaatggagaaactaagtggaaatcgggtaccaaatatatgaggtttgtaagaggaagtttgaaaataaccaaattctgtgcaggtttgatatgtccattggcgacttccataggcagcatcgctatcccaactaacttccttcatagagtcaaccatattattataattgtaatcaaaacagctattaccatccgcgtcaagaattaacttagtaacagctgccaagcgattgatttcaagtccggtagattcgtccaaaagaacgttacacaagcgatcgacggtgaggtttttctttttaattcctgcgctgttatcattattatattgtaccactccagcaaaattctcagctaagttcatgaagaagttggacatgaacaaagaattattaacgtgttctgatatatcctcacacaaattgaattgttcgttaagtttcttttggccaacttcagtcttcaaaagatttttaacttgaacaaaactccgttttacaatatgtggacacatttcgttactggctcgtaatgcatctgcaaccaccataaaatattctgaaaaatctaaatgtgcgagaagtggtccacttgcagacatggccccatgcaccaaatggggatacttttggcgtgcccaggcggccaagtttcctggataagaacctccgaaaacaatccattttacatcagaagtcaggttgtactctttgttcataccttcaatgaaaaatgctaaatcgcctagggcctgctggcttgtcagatatacaagattctcggtacttaaatcttcggtcggacggcttttaccatagtatctgtgctcgagatcaaacaaaattggtttatatttgcgggcgtatgtgatccatgctccgctgatcacccaaccacctctttcttctccctctccaccaatcataagaaaagcaagattgccttcaccactagcaaactcatcattcacatagtacctctgttgccaggtcctctcatcgtttggattaaaatggtccaaagtttgattaaaccatctttcatatttgttagcttctggatttttttctcggtgaaatagtctacccctccaaaagaaattagatccagcagcaaacgaaccgaaagtcgatagtaaaagcactaccgtggtaaatgaatgtaatctagccatagcttaagcttttgg

SEQ ID NO: 7164 - DNA, 1673 bp, Diabrotica virgifera
gaggttttcttgcaaggtgtagtgcaattgttttcagaatctagccaagtgtttgtcgttattttgtgttaatatcgtcaaagtaaccttagcaaaataatgtccgacaagaaagccattggtggcgctggtcctccaccatcgagtggaccctcatttactccccaacctccgccgcaggctaatcccccaatgccgactactcaaccttatggtgtgatgccaggtattccgggaggtaatccatatgtgattcctgggcagactcagatatatccacagggtcctccccctacttatgatcaagctttgactcatcctgctgctatagttggacaacacatgtatccaccaggtacaatgtacgctgctggctatccaacatacttaggatatccaacttacgctccaatgcagtattatccttctctaggtgcttactcatatgccatgcaacctgcacaactcaggccaactataatgatacctaacggttacgatgcaggtgcaagatttgacggaatagctcaacaggtacttcccccagctccacccggcgttcccccatcagcagcacaactagcagcaatggccggccatcaggtggctttaggacagaagaaaaacaccttcttagccgggggttccgacgggggctacactttttggtagaaaaagctcgaaattaaaataggaaaaacgaaattgttacattttattttgacggacggatgccccgacattaaaaaaacaacaacgtcgataggggtttttaaatctagtccttagttaataggccagaagttagttactcggttcacaagaggatgccgtaatacctttaaatcgtaaccttataatatacaagtttaaatataatttaatttagatgtatggtattgtttcttttgtaataaaataaaaagtttgttaatcattagtaatcataaattaaaactacaggttagttttgtcacagtatgtatttataatattttttgccacaagcaaaataatggaaaatcacagtttaatgcaaaagcaaaaattgttctgccttaacgtcgaaaaattttcataaaagcttcaaaaattgaagtttaggattgcaataatctaataatctttgtatgtcttcaaccatttgagaacatgacgttaattgacatttgacaccaggcactagcgacttatactagaactcaaattgtcgttgtcgaaaagacgctgtaaacagtaaaataatgtggtttaaacaactgatatctaaattgtttaattttctattgtaatttaaaatgagacagcgcgtcggtgatgtgacaatacctcccatttgctttttcatgaattttgtaacagagatttcatggaaaagcagatatactgaattcgctctaccgagattcactttgacacattcggaataggaaacatacaacacaaaaattcctacctcacactattaactgctaaaatcaacttaatctttcattaaaaaaagaagaattattagaaatagtgggagtgtctactaatctcataaaattttgtgaagtttattaattttctcatttgttatcaatacattataatggtttaaaaataaatttatcgctaccttacgctatcaataaataattattgattagcgtaaggtttatgttattttt

SEQ ID NO: 7165 - DNA, 1671 bp, Diabrotica virgifera
  SmartBlast Evalue=1E-106; Info=Contactin n=1 Tax=Harpegnathos saltator RepID=E2BBG0_9HYME
tagatatcaaatggtattacacagaatatatagttaaagttcaagcttttaataatgaaggcgctgggcctattagtcctgagacagtcatttattctgccgaagatatgcctcaagtggcaccacagttagttattgccaaatcctttaattccactgctcttaatgtcagttgggttcctgttgatcaaactagggagaaagttagaggaaggctcataggtcacagaatcaagtactggaaaaaagatactaacgaacaagatgcagtctactatttatcaagaaaaatacaaccatgggctctcattgttggtcttcaaccggacacttattattttgttaaatcaatggtgtataattccgctggggaaggaccagagagtgaacgttttattgaacgtacttatagaaaagctcctcaaaaaccgccttcttctgttatgatatatggcatcaatccatccacggtcaaggttgtgtggcgatatgtgcagccatcattagaagaagaaccattacagggttataagattcgtgtatgggaaagtgatcaagatttgagcacagccaatgacacaataattccgtttggaggaaagctggagggatatgtgaataacctatctcctggaaaagtctacaaattgagagtgttggcgtactccaatggtggagatggtagaatgagctctccagcaaaagaattccaaatgggtaggccaaaataacactatggttttgttggtgatggctttatagtacaagcttagtttattttagttggtgtagtgtagaaaatgccattgttgttgctttaagaatttttgtgcaaatggcattcatagctaggggattagatttttggtttgaggattcatgtaactaaacgagttatacttgtgccaaaataggaaatgtaaatgtctaaatattggatagaaaaaaaagacagtaaacttttatcgtattttttatactagaggaagtaaaaataattacaggaagttatgtccacaccagaagtttatgagttcaaaaaaaattaccatttttcattgcttacctgaaataatgttttaaggttgaaagtaacagtaaggtaaaaactcgctacaaggcattcataagataaaaaatccataatgtttaagggtgttcaattttcaggaactaataaggaaaaaagaaacaaagaaaataatggaaaatataaaagaagaaattaaattatatactgaactatcaaaagtgaaaaaccgaataatactgtttgcaaaaaagtagttggaataacagtagataaacacggttatttctgatccactttctcaaattgcggctaccactgacgtcttcttcttctttaagtactgtctcccaaaaatgatcatcactatctttactctatctgcctctgctctctattgagctgtatttaaaccagtcctttaaaattttcaaccatgacgcgctccttctttatatgctccttcctcctcttatctttctctatattatcaatcttaacatttcatagcgctgtcccctcattacgtgtcccagatattgtaactgtaatgtatcagccgaaaagcttgtggcaaatctaacttggtgaactccctacctccttgaagctttgcaaacaattcttctattcttggcata

SEQ ID NO: 7166 - DNA, 1668 bp, Diabrotica virgifera
atttgtcagccacggataattttttaaaaaatttgttcgcgacggataaatttttttagaaaatttatccgcggcggacaaattttttattgattggacaacctcaaactgaatgacttagaaaatttgtcagccacggatattgacggataaattttttaggaaatttatccgcagccgacaaattttttatgatcggacaacctgaaactgaatgttattctttaagacactgtcaaaatattataccttgatctccgactagaagataataagtgaaaaacacgaagaaaatgttagcagatacaaattctggaagggatgaagacaatattatctaattatctaacaatattattaattaacaccggccaattttctcaggaatgcttcataaagaaatgttaaaaggtatgcttgacggacaaatatggggcacatttttgcagtcaaacgttattaagttttagaacttgcaaatctataggtttttaagtgtctgactgtgtgtccattaagcatacaatcacgttttaatggtattttttcatgaatccttcatagaaaaaaacaaactactgttaagaatttaaaattagctcgttaaaaatttaatatttttgtccgtcaaatttctcgattggttgttttctactttttatccccctatatgacgtaaaaatatatttctgttattctgttcataatatttaatcattgtaccagtttcagattaaccgacaaaaaaatttgtccgccgacaaaaaaaaattgcccgtcgatcaaaaaaaatttgtccgctgacaaaaaaaaaattgcccgccgacaaaaaaatttgcaaaaaaaaaactgtagataataaatttgcagttctctttggtgaagagtttgttgacaccctgtatatacaagatgtaccatatacataaaaacatgatcctgaacaggaacagcgtcgtaggaagcctgctattgcttaataaaaaacctattacctttaatttaaacaactgacatttggacgaaagtcacttgagctatattagtcattcaatcaactgtttattgatccaagtattactggtacaccccgtataacgtttcttgtagagtatcgtactttcttcaatcaattccacatatcacaagcaaagagtcagggtttaatcttacgaactaaattgtatagagcggtattcgaaaaacacggtgagactgaagccagatttggtgtttttgtcttacatggcgggtcccgttggattatattatacatgtcatagcatagaatatatttttattgtctgtaagtgtaaaaattaacaatatctttgagatagtcatcgattcagagtaaataaaattggtttcttcctaatttttaactaaaatcatttttgtatagaaataaatatgtctaatacctctatatcactatacagagtgagttttaagtaggaatctcaattatttcggaagcgacttgcactattttttagacgttgatcttgtagtgaggacgatattatggtggcattctacaccgttgtcagatcttccgccccttctgcaaatctaatgaactttaagtccttaagcaatattaattatttttcatgtaatgtttcctatacctaaatatcataatcttgttacatttacattaca

SEQ ID NO: 7167 - DNA, 1667 bp, Diabrotica virgifera
taataaatcatttattaacaatagtaataataataatctatttacaaagttaacactatattctttctataaagatacctatagttatgtacaatgttcatatcttaaagtacactacaaaacaaagaattgccagacacgtacttagaacattagtgcttactgatgatttgtcagaatcaacattaaatgtatcaaaaacgatatctccttcatcaatttctttagctaatccatacactttcttgtcacatattaaaggactgccttggattagctgggtcaaattgagttcaacttttatctcagaatccctgtatcgagctacatctacttttgtactaattactgtaccgttgttgactgttacaaaaaggcagttggtgagatctttcttcgttgttgctatctgagcatgttctgtaaaattatggttttgtactttgaacgtaactaaatctgtaaactcacttttctctggaactaacgctacagtgttattattattataaatagactgagcgtataattttgccattttcagtttgtctttaatatcatcatacacagcttcgttgatccctacttgtgtgttactggttataacacccaaataagtggtatcttttaggctgtcttccagactcgtcagtagatctgcaaaaactggtacactttcaacattctcttcagtcacattcataatcttccataactgaagagcttcacgttggtcaaaatggtatttcttcaaattacttaagacatctgatgtagagttttgagtaataacaatttggaaaatttcttgtctgcaaacactgtagaatttttcttcagtctcgttaatagtgtttaaagccttttggaaatttgctgaagaaaagtttccttttttgaatataaccagtgggtcttcatccccgtaggtcatagcctcagaaaactcggcagtgttaatgtttagagcttgcaaaaaattccgtagttgaactccagatatgttcaacttttctaaaaatatcgtattatagaaatttttaaactttacgtttaaatcatccagtatggtctctaagcccttcatactcaatacgttagagggatcgtattttagtttttgtagtacttctacagtttgagctaaacttatgtttcctacatcatacagcattatcaaatctgcaggggtcgcaaaattagcgtcatagatagctttaactataaattccggtattttttcgttttctagtccgaacagtagtttaacaatgtattcatacttctcaggtatcgatggaggtactgttgtactggtagtactttgtactggtggtgaagtttgatttactggcactgaagtcggttgacaccatgctaccgaaactatgaataaaagaactgcaagtgctgtattgatttttgccattgtttagtctcaaaaaagttacataatcccttaaagacacttgctcggcagtgaactaaatttaggaagggaattttaaaacaaattcaatcaccataaattacttttcatctgtcactaaatcaaacaatttttattttacagtaaacacaggcattataaagataagaaatcacgatgaacattaacaaaacttttgtgacaaaccaagttaagaatcttcaagggcaggattaca

SEQ ID NO: 7168 - DNA, 1670 bp, Diabrotica virgifera
aggtactgtatacacctcgaaaggtatctatctattcttttttctgtttcattgtccaactttcacgcccatacagcaaaacagaaaacatctgatcattcagattatgagctctagactaagatctgatcttgtaaaaaatgttttcatgttcatgactgttttcctcgctctttcgatttgtgataatttcttttttttttttttgggtaacactggctgttgatatttgctcccaaatattttatagaagttatctgttctattatttgtcccttgtcatacacatgtatatttattggtatcattgaagatactagaattttagtttttggaaacgtttagatttaaatcaaacattttgctgtgagtaactactgaatttactatattttgtagtttttgtacattgctattagcacggtatcatctgcttacctgatgtcgatagtactcattaattttgatcccaccttcaacctcttttaacgcttctctgaatgcagattaaataatagcggtgataagatgcaaccctgtcgcactcctttttcatgacttttcctgccgtatttaaatttgtttgggggcacaattgtatttagtgataataaagacatttatctttaagcaggaaaaaagccgccataagtgatatttcctgtttcatttctatatcttgataggtttgatgtaaacatacatattcttcagattttctgttataggtactactaagtacaaacagaattaaaaagtcccatggttattttgttgaaaatgataaaatataatataaaatatatgcaaaactacgaagattatcaaaaaaaaagatgatttttgtgttattgatgacactgtttataaattttgatcagtagccaaagtacagattgtcatgatggtcgccaacatccgagaaacggatatgcactacaagaagaagaagaagaggccaaattcagttattagtgcaacatatattataaagcactttaaaataattgctgatgcaaacatacaaaaacaacaatgtactgcatttcatcacatgtatgtacaccagagaaacaaatgtgaggtattttcctaacagcttgttgaagagttatttaaagcaagacaaatttcacaaggtagcaaaaatatgtgcttcactcttaatcagtttctcacaagagtgaataatggtattttacactttgcaatgagtattccattgtctaaagaatactaatcaaataatgaagtattgatttgattatgaaatgattgtgtaagtacaacagttgcagaaatctcctgaaaataaagatcaaaagaaatttgagcctgcatttgttatcagtatttggccagtgttagcttaaagttacctacacaaataattttaatagttcagatagttgagaaaggcactctgccgaaacagctgtagtcacatagttgtaatacattttgtgcaagtatagaaaacacacgttttcagtgttttattgttagatttaatagttcaatatatcgacggcggaaaagcaggaactcttaaatggcaagatgatgattttacaggagaccaaaaaaccgaatcatttttcatttagggcgtatcatattatgtttggtagtaccgttttctgtaatttaaagccttccggaaattttct

SEQ ID NO: 7169 - DNA, 1664 bp, Diabrotica virgifera
acatagtataatagatactagaaatttttatcctcgaatttggaatttgacagtaccattatttgtccttttggagaaatatatatgtgtggaatcgtcttaattcattcaattagtcccttccgctatattataaagtgacacttgaatttaaaacacccctataaaatttagtacaccactgtaaaattattctgatttcaactattgtttaaaatattatcaagtatccaaagctgacaaaattaaaaagcttaattcaaacttttagggtatacttcaaaagtatttcaattgacttaaattgtataagaatatatttattaatgtcgaagttagaataacttaaaattcggaaaccacctaaacctcgagttgacttcaatttgatacgtgtcaaatactgtttcacttcggtgtgagacgatcgagccgattttatctgaggtacgttcagctgagggcacgatcgagccgaagttactcggatggtcagttgtgcgactgtgcagcccaggctagggatggcggtttttgagaaaacaccggttttcggttaaaccggttttatttacttacggtttaacctgtcggttataaccgatcaaaaaaaccggttattccaaaaaccggtttacggttattttaatcaatattcaacacccaattggtaacaacgttacatttacattgcactttagtttgtgatactccacatgtctattttcaatataaaatctctaacagttttcgatatattggaaaaaatctattttcatttgataacttcaaagggctgtaaatttttttggttcaatccatctattttggtcccaaaatatatgatttaatttatgacctaccgttataataaactaactcaataaaaatttcggatccaaatcatatcaaataattgcaaaatacaaatgaagggcttaatgtgaaacactgacaagcctcaaaaaggtaaaagtgagatatttgactttaaatgttaaaaataatattaaaaaatccagtaacaactttaattgttttagtttagatatttccatgcatcatgccctatgccccctatggggctgtagttgacaacaatactaatcaaattacttgaaactcaagaaaaaacagcctttatttaaaaaaaaatgtggcttgttacatcataacattaataataaatacccaaattttagatatacatatgtagattcagaattttctattattgactgagttcggggtggtttcaaccctataggtgttaaacagtgtttatttctttgtctccatcaacttgttggaatttttgaacaggtgtgtttggtttttattgacggactttgttcattatcctacaaccaaatgcaataatataacaagccacgtcataagccactacattaatattgaatggtaataatgtgacaagccacatttaggaaaaaattacatatcgctggattttcactacttgtgttacttctagattgtacatagtcagggtcacggtcactgtcatcgaatgtcaagtcaactttgctatttttctttctagaatcgtcagaactcaataattatccgaaacgcttccgcccatgttcgccattttgatgtggcttgtcattatgtcgagtagatactagaacaaactaggc

SEQ ID NO: 7170 - DNA, 1661 bp, Diabrotica virgifera
  SmartBlast Evalue=1E-174; Info=Polycomb protein EZH2 (Fragment) n=2 Tax=Aculeata RepID=E2AC62_9HYME
agtatgtggaactcactgaaagaactgaccccaacgctcctccagagtgtacaccaaatattgatggacccaatgctgcatcagtgcctagagaacaaactctccactcattccatactttattttgtagaaggtgctttaaatatgattgcttcctacatagactgcaagtttgccatcctggacccaatttacagaagcgtcgtgggcctgatctaaaaccttttactgatccatgtggaactgactgctatttacttttggatgtagtgaaggaaacaatggctgccagagcgaagcaggaagaagagtctgaaaaagaaaaggagaaagaagttaaagctaaagtacctactaaaacagccgcagaaacggttacagaactgaaaacgaacggcgttagcaaccagtctccaaggaagatctgtaaacagcagagtgttgattctggaaacgaagcaagctctgaagatagcaacgatagtaataagtacaaagataatgataattccgatccagtttctaccacaacgtcgtttagtttattgggtttgatgggagccaacgatcacaaggaatggactggttcagatgagagtctattccgagggctgcataaagtttttcttaataattactgtgccattgctcaaattatgctaaccaaaacctgtcaacaggtatatcattttgctcaaaaagagtcggcagatataccacctgaagaacaaattcgcgattatactccacctcgcaagaagaagaagaagcatcgtctttggtctatgcattgtcgaaaaatccagctcaaaaaagactcgaatagtaatcatgtgtacaactttacgccgtgcgatcatccaggacagaactgtgatcataactgcccgtgtattggtgcgcaaaacttctgtgaaaagttttgtaactgcagttcagactgtcaaaatagatttcctggatgtagatgtaaagctcagtgtaataccaagcagtgtccttgctatttagctgttagagaatgtgatcctgatctttgtcaaacgtgtggtgcagaccagtttgacaatacaaaaattacttgcaaaaacgtcagtgttcaaagaggattgcataaacacttactgatggctccgtctgatgtagctggatggggcatatttttaaaagatagcgcccaaaagaacgagtttatttcagaatattgtggagaaataatttctcaggacgaagccgatagaagaggaaaagtctatgacaaatatatgtgcagttttctttttaatttaaacaacgattttgtggtggatgcaactagaaaaggaaacaaaatcagatttgctaatcactcaattaatccaaattgttatgccaaagtgatgatggtcaatggtgatcatagaattggaatttttgcaaaacgaccaatccagccaggagaagagttatttttcgattacagatatggtcctaccgagcaactgaagtttgtaggaatagaacgagaaatggagttcttatagtcttgatgtgatgttttttgattgattttttcctcagttcacattttggcctgattattttaattttatatatttttgacttttgaaatgtacacattaagtattcgtgtgtaattttacaacttttagtattgaaat

SEQ ID NO: 7171 - DNA, 1660 bp, Diabrotica virgifera
  SmartBlast Evalue=4E-11; Info=WASH complex subunit FAM21 homolog n=1 Tax=Drosophila melanogaster RepID=FAM21_DROME
agaagtttactgtggaagctttgttttgacgtatttgtaattgtagccacgagagatgaaatgaaatatttaggcaaaaatacatcaggtactgaagggatggagcgtgaagttacggacaaaatagaaaagttagcagatataagtcgatctccagttgagagaagtccgagaagaattgctagtattacggagatgctgaaaaatcaaggacagaaagacactacagagcagaaagtgatacctggaagactaaaacagaatcttaatataaacgtgaaagccttgctgcctggtcagtcgcagccaaaaatttccagtttacgaaaatcccaaagcttggagtcgccttcagacgaggatataagtgattctaaagatgttataagtgaacctgcaacgaagactcttagctataaatattcaccacccaaggacgaggaaaaacctgttaatttcgatgaacctgataacgtgaatatcctggaaagtattactaaggaaagagttcgaattccagtaaagagaagaccttcaaccagaagaggacggcaagaagcgttgcgcaaatcggcgatagatatatctttcgatagtgtggacgaattggaaaatgtgtcttcgcagcaagaaaaaactatcgaaccgactacggacttctcgaaggcgccatctagtccaattccagctacaaatacgtcattaacggaaaatgttactaaacctgctgcaaacattacaacttcagaacaacaagacaaattgaccaatatttttggttcagcaagttctccaaaagaattagatgggttcttagattctaaaagtcctcccaaagaggacacaatgtatacatcaccaaatcaaaataatgatgatggtttatttgcttcagtagataatacagaatccaaacaacaaaaatatatgagtactgatgatgatgatgatatattctcttctgggactccttttgaaaagcctgtctttcaaaataaaaataccagtgatgtcgatgacttattcggtccgataaatcaaccaaacgtatctacaaagtcagatgccctggagaaattctccagtaatcaaagtattttcgatcctccaaaggagttatcaaaaacagaaactactaataaaaacagcagttcaaaagaaagtataaaaccgatgctccagaaacacagcagtactaaacctagtatattcgattcggacgacgattcggatgaagatcttttcaaaagctcgaataaaaccaaaccaaaagaagtttctgtagtaaaagaacaaatttctaagactaaaaaatcgaaatctttgtttgatgacaattccagtgatgacgatttgtttgcgggaacatcaagtcgcaggaaagacagtgcgggaacagtgccgaaaattcttgacaaaaaaataaaaccgtcgatcaaaaaattagagaatgttcagactgacgttgatcctctatcgagtttactggagtaaattccttggaataacatttcctgtatatgttaaccactgttctactgtatcagggcgcaaactcgtttctcggttgttgaaagtgttattcgatatgaagcaacaactcattatactcgattcgctgatcgcagtcccaattgtctagtaactctgtaattacata

SEQ ID NO: 7172 - DNA, 1664 bp, Diabrotica virgifera
  SmartBlast Evalue=1E-154; Info=Cytoplasmic dynein 1 light intermediate chain 2 n=2 Tax=Formicidae RepID=E2A100_9HYME
ttataaatttttataaaaatgccacctttagtcgatagaagtccggaaaatgttataattgacgaggataagaaaaatctctggtcacaaattctgcacgatgtgcaaaagaacggaaatccgaaattgtcgccacataaacaaattttggttttgggcgacaatgagtcaggcaagaccactatggtagctaaacttcaaggtattgaaaattccagcaaaggttctggcttggagtacggttatatcgatgtaagggatgattacagagatgatcacaccaggttgagtgtttgggttttagatggtgatccagctcacgaagatctccttcggtttgctctaaacgaagaaagttttcaggaaacgttggttattttaacagtagccatgaccactccttggggaatactggaacagctacaacattgggcatccgttttggctgatcatctcgataagctaaaattagatatagatctgagacaagctaggaaacaactgatgattaagatgtggctggattacattgaacctggagatgaattggaccctgcttctcccatgaagagaagttccagaaatttgggagacgatgatgagggttacgatggaactatgctaccagaaggaacattatcaaataatttaggtctggatattgtggtggttgtcacaaaaactgattatattcaaaatcttgaaaaagagcaagattatcgagatgaacatctagactttatgcaacaatggattagaaggttctgccttcagtatggagcagcacttttttatacaagtgcaaaagaagataaaaattgtgatttgttgtacaagtacttaactcatcgcatctataacttccccttccacactccagctcttgtggtagaaaaagatgctgtgtttataccagctggttgggataacatgaagaaaatcagtattctgtatgaaaatatgcattcttgtaagccagatgactactatagggatgtaattgtacaaccagtaactcggaaaactattaacagagaaactgaggtgatagcagaggatgaacaagcattcttaacaaggcaacaacagatttcatttggaggagggccacctactgtaagactaggagaatccccagttagaccacccctaggaggtatacaaggttcccctagaaagcttgatggttcaaaggttgttagttcaccaggaggggaaggtgttctggctaatttcttcaattcgcttctctacaaaaaaactggctcacctggagggggtatggccaaggcttctggatcagagagtttgcctgataaagctaccatgagaactgatgcagctgctgaattagatcgactttctagaggagcaggaaagaagtctctaggacctgcttcgactcctggaagtcttggatctagtggctctacagaggaagaaggaaacaagaaaagtgcgaaggaggaaatgggaatggtgagccaggtcctggaggtgtagatttcaatgctactgattgttagaaatatagtgtatttaattatttaacgtactttctatagcttttcttatattttctatctctgtgataacctgtttttatgattttttttatctagaaaaaacatatgtgtagcttcaataaagatatggattacttt

SEQ ID NO: 7173 - DNA, 1667 bp, Diabrotica virgifera
  SmartBlast Evalue=4E-15; Info=Safb protein (Fragment) n=3 Tax= Danio rerio RepID=Q6IQK9_DANRE
ggcttgtggacgccatttaatttccactgcttgcttgtgttaataaagtatttagtattagtaagtacttaggcgtacaatttaatatttcttaaattaatttgaatttttggtataagtcgttttacatataaattatcatgtctgaagttgagagtagaaagcttgcagatttacgcgttatagatttaagattggaattagaaagaaggggactggacaaaaatggcgtgaaacaagctctacttgaaagattgacgaagcatttgacagatcaaggttttgatccagccacatacatcttcaagaaaaatgaacaaaatgaagcgtttgaagacactgaggaagatggtaagagtaaaaagagtaatgagggatccaagaaggttactgatggacatgattctccaattttacttagtttagaggaagatgagggagcaaataatgcagataagaagaaaagagaagatagtaaccagtcatcatcaggacaagcatcttcaggaacaaccaatggagagaatagtgaaaatagagctcgggatagcaaaaatgagaagaagcttgggtcaaaaagtaatcccacggtcgtttggattagcaatcttgctgaaaacactcgggcaagtgatttaaaacaagctctatctgcttgtggtagagtaacaggagccaaaattgtcgtcaacgcaagattcccagggtcttgttgctttggttacgtaaccatgggttctgtagaagatgttgaaaatgtcatcgaaaaattaaacaatacagagttaaaaggtcaaatgatcaagattgagaaatatgatttggtcagagcggttcagttgaaaaagaatgagaaatcacaaactagttcaaaagacacccagccaaaagtaaagaatcctaaaaaagatgataaatctgagaaaaaaggtgaaggtaaaaagaccgattctgaaacacctgttggtagaagtgaagcagatagagcgagatccagaggcagaagagattcgagggataagctttcagttcgtccgcattccagggttcgccatgaacgggatgttttaactttcgataaaattcgtgaagaacgtgatagacaaagattacgtgaaaaagaaagaatacttcgtgacgaaattagacgtagacgagaagaagcttcacgtaatagagaagttgaaagaagacaacaaatagaagctcgcagactcgagagagagaagaaaaaactggaagtcgaaaaagagcgaattgcgcgtgaaaaagtagcattggcaaggattgaacgggaagcacattgggagaagcaaaaaaaaatggagtatgacatgacaaatatgtacgaaaaggatatggacagaagagttagtaaaaggtctgcaccttttcgtcgggaagaatttgaaaggaagagaccagcatatgatagacatttcaatgagccgcctccacctccaagtctaaaaaccagggaagccagtccacaaagcttcagtagtcgttcaaaggaactttacacgaaaagtgtaaaatactctgtgccaaagcgagattcactttatcctgaaaaacgtagggaatatgatattggacgtcctcctataatgggtagacaggtggctgattcatatgaaagcagagatgctagagctgttgggcat

SEQ ID NO: 7174 - DNA, 1661 bp, Diabrotica virgifera
  SmartBlast Evalue=5E-31; Info="Ecdysone-inducible caspase, putative n=1 Tax=Aedes aegypti RepID=Q16PQ5_AEDAE"
gactaaaaatggtattataaaaaagattaacaattcaataataagcagacataaagttttattaacctacatatagtaatcactcatatttgtatcagtattcacttctgtcgacactccccaagggcaatgtcttctttttatttttcgtttgtttccgaagtgtttactatgtaaacacttcaagtaaagtccatattagactctgtcaaccgtcagaaatcgtaacttcgaactagcacaaattagtttatgttcaccacgtttggaacattattattaactataaaggcacctttgaacattcatctatatattgcgggggtttaggtaacattgcttgaagcctctattttcataagtggaggtctgtttaaaggtgtgatgctttctagacagttcttgatctacaagcttcaacagatcttctacgtggtgttgcttaccatgctgcttaaatacatcacagatactttggatataccacgatccttcttgtggcgctcttatggaagaaaagcctggtacagtagaaaacgcaatcagcatgtctgcgtgtttttttacaatgttggtaaaaggaaccgcatcaatttgcaattcttctctatgtcccctgcaacattggaagataaaaattttcggctttcctttcatcggcgcacacctatcgttggtaaactccgatagaacttcgtcaacattcagatatttgtcatcggaggtctgaatttttgtaaaccctcctggtatttcttcactgcccctcgcattgttcccgtgactcattactattacaattaatatgtcacctctgccgacatctctactttgtctgtagctgttaagtttacttttcatttcattcagtttttgattttgatgaacgtagacatcgaagcccatatcccgaaatagtgtcttcagattcttttcatctaattctgctccctttctttcgtcttttatgtccaaaaatttaatgttgttaaatatcacaacagttcctcttctcggcccattagtatcatactttggtatgtcactcaatgtgatgggcctagtattattggttggcactggcactgtggttggctgtattcggggcacacttgaaatggtactaccattttgaaaaggtctggcgtcagtttcaactttttggctactaggaagaatgaactttttggataccacgttattgttggtagtttttgtgggcagtctttcgctattgtgtctaggaaatggacttttataatttggcgtcattcttggcaaattgacactctggcctttgtacggtattggtttgagtgtaaggtccgagatggaaccgagtctagtactttcaatattagttgaaggtggaggccatcttgaagttattgatccactactggaactagttgtaatagtacgacgttgttgactagaatgggacgttcccgtgatctggattgttctcctcatactgacattgtaactatttgcagtattattttgtaccactgtctccgagacagtccttttctttgttccatctttgctaaaattcttttctttactttgagaaggccccataataactaattttaattttatatttcataataattctcaattaaacaaagaacttgctctgcctgctgctagattct

SEQ ID NO: 7175 - DNA, 1665 bp, Diabrotica virgifera
  SmartBlast Evalue=8E-26; Info=Vanin-like protein 1 n=1 Tax= Camponotus floridanus RepID=E1ZWI0_9HYME
gataatatatattgtatatttagatgtatttggtgatgtttaaaattgtacattattttattacaaatacttacataagcactgacaatttagcgttaataaaagatctaaaagagaatataacgcaaaactataatactcattagagcaaaactaaatgtaactgtggtacttccactaatagtggtctctacaataccaaaagcaagaacactgctggtctctaattcactgagaaggctcagttttctgtcgtttttaactgctgttgaatcgaaggttgtgttaaatattggttctaatttagtagttagcgtcaatggtacgaaactgttggcattagcaactgtactttcaaccaaaatgctgctgaactttgtactgggttccactgtgctgttaccgcaagtactatcttgtgaagttacacaagctacaagggagcacaccctctgggttttcttttgggttccgaaaatatctactgaaccactgtacgcaaccaatttgtatacatccgtgctggaatttgttgttacattgatattaaattgacagcagaaagatctatggcatatcttttctttgatattatgttgggaaagatctagtgttttgattgtatattttttattttcaaataatctattactttggtactttagaatttctggtttatcatcatcaaaatcaaagcttccaagaccacccttaaagaatttatttgtaaagtgtctagtagctgaagcattaatgacagtatcgacaacggtagctattaaaatttttgaagcagttgttcctgaaatgtaggattggtaggcggtaccatttgatccaaatataccactacccccaagtgccacagaaggattattcaaatttgccgccaaaagattcactttgttcgccacagcgtatccatgttgcattgatagagagtgatagaaaggtagagtcgagatccaagatgatggataaacgatatccttaacgttggtgtttggtttttcagaaatcagatcgtaggtggagaataattgaaatgtaacaccaaatgtagtttcaaaagtattattattttcggaaggttttccaggcgtcaaatttgcttcgttaaaaagatgtgtttttcgtgattttgcaacaatttctccgttgggattaaatgctaaatttgtactgtagtacagagttttattgttattattggttttcttttccaataaatttaaaacaacatacatgtcgaagcttcgtgacaagtcggcaagtttttctaagatcaaaccgttagtggaattaggtttagttcctacatcgggaatttcaagtgcatatgcagtcacgttgggattataacctgttattccatagtctggaaacactattatcacagctccctctttcttggcttgttctacaaatgaacgatattgattagtattagtttccattgtagtatttggattagctgattctgctggctgatattccaccacagctgctctatagtcccctacacatatttgagagatggaaattactataaaagtacacaaatataaatttgctgaagccatgactcgtgtcttggcaaaatcacacactaaatttagattaaggtgtaactattggtattatataaacagatacaccgttttc

SEQ ID NO: 7176 - DNA, 1657 bp, Diabrotica virgifera
  SmartBlast Evalue=1E-108; Info=Cytochrome P450 345A1 n=1 Tax= Tribolium castaneum RepID=D7EJT0_TRICA
atactaagctattagtatattacttatacatacattactcgctcagattatcaaaatctgaaatcaaaaatactaatatgttattatctaacgtctgtaattggttttagagtaagaggaagtccagtttttgattgaaaaacaaaacttctggtctccagttcaactggtattggtgttgtttcacagggttcgatcatatactccaaaagtatagatgctacaaaaagtttagatatgatcataccaaatcgttctcctatacacgctctaggtcctgctccgaaaggcaaaaagtttattccttctacatttgacttgttaaagaatctgtccggattgtatcttgtgggatcgggataatatttttcgtcctgatgaacagcataaaaaggtatataaataatagtgcctttctcgataataatatcagtatctggaattctgtaatcctcaacagcttttctgtcgattatttgtagggacacatatttgcgcaaggtttctagtacacaaaaatgtacatactccatgtcatgtatagcctcataagttaaagcaccatgtctcttcacaactacattaacttccttacgtgctttgtcttgaatttctggatgaatagctaattcatacaagcaaaaggattgtacagaactcattgtttccgttcccgctatgaaaaactgcagagtattggacatcacttccgtcattcctattttattatcattgttagtagattcttgcgtctccaaaataatatcaatataatcaaaagcttttccatcctgtgctttaactttttttctttcattaaccacgtccataaatgcatccaacatgtaatcttgatcactccgtttcataaagtcaagtttaaataactccacccactgtggcttaaatacgtgtagcccttgaattattgcatttcttgcagaaaactcaaacaatcttgttgcaatgttttggatctcggaattacccttttcgaaacacctaccacccataccaaagtagcatctggaaaccacctctgttgagtatctcctactaagatctttaacttcaataacgacatctttatttgttataaatgcgtacatgtcgtcaattataggtttggcagtataaaacattcctttaattttcccactgctgaagattgaagtgaccttgggtctggtcttcttccagtccgaatacccctggaacaacaaccaattggccacaatagggttatgttttggagatgcaaggcttctgtccttgaaaaagctgaaatcttttatcaaaacatgttctatcaattttggagatcttagaattaaaactggagtatcaaatacaaaagctcccacaaaatctccttttgattggtcataaatagcttttaatccatgtgctatggtacttttaaaagtaaatgtgtcaaagaagtttccaaagaaaggtaaaggttttatgtagaatattcctcgtttttcccagtaattaaaatttcttgtaaagtatttatatagtgcatacagagctataattatcaataggatactcaggttccaggtagatgtcagcaacatctatgagaaggtcctcaaaagagtgaaaaataactgagatcactgtcaaatcttaaaaactacaatatgtt

SEQ ID NO: 7177 - DNA, 1657 bp, Diabrotica virgifera
gttttctcaggattcgaaaaaaaaatgaatgcattcaagtagcattggacaaagattttgcgcctatctcctaagtttttactgcgaagatattgtttccaacgctttacatattagtgtaattcatttccatttgattcatttagttgatttttggatcaatccactcctacattgggaattcacttgccacctagatatttcttggagcatataggtcgttccaatttattccattccaaccaagttttaagggttgatggtgtggagcaaatcctgaccaatgcaattgtctgacatacaaatcatttagatatttcaaaaaggtaattgctgaaacagctgtaagagaaaaggcttctgtaaagaacactaactcgtacttacttgtggagagattcctacccaaactataaccgaccaatcgccaaatggaagcctttgagtaatacaaactggctgatattctttttcatatctgttgacgtccatctgaccaattaaagaaaaaacacgacccttttaaaaacattatagtgatcaaatccttagtacctattccaggatagtgaactttctgaatatgtagaaaaataagaaaactgcttatttggggcacatattacgaggagaacgataaactctagcaactggtactagaaggaaagagagagggtaggaggtttaggacgcaaaaagatgtcatggatgcgcaatattctttataaagtttatatctatcacatatactttcttccaaaagtcgatcataaacttttacttttcatattttcttatagaagtacctacctactttttgaacttcggttacctacataaagcaaatgaacttgatattacttaactgttccccacgcttctatacgatatacaatacctactcctaattcagcagctccctgatgattagttctgaatattaaccaataaatattttcatacctaaaggatataattgaccaattttcttgtgacaccttgtataattgtacaattaacattcatcattctaaaaattcatcgtaggaaataatattggtaatgtagtaatacaaacaatgtaataaatcaagataaatagaatatcatagtcttgaatttttaatttttaaaattcgaactaattttttgaaatttaattttttttgtgactaccaagtagttgttaataattatatgtatgacttacgcgggggccgtagcttagcggctaagatactgacatgtcaagccgaaacgcacgagtttgatccacggcaccgacaacaaaatttttatttttcataaagtattcaagccgtcaccgtgcttcggaaggcacgtaagccgtcggtcccggctatgtaagtggtcttcgtgtcatgttagaggcgcaactgaaaacccaacaccagaccttagctagaaggtcactcgaactttaatttttactcttatccgttgattgaattcaccatgatgattcggttattcaatcaacgctctaacctatagtactctaacgccatattttgtaattggtcgctcatattaattttatagtttacaataaggtttaatctagttgaatgcgtttattctgatatgatgttttagaatatttttttaattgtaataaactattttatgaaaagtg

SEQ ID NO: 7178 - DNA, 1663 bp, Diabrotica virgifera
  SmartBlast Evalue=2E-94; Info=Glucose dehydrogenase n=1 Tax= Culex quinquefasciatus RepID=B0WJG5_CULQU
ccattctcgtggtaccagcaggatggtactcggtggaagtcatatgtctaagagcacagtaccaatactctttgtcattgtctttgagctgctcacagtttggttgcttgctgataaaagtagctccgatgcttttaaacgcttcagtatcagccagtgacaaaatatatttgatacctttgtacatcgtttcaagatcttctcctttgggatcagaaaaataatttaagtctattaaaggaaaatcgagaatgttgtttgacttgagagttacacttccttgtgatttgggtttcattaacgacattataaaactgatatcagtcaaagggttataactttcatactgtttggcgaatttatcttggaaattataggctgcttttaaatttcctggaacaccaaatggaggagcaaaatttaggtactctatatcagcttcaccattggtgatactatcaacattaataaaagcgagatgttctaaaccagcaccatttgtagaaggcgctttgccttctaaatatagttgaagctgttctttcaaagaataattgggagaagatacattggttctgaaataaatattaacaaacaaaggatgatcttgtagatgttgacccactgctggtagatctgcaacaaccggaatgtctagatctttgagatgttttttaggaccaattccagaaagcattaaaagttgcggagtgttgatagctccagcagataatattacttctttcttggccgttgccttatagattcttccattatgaacaaaagtaactcccttggccttacgttttgttaacaatatctgattaacagctgcattaagaacgatttttacattatttttatttttaatatcatcgaggaaagcatgctcacttgtctgatgcttgtggtctttttgattaaactgaactttggaaactcccagctggtgttctccattataatcgacttccttcaaacctttttccatatgagcttttagaactgtgtcacctatcgtcgaatttggcgatgtatgattaacaaacactatgccttctgttccatgataggatttgtcgtacgattccatcaccacgtattctgattttttaaagtacggaagaacttcttcgtatgaccatccagggttacccatggctacccaattgttgtagtctgaaggacttcctctagcgtatacggcagcgtttaaagtagtacagccccctattacttttcctcgtggatagacacattggtgattttccatgccttgacaacatgttgtttgtggagctgtaaaatacccccaattcatgtccgtctgttgtaggtaattgttaaattgaggaacatcactaaagtcatcagtttcacctccagcctctaacagtaatattttccatgaagttatttcggacagtcggttagctaaaactgatccggcagcaccagcaccaacgataatgaaatcatagcggccaaaatcgaatattttggtgtgatttatcctaaatactttttcgttgttggtcggtagttcaaactttttgatttgttccaatttttctgaaacgaattcgtaaaatggttccaactccagtgccccacatgtcaataaaaacataaaaatcactagcagcttcgcgcggtacatcgt

SEQ ID NO: 7179 - DNA, 1663 bp, Diabrotica virgifera
  SmartBlast Evalue=1E-130; Info=E3 ubiquitin-protein ligase UBR4 n=1 Tax=Harpegnathos saltator RepID=E2C5Z8_9HYME
taagtggcatcctacaagtgaatttctacgacagttttcttcaatagctgggattaaagattgtaggaattctaaaagagatcctgccaccaaacttgatcctaagtagttgatgatgaattcttttgaaccatctaactgtttgacagtgttcgaattttttcgctccttataaataatcttgtcagctgggatgggacttgaagtctttcttcttaaagaactggttaacatatgttcagagttgtttccagttgttgcattattggtttcgttggtctggggacttctctttaccaacgcttgacaacttccatcctctttggcgccacaatcacagaaaaagttaccatacttggcgtaactcaaatcgtgccctttgtgacaaactctggcacagatagagcatacaccaacgccatctaacattttgcaagtgtgacagtgataccaatgctgattcatgaattctttttgggttacggtgaaggtgcaaagtttgttgcataaagaatcctcgtcgctatcttcaccgctatcatcgtcatcgttcgcgaagtcttgccactcagattccaactctaaaggagactcactttcccaaggaggactaagaggtcttatcgtttgaggatgctgggcaataatagttgatataacatcgctaacgtagtctagaatactagaagaggcttccagcatagcatttttcttcaaggaatcaggattactagttaatttatctataacatctttttctgagatgcgtttgttgcacagttctatccattctgctgtagcagggaataaataactgtgtccctttcctgaaccagcatctgctaacatgatcatatccaccattaaatcagtaaaaccagtaccttccagagtaggcgataacagatgttttccaagttggatcagcgccttcaatattgttatcgaaacttcttcggaaacattactgttttgtttaacaataaaactagttaaagcttgcaacagctgactgttctcttgcaccaaggacttttgatcgtcgttagatgttggagaattagcctctttactttcaaccgtggttatagtccattttccgttggtagatgtcgcaggagattcttctttattgatggtaactgtagttgtcacgacgggttcaatactacttgtaccgatgatgatttgacgcaaccaggtttgcagcttttcgctatctacgtttgccagtttactcatacttgaacataagtagttcaggcttggatctgtagagctcttctcggctgcttggaacagtttattgaagaaatgcagtactctggtaccataatgttgcgacatttgcggactagatacagacatcagcactttcaccaaatccctatctccagtaaagaagatttctaaagcttgtctgcctgaagatttctcgatgattttttcgtagaatttcaaacagtggtgaagtattttttcatcaatattagcactatacgtctctgagttacctgacgtgtaatttattatgagtttataagtatgatctaaaaccctcaggtagactcgtttttgatgttcgtctatttcggtatcgccaatcattttgtctaacgttttagtcacagtgtcattcaaaaattcggtccttagatctaaa

SEQ ID NO: 7180 - DNA, 1662 bp, Diabrotica virgifera
  SmartBlast Evalue=1E-71; Info="Sugar transporter, putative n=1 Tax=Pediculus humanus corporis RepID=E0W0A9_PEDHC"
agatactgacaaaatgtatgttttaatttccacagccatgttgaggttatatctgattgtgtaacgatgatatttaaagaaaaatgctaatacagattgatatttggaatttacatacttctgtacggcaccaatgtgacgcataatttcataattttgtggcttcacggaaagtacctactcaaatagacaaatgaatacaatacaatggggataaaggaaaaaattaattacgcttacttagttgcattttgtggaaaccttctggctctaactggcgatacaactttaacatggtcttcaccaattttaacgaaactggattcaaacgatacagatataaatccattgggaaggaagataacattagatgaaatatcatggatcggatctttgcagtatataggcgcaatggtaggaattctgcccttcgccgttttagctgatgtaataggaagaaaacctgtactgctcttattggccgtaccgcacattatatcgtttctttcttttgcttttgcaaaaaccatcggttggtattatgtggggcgcttcttggggggagtttccttgtcttcggtgtacatcatattgccgatgtacgttgctgaaattgcagaagattcctataggggaatgttactaatgtcctacagcacatttgctagtttaggtgacttaattccgtacgtattaggcccttacgtatccgttttatggtttaatatcattttggctgtttttcccatatcgttcttggttatatttttgataatagcccctgaaagtccatattactacgttaacaaagaagatgaaaaggcggaaaagattcttaaaaagctaagaaagacgaaaagtaagtacacagccacgaatgaaattgaagaaattaaacgagagaaggctagaaatgtacagggcgacatttttaatactctaaagaagaagtacgtcatcaaaggatttttggtggctcttggtttgagtagttttcaacaactgtctggtctgggtgctattctggcatatacagaaataatttttggtttcgccggtactggcttgtcaaacgaagtttcggctatgattgtcggtgtggttctgttcttggcaagtttcgcaggaccattgatcgtggacagaaaaggtcgcaagtttctgttgacagtttctgcgttgggatgtataatatcagaaataattttaggggcatacttctacttacacgaacactctgatgtttcgttaaagaattggtcgtgggtaccaatcgcatgtcttataatctacgtcgtaacctttaacataggttttggtccactaccattcacgataacctctgaggtactgccatctaacgtcaaattttatttagccactgtgaccggtttcacgggatggttaatgtcttttttggttactaagttctttaacgatctcaatttggcgcttgggataggtggtaccttttggttgttcgcctgcttttgtattgctgccttagtgttcgttattttctttgttcctgagactaagggtaaaagttttcaagaaattcaaatttttttggataggtgatattagttgctagataaacagtacttataccttttttattaatggtttatattcaaattttaataaagttgttgtacctgg

SEQ ID NO: 7181 - DNA, 1654 bp, Diabrotica virgifera
  SmartBlast Evalue=1E-127; Info=Mini spindles n=2 Tax=Tribolium castaneum RepID=D6WD03_TRICA
ctttcattactaatgcactcgtttattagttttaccaaagcacatatagtgtttgtgtggtcagatctctcaatcactttgacgcaatgcaggttaattactcttacgtaagcttctccattgggcactttatttaacctttcttcaactagtaaagtgatcatttgatgcataagctctttaataacaggaactgaaactcggcttcccaatgccttatttatatagaaagcatctatggtagtgagtaaatttcatacatctttagtgtcgacgaatctacagtaacttgtagatcctgcaattgtttaaactgggaaattattgtattcatgaactcatcctcatagtcaatcaacgtattgctcctcgtttgagtgagtgtttcatgtaattgggtcattgccgctaatgcagcagtatggtttggagaacccatctgtttaatcagtctctcaatcactgggttttgttttttgggactggtaaaattaccgaggctaactcttgaaacggcttccccaaaagctacgggctgagttccagctttggctcgtacctgggctctcgcctcttcgatggtcgggactctaatctcttcatttaagaagctaatatcgtatgacttcagagaaggcttaactggctttggaggtttagttctctccagttctttcatgaactctgggtctaatttgaatggcccctgaatttccttaggcggttctggtacaatcatttgcggcaaattcacttgtggcaacatttcttcatctatatcctcatcttgatcactctcattatccacatcgtttactatatgcgtattgcttaaagaaattctattagggggatgttttccttctgaggagatatcaaagttgttacaaccgcggaactaagatcagctttaggtagattcatagtattcctactattaggtaaagtcttcctactagaccgttttattctttcttctaacaacgacatatccttatcagatatgtttccaactagtttataaactttttcaccgacaatattataggcctgcacaacacagttaagagcggcatttcttacggagttgtctctatcagaaatttgcttggccacttctttaagacacgccatgggcgtcggcatacatacagtaatgccgaaatcttcaatgataccacccataacttccaaacattctgccctttgtcttgcgtttttggatttaactccttccatcacatacgtcgataatttattaacaggaaatagtctatttagttggtttaacaatgctttcacgccattccgaactgagtctttcggatctcctatcttatttatgaggtacggaataaacgcagatgcttcattttccaacattcggtattttgtgtcaatgagcatattaaaaacgaactgcaaatactcaagaccctttagcagaactgaaggattggtatcgaaaaaccgtagtgttaaccatttaagtataagatccaaattagacataagcgcttgaccattgccggctaaatcatcggttagtgactccagagctttgatgtggtatctgaaatctgcgtggaacatgttagacgtaagtgttttattaacatttgcagccgccatttgatcctttagcaaatcaaca

SEQ ID NO: 7182 - DNA, 1658 bp, Diabrotica virgifera
  SmartBlast Evalue=2E-80; Info=Ras-related protein Rap-2a n=8 Tax=Neoptera RepID=E2ATE5_9HYME
ggtggtttaagggaacaaaacccccaaaaattttttatggggtacacaaatttcactgttatttatttttaaagatgttcccgccataagaaagctacatgtccattttcaatataaaatctctaaaagttttcgatatattggaaaaaataaatttccattttgtaacttcaaagggctgtaactttttctatgtgcacacttgcactaaggtaaattaggttcaatgaaactatccttggtcctagaataagtaagtgatttaatttatgacctacctttctgttacatgctgtatatataggtatatagaggatgatattctcatttcgaatacactgggaggcccactgtcttgttagttgacttggaaaaagtacttttaggccgaaagaagtaccaccataatctgttcttttcaggcactatcaatagatcttatatagtagatatggtttcattttaaaaaactagtaaataaaatacattcttatgtattatttacgaagattttgttcaatgtataaaaatatagaatattgtgcactttcaatgtataaaccatttctcatgtagtatactaatagattaatgagtatttataacaaaaatttatgaaacttctgaatagcaggactaaactgagtgaataagtgtagtaattgcagtactagatccatagtagcaggagccagtagaataatagagaaaaatgaacagaacaaggtgtagattaaaataggtgtcttaaatcagatcagttcagcaatcacagttaacacaaagcaactgtcttcattgttcccaacaagtagtaacattaataatattaaaaatgatagaaaaacaaaagtatacaggaggaataaacaagaggcatgggttgatattagagcatggtacaccagcaataacttggtttttctttttcgggactaaagttcatctcacgaacgatctctgcaaacacttcattgacgttggttctgtttttagcacttgcctcgatgaaaggacatccccattgctgagacaggacgttaccttccgcgtaatccacttctctctggtggtccaggtccaccttgttagcgactaggagaatggggactcgttcggttcctttgactctggtaatgagctctttcatggggcggatgtcttggaaggtttgatggtttgttaaactatacactacgacaaaaccctgtccattctttatgtagaggtcgcgcatgctagcgaattgttcagtacctgctgtgtctaagatttccaacacacagggcgaattgtccacttcgatttcttttcgataaaagtcctctattgttggatcgtatttttccataaaacaaccagaaacaaactgaacagttaatgcactttttccaaccccacccgagcccagcactactactttgaattcacgcatttttatttggtttttatactaagcgtactttgtatgcactattattttatacactaacggacagaaattactgatagcggtaacagtcaacacttttttccactccattgcaatatttacaagttaacgtttcgccatcttattgaacactctcataatgttttcataaacggaacggaggaagagacagccacgaggtgaggggccactccaaacaggatgg

SEQ ID NO: 7183 - DNA, 1656 bp, Diabrotica virgifera
  SmartBlast Evalue=0; Info=EVI5-like protein n=1 Tax=Camponotus floridanus RepID=E2ALY0_9HYME
ccctcatcagttcgtccttcattttgctttcgagatctgcgtatcgtcgttgttcgtccaacaaacgggctgctgcttccttctttttgccttcggccctctcgatcagttctagctgcttcttgatttcttcgtcttgtcttcgtaattggttggtgctcacttggacttgggtctctaattccattaccttcagtctgagctctttaacttcagtcaacgtctccatctcacgtattcttgtagtcatcagctcctcctccaatttctgagtttcattatgtcccagtttaccgaaaagtagtttcttaggtgtgctcaatgggtccgaaggagggggtgggtcctgcttgtggtcctgtaaatgtctttgccactgatcgctcaattccgacaccctctgcctcagatccttcaacgataaattagcctcggcttctctcagcttcaccgcgatcaattcttcttgcaaatgagccacgctattgtctggagtgatttccctaagcgtttttttatcttcctccaattcgtgtattctcgaacgaagatctctgatgatggcatcgttctctgcctctcttaaacgaacttttaccagttcctcttgaagacactcgatcatttcttcgcgttggacgagctgctcttgttttagggtgatttcttccatggaagattgacgtgaggtgtgcgtttcttccatcatcaaggacaaggctctgatcctctcgttggccagggctagttggtgagtggtctccagatgagtatgccttaaggcatcaagttccctttgtaccacaaaggtggtttcttcttcttcggctctactaacttgtcctttgactagtctatcggccaaagccttgctctcttcttctaacatctcgcatcggtgtctcagctgtttgttttcgtgacgcaggcgctttaactctgccatttcttcttgttctttggtcttgatcacgatatattccttctctaatttcttcatctttttggcgttgtatttcatttcataggccgtctgcatcaaagcctcgggatcagcttcggcgtgagcgggaagctccttttggaaatacttcaacattccctccatatccaacgacatcaactcctccttccccaacgtcaacatcgccaaagccactttgaagatgatctccatgccctccgacaaaaacacgtccataatcctgcaggctaacggcagagaaagcgctgtcgtgaacagcgtcaaaaaccagctcgaagcgtacatggaggtgtggaagttttgagattggaagtgctgattgaggtccggtaagtattcggcgacttggttttccagttggtacatgcacaagcccagttccgccatgctgggcttgaacatgtcccgcatgcggtagtcttccatgatgcggaccagtaccgcaaatgcctcttcttctggcatctgcatgagtagcagtcccacaatgaagccggtaccttgacaatatccgacttctctgtcgtgcagagaataggctttgatgacattgaacagagattcttggcctaggccgtctttttctttgaagaactcgtgctcgggataggtcctagctatatcacgacgtattactttttcacatggcgatttcgttttgatgtattccg

SEQ ID NO: 7184 - DNA, 1649 bp, Diabrotica virgifera
  SmartBlast Evalue=1E-134; Info=LAG1 longevity assurance-like protein 6 n=1 Tax=Harpegnathos saltator RepID=E2C5U9_9HYME
cgtccaaaatgatatgacatagaggggtgttgttcggcaaaattaagtcaaaagaatctggagaattttgaacgtagttgtgtgattaatatgaacatagtgttttaatcggaatagaatttaacagaaaagattaaaaatggcctattactatagaactttcatggaaacgttttggtgtgagcacgtttggttaccccctaacaccacttggaaagacatagctcctgatgcggatcctaacgttcgtcatgctgatccaaaacacttattttatcctttgccgatggcatttgtactgttatttttacgatatatattagaaaagtactggtttgctcctgttggagtatcattaggaataaaaataatagaccaaaaaagacacccgataatcctgttctcgaaaaagcatatacacagtcaaaaaagtggaaacataaacaggtacaaggtctggctaaacagttggacattagcgaaagacaagtagaacgatggttgagactgcgcaaagcacaaaacaaaccatcaactttagttaaattttgtgaaaattcgtggaggtgtctatactacactcttagctttatttatggtttaacaattttatgggacaaaccttggttgtggaatataaacgaatgttggactggttttccacatcaagacgtcactaatgatatatggtggtactatatgatctctatgtcattctattggtcgctgtcagtgagtcaattttttgacgttaaacgcaaagacttctggcagatgttcattcatcacattgctactatagtactaatgtgtttatcatggatagttaacgtatttcgaattggttcgctggttttagttgtacacgattgtgctgacatatttttagaagcagctaaaatggcgaagtattcaggatatcagaaaatttgtgatataatttttgctgtgttcacagtactttggatagtaactagaataggaatattcccattttggataatcagaaatacgtccatcgatgctgccgactatgtgccaatgttcccagcgtattatatatttaacagcctgcttctaatcttgcttgttttacactgtgtgtggacctattttatcttacgaatctgccaaaaattcgttttatctggtcacatggaaggagacgttaggtcgagtagcggtgaagtttcagaataggttatttttatacttgaattatgtacctaatagtaatatttcgctgtaagatatcattgaagcaataatttttgttagtttactataccattcaatgattatcattcatactgagttttatattgagaaattcggctagtttaggacagaaatgcgaatatttttgaatgcaaaggcaagatttttgtatattttaagcagaccacaaaaaaactatattttacattttatttattgtttattatgtaattatgttgtgaaaaatataaaacgcaaataaactgatattttgttattaattaggcttgatatattattaaagcatatattatacgcattgatttatccgtaagtttgacattttatgccaaatttcccgaaaaaaatcactgacttgtcactactggcgctcatgaacttttaaatatcccctctacgtacgagctcac

SEQ ID NO: 7185 - DNA, 1655 bp, Diabrotica virgifera
  SmartBlast Evalue=1E-120; Info=Chloride channel protein 2 n=1 Tax=Harpegnathos saltator RepID=E2C3F6_9HYME
aattcaatatatatcaacgaaagtaagaaaattgaaatgttgggagctgcttgggctgtaggggttgcatgtaccttcaacgcaccgatagggggagtactcttcagtgtcgaaattaccacggcctattatgcagtcagaaattattggagaggatttttcgcagccgtttggggagcaacaacctacaggctcttacttgtttggattgatggagcaaaaacgattaccgcggtatttcccacgaattattatttcgaaattccttacgactctctggagctattaccatttgccattttgggcttaatctgtggattttcgggtgccttatccatttggtgcaaacaacatttcgacgccttcgtaaattccaataaaattattatgaaagtgaaaagctttaataggttcatatacccagccatagtagtgcttttcctttcctcattgacctttcctccaggactaggccagtttatggctgcagatctagcaggaggaccacaagtcacctctctgtttagtaatttttcttggactaaggaaaacttaaccttgcctcaacaggatatagtatcacattggtcaacagattggactagcgtatatgaaaatttggtaatatatttgttctatgaaatgataggttcgattatagccaattcgctacctatacctactggagcgtttattccaaactttagagctggtgctgctctaggcagaatcatgggagaactaatgcatagctggtttcctacaggtattggttatagatctaaactcataccaggagcatacgcagcagttggtgcggcagcattttctggagctgttactcatacaatgtctgtatgcgtagtcctgttcgaaatgacatcttctatcacatatcttatccccaccttaatcgccgttcttatagcaaatggggtagccaggttattagctccaagcatatacgatttagttattagatccaagaaactgccttaccttcctgatctgttaccaaatactagcagtatatacgaggtgtatgttgaagactttatgaaaacagaaatcaaatacttaagcctgtcaatgaactatggtcaaatgaaagaactactgatatcccataaaaaaattgaagtgtttcccttggtagatcatccacaaacaatgactttactcggatccattaccagacaagaactgatcgtgcttctcgatcagcgagttggtaccgtacaaagaagacagtacttgccgactccaatgatcgacagacatgaaacatctttcgaaaacatcgaatttatccagtccatgcgaaagaggtctgtacctcatatagacgattccagtgattcagagaaggaagacgatataagagttgaggataacattacaacacatccgggaatgcacgaaatgaaagaaattaaagtaaatagtcttgaggatacaagagaccaaataatgaaaaaatgggcaccagctaagaaaacgatgactttaccgcctcttgctccaaaatcaccccttccagaaagacggacaccattaccgttaagacggggagctacatcattactaaatttagatgtgcctggtttaagggtttgtgacctacccgatcacgaacagcaggcctgggaagttga

SEQ ID NO: 7186 - DNA, 1659 bp, Diabrotica virgifera
  SmartBlast Evalue=1E-152; Info=Fatty acyl-CoA reductase 1 n=1 Tax=Camponotus floridanus RepID=E2AKA1_9HYME
tataaatcttctaattcctaagacgtaattttctaaatagtgttcccaatttattcgggcaacatcaaaacagaactcttctctatctgattcactgagaaccatcgctagctgtcgtacattttcatcatcgaatttccattcattggttgtaaaatattgtaaacatgatgcagcttttttctaacttctcctgcactctcattaatataggttttccaccggacaaccagacgaaagaatcgattatataagctgggatccaatgccatattaactgccttacgctattgacgagtctgtaggatgtaagggaaccttgagggtaaaaggatacgtctaacactggatgcttccgactatatttaaaacaacaatctacgaactctttccacttgataggttttcgcatgcctgtgacacaattataaattgttatatctttatttggtgtagttcctatcctccacgccgacactatcatcaaattaatgaccatatctacaggtacaaagtctgctactttatttggatcgcacaacatggtcctgatgagtcctttaccggcagctgctataattcctgtaggaccattccagttgtcgacccaaccactgaggggctcgttaatactgcttaaaactatactcggtctaataatgactatgggtaagtcgcctttatttttttgtaaccaacactccgccagcgcttttgtgaatgtataagtgttgggcctcttgcctatcaatttcgacgtgaaagaatccaccaagtcttcatccaaagcttcaactaacgtcactacctggtccggtccaatgggaggagggtaaattgtttctttcacctcggatctatcacagttgcagtatgctgttgatacgtgtaccagtgcttcgaggtgatccatccgtttacaaagctcgatgagccgttgcgtgcctaacatgttgatcgtaactgaaagtttgagcttttcgtcgaatttaacagttgccgcgctatggaaaactatattgacgctgcgctccagtacggctctgtcgttgacgcttatgtttaattccggttgtgttatgtcaccttctatgggcagtactttgtgaagatctaggggccgttctttgcggattgtgtcgaacagcggtgaacacagcagttgttgcaatctttcttgtgcatgctgacctttcttgggcctaatcaacagatagatcttcgacactccaggacacgatctcagtaacttttccaaaaggacttttcccataaaacccgtacatcccgtgatgaacagcgtctttccattatagaattcgctaacactactggaattattgaccgagttctgaagagctgacattctcgcctcgttcaacatgtactagggaagaatatcaaattttccgtataactactacaagctaatgatataatctggaaaaatatgtatgaacatttgtcacttcttttactaaaaatacaatgtttttgtgcttaaggaggatgacgttcttgctttggaaggcttctatttcatcttcttgcgtgtacctaatctgaggagccggctttgaatgttcaaataaatccaataaattaacacaaaatcacacgcaaacattcataaaactgtacggaacacactgaatttat

SEQ ID NO: 7187 - DNA, 1655 bp, Diabrotica virgifera
  SmartBlast Evalue=3E-48; Info=Quick-to-court n=1 Tax=Culex quinquefasciatus RepID=B0WLK4_CULQU
tactcggcttggatgttgagctagctccactatcttattgtgatgcttcaccaactcttcgctcctattaagaagttcttcagacttggcagtcttctccgcctcggcgttttgctcgtccaacttcttgctagcctcctctagctggtgttcgagctctttgatcctttctttggcttcttctaattcgggtactatctgccaatacctagcgttgatctcactgatcctctgcaggagttcttcgatcttttcgttgtgtttttgttttaattgaatcgattcttcctcgtgcgttttgatcagctcttggaacctcctctcgtattcctcgattatcttttggtgttcaatttcttgatcggtggatgtggacttgtctaatcgtactaatcttcccgatttactaggcgttctacaatcttctgataacacagactctttagaatgaacggacgaacttgtgcagtcttcaaaatggccggaatcggcgaacgacgtgttaaggtcgttcgctaggtgattcgataatccatctacggcatcttctggagttgtttcgttactgttattttctctaactgtaacggcatcactcgaatttgatttgtcttctggcgaacttagggcagccttatacaatctcaattcaactacttctttggttaatttcaaaatatcactatctttctcttctaaatccttctgagcttgctgcaggaggtatttgagtttctttacttgcttttgagctctttgtgtcggcgttaagtactcgtcccctactgctccagcgtgttgattgcaatgaaaacatacttcatgctccttcctgaaaaagttgtaccgttccaagctacactggaatggtcacaagacgccacactgcttcctatactagttacgctttctgaatcccaattatctatagcaccagtcgaaaaatttctcgaatcggcagaaatttgacggttcggagaggaagtgattattgaaggcgatttagaactatggtttccttgtctaacattggctaaagataaggacagacttctcactctactgggcgacactggggtagtacctccttttagcacctctacgggacttcgattcccgattttcatattttccggtctcttagctccatgttgaaccccccggtcgctcctctccatgaacgatcggccccgttgtaaaagagggttgaacgaggactggtggtgcgttgtgtccgaaaaggggaatcgattattattgtggttgcggtctttgctggccgtgtggttctgatctgggctttccttggctataataatgttgttttcctcatctcgccgcttccctatcggataagtgaagggtttttcacccctcaagcggagactgttatgtctacgtaacggagtaggactagcaggaacaggaattttagttttggtcgtttctgggatttttgtaaacattgttgcactcattatggtttcaacaactttaaattaaacagagttttgtcacccccgaactaaatctttgtagcactgcctatttcactcaaaactggcgtagaatcggtttaaactttcacgaaacatattgctacacataaataaataatagctactgtaacaaaagtgcaacgtgtactgttttca

SEQ ID NO: 7188 - DNA, 1654 bp, Diabrotica virgifera
  SmartBlast Evalue=3E-27; Info=Tetratricopeptide repeat protein 36 homolog n=1 Tax=Drosophila pseudoobscura pseudoobscura RepID= TTC36_DROPS
agttaagtgaacgtgataatgccattgtgaattgtatttttaatccaaatttgcccattggggaaagtatccagtgtgaggaacttaaagatgtagaaacattacctgtagatcaagaaattacaagacaaatggaaattgaagctgtaaatatggcggagaagggaaatttaacagatgccttaaggattataaacaaagcaatagaattagctcctagtagaccatctttgtacaacaatcgggcgaatatactacaatatctacgtagatttgaagatgcatttgaagatgtaaccaaagccatacagctatgttcagataaacacaaaaaaacgttaagtttggcatactgccaaagaggtatacttcataaaatattcgaacggacagattcagcaagagaagattttgagacatcggcaaaatgggcaataaatttgccaggaagcagcttgtcgagttaaatccatatgcagcattatgcaatcaaatgctaagacaagtgatggacaaattaaaataaatattatttacaagtatgtttaattatatatttaagtgtacaccacaatattttatttaatataattttaaatgcattaacctgtcgtaaatcattttaataactataataaataggtcggccctttaaaatctctttataaagataaaaggacgttatcggagtggaccctgtatacactctcaaaataaatagcaccaactatcaaattataccagataaataaaagtaagtagatttcaactatactcgtatatcagagggatttaaataatatataaataatttaataaaagtagtagcttggtttaaagacgcacttccctgactttgcataatttttatggattttcttaataatttaattagaataaagatctgtattataagaattattagcaatcaagaagcaggagaatccgatgatatcaaaagcaaacgtgggttcggcaggaatgtatattatcacctctgctgttcaaaatatactctgaggaaatcttcaagaagcagtgggggatgttgaagatggaattcgaattaacggagaatgtatgaataacatcagatacgcggacggcacggtggtattcgttgatagttatgaaaccccaggtgttaatgaatagaatcacagaagtaaatcgagagacatggagtttcactaaacattaagtaaacaaaatgtacgattatctctaagaaggaacatcaatttaaacgaataagtgtgaacggtcaacgaatagaaagaacaaaaaccatacgcctaccttggtacgaacgttaatgaaaattggaacgattccctaaaagtcaaatgttggatagagaaagcaaaatctgcatttcaaaaagctattcatgatatgtcatgatcatgatttatcaatatccataaaatcaggttactagtattatatcttccttatattgttgcacggagcacggagttgagacgtggactctcacagacgctacctgaaagttaaggctttcgaaatgtggctttatcgtcaaatcctgaagatatcttataccgaccgcgttacttattaggaaaacagccaaaatcgaatacctcggtcacatcatgaggaacagcgaaatatatggattgttgcaact

SEQ ID NO: 7189 - DNA, 1657 bp, Diabrotica virgifera
  SmartBlast Evalue=1E-144; Info=Beta-glucosidase (Fragment) n=1 Tax=Tenebrio molitor RepID=Q9GSE6_TENMO
aaaatttcaaataatttattttgacaattcgccctccagatcagaggccgttttgaaaggtacaagaagtaacaaaaaattagttgttaatctgaaaaaattgaatctgaataacagaaatccaacattcatatttacaaacaatttctttctacttattaatagtcttcacaaacatctgtaacgcaccttgtggtcataactttcttgaggaattctactgacctctttggcgtcctcggtctatctgcgtcagtaaagtttacttggtaaagtccaaaacactcagaatatcctctgatccattcgaagttatccatcaaactccaagctgtgtatccaataacgttaacaccatcgtctagagcatctctaacaccacttatgtgttgctgataataatcgattctgatttgatcgtccaaggaagaaccgtcatctgatacaccattttcagtaataaatatttccgtatcatctccgtatgtttttttcatccaattcagcattttcctcataccccatggcacaatccttaaccaagaggaagacgatttgggccattcctctttcaggtagatatctacttccatatctttttcccagctggaaaccacaggaacttcgcttcctcttgctttgaccatatttactgtgtagtaattcaaaccaagaaaatcaaaggaacctttaatgaattgaatttcttttgaagtaaagtctggtagacgagattttgataagccttgcgcagcacttcttctggctatcacatttctcattacttttgggtaattgccattcacaattgcattggcgtaccaaccgtaattaaattgcaacattctttcggcagcatctttatcttcctgactgtcactatctggctcaccaaaaaaacagtcaagagttattccaaggtgaccgttttgacgccgtctgtatttttcgtcatacaaatgccatactgcagcatgagctttgatcacgttatgggtacacaagtattcccctacgccaggcgattggataccgggtgcaagaattccgtttccatatcctccattgcaggtttgttttggttcgttaaaagtcagccacatctgaacatcgtcaccaaaagtttcaaagaggaactgagcatagtccacgaatctatcgatgatagtgtcattggtccagccacctatatcttctaaaggttgtggggtatcccagtggaacatggtgactaggggaaatatgtcgttgtcatttaattcttttatcaggtttttgtaataattaacaccggcttcatttacttcattactgtatcctgtaggtaagactctggaccacgaaatagaaaaacgataatgatcaactcccaaatcctttaatagagccacatcttccttgtatttgtgataagagtcgcaggctacatcgccgttagcgttaccaaaaattcgtgatggatcctcgtgcgtaaaattatcccaaatgttttgtcctttgccatcctcgttccatgcaccttcgacttggtaggatgctgtagctgtaccgaatataaaatatcctggaaacgttttattgttcagttcctctccgcatgttgcagatatcacaagaacacacaacacccaaactctatgccgaaacattgttgcta

SEQ ID NO: 7190 - DNA, 1649 bp, Diabrotica virgifera
ttaaagtaatgttcaattagtcagtcattgaattgagctgtgaaattggttttccaaataaatactaatttcaacgtcaattaacaaagaaaatctcaaacgatcaaatattgcatgatataactaagaggcaggatgtgaaaaccgataacaagattaagatgctaagtacaaactattacaagatagatactatccataaggtggataaagaatatttaaaatatcttagtgcaatcatgcaagacgctggaattttgactcttgtatttcattgaatgttaataggtagatgtcggaaggaacatgccacaatgctatattaagtagaaaagaaattataaggacaaattatgttttactgcaaatatttttaacaaaaactaacaaatgacttaacataaaattgacaacttttacataatcataggtaccaacttaaagaatcagacaagaatggctagtcactacatgttactaaaagtagaaacatgtgctccaaattcaaataaaattcttattgttaaaaacggggcgactgagaaactaaagaaactttacgggctaaaatgttgcgtatatcagtgattattaaagtttacaattaaagaataagctagtatatacttaaaatcaacggttcagtacacttaaaaggatatactgatttaaactgtggtaaaataattctaagaattagaattactttagtatattatttggaattattttaacacagtttacatcagaatacgctcgaccatttgttttaactacatgctagcttattttttccaattaatttggattgtgagttattgtttctacttttcctcttactttagtttttccaattgctatttattgaatttgttaatcttatcaaaatttattctttggttggataaagtctcagaagaactttctgtataaatcactggggtcttcgcaatctttctactatataaataaattaaactagatgaatataattatacagttaaagcagaggatccttatcaatacactggcataacacagtggagaagttaacttctcactgaatgtaaataatgataaaaaatggcatcaagtacaattggaaaatatatttaaacattgaaatcgagtatcttgaattttgggtgatatggctatgctatgtagattttaagataagcaatggatgttttcaatactttgacaccgaagaacattgttttgatattaattttttactgcattatctcactagacattttttgtatttattcgaaaatactgcaattcgtgacgctggtacatacaaaattgactttttttaaatgataattgactatatcaatgcgtagtattgtctaaaatttaaattctactataaataaaaatttacaatccaaacataggaattttgtccagaaatcgcccatagaaatttccaaaatcataaccatttctttctgcattaactttttgtatataataaggaaaaatttccagttggctgtataccgtagtttaaaaaaaacttacaatcaagtgtggaacttctagtgtaattggtataataatttataaaatcatgaaaatatccaaatggatcacaaaattggtcaaaacgacctcggtcatatcggaacatcatcaat

SEQ ID NO: 7191 - DNA, 1622 bp, Diabrotica virgifera
gccccaatgtcttcttccatttggcgatttgtctcttgctattcgtactattctattttctgtcattctttctatgtgttgattccattctatttttcttcttttggtccacatgtttatttcttctataccacatctcgctcgtatttcctacttcttactctgtctcttagagtttggtttgctatttttcgcaagattttcatttctgctgtgcagcaatctttgtgttttcgccgtgtctgctcttgctctgctcggtatgaaatatattaaacagagtcggagccggctcatcttcctgttttggtccagttatctggaagggatctgttaattgattttggactcgtatttgaccttctgttagtattataatatttgttttacgttgaatatatggtcaatattaggtagtgctggtctgaatccggcctggtattctcctatgatttttctgtgaagagactaactatcttatttatgatccacgtaaacaccttatactccacacagaggaaggttataactgtgtaatttttgtagtttttcttctttcttgtggattctgttatctccaaacccgctactgcataggttatatttgtttgcatttgctctattagcagacagtcgaaccagtttttccagtttgcttttattgctgcattatcactgatagtttatctttcactatttttcaaaatcacaaactcaccaaatgagttctagtagtctgatctctataatttgccatttataaaaaattatagtagaccagaattttgccccaccctgtattatatcatattttatctaatacattggttaggcaccacatagccctaatgccttttaaaatatatttaaaagcaaaaaaccaatgaatgaaaaatttgaattgctgctttttatcaatctggtttttaaccaactataaaactataccctgttcaaaaatacgttgttaagcgaaaaatattaaaaacctaagggtataatataatacttcgttcttggaatcagtttaaaaattccaaaatattgagtaaaaattcaaagataactgttacacacctttggcaccttttgtattaaaattacattataataattatctttcgtggtgaggaacttttttaacaaagaacaaaacgtatatactataatattattcgagcttatttatacttaaccattaatttaatttacttactgcaatatttcgccatctttgcctcgctgcattgcttagtgtcgcctagcagccttagaagatggaagtcccagtcgcggtcaacaccaatgtgaaattcatgctgtgatacgtgtatttcgcctattgacattcagcgtcaattaatcgaagtttatgggtaaaattgctaataaaaaagaattcagtgaaggccgaacgaaacttcatgaaggccttttgctccaatcttcagctttgaatttttagctttgttctttgtcaaaagttccatctccatacaactaatactgagccatagaagaaaatcccaattagggtaacttgtggggttttgccattttcacaaaatcaaattgattatttgacctttaatttataacaaattataccacaaaagcatgac

SEQ ID NO: 7192 - DNA, 1655 bp, Diabrotica virgifera
  SmartBlast Evalue=1E-145; Info="Glycosyl transferase, putative n=1 Tax=Pediculus humanus corporis RepID=E0VLJ1_PEDHC"
tataggtatcacactttattatgacttatgctatatgtacataacgctatttgcttacacattacttaaacaaaggttctatagccctcaaaaattcttcatagaatttgtgattgctaaaacggtcggttgaagcccttgccttcgatctaatctcattaacctcggcatcatccaattgcaaaatgaatttaattatgtgagcaaactcgtcaggagtttgagctaaaaaccctagtctagatccctctgaagtttctataatatccaataaaggtcctcctgatctatgcgccaccattatgagacctgctgccatctgttcgactacgctaataccaaaatgttcgtcaagcatagtgtggataccgatccaggaatttttaaattcctctaataaatcaccatagttaatgttaaccttaaattctacgttgttttctaggcttaaatgcttactaaagtcttttaaatctttcactctcctactgtcttctgcatttctacaactaccacataacactagagttatgttgttgaatacatcttctggcactatttcacgcagctcatataacgcttgcagttgtaaagggtggtccttctcaggtctaaattgagccagagacattattctaatattctttggtcgagttttgtctctttggatttttttgagatgatcagtctcacaaggtggatatacaagatgaagcggtcggttccaaagtgagttgagatgttccatcgtgaatgtagagttcactaaatttatatcagatgattggcctgctagagaataagcccaagcaaatatgtgataatataccagttttcccatggtaagaataggacttcttgctattatactcctattgttatacaaggactgcctgttggacactcttttcaacatatcatttgtaataattggataatgtatgtaacaacctgtcttgcaaccaccaatgtacttgaagattggaattacaaatgtaaagccagtggtttcaataaaaatatctggatttaacctattcaaagcttcaaagcctaagaatacagaccctaaagcctgccccaaaagggtgaaatagggatacatgtttgcttcgagccattttcttcgatggagataaataaattttatatttttgtctagatttacatttaatctagttctaactttatccaagatttcttctggggttgcttctacatcacctgtgtaaatatagaactctgctttaggatactttttctgaagtgcttgtaatgctacccataagactttctctcctccacctcctgcattacagtagggatgaaatatgcctacccttaatttactggaaagattctttagtttatcaacagtgtattttctttttaaatataagtaatatactggaacaacaattccgacagaaagcaccacaaatattacaacagcaaggattaacttaataataaaaagcaggaactgtatcattttgactaccccacgcatcttgcatatgataagatttacaaaattacaaaaaagtcattggtatgtatgagttcatatttaacaaaatattgttaaaatactatgtttatcagtcttaaaaatattgacgttcaaatcttccataggtaaaaaaaaatatcaa

SEQ ID NO: 7193 - DNA, 1652 bp, Diabrotica virgifera
  SmartBlast Evalue=1E-159; Info=Mitochondrial-processing peptidase subunit alpha (Fragment) n=1 Tax=Harpegnathos saltator RepID=E2C450_9HYME
tttgaaatctgacagctattttgtgtggtgggcctttaaagtcttaaaaagtgtgaaagttttaaaatattcccgaattagttttgtttgaatgaaattacacaccacaataattaatgcattaacttaattgctttgcctaaaccaagaaatggcgttacagacaggctacaaattaacaagagcgctactaccaaagaatcagcatcagttatggaatgcatcgaaaactgtagaatattgtctagccaaacaatacacatcaacagatcgcactgatttaacaggaggggcaaaatccaaagtaactgacatgcctcctatgagcgaagctgtaaaaggactgccacaagctgtctacgcgaatttcaaagaggaagaccaaaagacgaaggtaaccatcctctccaatggcttaacagtggcgtcagaaaacagattcggtgctttctgcacagtcggtgttgtcatagattcaggatcgaggtacgaagtggcttatcccagcggtatctcacattttttggaaaaactagcatttaattcaaccaaattttatccagacaaagacgaaatgatcaataaattggagaaacatggaggtatttgtgacagtcaggcttctagggacactttcatatacgctgcttctgcatacacatcaggattgaatgacgttattcaattactagcagaagctacgttgagaccaaatataacatctgaagagttattaaatgcaaaacaagcaataaattttgaattagaaaccttaaatatgagacctgaacaagaaaccattcttatggatatgattcatgctgctgcttataacgacaacacattaggactaccaaaactttgcccatatgaaaatgttaacacaatcaatagaaatgtgattttgacatacttaaaaaatcattatactcccaaaagaatcgttgtggctggagtaggagtagaacattcgaaattagttgatgcagtacaaaaattcttcgttgatataaaacctatctggactgaaagtaattctgaggttatcaaagatgttagtgttgatttaagtgtttcacaatataccggaggaatagtgcatgaagaatgtgaaatccctcagtttgcatctgctggtcttccagtgctgtctcacgtggtcgtaggactagaaagttgttctcatcaagacaaagacttcattgcaacgtgtgtgcttaatataatgatgggaggtggtggttcttttagtgctggaggccctggtaaaggcatgtacacgagactatacacaaatgttttaaataggtatcattggatgtacagtgcaacggcatgcaaccatgcatactctgatagtggtcttttctgtatacatgcaagtgcacctcctacgcatgttagagacatggtcgaagtgatagtaaaagaattagtgaacatgccgaagaatattacagacgaagaactgagaagagctaaaacacagctgcagtcgatgcttttgatgaatctagagtccaggcctgttatgtttgaagatataggaagacaagtactcgcttcaggccaaagaaggagacctaagtactttataaacaaagacaacttcctaccattgggcattctgccttcagaatcaataagtccag

SEQ ID NO: 7194 - DNA, 1652 bp, Diabrotica virgifera
  SmartBlast Evalue=4E-85; Info="CG2818, isoform A n=6 Tax= melanogaster group RepID=Q9VQU3_DROME"
aatagtcagtgcgttttgattcgtccccctgtcatagatatttgttcgaagttcaaagtgtcaagtaacggaagagacagaaaatatttgtgttcaatttagtaaaataatagagtaaagagtaattattttaattttatgacgtgtgaacataagtatttctttgttcaaaattgtgttgtgataaataagttcagtgcaaaccaattttactcatttccagctctagtcatgtcttatatccagttatctgcatctgaactgaaagtgtaagttattagatagtcagtattgttaaacaatcaaaagtttatgctgttttaattgaagctttattagctaatcaaatcaatatgcagcgctggtttttcttagaggatccaagttcttccgaaattcgcaatggtaagcccgaaaccagagtttcaagtacctcactaaagtcagctgagtacactcctaaaaaatggttattccgtgtcagagtacctgaagtattaagaggtgatgaacatgtttgtgtttgtggggacctgccagagctgggctcttggcagcccgaaaaatgtgtacccttaataagggaagaagattcagacatttggtctgcgattatcgaaatacctgaaaagaagaaggttgagtttcggtactgtgtttgtatactggtggaacttggtatacaagtaatagtgaggagctgggagacaaaccttcaggctagatctgttgattccatttctggtaattctcctacgttagatgaggagcctcatgaatatggatgttacggtgattctgaacatattgataggggttggctaagcaaagaaactgtcattcaattgaaactgtgcaataaccccttagtactctttaggccgaaatatcaaaataggaatataaatattaaagtcactcccgtaaacctaacacgctctaacactggctttgccaagactatgtccgaagctttagaagaatctttaagtgcagatactcaggattcagtcgaggctcccagacacgctttcacagaagtagctagcttaaatgcagaggatcctagttttcatcctcaaaaccaattcggcaatgagttgattaaagatgatatgttaattttccaatctacagtgttgtttccctctactattgctttcttaattgatctctacatctacagctctcgttctggagagggagagccaccataccatgcgggttttagttacctcctaccttcagtattgcaaggatctgaaggtaattatgtattaccagtgacaagtacaaaacaccgtccgttaggtgaaattaggataggatatttagtgattggtccgatgcctaacttcaaatgtgatatgtttatttcttatgcaaggcattggaaaaaaaccagatctggccttgatgttggtcatagaggctctggttctagttttaaaacgaaagtacaaaattgcgcagaggttagagaaaataccatagctagtttgaagaatgccatcgagcatggagctgattttgtagagtttgatgtacagttgagtaaagatttagtgcctataatttatcatgattttcatgtttgtatatccatgaagaggaaaaaggaattagctgaaactgatatgctggagataccg

SEQ ID NO: 7195 - DNA, 1646 bp, Diabrotica virgifera
tacatgccatttgtttataatatcgactgactatagaatttttgcgatataaagtatgaaaatattatattggtgaaactttttgtgaaattaaaggaaaaatggatatagaagaagttcagtcagttagtgtcaggaaacttatttcagcctttgaaaaccaaactaattctcctgaagccacatactttagaccaaggactagatcattgggcaacatactagcaaaaaatgttactgttagagaaaaccaatttgcaacattggatgaaataagtgacgcattggaagtaatacaacaacaactgcaggtttacgacatatacaataaagaaagacatgttgcattccaagaagaactattcaacattctgaccagcattattaatatcgataatgatgatccaatcagagcccgtaatcttatctccactactaaacatttagtttctgtgctgaacaataaacttccatctaataattctgtcgaacaccgatataccaaatattctgagcaggtcaatggtacacatcaatccaatatactagttaaaaagaaagaaacatcgaaaactaataataacatcaaacgggaaaacagtgttgacctcaacaaagacatagtcaagtcgactaaagaaacaaaaggtataggtttaaccaggtctgtttcagttaaaaagcttaaagagctctttcaaagtgacataaagctatctgaacttccaacccatcaaaacaaatatgagtccaagtccgaacaaacagtcaaagtcagcaatacgttaaagaaaagttcaactactaccactgtggtaactgttcctgaagctgttaatagagtaatcaaggatgaacgtgtttatccttaccaagaatactacccagtagaaacagcttctaaggatacagactatgcaatttccgtagcaaatcttcgaaatgtattcgaggtgaagtcaaaagaagcatccacaggtctaccgcttattcttaaggaacataaaccaccaattacaaggttcaactatagatctagcgtcagcgaagaacctgaattgattagttacacccccaataaactggcttctgaagaaagtagcagactgctggaactattgaaacgagatgctgaatcctccaatcaaagttttgaatactcgcttaatgtcagtgagcaagatgatgcaggggaagtgacaccagtggagtctcctaatagggatgaaaacgacattatgtcaagtttggagtatatagaagaaaacgacaatgaatatgacaatgactctatatctggtgatagcttgaatagtgcagagagtgttaaaactgttgaaagtttaaattcaaataataatagtagtctacggcttaatagtaattatattattgacgacaatgaggaggatgacaacgaagacaatgattacaatgatcacggtgttaaaatagaagaaatcaattttgatgacactgaatatttacctgaaagtgaagcgtaagataaataagtaataatatttattaataagattataaaataaaaagtgaacaaaaagtataaaatatacctactattattaaaaaaagataatttttttattgttattagaaattatttaaaaaaatatattatagaagta

SEQ ID NO: 7196 - DNA, 1650 bp, Diabrotica virgifera
  SmartBlast Evalue=0; Info=Selenophosphate synthetase n=2 Tax= Endopterygota RepID=Q3HR35_BOMMO
gcgtcttgcgattgtttgagaaacgctcttgtgagccagtgtttttaacacggtagtacgggtgcattttcgttaaaattcgaaaagccggtatgggcgattatcaagtaacacaagttcaacaagatgctcttggggctgtccagctagagttaggaggaaatcccaacactctagcattacgccggccgttcgaccctttggcccatgatttggaagctagtttcagattgacgcgattcgccgatttgaagggccgtggatgcaaagtaccccaagaagtacttaacaaacttgtagaggggctccaacaggattataattcggcagaacatgaacatgctcactttatgcatatggcaattccgcgaattggaatcggccttgattgttcggttacaccccttcgccatggaggactgtgtttggtacaaaccactgacttcttctatccattggtggatgacccctacatgatgggaaaaattgcttgtgctaatgttttaagtgatctttatgcgatgggagtcactgaatgtgataatatgcttatgttactgggagttagcacaaaaatgacagaaaaagaaagagatgttgtcattcctctgatcatgagaggatttaaagactcagctcttgaagcaggcacaactgtcactggaggtcaaactgttgttaatccctggtgtactattggtggagtagcaactaccgtttgtcagccaaatgaatacattgtcccagataatgcagtagttggagacgttttggtccttacaaaacctttggggacacaagtggcagtcaacgcccatcaatggttggatcagccagaacgttggaatagaataaaattagttgttagtgaagaagatgtaagaaaagcctatcaccgtgctatggattctatggctcgcctcaaccgtattgccagtagactgatgcataaatacaacgctcacggagctactgatattacaggttttggtctacttggccatgctcaaacattggcctctcaccagaaaaacgaagtatcttttgtcattcacaatttacctgtcatcgcaaaaatggctgctgtagctaaagcatgtggaaatatgttccagttattgcaagggcattctgctgaaacttctggaggactcttaatatgtttaccccgtgagcaagctgctgcctattgtaaagatatagagaaacaagaaggttatcaagcatggattattggtattgtcgagaaaggcaacagaactgctcgtatcattgacaaacctcgagttatcgaggtcccagctaaagagtagatttaataatacatatgtaatcaactttaagtattttttgacatactgtgggcagttacaagtctaagtatgattccccaacagctttgtagatctaatacgttattactttgtgcattttattgaaatgatcctttgtattgtttatgtcagaattttatttgttttgatcatgtttatcacacatgaaacatgaaacctttttttgtgtctttctcattataataggtattttaaatttcgtgaacatgtgtttctttggtgagttacgacatctgcattttgagttttattttagtgtaatagatgaaatgtttaatggtattttgtataataa

SEQ ID NO: 7197 - DNA, 1649 bp, Diabrotica virgifera
ttaatggatcataacaactatatacttgtacagacagtaaataaccaaagcatgaaaaaaccccataaaggaaaaacaacactgtttgtgggggactgtgtgctccccaactagaaatctccagaaattatatccaagtatccaacagcctgtaatgtctggttgcacgttgcaccaacaaatcttaaactccagcttagcccagctcagcttttagatagggccgctttgtatctcacttaagttgcaccataattttcgattcttacacgatttgttcgatttgtacatcattgtggcaagctgaaaattgatctaagactcaatggtgcaaagcgtatgtttcgtaagctaagcttaaagcacggcttaagcttaagatctgttggtacacccaggcataaaatacccttctaaacagatgttttgggattttttcaaaataaatgacactgaaagcttagttcctattcaaggcataataaatgatgtcaaatccatcgaaatattacgcaaagcattgttccatttatggaaacatttgacggaacatttcttcttcttcttcttactctctttcttggcttgcatacggaacattttaacatgttggtccccttgtcacttgtcacaatgcgaaattggtctagacttttgagcgggaaaataaaggaaaagtgcttgactggcctagtaatttaccagacctaaatcccattgagaactcatagcatattcttaagaaatgcttagctaaattgatctacaaaggaaaaattataacaagtgctatacaattgtggttccacgatgatgaactcatgaacaactgtgctaaaatagcgttggagaggtcatttctactaaagggggacatacttcgtactaatatttttcagtctacttatagtatgtaatggttaaagtttttttggaaaaaattgtgtttttatttgtcctattccaacattagatatgttattttaataagatcaccgggaaagagaataattaatatgtcccacatttaatataatcaaatgtggtaatactaatatttactttgctacacgtacacgtatttgtttttataagtattctttgttcaaaaacaaatgatagattataccattaaatacatactacttactttagagacgaataaaagctaggattagttgaagcacctgagggaaaaaaactattcgatatcttatacgtattatatgtgatacgtattagaatggaactggacaggtcacgtgactcgaatggcagataacagacggaaaaagcgcatactgaaatggagacaaagatatagtgcctacctaccgaagaagagatcgtccaccgacacgttggactgatgatctaaaacgttgccataggaattggatgcaagaggcataagatcgaaacagatagaaaattatgagggagatctatgtccagcagtggacaatcggagagtgaatgaggagatgtataatacattcaagtgatgaggtatttaaacagataccaatggttttaccggtacctgcatttaataggaaatatagctacctacaaaaatatacattgtctctcctagtataataaaaaatgacaggattaatttagtacgacaacttacttaataataa

SEQ ID NO: 7198 - DNA, 1646 bp, Diabrotica virgifera
  SmartBlast Evalue=3E-33; Info=Reverse transcriptase n=1 Tax= Anguilla japonica RepID=Q5TLN1_ANGJA
tatcaaaattgacaaaacttaaaagtaaaataagaagctactgcagtttgtcctcaagatattcatttataggataatatgcttttcttaagagtaagcctttaacattttttttttaaatttagtggaaagtggtatttctttcacagtttttggcaaatgattgtacaaggtcagtcccatatatctgaagcaattttgaaatttcgatgttctgtgtttaggaactcataaagattcagcacttcttgtattataatagtgattgtctgaatttactggaaatgtattgatttcctcttttacataatgaaaacatttatagatatatatgcagtagaaagttaaaatttgatgtataataaaaattggtttacacgattgttgataatccaaattaaaatttacggataattttttttggtaatgaacactttgttactatctactgagttccccacaaaattacattatagcacatgtggctgtaagcaaggctataataaacgtttattaatgccgagatgggtagtgcgtttttaattctagatatagcataaaaagctttattcaatttcatgttcactgaattcacttgttctgaccatttgagattacaatcaatgaacacacccaaaaactttgtagagtgagtggaagtggaagataactattgtttctatcatggatggttaagatatagtcattggtagatgagttgtatgagtgaaaataaatgatttccgtcttgtcaatgtttaatattaatctgtcggtattacaccagcgtataaagcagtcaacaacagtcttcattgtcatttttaattcctcgagtgtacgtgcagagactattaacgaggtatcatcagcaaatattgctattataagtgcacttgtgtgatctggtaggtcgttaataaaaattaggaataataatggtcccagcacggatccctgtggtactcctttatttgtcgtgtatggttctgagcttgattctttaattttaacaacactcttcctgccacttaagaaatttattacccattctagaaatatccctctaaaaccaacgttatataatttattgcgaataaatgttatgtctaagcagtcaaaagctcgtgatagatcaaaaaatagtcctgccacgtggtttctactatctaattcatcataaatacgctcaaacaagctgcatgcagccgtgagtgtcgacttttttggtctaaatctgtgttggtttggagttaataaattgtattcttctataaaatttaacattctgttgtatacaaccttctctattactttggaaattacgctaaggacagatactggtctataatttgaaatatcatgagggtcattatttttgaagattggaataacttttgccattttaaatatggatggaaattggctggctgttattgagagattaactaaatgggtaaaaggattcgatatatgtatgatcacttattagttttattatttttacagatatgttatcaataccagtactaggcttattttttagttgatagactgtattttttagttcaattggagtcacgggtaaaaagaaaaatgtttaaaataaaataaaaattccatcttcattcagttgcaatgcgaag

SEQ ID NO: 7199 - DNA, 1646 bp, Diabrotica virgifera
  SmartBlast Evalue=0; Info=P70 ribosomal protein S6 kinase n=1 Tax=Artemia franciscana RepID=Q9GQB3_ARTSF
atatatactatacatgaggtagtccgctgccgacttccatcatctcgtctgcgcatgcatttgttggtatattaaagactgcttgtggagcaaacgggttatgatggtgcgcatgtggatgatgcgcaagtccgtgtgcagcatgtggaggcacgtgattggagtgcgcagcgtgcgcagaagacattcctgctacgtagctgcaattcggatccaggttattgggatgactatgatgagtaggcgtaaaaccgaaatgagggcgataggaacctttacggggagagcgagcttttactatcgttggtttatagatatcttccaagacggagggtgctatgtaggtaaagccctggaatatcatgttggcactttcactaagagtcgattcgtccggcgaatctactggagtttgttttgtaaatctggtatcaaactgagagacatcatcatcactagcaagacttggtttaaatggaggttcatattttcttctcaggacatcatcccagacgatgtgtttgaagaattgatgtcgtttgacagcatttgcatcatcgggaggagcccctaatctcgaaggaacctgcctctttagtaatttgcgtactaaatcacgagcatcggcggtcaaataaggcggaaggtttagttttccctttagaattttttctattgtcttttttctattttcagcggtaaacggaggtgcaccagttaacatatcgtacatcaatgcccctaatgaccaccaatcaacctcttttccatggccatgtctagttaaaatttcaggtgccatatattcaatagttccacaaaacgtgtgggtcaatatgccttcgttaatgtgttctttacacagaccgaaatctgtcaatttaacgtgaccgtgggcgtcaagtaaaatattttcaggctttagatctctataaataattccttgtccatgtaaatgttctagggcgagaatgatttcggataaataaaagcaagcggtatcctctaaaaatattccttctctttctaaatgcataaaaagttcgcccccgctgaggtattctaaaattaagtacaattttccacccgtttggaaggcatatatcaaatccactataaaaggatgcttaacttcttctaaaatatttcgttctgctttcgtatgggcagtatctttttgatttctaactatggaagccttgcggagaaccttcatggcaaagacagtattggcatctttccccgtaatttttctaacttgaaatactttgccataacctcctttgcccaggactttgcgtaattcaaagtcatggggtccggttttttcctggcccgggttcacaatttgttcagtcagatgaaccgtttctgtatcatcggattctacaattgcattaatattaggattttgatcatattcatcctcttcaatttcgattgcatcgtctgaatcatctacttctacagtttcaacatcatgcagttctaaatcgaatactccagccattttgactacaaaactttgctcttacatctagaattatagctttcaagcaatattttccaaaattgttcacaattgttgcgaaatgtctaaacaattacaagaatttttaaaattttctgctggcacgacaccataa

SEQ ID NO: 7200 - DNA, 1644 bp, Diabrotica virgifera
  SmartBlast Evalue=5E-18; Info="CG1572, isoform A n=4 Tax= melanogaster subgroup RepID=Q9VYX8_DROME"
gcccgggataaatttccactattaaatattaaatccaacttttgttttgaaaaacggtgtttgattgtacgtctcagatgaatgtattcttctattaaagagttcattacttccttcttattatcataggctcttattgcaaacaaaacgaaagtattgatagggatattatttatgttactttttataaaaagagtgtgttttaaaaaaatctgtttaatcggaaaaattcggtaatccgaaatgggttcggtcccaattatttcggattaccgggactccactgtaattataaagataaatggacatgcagagtactattcaactttgtgttgtcaacaaatcagttacgacttatttcacatgagtcgtcacgacttctttataagtagacaactcttccagttttttggcctccgtttaaagatccttgcagcattgcctaattaaggccagtcttcttcatgtccttactctcagtacctgtatatctgctactgtatcatccaagaaatgtttttccatgtcacagtacttgttacatacctgtttctttttaattttatgcaataactggatattcactgtagttacctttagctgtgtgtacagatctgctgcgtacatcagccaacaacatttcattgtgtagcatcgtccttagtagggtattaaggtaattgctccaaaattcgtctgtacactataacactttattatggagctaagaaataataagaacttttcctggtatgcatcttgccgatttaaaaaaataattatttccttaacttaattatgcctggttgcaccaacagatcttaggcttaagacgtgctttaagctccgcttaagaaacatactcgttgcaccattgagtctcagatcaattttcagcttgccacaatggatttccaagtggattgtatcttaaacttacaagttaagacgtgctaagatagacgagccctatctataagctgagctgggctaagctcaagctggagcttaagattttttggtgcaaccaggcattagtgggtcaaaccgtgacaaataaatagttaacaaaaatgtctaataggagagagttaaagacctctgtagcttcttaaggcgaagatcgtacttaataggtaaagtactgaatttaccaatccaattactgctgctgcaaaatatgcttcataatctgaggtatagtaactcttttccaatggtttatctcgatgacaaatgtcaaactagcagccaatacaagtataaaggcacatccatgatagacaacttcgtatattgttttagagatgatagatgcagttgaaatagatatcaaacatgatgttaatagtaggaacgttcctataaggaatgtcacagccataagtaggaagaatatttcgggagtgttgacatatcttccatatctatggatatagtaacctacgattccgacagtcacaattccaaggattaattgtgcaaacttcagtaatcctggccacgattttaaatatcctgtgttaattatgatagctgaggtagttgtcgtagttgtagttctagtaactgttaccgtatgagacattttggatgattatctgtcaccgtttgttttggataaatttgtttaggcgatttaaa

SEQ ID NO: 7201 - DNA, 1646 bp, Diabrotica virgifera
  SmartBlast Evalue=1E-71; Info=Neuropeptide receptor B3 n=1 Tax= Bombyx mori RepID=B3XXQ1_BOMMO
aaattatttagtaagtatattaaaccagttggattatttgcctatcgcctctcgtagatatttgtctatttatctgtaaataattagagcagtgtaccccaaatggagcaactgcaacgatgttatctctaactttaattgtgttattcgtgtttgttcaaccaatagtttcgaagcagtgccttatcattgaagatcttgtcgatgaagaactatggaattattttgcaggtttttggtgttactactacaccagcgacttagtatggagatatgagtatataataacggcgatttcttttaataatgaaacctattacgtgtatgctttaaatgttaacgggtcagcacttctactagactttaaagatgaagcatcaatggcatatatcaaaaaccagtttccatcggacgcagcttatcggttctatttggcatgtaatcaagattctgtaaactgttgccaagatgagatggacgaagataatattcgttatagcgaatcatactgtccagccatttgggattcttggacatgttttccacaaacgaaagttaacactactgctaaaatgccttgtagcagtcaatattatggagctgatagtgatatatgcaccctggaaagtcaaaagaaatgcatctggaacaacgcaactcaactagcagaatgggttcagtcaacagactactcaacttgctcaacagttccactttataaaagacgatacaacttccatgtgatatctttaagcgtctgtatcgttttttgtttaccggccatcgttatctttctaagctttgaaaaactaagaaaaacgattagagtagtgctccacaggaacttactgatagcaatctgcatccgctgtatgttaacgattatctccaaagaattgatataccttgatgctcttagggaagaaagttaccatacaatggaaaacaacggggttgtatgtcgagctttaactttcctggaaagctcagcagttaatggtatttatggttgtatgcttctcgatgccttttacttacataaagtgattgtgagggcgtttgcaaaagaagtcaagatgaaatacatctacacagtattggtagctttgactttcacatttagcacaacctgggcagcatcaatggcttccatcaacgcaaaattgtgttggttatcttctaacaacttgcaatggataatggatggttacagaatagctatcttgtttattaatactgttttattgggtgatattataagagtgatggtacttaagataaagcatggaactactaccgaacagacgatggcagcgtttagagccacgatatttctcattccattgtttggacttcatatcattctcacggctaataaaatcgtatatgacaaatcctgcacagcagaagatgtatatgaatacgttcggtatacaatggaagggcttcaagggattgtagtatccattatcttctgttatgctaataaagaggttcaaggagaaattaaaaatatgtacagaaaactatgtatatacttaaatcaaaggtttgattggcacttgggtgaaaactatgataaaagaagagctacaactgctacttttgtacaagataattataattaagttaaagtgtaattaaac

SEQ ID NO: 7202 - DNA, 1646 bp, Diabrotica virgifera
cttcttatacacaacagtatattttgagagtttatcacattcattgattctcgaatgacagcatttatgcactgtatatgtaacatagatctacgacaatgccaaggtatttgtcatagtgtaagaagtaagatatgaaaacaattttcttaatattaaagtttagagttgcttgtaaaaaaaaatccaatattgaatagacaattgaaaaaatttatattatatgtagaatggaaaattttcttaacagattttctattaaacaggtaaattagttatttcactttctttgtttctctttgatcaataacattgcagtgatatttttcatcccactttcaatgtaatattttaattaagacgatcgtattattatcaatatatatcatcatcatcattggtgctacagccctagttgagcttcgacctccccaatctatttcgccagtcgtttctgtacatggccaacaattgccaatttgtccacaccgtccctccattccagactaatagggttcgtctgggtgggtaattatcatttgctctggacacatgttccagcccatctaagcctacctattttcatgaaagacattgcatctatcattatttactaattctcacagattgcgtccattactcttcttagtatttttctttcgaagatgggcagacgatttgcgtctttttagagatttctgcccatatggaagcagtagtagtgtgttttataaaaattgtgtaaattaaacaaaaaacaagtctaagatgtcagaatgaaacagaatactggttttacacagaataactttattatacatttgaatttaatgcattttttgctctaataaataatgttccccacgagcctacaactgcagtcttttgtcttctaatacttaagattatactatctatatatcagacgttctttgttacttcttctgcttgtaattgcaggaatttgtgccctaaatcttcggcctagcatgttaatctactctatcggtttcatgtctgcagaaaaacacgctgacgaatgcattgttgttagacccagatataataaaaagtcctaggaggcgacgtgtgtagctctttagcaatataatacaacgaaggtgtcttcttcatgttgtattgtccctcgaatcattatattgaaatatatttgcatgtagtgagaacttattctgaaggaaggaggcaaagtaacatgttctttgtactgtattggttgttctctctgatataaatgtctctatttcaaaactgatacgattcgaccaggcttaggattgaatgtaaaatttaaaagaaaatagaaaagaatgtatgtaacagaacgtccaagttgagagttagagttgtgcagctttttattaggtgttttgttggtcgtttcttcttaaatccgttgcacgtcatccaatttgacgtcatattcgcacagcgttgttgtagtgtcagaatagtagaatataatgttgatttatgttttcagagttatgggatgaaacattgtaacaacaaaagtaatgaattttaataaagcattaatttgttatttttatatacaaaatgaattgatacttgataagatagtcttaatcgttaaaaaaaaagtacacaattatatatcgcac

SEQ ID NO: 7203 - DNA, 1635 bp, Diabrotica virgifera
tgttttacagtttgagcttctagattacttgttactttttcttggtcctctacagttcctacattagtcaaaccgtcattttcatctgctttggtaatctgttctattatttcaattggttgaactgtattgttatctgttactatggctatctgcgcagtcattttcctcaattgctaatattcttttgtggtgttatcttgaatacattcggcaggttctttggtttcatcatgaactgctttagcaacctgctctgatattttaattgcctgtacagtatcgttatctgttactatggctatttgcgcagcattttcctcgattgcaatatttgtttgtgctgttatcttgtgtatattcgacaggttctttggtttcatcatgaactgctttagcaatctgttctgatatttcaattggttgtactgtattgttatctcttactacgaccacttgcgcagcattttcctcgattgcaatattttttgtgtcgctatcttgagcacgctcgacagattctttggtttgtactgaatcttcgaatgctacgatacgttttgcactaccatcttttagttcaaaataagaatcatctgagaacgtgagttccttcggtgacagcttagaatagtcaaaaatttcactttcattgcttttgttagcttctggtgtttgtaatccatatgatgaagaacaatgatcttcagtttcgctatttgctatattttcagatgagttgtatgatctagaaagtagggaaatacgttttatttccaacgtttgtggctcttctaaatctgcctcgacagacttctcaattggcgttgaagtgaccatggacgcttccacttgaagttcaggatctgattgcggtttactttcagtctgtttgattatctgagatactctagttttcagatagtgttcaaaaatgtgctccatttctttgtctatactactcttactacgccttacttgaatctcttcagataccggcctggaaccatggtcagcttcgtcagagctctttttattacttgaaaactcctgttcgttaacagagaatctgttcttaatttctttcacaacatctttatagctcatccgatagttcaggggtgaagtaaccccgaacctattttctttgagtatgtcacgataatcgtaaggtgattgtggtggtcttccatctaatatgtcgtcagatatttgttctatttctgtgctattagaaacttccggtccagttacatattctacagtatttttatgcacatcagatttgtctctcaacactacactttcttccatgttgccaatgtcgtctttacctagctctttctctatcgatttatccatgaaacgtttatcttcttgaatcaatttatggatcgtatcgaatttttcagttatgttctttattgtttcatctgtatcggttactgcagctgtttgatcagtttcattttcgctaaataattttcctctttggataggtctttttaaaaggtatcattatactctagcgaattataactctcaatcggagcaatatcgacagtttcaactgtagcaaaatgcagaggtgggggtaaatgacattattatctatttcatgataattatctgtag

SEQ ID NO: 7204 - DNA, 1644 bp, Diabrotica virgifera
  SmartBlast Evalue=0; Info="DEAD box ATP-dependent RNA helicase, putative n=1 Tax=Pediculus humanus corporis RepID=E0VZA3_PEDHC"
aagaggaagatacagacgaagaacaaccagaggaagatgaaattgagtctgacattgaagatcaagagattgacaatggtgaagaagatacagatgaaaaatctgatttaggaaacaaattaccaggatccagtgctacattagaaattctcagtaaaagtacatttgactcattgacggataaagtatgtgaaaatactttgaaagccattgcagatatgggttttactactatgactgaaattcaagcaaaatctatacctccacttctggaaggtagagatttggttggggctgcaaaaacaggatctggaaaaactcttgcttttctcattcccgctgttgaacttatttataagttaaagtttatgccaagaaatggtactggtatcattatcatttcccccacacgagaattatcaatgcagacttttggagtattaaaagaactaatgaaatatcatcaccatacatacggtttggttatgggtggaactgcaagacaaacagaagcacaaaagctttccaaaggtattaatatcttagtagcaacgcctggtaggcttctggatcatcttcagaatactcctgacttcttgtataagaatttacaatgtttagtcattgacgaggctgacagaatattagaagtaggttttgaagaggaaatgaagcaaataattaatcttttgcctaaacgtagacaaaccatgttgttcagtgcgactcaaaacaagaaaacggacgcattgacgtcgttggcattgaagaaggaaccagtacacattgatgtagatgactccaaacttgaggcaactgtatctggtcttgaacagggttatgtagtctgcccatctgacaaaagattgttggtgctgtttacattccttaaaaagaacagaaagaagaaggttatggtgtttttcagttcctgcatgtctgtgaaataccaccatgagttgtttaattatatcgatttacctgttatgtgcattcatggcaaacaaaagcaaaccaagcgaacgactacatttttccaattctgtaacgccgaaactggaacgctgctatgtacagatgttgctgccaggggtcttgatatcccagcagtagattggattgtgcagtacgatcctccagatgacccaaaagaatatattcacagagtaggaagaacagcaagaggcgaaggaagtagtggtcatgctctacttattttaagacctgaggaattaggatttttaaggtatttgaaacaagctaaggtgccgttgaatgaattcgaattcagttggagtaaaattgctgatattcaggcacagctcgaaaatctaataggcaaaaattatttttttgaacatgtcagcgaaggaagcatttaaagcgtacgtcagagcttatgattcgcaccacttaaaaactatattcgacgttagcaccctggatttggcaaaagtagcactatcgtttggatttaaagtacctccagcagtggatttaaaagtttctgccaagaaacccgagagaccagagaagaaacggaaaggtggtggtggatttggattttataaaaacttcaactcgatggattcgaaaaacttcaagaagaacacggtatacaggcagcctaaacctaaaagcagg

SEQ ID NO: 7205 - DNA, 1641 bp, Diabrotica virgifera
  SmartBlast Evalue=1E-109; Info=Beta-glucosidase (Fragment) n=1 Tax=Tenebrio molitor RepID=Q9GSE6_TENMO
tcagttgagaatgtattagcagtatattaaatacaataagtaaacaaaaataaatttattaaagggggcaaaaataaatttggatgtatacattcatataaataattgtattctattataataaacctcgtaatgtttttttcgtcgaaacatggttgtatgttatagctgacaatcttggtattcttattctattaggatcgttgaaatctacatagttgagtccatatctcaccgagtatcctttgtcccactcaaaattatccattaaactccaaaaagtatacgctgttacattaacattatcttcattaatacttttccatagttgttgtagactagccactatatatttatgcctgttatggtcatataagtcagttgaggtttctggaaagccttgctccaaaattcgtatttctggatcgttatatgtcttttttatccaattcagaataatacctaaacccttactcctcatctcaatagagtaatccacagtccaattaggaaagtatgtgaaattaaccccttgatcattgatataactgggatcaacgtcgaccttcctatcgtctgacactaaatacgtatcatagttattaagtccaataaaatcgaaagatccctttaacaatttttgatcttcagcagtaaggactggaagtctggattcgagaaaaccttgagttttgcttatattggcaatactgtcgatcatcacttgtggatagtttccaaacacgacaggatggacaaaccaacctaatgcaaattgattggccctttctgctgcttctatatcttctgctgaattcgtttcgggatagttacattgtaagttaaaagccatacttatttttccattttgttgtgatttatatttcctctggtagaggtcataaactgctgcatgtgctttgaggaaggtgtgaccacaaaggtattctactataccgtttggccgatattcacctaaaactcgtgtgccacttacgcaaactgaataaggttcgttgatggtaacccacgtttttactctatccccatatagattgaacaatagatcagcatagtctgagaggtattcactgaatttttcattgaacattccacctatcagaaacataccgtagggtatatcaaagtggaagatagtgacccaaggttcaattccattttccaataacttgtttattaaataattataatacttcacaccatcttcacttacgtggtttctaaatccattgggcagtattcgagtccaagcaatggaaaaacggtaatggcttactccaagggcttttaacaatagaatatcataatcaactttattgtaagaatcacaagcaacgtcggcgtttgacccatctacgatgatttcgttcgtatcatgtacaaggtgatcccaaatactcactccttttccggaagcattccaaccaccttctatctgaaatgctgacgtggctacgccgaacgagaattttttggggaaatcatacataggaagttttgccgacgttgtacttcctacccaaagaaataataaacaaaatgtatactccatctcacaaaattaatagcaaattataataagaagcagccgataaaattctaatgaactctttttgcact

SEQ ID NO: 7206 - DNA, 1638 bp, Diabrotica virgifera
  SmartBlast Evalue=1E-79; Info="Zinc finger protein 585B, putative n=1 Tax=Pediculus humanus corporis RepID=E0VMX6_PEDHC"
caggtaacgactttatttctatgggaaaacatgtgtcgtttgagacgagctttactgtggaaagttttgtcgcacttcgtacacgcaaacatcttttctttagaatgctcccaagtatgtttaagtaacgttcgtcgatctttacacgatcgaccgcacaacatacagctatggggaggtagattttttccatgtttagcttgaacatgaactgctagcaaattctcctcttcggcattttctccacatatcatacatttgtactcaagtattctggcatgcacttccgcatgggccagtaaatctaatgcttcttgaaaagattctccacatacgttacatatgtgaccgaattcgtctttcacatgaatcctttggtgtctgcgaagattgtcttgtctatgaaatgacaaaccacaagttgaacaatagtaggttccatattttgtttcctcttcggaatagtcttcgtcatcgtcgtcttcataatcgtcgacatcaccgtgcttttccttaatatggtccttcatttgcatcatatcccaatacatttccccgcacttttgacactcaaagggactgtctccttctgaatgcaaccttatatgagatatcatggccttttctcttgcaaatcctaccccgcaatgctgacaaacaaaaggtttttttggatcccttactggatatcgtatttctgtaggctgttgaatttcttcctgtggtatgtaatcatagtcttgcttgatattgttggtcatttgttccatcatcttcacatcttcttctacataattaaatgtacgggaactcgaagctgcaatattatcttcgaattgatcgtactcctctttcacttttttctttttctttttgaccaattgtttctttttttcttttccccgctgtcatctaattcgtctacagtttgggcattttcatcctctaagccgtctacctctgggatgtacgcatgtgtctttaaatgattcattaaatcacattttcggatgtatcgcgctccgcataagttacaaccatgtggtcggtctgtttgatgtgcaaccatatggttcattaaattggcttttttcctaaacctcctgttacaaaactcacatgggtgaggccgcgcggctgaatactcatcttggtctgtggtcagcggtatgtcaaggtattcttcacttacttcttcaattccaacgccttcatgagaaccatcaacaatttcttcagcacaagttatgatatcttcagtcatttgacagtccaatagctgttctgactggttatttaccacaagaacattttcgtctagatacatgagattatcaacattgtcctcttgtatttcttgggtttcctgaatgtcaggtatgcattcatcatcaactaactcaatcacctcatgttttaactcagttactatctcctctgtaacagtttcttcttgaagacctgtaaattcttcactttcagatggaaggatctcattttctatgccacaaataacttcttctgtttgaactactgtggttgagtcctcccatgttagactaaatggttcatccattttgtgttaagttatttggatcatcttttaattgtaaaaattcctataatttttgacaacct

SEQ ID NO: 7207 - DNA, 1637 bp, Diabrotica virgifera
  SmartBlast Evalue=3E-55; Info=F-actin-capping protein subunit beta n=4 Tax=Apocrita RepID=E2AEJ3_9HYME
ggatttgcaggagtcattctaattaaaaagactggagatggtagtaaaaagattaaagggtgttgggattccttacatgtcgtagaagtacaagagaagagttcgggaagaaactcccattataaaatgacttcaactgctatgttatggcttcaaactaataaacagggatctggaactatgaacttgggtggaagtctgactcggcagatcgaacaagatgcagctgtaaacgatatcaaccctcacatagccaacattggaagaatggtagaagatatggaaaacaaaattcgcaatacattgaacgaaatttacttcagcaaaacgaaggacatcgtcaacagtctgcgatcagttcaaccactgaccgaaagccgggcacagcaggcacttaagcaagacctcgcggcggcccttcaacgtagacaaaacaaaactgagaactgattagtttgtgtagcaagaaatttttcgagtatcggtgagatcggtgaatcagattaagttattactatcgagactattcacagtcctgtgtctttaacataaacgcaaacagggtgtctatagatgtgtttgtagaatacactgaattgtaatgttgaagtaaagcgattaagttgtttataatatttacttcaatattaaaaatacgtttggtataagaatgtttatcatactatcagacttgcacatattgttgcgttaatactaatgatatcaattataccctgtttttaaaccagaaggagtaaattcaaaaggcagattcacacgcaataatgtcactggaataattattacacttttataaaaaagaactttttataatttcattatttataggacccaatataaaattataaactattttgttgtttcaacttctgccataaaagaattttgtaatcgactattttagaggcatatttctctagcggatttaaactcataaaccaaagaaaatatttaaaatggtatatataatatttatatataataattaacttattaaatatgaactttaagcatattaacttttaattatttatttaaaaattaaaaaagatacgcaacagccgggtttcgaactcaggacctctcgatctgcagtctaatgctctagcacggagccaccatcaatttgtaattatcgatttgttgacgtactttaagatggaatctaaatgtcattgcattagtcacatttttaaaaatagtttgaaattaaaaaatcgatttatccataatgaactggtacgaacgtgtaaaccgaatggaaccagatagattagcgaacatctgtaaaaacaacaagccgtatagcagaagatccgttggaaggccgccgaaaaggtggaaaaacaatgtacagtcaacaacaactgaaacagaataagaggcagacaaacaggagtaatcctagtcaaacgaagaagaagaagaacatttatccctataatagcagttaaatattgcattgttagccagttctgagctattctgaacatttcaggtgcctaggtagcctagaactctgtttaaaatggataacaaaatttgcggaaacagtgtcaacaaaggaataggatagggaatgggaaacaaaaaaagtatactcaccggagggaccg

SEQ ID NO: 7208 - DNA, 1638 bp, Diabrotica virgifera
  SmartBlast Evalue=1E-127; Info="Inositol-trisphosphate 3-kinase A, putative n=1 Tax=Pediculus humanus corporis RepID=E0W2Q5_ PEDHC"
tacactattctatacaattgtaaaatattctcttataaagcctcgtctgatgtgtaaaacctgaattattacataaaattctgcgaaaaagcgtatcatcacataattagtttgactttttgtattgaacgttcgatttctccgtcaagtcttctccacggaatcttgtgctacctcagggggatcctgcagagctaacggaggactcactgttaccggttgttgctccagcatgttcatgtatatctttatcaggttgtttacgccgattaagtaaccgtcttcgtggttgcctactttccacttcgagctgtgcgttattttgacgttttctggaagaacgatggttttggcaaagtctatcagccagacgttggcgttgaatcgatcgtgaacaaacaacaatgaacttccaatcacctcatgtgaattgaaaaattgggaagtttccaaagttgctttaatagctttcagcctctggatatatttaggtatggcatgtggaaatccgtcggtgaacttctcgaacgcggccataacttggtctttggtcttggtagtcttaaagtccttcgtggacgtaccgtcagcgctgcgaataccctcaattctaaagcctaatgttgccgtcgaagaaatcgtttctctccaaaccatgtaccttggttttgtaactcctttaagcttgtgttcttcgtcagtcggcgcggtctggtcaatctggcacattttgtcgtacatatccttcctcaattttggtttttccttcgctttagctagttcttcttctagataagttctgactccgatcttgcaatccatcacacatggtgatacgaagtctcctaagagatcctgtagttgaatataggaacattctccgtcatcactggttaccaaacccttgtactcaggaacatacggcctcagtacatccttcattagaatcttaaaacatttttcttccttcgcacaaagcttcttcagaatcgtgccttggtcaggcccagccttgaagtttccttgatgtccagctaactgtacccagggatatctttgctttttgtaggtttgaaagaacggcgtccattgaacgatgtttcttaactttctccaaccggaaggctctctatttttatgtggttgcagcaaagtatctccaacaggcgactcctcttcgtcacttaacgttgaacaagttgagcaattagatgacttcctgtacggttggcacaatacgtaatcaccatctaaaccacttatagtcgaaccgcaaaaatttaaattgctacacgaactatgcaggctcgaatccggggatatcgagttatcccgtcgactgcgaatgtattcgatatcttccaacgttaggcccataatgtcgtccgaataatcactaaccacgactgacggggtacgccagtaccgataccgcggttgatcttccgccccttcactaaaacaactatgccgacgactttcatcgaacgtgtccgaatttgtttcgctgatgacatcaacgctaaactttctatccagcggaagaggaacataatgagcttcgattatggtcttgcttggaacattggaatgatctacggaacatcgaggactataagggcttcttggctggtatcc

SEQ ID NO: 7209 - DNA, 1639 bp, Diabrotica virgifera
  SmartBlast Evalue=2E-30; Info="Juvenile hormone-inducible protein, putative n=1 Tax=Aedes aegypti RepID=Q175M4_AEDAE"
caacgaaaagataaaaatggattttgcatctgtgcgagtgctattgaatattttaccgcaacaaatctttaaaaataatatcagtgaaaccaatacaaaatcatctgatattgatctgttgtgtaagtatataaaatccattaataacgatattgatcttatgaaagtggatgatttgctagaaaaattacgaagagaagaaagcattagagaaaatagtaaagtaagaaatgtaatttttaaatctctaaaagttatttttataaacacaaatagcgcagaaaggttgtttggttttgaccagttagtttgctgcagctatgattctattactcaatcactgttagaacacaaccagctcgagctcttgatgaccctatcagagtttaaagatgttatacgaagctacattcccatggcgaaattagaagtggtattagatcaaatttcctctaaaaagtcagcccttaatcaagaactagtccaagaattgatagaatacctacaaataccacaaatcttaagggaagatgtatacgaaatacttcagaaacgaatgaaacacaaaaattacaaacttttggcatactatttagacgatattaatatcaaagatggtaatctcagtgagtatctgaaactcagagtatcaatagaagaagaaaaacggattaataatatcaaattttttattaagttgttaccgtcaaaattgttatatttccaagaaatattaaccacagaaggtttcaagaaagaggttttgttttacaagacatttgttccagtaatagaaaagttgggtatgtccaatatggatttcttaccaaggtgttatctggtaaaaaacgacatgattattttaaatgacctttccgtacagggatattcatcaacagaggaaatatttttcgattacgaacacttatctctggttataaggcagttggcgaagttgcattccatgtcatttctcatagaacatagattaagtaaagtactaggagaaaatattaagattgatgaatactttccagatttaaccgaagaatatcatattcttccaaatgaattaaacgatactcatatagaatatgcagttgctgatttggaagcctattctcatctagccaaacatatatctattggagagtttcagaaacgggccaaaatcaagttcaatgaaatttattctgcagttaaaaagtctaatagctttagaaatgttatttctcatggcgatatatggaagcctaatattttctttagatgggactcgaataaacatccccaacactctgttattctagattaccagttactcaaatactgccctcaagccatcgacatcctcatggtaacttacgtcaatgctaccaaacaaacaagagaccagtatatgggtattcttctggaagaataccatagtgaactagaatcaactttgggacaatttggtatggatattgaacaaatttctccttttaaggatctaaaacagagcgtagaggaactggaagtgtttggtatcttcatcgcgatgttgtacaacaaatttatgggactaccaagagataaactagggaatacactaaaatatccagcaaaaaataagcaattctggactgacgttaactac

SEQ ID NO: 7210 - DNA, 1637 bp, Diabrotica virgifera
  SmartBlast Evalue=1E-43; Info=Aspartic proteinase n=1 Tax= Theobroma cacao RepID=Q8L6A9_THECC
cgagaacagagatcagttctagagagctagaataagaagtttgtgcctttccgtcagcaggctctttgccttgctgacggagaaaattgttgaaaatagttcaacggagaaaattgttgatagtagttcaatgaagaagattagttgtttgtatttagtacagtttctttaagtttttgttccagagctgaagtaggctaaagtggctgctgtggtcgtagggaatgtaaatattctcgaccgtattttgtgttcctagtgatggattaaacacatcctttaattttcttttgtcgaaaagttcttcatttctttcaatcaagtttaataaataataataataataatatccaaatttgcatacaataaacgaacaatggaatttcatctctaatataattaatacctgtactttgtctgtaaaattgagtgttgttatgtgcgtgacaaaaaaatgtgtcgtaacatcaggacaatgtttaacaccgtaactgccgcatggatggactatggatggataaagaacacatcaaggactatatgacatttgatgaatgaagataaatattattagcaaaaatatggggattaaaaataaattccagtacatgtccagtaaaaattttattttcgaaaatcgtgagcttccgaatcgtaagacaaaatggtcgtgcttcataaaaataataaactgttgtcgtgcctcaggaatataataacaaaattaagagctatgatacataatattcacgacaacgatttcttagtataaatagagcacattttgatgcagggtttacgttttgctgagctttgagttttgctgaaggttaagaaaaagcacaatgaaagtgtttattcttattacttgtcttgttgtggtatctccaaactggatggaaatgagcaatggagctcttgtaagaattcctctgaaaaaagtcaaaaatgaacaaaacatattgagtaatctggtaagaagtggactacatggtaaattagaaagacaggaaaagtgtccttgaccaacgagcaaaatatgggttattatggagaaatcggtattggaacccctccacaaaagttcaatgtaatttttgacaccggatctgccgacctttgggtgccttcttctcagtgcccaaaaaagttagataagactaatgcttgccaaagccataaacaatacgatgcgagcaaatcttcaacatatagagccaacaatacaaaaatccacttcgattatggaacaggaaatgtggatgccgttttatctgaagacaatgtagaggttggcggaattgtggtaaagaaccaaatcttcggtgaagcaactatagaactcaatatcccgaaaggtaatcaggacggtcttttaggactaggttcctcagggctgtcacctaaaaatactcctacagttattgaaaatatggttcaacaaggtttactggacaaaccagtgttttcgttttatttgagtcaagctgccactggtgataaaggagaacttgtgctcggtggatcagatccaaaggattacaaaggagatttcacgtacgtaccaatatcaggtaaacccgaatggcaagtttcggcgcaaggtatttctataggcaaccaacacgtgtgtcaaa

SEQ ID NO: 7211 - DNA, 1634 bp, Diabrotica virgifera
  SmartBlast Evalue=7E-12; Info=Endonuclease-reverse transcriptase n=1 Tax=Bombyx mori RepID=D7F160_BOMMO
atatttttatacttgatagaggcaacaggatcaggtctagatcggtatatttttttgttgaatgggtttttacgtgaactattcaaaacaattttttattcaggtatatgaatttttagtttagttagtaataccactaatttttgcctctaccatatttgctaatatatttattggcattgtgaaatgacatggtttgcttataaggcatgagaagagaggtgaagagaaatataatatattagtataaaaagaaagtttcttcagaacaaaattatatacaataattaggagagcttatccaagatcgtccgactaacatgaaacttaagataaagatggtgtaagagaattgccagataactaaatgacgtaacaaagaaagcaggtattttttcacacattttccaacgatattccaaattattacttaatatctacttgtaaatctatgaatccaaattctcgaattatccatttacagcaacgattaccttggaactacaatacattttttacattttccagatctgcaaacagttaataatcgctgtgaaccaaatctggggaatatggcaaattgaacactaatgtgttcgttgttctaatggaaaagtaccttgtctattatttttgtatataatatggtgtctattatttggactattctttggtttcgggagtacaatggttacgattcccacgatgtcctttatctaacgctcctctactcaacgtttattgaacaaaattatggcgtactttaatatttgagatacacacgatgtactttttgatcatcttctattcaatagtagcttttaccgttcactacggtgtttattatttgcgcacgggcaggtagaattaggcaagataatttttaaccattgagaactgatgatggtattaaaaaaatacagtgaaatctgtgtaaaagaaatcgtatgttttccatatgccggtaatgataaaagttttcgtcatggataagattcggtgttaggcagtgtccacgttgctcaagtttcattgtattttatcacgagtcgcagttttcaccattggttacaaaatcagaacacgttacattagcagaagaacaacaaggttttaggtcgggaagatcatgcaccgacgctatataatgaggcaggttcaagagcaatcgttagaatacaacaaaccggcatacttatgtttcgtggaccttaagaaggcatttgatagggtcaaattaaaggacgttatccatttattatacgcaagagacgtacctctaggaataattaaaacgatcgaaaatatctaccagaacaacgcaataaaagtaaaagtagatgaagaactaactgacccaattaagctggcaatgggataagacagggagactccctgagtcctctattgttcaacctgatcatggacgaaataataaaaaaagtaagaacaaaaaaaggataccaaatgggagaaaaacaacttaaaataatctgctatgcgacgacgcaatactaatctctcaaagtgaagatgatttacaacgtatgctgcacgaatttaatataaccgctagaatatttaacatgtcaattttcccaaaaaagactaaatgcatggttataacagcagat

SEQ ID NO: 7212 - DNA, 1636 bp, Diabrotica virgifera
  SmartBlast Evalue=7E-43; Info=Zinc finger MYM-type protein 1 n= 1 Tax=Culex quinquefasciatus RepID=B0W189_CULQU
ggcggctcgtgacctcagtatgcgggtaggctacacatatacttcgggtaggcgacaaaaaatatcctacaatttgtaatacattttgagccgtcttgcaatactaaatgtaatctatgagcgcaacaatgtgtaaaaattgcttttggagcatctactttaatttttgattgtaatccgtttaaagagccagccattacacttgcaccatcgtaaaattgagcaatttatttatttttgtaatcatatggctcaagaacgtttgaaattaaactatatagagcgtctgcagatctattctcgctaacatcaaaaaaccctaaaaatctttctgttacctgaccaacttttttaacaaaacggattgttaaagtacactgtgatttttcggttatatcagtagtatcgtccgctagtatagaaaaaattgactttcattaatttctgttgaaatttcattttttacgtaatcggcaagacaatctattaaatcattttgtattgtttttgacaaacccgtgaacaccccttctattttttaacatgatcctggatttcctgatcgcgtttaactactaaattaaaaatgtctttaaaattacccatgtttgaagaattatggctctcatcatgaccgcgaaatgcaagttcttgttttactaacagaattgtaacatcaatttcttcaacttattcaatctttttcaacttcttcattatatatcttattagatagagaaatttgtccagctaaagcactgtcaatagtttatttattttttctaaccgttttaaacctaagtaattgtttaaatgttctttcgaagattcatgtttttttacactagctgataaatttttcaaatctgaatatccctgactcacccaaacattttgcttcaaatttgagagcaacagacaaggccaacagaaaagtgaatttttaaaataacttccgcttagccatttatgattttcataccatattgttttaaacgatctcgaaaatggtcgattgtcttttgtcttatctgtggataaaattgttaaatttggtaaaggccggcccattgaaataatttctgatctttcttgattttggcgccttgaaaaaggcgtctcgatcaaactgcatattacatcgtttaaaatattcatattcgatgactaaagtttttccaccaataaaactaacacacctacgtttcaacaacgtcaaatattacttattttatttatgtatcaaataataatttactcttcgaataaattgataagttaacaattaacctcgctttaaatttttaattatctatataatctaataacacaattcgtcagtttaactttaaattatccaaattgtattgaaacgcaataaaaatataatggacgactgacaaataactattcacagatttatttgtcgttagtgaattattactaaattaatataaaattaaaatgcccttcaatagaccgatctcaaatttacctgtttattattcagtttttataaacaaatttaaattgccctacctagtttaattcaatacttaacctactaataacagctaaaatcaaaaaacaattatttaaaacagtttcacaagacacaagagaagcaactgataaa

SEQ ID NO: 7213 - DNA, 1612 bp, Diabrotica virgifera
tatacaagtaacggttatccaagaacattcaaaaactgaacgaagtagccatctctatgttaattatgacaatgtctattgtttacatcttcataccagagagaatttactacatgtaatttgccgtgtaaagaaagaaaaatagggatagccctaaaatatttgcgcctacgctcttaagtactatttatttatagtaaatattatctactttttatgaaaattattctgttaatttcactaagaatgtaaaggaaaatggaacaaatagccactacatccattcaaagttgtaatatattataataaccttagtaagaagttactgttcatttgtttttgtaaaaattcgctaatgtgtatatgcagcatataaatgtttttttacttataaatatattgctcatgactgtttcttagtgggtaactaattctttttaactttggaatcgttttaggagcttgttataaacaatgtttaggattatgtatgtaaactaaaagtcatacaattaggcatgcacgtcatggatttaatgacatcatgatccaccggtacaaacttgacggcaaacaaattcaacaaagatttcctcatatacagtgatgagcgagctaataaccggcataatagcgcaaaagatataaaatatatattaagttctgagatagagagaggtgaaactggtggagttgggaaatttagcgataaagacgtataaatttgcattatatttgttgtttcccaccttcggaggtatcagaggagtatgtcaactaaaactgtcacattggcagttgccaaactcgtccgatacgtctgaaggtgggaaacaatgaatgtagtgtaggtttataggtttttatcgccaaacttccaacctctactagtttcatttctttttgtctcacaacttaatatgttttccatcttttgcgttgttttgtctgttattggcgcgctcatcactgtattagttttttcgctaccgtcaagtttagcaggaaagcgctgttgccaaataaaaaacatatatgtatttaccacagcagcgaccggctacactgtttcttgttctatctaagtaagatttttatttgtttacttcttttctttttattttatggcctttgggagctgtgcccatttagccagcaacatttcttaaaattaattcctaactaaacctatcatacaacaagactattacgaacctaatcgaccaatcaaggatagggaagggaaagtgaagtaggttacaaaattaactgtccttaaaagataaactaaataaataaaatatatttgaaaacaataatttgacattatatttaaccaccaatgttatgacagacgtcagttaccatttaccatatcaccaaatataataataacgtcatatatactcgcaactacttctagccaatgaaatgttcgctgtagcaggaatggcatgtcaagaaaatctgattattccctatatatttttcaaatttaaaatatggcatcaaggggaaaattgcgtgcgagccttattgttagacttcgaccatatgaacgcaatatgactcttgctttcaaaactttcaaggtcaaagatttgtagcattg

SEQ ID NO: 7214 - DNA, 1637 bp, Diabrotica virgifera
  SmartBlast Evalue=1E-107; Info=Guanine deaminase n=1 Tax=Aedes aegypti RepID=Q17FY0_AEDAE
taaatatacataactttcatttcttaacattaataatactatttcaccaactctccagcgacgtatacactaacgatgtttctatcatctcctgtataaataaatttctgcaaaatttctttcggttcatactctatcaagtaatcggagccattatcaatatccatatccacaataagcgcatcgaattccttatttacttgaaaattgccaattgtattagacattgctaaagcttcgcttcccccaagtgttgctaaataaaatacttcttcataattgaaaggtttgtaggttttatcctggaatgaacttacgatagatgaatctaaacatgatttcattgttttcataattgatggggaagctcctcctgatacatctgttcctaatcctactttaacgccgttatctagaagttttcttacattacatattccagattttagacaaatattagaatctggacaatgtgaaatagaagtaccacgttgtgcaatcagcttgatttcttcgtcggataaatatattccatgtgccagaatagttttttctgttaatagattagcttggtcataaactttagcataatccattttatattgtgattgaactaaggccacttcatctacattttcggatatatgggtctgtatatgtaaattgtgatattttgctagaacccccagctctttcattaatgccatgtcaacacttaatgcaaaccttggagtaataataggcttcactaagtttgattgcttggacaaaacatagttgatgaattcttttgtattactaatagattcttctggtgtttctatgtaatcttcaggagccaaatgtgtcatgttaatttttcctataagggctctctgtctgtgttcaattactgtgtctaccaagatattggtgctgttgttaaataaacatccaaagtaacaggcagttgttgtaccatgggaaagagttttttgcaccaaagtggtatacactctttttgaaaattccaaatccttatattgtctctccaacttataggtgtagttgttaagccaatccaacagaggcatgtcatatccgagaccgcaatttggatattgtggagcatgaatatgcgtgtctaccaaaccgggtatgaggatttgtgacttctttaatagccgggtgctaaagttctttagtttcagtctggttaccgtttcagacagatctgattcggtacctatagctaaaatcttagaacctgcgatgataatgaatccattatcaatcaattgcacattaaattgatcactgcaatggataatattcccaactataacttgaacattgtcggttctcattttgtttgtttatctactaaacttttccggttagctatttttgttttgttagcagtcagtgagtgtcgacttttctatcacacgcggccctgaatcgtcgattcactcattcactgcgatgcacgtacgttacgttgcctgcttctgtagtttataagctaaaatcacttccacttctctggacgcactttctaacgcaccaacaaatgattagcaaattggcttaccgaactttagaaaagtattagtgcttatctgaaataattaaatgttttatcaaataaataaaac

SEQ ID NO: 7215 - DNA, 1637 bp, Diabrotica virgifera
  SmartBlast Evalue=1E-165; Info=Protein disulfide isomerase n=1 Tax=Aedes aegypti RepID=Q1HQU9_AEDAE
tacgttcagaaatgaacgaatcaaatcataccacgaaaatttggttgcttggcaaaatttgttttgtgagaggggtatttggtttttgctaattattgtaattatctgaattctgaatccagaatctttggtaggtggaaattgaatgtggaatctggatggtgcataaaaaagactgctgaaaattttctactccaagaactgaatatatttgaatgtaaaattgctgtgttaaaaatgatacaaatactttttttaggtctttttttccaatcatctctagctctctaccctagtagtggaagtgtagttgaattaacaccaagcaattttgacaaattggtgatcaaaggagatgaagtgtgggttgttgaattttttgctccttggtgtggccattgtaagaatttagtaccagaatataccaaagcagccaatgcattaaaaggtattgtgaaagttggagccgtagatgtagaccagcacaaagaaatcggaggtcagtatggaattagaggatttcctactataaaaatttttggggcagataaacgtaaacctgaagattttaatggtggtagaactgccaaagatatcgttgaaggtgctctcaaggcagctaaagcaaaagctaaagcaaatcttggtttaggaggtggatcacagtctgatgattctgataatagccacgtagtagaactgactgatagcaattttgaaaagctagtactgaaatctgatgatatgtggctagtagaattctttgctccgtggtgtgggcactgtaaaaacctcgcacctcattgggctaaagctgcagctgaacttaaaggcaaggtaaaacttggagcattggatgcaactgttcatcaagcaagagcatcactatatggagtacaaggatatccaacaatcaaattctttggcccaggtgcaaaagattctcctacagattatgatggtggtcgtacatcaagtgacattgttacttgggctttagataagttagaagagaacattccagcaccagaagtaactcaaattttagatgacaagtcatttaagaaattgtgtgaagacaaacctctgtgtgtagtagccgttcttcctcacattttagattgtcagtctgaatgtagaaacaattatattaagatgcttgctggtattggagaaacattcaaaaagaagatgtggggatgggtctggtctgaagcaggtactcaacttgatttagaaaattcccttgatattggtggatttggatatccagctatggctgtcattaactcaaagaaaatgaaatattctattctccgtggatcattttccaaggatggtatttatgaatttttaagaaatttgtcctatggtaaaggcaatactgcccctgtaaagggccaacagcttccaaaaataaacaaaatcgaaccttgggatggcaaggatggtgtgcttccagaagaagaggatattgatctctccgatgtagatttagatgagaaagaagagttgtaaatgtcttaaatttaaatttatgtatcaagtcctgctgtaaaagtttggattaaatcaatttccaaaatgtaaattttttaatcataaccagttgatttgtatattttgtaattctgtat

SEQ ID NO: 7216 - DNA, 1635 bp, Diabrotica virgifera
  SmartBlast Evalue=1E-101; Info=Voltage-dependent anion- selective channel n=11 Tax=Drosophila RepID=VDAC_DROME
cgcacgacagacagacagacagaacaagaacaagaacaaactgtgaaagaacagacacacgttgtggtcacgtcctcgttaccttctgtgcaaaaattgtgacttaaaaaaagttgaattacattgtcgaagtattttaaaaagtatttttgtaaattctaaattagtgagatatatttattttacatattaataatacgaaatggctcctccaccatacgcagacctcggcaaaagagcaagagacgtattcggcaacggttatcactttggcctaattaaattaaattgcaaaaccaaaacagccagtggggtccaatttagtacaggtggtagttcagaccatgaatctggaaaagtgtctggatctttggagagcaaatacaccgtcaaagattatggattgactttcacagaaaaatggaatacaaataatactttggggactgagatcgccatttcagaccaaggtattaagggactcaaggtctctggtaatgttaacttctccccacaagaaggataccagtcaggagttgtgaagtctgaatacggcaacgaaagaatacacctcaacgccgatgttgacttaaatagtaacggacctgtcgtaagaggttcggctgtcgtgggctatcaaggatggttggctggttaccaggctgcctttgacgttcaaaactcaaaattggccaagagcaattttgcattaggattttcaacatcagactttgttctccatacatgtgttaacgacggccaaacgtttggcggttccatctaccaaaaaatcaaccccaaattggaaacagccatcaacttgtcttgggcagctagcggagaaaagaccgacttcggtttgggctgcaagtatgacttggacgccgacgcatctcttcgcgctaagattaacaacgccagtcaaatcggtttaggataccaacaaaaactacgtgatggtgtaactctaactttgtctaccctcatcgacggcaagaacttcaatcaaggtggtcacaagattggtttggccttggacctggaggcttaaatatgttattacatcttgttccacaaatacatattagcgcccatttaatatatttaagaatcctgtattgtagataataattatttaaacgggactttagtgttatactttattactcccgttgtgtttatttcagttgctcctcccaattactccttttttacacgctatacgtatatattgtttttattattaaactctgaaaggcgcgcttttctggatattttcaaagattgatgtcaagttaggagcatatgcattttatgtcaaaaaattagattgggattgtgggtcttagatggctacaatccgctttgtgtagttttgcaattttgcaaaaaattgcgaattttgcagtaaatgtggatttaataataaaaacatttcttctctcccaacgtgttattgttggtctgtgggggagtatcaagtttgacctgtttattgtatgtcaagcagagaagaagaaagcttctaatggttccagtcttttttttattttagttgaaagttttgtttcaaattgattgttccggaaaataatattgtacacaaaatgattcaatataagattttaaaactaa

SEQ ID NO: 7217 - DNA, 1633 bp, Diabrotica virgifera
  SmartBlast Evalue=4E-29; Info=Lectin 1 (Fragment) n=1 Tax= Girardia tigrina RepID=Q8WSX2_DUGTI
ggtaagcagattttttaatttttatttacatttaattaattgctgcaagtatcccatctattctggacaagaacggaatgctcgtctccggctgattggtcatctactctgataggaataaatgattgatgttctaaggctggcatgttgttgttgatgtatacgttgattactggttgaggacagtcgtcagctagatcattgtcagcaccaggtctttcacaaataaaaagagattctttgtcacaatttacatctatccattgtcctttttcgttcatttgaatgcaaccattgttcaattcctcttgtggtcttcctgattgccaattggtataatccattttttggttgttactgtcgaagacccagtcagctttagacctcttaccagaaatatagaaaggaccattgtcagcgacaagtagtaattccctggttactccatctgtcttctgttgagaatttatctcagaaagttgcatatctaggaacttacaatattcaacagcttcatcatgagtagcctcaaagtcttgttctacataatattttccaagagtttcttggttcttgacagactgggcacgttttaaccaacgttgttgagtttcccttttgctcaatttacttggtttaactggcctttcgcacacaactggatgttctacacggcatccaatatcaaagaagtacaatcccttatccttattcatgtccaaagctatgcattgttcactgagtctgttgttaggttctgaaacagcccagtttgtataattgacaagttgtccgttggataaccaaaaccagtggacactgtcggttgatcttgctcctgaggaccaccatttttcctcagcatttgtatctctaagatgcttgtatatcctgtcattttcgtcttgtgagagtacagaaacgggtaacataccaatgctatcacagaattggaaaccttgagcaaaactacccctgaattgccttgcaaaatagtagtatttgtttccgtagacaaactcgtcagaaatcaatcctttggtaccttcaaaaatgttggaccatacttctgattgtcccttttcattttcatctgcagctgctttgcatataaaaggtttttcataactgcaaacatcatcatgccagaataccttgttgcggttattatcgatcttcagactcaaacaatattcgttattggtattgggctggccattgtcccagtaggtttgctcgatttgtttgccggtacttaaccacaaccaggattttccgtcgattattctgcttcctgaagaccaataactgtcaccttcatttttttctttaattaatttgtatacagcttcgttttctgcctctgattcgatatccagcaaagtcatgttgatatttttacaaaacctgagggcttgcaattgagttgccttaaaggtagtacccataaaataattgtattttccatttttcacaagtggaagtacgtggcctggggtcaaaactgctctaggtgcttcatcggcgaaggtgaaagcggaaaagagcaaaactaaaattgccgatcggcccaacattttcgtaaaattatttgaaattttcaaataaaattgtcgactcgtcagcagataac

SEQ ID NO: 7218 - DNA, 1628 bp, Diabrotica virgifera
gctctagtctcgggatgactatcgtgtaatttaacttcttctcctatatcatatactcgaaatttgtctttagaaataggaagccactccacaggaagaatttgatcgtctttattaacagtcggttttccaaatttagcaaaattcgcccacagtcttacagtttttcgaatcgctttgtcttcaggactgtctttttctatctctgttacgaaatgagttttgaagagataaccacaatcgtctgcatgcgaaactcctgggtcagttatattgaggaatgtttttagaaagtttaattccgtgtcatacaaaaatctataaaaatatattgggtaagggtttgtttctaaatgttctctggcatttttgtagacctcgtagagaaaatagtcatcagtgtagagcttatatattttatctctatcttcaagaggatcattgtcaccaaaataaaacttcttaactttgttagctgcctgagtatgcaaattacttcctatcctcaaattcaacgtcctgggtaacaacgtttcgtgtactaacactagattttcctgagcaacgatgctgtaaatgaacattccttctctggacacacatcccatcatcataggtactttgttataatttccggattttacaatatcacgtggatcactgggtaagaaagctggttctttggagttggtttcaactactggaccattagggaataatgttccaacgggatataactccggtgtcttttccattgttgcctccagctcttccagtgtcatattttgaggtgtttgagtattacattgtcgtcattagagtgaattccagctctttcagcaaataaattgggttctatccggttcattgttccccaacagctcgtggcgcatccactttggagtatggctttgtgaaataaacctttggtcattggcgaaagtaccaacagatgaacagcaactgctccagcactctcaccaaatattgtcacattatttggatctccagagaattgtttaatattattttggacccatcgtaaagccattacagcgtctttgaaacctgcgttacctggtacacctacatctggatctttgaatgccatgaatcctaaaggacctaaacgatagttaattgtaactaatactacgtcttctcttaatagatagtcaggaccatataatttcagtgtatttgagcctttcgtgaagccacccccatgtatccaaaacattacaggcctcaattttgaacttgaaatctctttagtaaaaacattcagataagacaatcttctgatcccgtatacgcttgaaattgtttggaaaagcactcgtctccttcttgggtggcgtctcgaattccttcccatttttcagggggttgtggagctttgaatctcagctctcctattggcggtttggcatatggtattccaagaaaactgtaatactggtttccgtcatcatccttttcttgaattcccaacagtttaccttcttttacggtcactattggtcctgacatcttacaaaacagtaataactacgaatattcaattaaaaatcatcacaattgaacactcagataatcaaaatttaatttttatcgagtagaacacg

SEQ ID NO: 7219 - DNA, 1634 bp, Diabrotica virgifera
  SmartBlast Evalue=4E-21; Info=Juvenile hormone-inducible protein n=1 Tax=Culex quinquefasciatus RepID=B0X959_CULQU
gcgccattttgtttataaagaaagtaacacgctgtctgcggactttgcatacctatattgttaacatatacaatcataaggtacgattccagcaataaaattgctggtaaataatttttccttgtattttggtaattagccaagagtatattaaaatatctaatatttaatttagtcatgccacaagaagaccctttcaaaacctttttaaaagttttattatctaatgacgtcactgccttcttataataagtaaaactatctttcgtcgtcaaatattatcgaccgcatctcaattaaatcttctgttagaatttctctataatagctgttaccctggaatatcttaaccatactatctgggcgtccttcaaaaaagaagtatgtaaaatcttcgtcattttttaaatatttgctatatatcacatccggtattagcatacagctcctatccatcatggcatgtagtttgcaaagaaacctcagcttcttatacgtctcataaaactcctcctcactgataatctcacttgcagtgtaacctccttttttaatataatctgagaagcacttataataatagcccaacagatcttgaagatattcgtccctaaaactttttcttgtatttatatataagaagatgagcacatcatacactggaggctgcagacctatggtttgaaaatctacaattttgcaagaaataatgttatcatcttcgtcatacttaaaaagaaacttattaggccataagcaattgtgagacaagacatttctgtagtttttaagattagcattaagttctgaaggtaatttggaaagagctttatcaaaagcacccttgaattccttttcggatattttattttcaggaataaaactcgtgagtttttttaacccccttactaaattttgacagtgctttattatcaatctgttcagatcaatgactaccgaatcttgaaatatttctggaaatgcctcaattagcttatattcccaatcaagatcttttgacttatttagttcaaacagaatgcagtcgccatggaatcgtgcaatggtttttagacaggctctacaatgatccaagtcaaaacacggttctttttcaaatattttataaccagatattccaagatcttctaatacaacaacatctgactcacaaaaataacttttgcaagtgtagttgcaatcaaaaccttcttcttttagatatggaacatataaatcgtagaaaaacttttctttttcgaatgtagaagtctcttcggctatttggtacattagcgaattcaatttgctaataatctttacaaaaaaattcgcctcatgttcttttgcgtctatttggtagtttattgttaggtaaaattgttctcttactattttattttcttttggacgtattgaaaaattatttattttaacatctatggaggactcttcggtattttcatcaaactctttatttttcttttcatgtagctccttaacatatttctttattaaatattgaagttgattatcgttcaaaatagactcctcttcatgattcatcgtggttatttacagaagtttggaacaaaaacattaaaaccacaggtaaactgttgtatgtagtcgta

SEQ ID NO: 7220 - DNA, 1635 bp, Diabrotica virgifera
gaagttggtgtattgtgtatgttttcttcttctttttggtgtagttgcaccagatgcagctgcattcaaagaaaaggttaaacgactagaacaagaatgccaaaacgataaaacaacttatgtggatgaggcggaattagagaggttcagaaatcatgagccgaccactgctaccaacttaggactacattatctttgtactaatatcaaactgggaattcaagacgaaaatggaaagatcaacacagaggccatcaaaaataatcttcgtgaaataatggttggaacaggcaaaattaatataatagcacatagatgcagccgtagattgcccgaagaatcagcagaagaaagtgctattacattatatagatgtttacataagccagcccatgtacataacaacaaccatactcatatccatgttcatagacataagcgttcaataaaaagaagcaaagctcacaaattttgccagtctgatgagtcaaccagggtaaatgaaagtgatatggagaagtttaaaaagggagaagaagtagacacatctaaaataaaaaactatattttctgtatgaataaaaaatttgagatacagaatgtggatggtaccgtcaataaagacggatttaaaaaatatctagaaaacaaggtaagcgataaaacaagggctaatgaattaacaagaaaatgttcagaaatatcggatccagtggcagaggaaacggctattaaattatacaaatgtgttcacgaaaacgatcgtcaggatgatcagaatcaaaatgctttacaacaacaggttaagcttgcctttgaacaatgccaagctgatccaaaaacttttgttgataaaaaaactcttaaaaaggcgcgcaaaggaaaaaagattgacactgctggtttaagagcacacaccttttgtatgagcctgaagttaaaccttcaatctacggacggaagtataaaaacggaaactgttaggaaaaacttagaaggcgaggaaactgaagctaaaattaatataatagttaatatatgtgggactagagatgaaaatgatccagcaaatcttactgcattaaaactattcaaatgcctatataaatatgaaaagaaacgagagcagaaaaaacgagctttccttaaacgtttaaagcaatttaaaaagtttcaccaagaatgcttatctgatcccgccaatcaggttgatgaggaagttctttctaagtttagtcatggtgaagagatagatgatcctaatttagcttcttacactatatgcctaaataaaaaaatcaaataccaagacaaaaaagggaaaattaagaaggatgctattattgacgacttaaagttggtttttgacgatagagctgaagcggaaaaagtggtgaatgaatgtgtcgcaaaaacaagcggtttagcagttagagaaggtggtgtcaaactaactagatgtattttcaaacatgttgctattgcacgtgcagctcaaaacaatgtgatccctattagcgatcgtcggtaaaatattcaaatacaacaagtggtattaaaatcaaatttcgtatcacctaaaaataaaaatatcttccatgaatgggaacagaaatacttaattttcaaaccagc

SEQ ID NO: 7221 - DNA, 1622 bp, Diabrotica virgifera
  SmartBlast Evalue=0; Info="Nuclear transcription factor, X-box binding protein, putative n=1 Tax=Pediculus humanus corporis RepID=E0VZX8_PEDHC"
gcttgtcttagttttctgttttcctcttttttcgcctcgcacacttcatcgcatggtacgaccgcctcgtttttgcgaacagtctcacaagagaactctttctttattcttttgcatttgcaggacacttttactttctttttacattggtcggcgttcggacatgggcctgggtggcagttggatttgcatctgtggccgcattcgtaatttttaggacattggttaccgcacgtctgtaactcctcttttttctcttcgttcaaccaatcagcgcaagtgacgtagggctgattaaggccacagtagcatttgattctaatcattgttttgcaaggtggacagtctcctggatgacacggtttcgggcatgcatgtgtacaaccctcagggcgttgtttgctgcaactattttcgcatttctcgcaatttgctcctgccttaatattatctggagcatcttttactgtatgacacaaccaagtgcatcgatgattaccacaatctaacaatctaccgcattgtcggtgacaactggaaggctttgacatatagcacggccaatctgaagtctcgtgctcacctaaacaagtcacaggcattttaacaacacagtccggacacggcaattctcttcttacaacttgaggcttgacttgttcccaaggcatcgacgctttttgcctttcgattttgacaagaacggcggagtgacaggtgacaggacacgaatgtgagcatttattatgaattttgttgcagatttgtcggcacggaggcaatcgccgaaatggcatctgtgggaatcccttttttcgtgatggcagtcaggtggagtcaggcataatttagggcatttcggaggcttggttttatgtttgcgaccacaaggaacagatatcttggtagctccgcatttacaagtcacgatatcagtttcgctgcaaggataacagggtcctcggtggcacactgaactacatttgtggttgccgcagttcaaagttttaccgcaaggtttttcgcaaggtggacagtttccgtcgcagcattttctattacatggatgtttgttacaatccttcatctgtttgcatttgacttcacataaatatggtttgtagcactggacttctttggtgtgttggccgcacctgcaggatttttctaccgtttcaagacacacaccgcacttttctctatgacatttcaaattacaaccgtgaataccacaatccagtactttatcgcaagtatccggacaggtgggcgtttcttgagtgcaaggcaattggtacgtagtttttccacaaggacaggttctaagttttgccaatggacacatgtcacagacgccttcatggcaaatctcttcgcatttatggtggccgcattccagtggtttattacataccttatcacactgccatacaggactagcacactcacgaagtttttgttgagctttacatatacatttctgtatacttttctttggacatggttgacactctccagggtgacaaggattaggacagttgtgtttgttgcattcaagaggtttgtcacaaacgttattacaagaccactcctttttgctgcatctttgtgttctgggctgt

SEQ ID NO: 7222 - DNA, 1629 bp, Diabrotica virgifera
  SmartBlast Evalue=5E-86; Info=Sodium-dependent phosphate transporter n=1 Tax=Culex quinquefasciatus RepID=B0WB17_CULQU
ttttttatttcgattttaataaaaaacgtttcaatcctatttatagcaactgcattagtaacacattatactcattttctgctccttcagtcgttatattcgtttcagatatattatttattttattataaatataaaatttccagaatattaaattgtttacattgagattacggatattacagaatgtttcttttccttcatttttctttttgtcatcttttccttcttggctggatcaaagtcttgaatttcagctgtggcaaacaataaaaacaaaattgatgacaccccatacaatactgcagctatcgtaaatatgattgcccattgtccttttttgttctcgtctataagttgtaccgacaaaggtccaaatatggaaacacaacttccacagctatttattatagccagaacaatcccagcaaaagaaggtgctatatcgatatgatttataccactaccaatactgcaagcagctggaatacccactcctattactaataatataacagctaatactctttggccatctggtacaaatcctagagcaagtagacatattgctggtatgatagaacctactaatgtaaacatcttcctggtccatattgttgacattaaatttttcttaataaacacatctgctaggctgccactcacaactgtggtaacaaagttaacaatataaggaatagacgataaaagaccattggattttatatcatacttcagaattttattcatgtatgtaggcatttctgctaaaagtgtttgccaacaccaaaactgagctactgcgtttatccaaataacccagaaaggtcgattagtcaaaatagctttccaaggtacctgcatctttcctgtatcttctcccaaatcactctttatgtacctcttctctttttctgatatcaatggatgtttatcggggctatccgctccaagaaaaaaataaagtatcacccagagatatcctaagcctccgtaaaggtaaaatgaagctggccagccccaccagctagacgaaatatatcctactattggcatagtaataatagtaccaaatggtgagccagaaaatgctattgaactaaatactcctctttctgatacaggtgaccataatgatatcaaattatgaatcgatgggtagcaaaatccctgacaaagtccttgcaaagctctacataacataactccataagaacccattaaatgagcaaaaagaggtagaaggcaacataatgtagagttcaccgtcattgctatgagaagaaaccatttagtaccatacattcttcctacattccctgcaattatctgaagccaaagatagccccacaaaaaggatgacaacatcgtactctgattattccagtcatatactggaacatcaggattcgcagtggtagttttgtttaagtctgtcatggcgaccatcgccatggaaagctgtgcccgcattccgatgatgatggttgtaagtaaaaaaagaagtccagcttcaagatggcggatacccaaatttgatactattgagcctggcttcattctttacagttgtggttttctgaacttcacttaatttttgaacggttgcgttccacacacgctgcgctg

SEQ ID NO: 7223 - DNA, 1629 bp, Diabrotica virgifera
  SmartBlast Evalue=0; Info="DEAD box ATP-dependent RNA helicase, putative n=8 Tax=Pancrustacea RepID=E0W2V0_PEDHC"
atagtaattcgctctaacgcattaagctcgaagtgacagaaaagaacgtacgtccgtgattattatacatagaatttcgaaaattatgtattcatgtcatgtattcatttatgtcattcatgtatgcatgtgattcgcgacattattaaaatcgtatctgacgtcaaaattaatgactgaaaatagggtttaggataaactgtatctactgataatgtaatagtatcagtataaaaataaataagaaaaattaaattaagtccgcaacgttcattggcatttcgtcaatttgggtcgagtaatattgttcgatatctcttagaattctgatatcgtctgattttacgaaattgatggctacaccctttcggccgaacctaccagatctaccgatacgatggatgtacaattcacgattgttcggcaagtcataattgataaccaaactgacttgttgtacgtcgatacctctagcccaaacatcagttgtgattaggaccctactctgtcctgacctaaactctttcataatattgtcacgttccttttgtggcatatctccgtgcattgaactaactgtaaaattgttttccctcattttctccgtcagccagtctaccttcctctttgtgttgcagaaaataacagcctgtgtaatggttaatgtatcgtagaggtcacagagggtgtcaaatttccattcttctctttccacagccacaaagaactgttttataccttccaatgtcaattcatcacgttttaccaaaatcctaataggatctgtcataaatttggaagtaatttccaaaatttcgtgaggcagtgtagctgaaatgagtacaacttgtgttgatgggggaaggaatctgtagacatcataaatttgttctttgaatcctttatttaacatttcatcagcctcatctaaaaccaacatttttacagatcttgttcttagagctcttcttctgatcatatcataaactcttccaggtgttccactaacgacatgctgtccataatcaagttttctaatatcttccccaagatttgtgcctccaatacaagcatgacattgaacattcatgaagtcacctaaagctagaataactttttgaatctgtacagccaattctctagtaggagacaagcataaaacttgcgtttctcgcattgtcaaatctaaagcttgtaaaatcgaaatggaaaaggtagctgttttaccagtaccagattgtgcctgagctattacatctcttcctttcataataggctttattgctctctgttgaatggctgagggtttttcgaagccatatgcgaagataccacgaagaagttcttctttaaggttcatgtttttaaacttctcgataacttcgacatcttcactagtttcaaactctacatttgataagtcctcaaaaactgaggcacctctttttggaactgccatacttgcaagattctttgtatttatatcacaattttggtagaacttttatatttcggtaaatgtattacttcactgcttgcaaaaatggggtaattgtgttattataactcgagttttaataaaaatccactgttgtacatatttcttttacacacgcagctcaaaaatca

SEQ ID NO: 7224 - DNA, 1630 bp, Diabrotica virgifera
  SmartBlast Evalue=1E-127; Info=Cysteine synthase n=1 Tax=Aedes aegypti RepID=Q16YQ8_AEDAE
tgaaatttaaacaatatcttatcacttctaagcatttcatctttaatcaattattgaataacataatactgtcaacatgagtaaatacgtctaccgttctcctttaaatgacgctatttgtgctcctgaaagagagcaaaagtgcccatggaatccgaaggctgacagatctacctcaattcatacaacggtcaattggcaagctccacgtccaaaaatactgccaaatgccttgcacgcaattggtaatactccattgatcaagcttaacagaatacctcagcaagaaggtttggaatgtgatatatatgtaaaatgtgagttctttaatcctggtggatcagtaaaagatcgcatggcaaacagaatactgacagatgccgagaatgaaggtatcttaaaaccaggatgtaccattatagagccgtcttcaggaaatactggcattggtttggctatggcagctgctattaaaggatataggtgtataatcgtaatgtcagaaaaaatatccaaagagaaagaatacgtaatgagagctttgggagctgaagttattagatgtcctgtcacagctaattcgttttctccatatggaatgtttggtactgtccatcgtttatcaaaagaaattcccaacagtattatttttgatcagttctctaatcccggaaatccactgactcactacgatactacagcagaagaaatttatgatcaatgcgacaaaaaagtagatatgataataatgggagctggaacaggtggtaccgttacgggtataggaagaaaatttaaagagatttctcccaatacggaaatcgtttgtgcagatccaattggatcatcttttgctttaccagaaattataaataaaactgacgttactttctgggagatagaaggtatgggctacgatttcattccctcaaccttagaccgcaaagtcattgacacttggattaaagtaggtgatgagaatgccctgccaatggcaagaaggttgattaaggatgaaggccttttgattggggctagcagtggagctatgatgtgggcggctattcaagcagcgaaagctaaaaattatggccctggtaaaagggttgtagttatgttaccagatagtattaggaactacttaacaaagttcgtatgtgaccaatggatggaagagcgaaatcttcagccttgtgtaaatacaaacaaccacccgtggtggaatttaaatgtctcccaattaaatcttcctgtaccacaaactgtaccgataaattcttccattgaacagactttgaatctaatgaagaaacttggacttaaccagatacctgcattggatgatcaagggggtgttgttggagtactttcaatgcagctaattattaacaaacttacatctggtaatgctacactcaatgacccaatagcagatgctatagaccgactttatcccagagttgagaaatctgctaatattggactcgtctcaagagtattggaacgtgagccttatttggtaattttggatacacaaggtaaaggaccttccaagataaataagcctgcaggcgttgtaactcctttagattttctacagtttatccagaagcagcattaaatatagagg

SEQ ID NO: 7225 - DNA, 1622 bp, Diabrotica virgifera
  SmartBlast Evalue=1E-143; Info="Alpha-1,2-mannosyltransferase ALG9 n=1 Tax=Harpegnathos saltator RepID=E2B716_9HYME"
gccggtaacattccgtcaaattctgactttataaatctaatattccagttaacatttggcagaaagaaggaactgggatatctgtgccattcttttccataacaaacattaatctgagctctttcggaaatcttttgttccactggatacttatttaattccatcatcaaatcgatagatgcgtgatagtttcgataaagagatagtattctggatatacccagtaaagaagtcaacagtatactaataaacattataaacatagtcttatccaagtaatgtgtcccttgaggcattttctgcaggaagttcaaaattctaaaccacaatttttggattatatcaacagtgatggctccactaagacaaatcaggggatacaccggataaaggaatctttcttctttgtgttcttgaatcataaaaacaagaagccataaatataaaggactcaatgacagccagtatggtaggtatactgtgcatttattcttagctggcacacagaagtagtttaaggttattgctataggactcaataaagcgaagatccaaacaaaattgaagtttacaaaaccgttgaggagataaaaggtaaacggttcagtaccataaagatttggtcctgctcctccaaacacattatatagcacaatatttacaggagctataattaatttaccaaaaagcatagaatctacaaccaccattggtactaaaatgactagagcacataatgcagaccatgctacaaaatccaggtacagtttccttctgaataacatatcaaaagctattggaacgcccagtaaggctgcaaaaggccaacctaacaaggatccaagtgcagtaaaaaatatcgctaaggcatacttttgctgccaccacgacgcacatgctgctgcaaatgtatacatggcaaaactggatggcaaaaatgatgtactagaaataaacattccagctgagaacaactgaaatgccagacatattctaccaatgtgaactccaaattctctacaaactgacttataaaaataaacttcacaactggcacatatgactcctaatatgcacctaacaaaatagaacattagtaaaggattgggctgtaccaatttatgatatatccaagcaggtgctgcatgtagcattaagtaaaagtaagatctcagcccaaactgaggactgtattcccatgtttgcaggcctttaccaaaattaagtaatgcataggttcccagtaattgaaagtttcatcacaatctgatatgtgtgaccatattgcagcacaaaatcttgctgatagaagtgttttaaaggctgtatcgcttgctggaaatattaagccgggactggtactggttgaaacttctactggtttatttggtggtggtttttgaggttttttgtgacttttatcgcgggattccctacgagtttgttgcggtgcattttgtcgaagcctaaaagacaactggctcttcgtcattctgttattattttaaagaaatcggtatcacatcatcaattaccagtctgttatcttttttttatcttgtaattcttgtaaaaatattaaaattgctgttgtgacatgttatgaacaattagtcttcttc

SEQ ID NO: 7226 - DNA, 1625 bp, Diabrotica virgifera
  SmartBlast Evalue=1E-147; Info=Glycosylphosphatidylinositol anchor attachment 1 protein n=2 Tax=Formicidae RepID=E2BWN5_ 9HYME
tgcaaatcaatgctgttcctaactccaacatcgctaaaacattgagtagttccatgctttccctgcattttcttaatccaatgaacaacggtaagagtaagagaagtcctgatgatcccagcagtgagtaaaaaattgttgtgttcttatcgtagcccgttagaagtggtacatattgcggtaaatttgaaattaatattccgaagaagtgagtcatcaggaagataatgattattctgtctacacgtactacggatttgggattggcttttttctcttcttctggtgatttttgtaagttgaaccatctagcacatgctttgatgaacatggttccagccattaaacaaacagatggaatgtaaagacttatggagatatatcgttcagaagaaggcaacaaataaaagaagaaactttgatgaaacctctccaacaaattatttaagcttcggaaaatcccttctattactctgccgatgccaaccatcattattttattatttgactttgttctggacctctcaaatccttctaatgttaaggcttggataccaaatctgtgaaacagaccatggttgccattgggaattccactagcttgtgtagccatcatcgataataggttcttgaagtagttccaccattctttaactggatctctggagtaccttggtcctttattcttgaatgtttgataaacaccttctttggcacacatttttgaggccaaattgaagagatctaagtttggtagctgcccatttaaaccttctatttttatatccatttgtccaattttttcactatgtaattctaaattaatagcagcctgaatagctccacctctgcctctgagatcaccatgatctaaaacttcttcacttccgcaactgactccatagtatgcctctaaccaggcctggattcctaactgctcatgttcagtgatcaaaaatattatatcttttgcccaatatttctctctgttggcatattttgcaaacgctaacataatagctatggatgggcctgtaggaggatgtacactagtgcttggtctgtaaggagtacttaaaactagtgcctcagtgctggcacctctgggtgcccttagaatcccatatatgttttttcctgaaaatttttcatttcggttaaaaggcgaagtaagagtaaaattatgtatgtatgcatctaaaccaatctgtttgaattttgctataatccagggatatggtatggaatcttcatatttcttcatttcgtcttgtaattcttcgttgtatcttaatgcttctctgtcttcgtgaaattgggatttaactaagcctggcaatagagcgttttcagagaaatatgtgctggcattcattgtagggtaagctaaggtacaaaaccaaatgacaccagagatataaagcaaaaaacatagcttgctgtaatatttcaaaagccattttacatatttgccttggccggtagtgggatctgtaagtaaccccattttgtgctattagttttactcaaaaataataatgtaagaaaattatttggaaaaaccgggtgtaaccatttcaaaacacctaaatataaccttaaacgtcagtggtttgtcactgtca

SEQ ID NO: 7227 - DNA, 1626 bp, Diabrotica virgifera
  SmartBlast Evalue=1E-153; Info=Leucine-rich repeat and immunoglobulin-like domain-containing nogo receptor-interacting protein 2 n=1 Tax=Camponotus floridanus RepID=E2A675_9HYME
ctacgctctctgcatcggtgggatcgaacactagggattctgctcggccgcacgtccccgaccgacaattttcaaaatacaagctgggaagattctccaacactttgttgagggtctgctgttgatacttgtacgtctctcgaagctgaaggactttgtgagaactgaatttgcggatcttgtttcgctggaagacgtagttttctctgacccaattcagctgacccgtggagtaatctcttactttctttacttggtcgtaatattgacctctcaaagtgctcagatgagcggtaccaatgtcccgaaagtctttcagatgtttcgcctgggcctggtagctgttttggatccattccatctgttgtgcacagttgtcctttattctcgtcacctgcagggcatagttttctcgcagcctctcgagttgttgacttttgtattgttcaatgttgtcgagcatagcgtatatttgtcttgctcttggcgacactctatcccgtttgcagaagctgcagaagttattgaagacgccgaacttggctgctaaatatcgtaggaactgtatgatcagggtcagccccaggaatccagcagcgctttgcgttcccacaatcaaggaaatgatcctgacgtggttccaatccgtgggatcgatgtgcagcaacacattatccgttaaatttgctatcggattactggcgtagcaggtgtatcttccacaatcttctctagttacgtttttaacccaaagagttccgttgtctagtatttgaatacgcggagggatcactcttagaggtatcatcagctggtcgtgcgcgtggggatgtttattaaaggcgtctggaatactttgatccggattccagtggtagacttctctcttcggcgtaacccacgttatagaaggagaaggattagctgcaaatctacactcgagtaatgcatccgagttaagtcggtagcgtctagtgggtgttttatatactattctaggggaagtgcaattaagatgctgtaaagtaggcaacatgtcgtttgtgtaggcatcaggacaagttaggtctgacaggaccatattgcccttcattttgatgttgggtacccaactagcaaaccagtacatgcgacaatcgcacgcccatggattgttactaatatttagcttagttaaataagttagattcgcaatagattgcggtaggaacgttaaattgttgccgctgatatccagttcgttcagaaaaggagtatcagcgaagacgtaagtctctataattttaagtttcttatttcgtcttaaattcagtacattcagtttgggtactcccaacagctcggtattgtgtattttttcaatcaaggtgttgtccaatgtaatcgaagtcaacaaaggactaaaatgtaacagaccaaaggttaattgagaaagtttgttgtggctcagatccaagattctcaagttgcgcaaacctcggaaagtaccgctcgccatgttcgtcaacggattattcgctagatttaagtactgtaaattggaaagcgagtcgaacaaacctttggcgatgaattgtagggaattagtagatagatcgagtctcttgagatcagtcaaatcagcta

SEQ ID NO: 7228 - DNA, 1623 bp, Diabrotica virgifera
  SmartBlast Evalue=5E-98; Info="Pathetic, isoform C n=2 Tax= Drosophila melanogaster RepID=Q9VT03_DROME"
cttgcctgactggtccccaatggggacgaaaatttgcaccgtttgctaggaaccttatacgttttgggcttattcgtgacgtattttatgacttgcagttgctatactgtgatcatggccaaaaactttaactacgtcgtcaaccaccacctgggatatgacgtggaaattaggataacaatagcaattatgatggttcctcttattctattggcctacgtacctaacttgaaatatttagctccattttccatggttgctaatggattcatggctgtaggattaggaattacgttttactaccttgtgattaacctcaaacccgtttctgaagttgctatgatagcggatgttggtaccatgcctgtgttcctcagcattacaatatttgccattgaagcaattggtgtgattatgccattggaaaataatatgggaactcctcagtctttcatcggtttatgtggagtattgaatcaaggaatgagcggagttaccttagtatacatactcatcgggttctttggatatcttgcttttggagaccaggttgaaggatcagttaccttaaatctacctaaagaagccattgctgcccaactcgtcaacgttctagtcggtggagcggtattctgcacctttggactgcaattctacgtctgcatcgacatcgcttggaacgccatcaaagaccgctacgctaaaagtgaaaaagtggccaactacatcatgcgcacggtgatgactttcgtatgcgtcgtcctagcaatcgccgtacccaccatcataccattcgtgtcactcatcggtgccttctgcttttcaattctgggattggccgctccaatcttgatcgaaatgctgacattctgggaaaaaggaattcggaaagtacaactggaagatcgtcaagaacttgattgtattcattgtagccattctggctttgatattcggatcgaaggcagctatcgaggacatcatcgatatgtactcgagtaagaaattggaaccaatactactaggaaatggaactactcacggcaacaacacagtgaatggtactcttagtgaagtactcacaaacgtcaccagcactttagcgtccactgtagcgtctttaaagtcaaccacgagtatacctcccacgacggtgaattcaacgacgctatgaataattaggccatttaggtaatttttaataaactttcagtattgtcgaagaggtgtaatttttggtgaagaaactaaggaggtaaagtcaaaaaacgttgctgagaatatctaccgattacaattattgcgaaaaacaatcactttaaccttccagttgacgctcaatttaatttctcatgagtgggcgcgtgtcgtaaattttacgtctttgtttaaatgatgttttcttcaataaaatgttgaatatcaaacaaattgatattcttcttgtagtgcctattcgtttccgatgttggcgaccatcattgcaatctgtactttgcacacttctgctctaaaaatatttgtggttgttgtgttgaaccacttttctttgcaagattagttgcagcagtccatatcttttgctgttcctcatgatatgaccgaggtattcgattttggctg

SEQ ID NO: 7229 - DNA, 1626 bp, Diabrotica virgifera
ggggatattttgtccagggattatttgtccggaccgactctgttgttttgcttgctgttacgttattgttactgttacaaaatgcaacagatacgaaataagattctttacgactacaactaaagcacaatattcaagaattgctactgttattatatttatgatagttggagatgtccaaagagtggatcatttcatatttgatccagaaagaggttttgccaaatttaacataatttcaaacttcaaatactctcgaaacagggaggagaatttaaaattgaatttttattatcgattcttgattttaaacaaatcttaatcttctacttaagattttaaggatgaacatacattattaataacaaatctataaaaaaaaataaacctgaacaatttctgttcatgggaaggcttttgaaccatctaatgaaaaaatggacgtagtaaaacatggagactttctaaagctctgcatcatttgtgaaaaatgtacttaaatccttagccgattaaatttattcgaccgatatatgattttgggaaactctgttggcctttatttaacggatatacttagcaattcctaatggggtcatctttaaaagaccattttgaaaatgtgattaccatatcgatatagaaatttatattatcaatgagcttagatggagaatgtctttctcatgtactttaccccatcgtttaggcgatatacagctcaatatgctctatctaataatcactaacttgtttttaatgttgaggacaaaaatcgattttaaccatactacaacattctgaaaactattattattaaaagttacacttatgtacgtagaacttagcacagctaacttagcaaaagctagtgttttttatcagttatgtgacaagttgttgttgttagttgaatactcgtgtctctgtttttcacttaatttccttgttttaattcgattatcactaaaacaatttgaaccttcatttatcggtctcttcattttaactgtcgattttgagttttaacttttgttgttcatttttttaaatagtattctggctccgcgatttacgttcatcttttgaggacgtcactttcttcatatgaataattataagaaacattttttaattaataatttacgtggacaaaaataattagtaaaacatttttaatacatttttttaaatcaaaaaacaattttgcctggcaatagtaaataaagttaatatttacctatttttttagtcttctaagggaagaatataagataaagagggaacattttttgatggaaggctgttttaaatatagaatgctttcaaaaaataataatgtacaatgtgttgttcgcttatttaagtagaaattatatcaaagttgttgattttcctattcgataatctgaataattgtttagatcaaatcatataatatcatgaataaaaaacatagttatgtcctcaaaagatcgacacttttactctgcttgcttaaatctgcatgtgcacaatcgtttatataacctctcatgtactttacatgcatataattaatattgtactctttaatagaagttgtgaatacttgtcctgtatatatttaaaaataaagtctcttcc

SEQ ID NO: 7230 - DNA, 1615 bp, Diabrotica virgifera
  SmartBlast Evalue=1E-156; Info=Serine-type protease inhibitor n= 1 Tax=Aedes aegypti RepID=Q16M97_AEDAE
aagcaaagccaatttacctatcagcgaatcatactgcgcttgcgttaacgtctgcgcatctaaatccaccgttaattccaccaaataaaacacttttggatcattcttaacgaccaccgacacagaatctgtatcggacaggccttgctcatcgtacacagtcaaattaaagatgtattttcctactgcgagatctgtcaaaattagaacgggagattcgtccgttttttcggcaatgttgccaatagctagagaattcgcgttcctgtcccatttccatctgacgatggcccaatcatcctttgaatttgaaccgttcaacatgataatgtttttgggaagctcgacctcgaagtcttttccagcgtcagcggttggtttttgattcttattttgattaacgatgacgtacaccttatcgctagcaacattcttgttatcatccgttacactaactttaaacgtgtacgtccccttcgtaagtcctgtaacgttggttttgctggaattggcgttttcaaatgtaactgaagacggtccttccagcaattcccatttgaaccccattattttattatcgtctgtgctattggaggcgtctagaagagcccaagtttgtggtaaactgattgtgatgttctcacctgcatttgccgttggaggtttgtttgtaggcggtttgacgaaaacatatacctgcgccgtactagattgtcctgcactgtctgttactttaaggataaaagtataaataccctcttctagattcgacagttttaaaataggcgttctcgtgtcttgcatatcgacagctttttgagcgtcatcagctgattttgtccattcccacgtagttattgcgtgatcgtctaagctcaagctgccgtttagtgttatagagttgtgaggcaggtaaattattttgtcttcacctgcatttgcttctggagggtagtcggtacccgctaatacagtaatgttagctgtttgactgctactcgctttatctgtgtctatcactgtcagcttgaatgtgtaatttccaggtttggttaggtcatttaattgaagtgtaggagcgtctttcaactgtggttcatatcctagtggtccttgctgcaattcccagtgccaagaagcaataccatcgtcgtctcttgaagatgaagcatctaaaacggcagccgagtttggttgtttgatagtttggttagcaggggttatcacaataatagggggctgattgatcctcttggctggtaacactgttacgttcacgaaagtttcaccatacgcagatggagttgaagctgcaactttaaaagagtaaacgccttcaatcaacttctctaaatgtagttgaccttcgttctggtgcttaacagccgtactaccgtctggctgttgcaatgatgtccattcgtattggtacttgtcgtctttatccgatacaactgttgcatctaaagttacttcatttacgggcagcctaacttctttcgacgctgcttgaactataagtacttttcgtgtaaccggcaaagacttattggtagtagcttctacttccagaatacggtcagtcaaaagagtaggacggcctcgaatggatgca

SEQ ID NO: 7231 - DNA, 1625 bp, Diabrotica virgifera
  SmartBlast Evalue=0; Info=G(Alpha)q n=3 Tax=Endopterygota RepID= A7UGE0_HELAU
gccatattgacaataggcggctgcacttggtgaaaatggaggttttttaagtgtaataaatcgtgtactagcagacagcggcaatggtgaacgttctgaaggagtgcattatcgagtggttgtggctataagtcgccggggcgtctcgaaccgcagcggatcgtgcctgttgtgtgcagcagagaactagcgaaggctcgcagtggccgctaatccccttagaaggccgtcatagaggcttctttaatcttattaacggtaactagatttatttcgagactaaagagaatataagagcatgtcagtggtcaaagttaatcaccacacccagcttactacgatggtgatggtggccgtattcgttgccgttgcgggaagtgtcaaattgtaggtgtgtgtttttcgcgatattgcaggacgcggcgtgaatgagtatcgtggccccatcaagtagtccacgaccatgcagtgttgtcagtcagatgaggctcgggaacagaagagaattaacgccgaaatcgagaaacaacttcgtcgagacaagcgagatgccagacgagaacttaaattgctacttctcggaactggtgagtctggcaagtccactttcatcaagcaaatgcgaattatccatggtgcaggttactcagatgaagataaaagaggttttatcaaactcgtctaccaaaatatttttatggccatgcagagtatgattaaagctatggaccttcttaaaatacaatatggtgattcctccaatcaggaaaaagcagaactgattaaaggcattgactatgaaactgtgactacttttgagagtccatatgtcgaggctattaaagatctctgggctgatgcaggtattcaagaatgctacgatcggcgcagggagtaccaacttacagattctgccaaatattaccttagtgacctggagcgcattaaagatcccgagtacttgccgaccgagcaggacatcctgagggcgagggcgcccacgacgggaatcatcgagtacccattcgatctcgactccattatttttaggatggtagatgtagggggacagagatctgaaagaagaaaatggatccattgtttcgaaaacgttacttccatcatcttcctagtagctttaagtgaatatgaccagattttatttgaatctgaaaatgagaatcgtatggaagaatcgaaggcactcttcaaaacaattattacctacccgtggtttcagcattcgtctgtaatattattcttaaataaaaaagatttattagaagaaaaaattatgtattcgcatctcgttgattactttcctgaatatgaaggtccacaacgagatgcgatagcagctagggaatttatcctaagaatgtttgtagacctgaatcccgacagtgaaaaaatcatatactcacattttacttgtgccacagatacggaaaatataaaattcgtgtttgcggcagtgaaagacacaatattgcagtcgaatcttcgtgagtacaacctagtctagtactacttaccctggtctagtactacttatcctggtctagtactatcctggaggtttgtttcgctaaaggtgcccccggcctatctccaggcagggttgg

SEQ ID NO: 7232 - DNA, 1622 bp, Diabrotica virgifera
  SmartBlast Evalue=3E-35; Info=Pst n=1 Tax=Drosophila yakuba RepID=B4PK65_DROYA
tggatctaccggtacttctacgaagtaaggctcatagtgatgaggattcccagttctgcgccaggtaaagtaatgctgaagcagccttgatgctagtcctgcgaaatactccatcacagcgtacattatttcttggtgtgctgtatttccaaaggcacctctaactacgtctttgaaatatctaaaaacaagttctatggccatttctaccaattccattatcataccttggatgtcgcttccgaacttgtttattaaggttaaggcaaaaccggcaaatactttaacattaggcaaagaccaattgttcaaagagtaggtacttatcatagagttagtatcacttgttgatatgttcgtttctgaaggcaagtttgataaaaaggcactagcttgtttcttattcatacctataaattcgttcatattgatcgtttgaccatttagtgttatgtctcctttggctgcggagaaacgaagatcgttttctttcattaacttggtatttcttgtaagagcggcaaacacatcgtctttattgggaatattgcggatagccttgattacttccgccctaccttttattacattaccatcgttgtctagaattgttgttttcaaaagcctgtcaaaggttttcctgtgtctgttagatctcaaagagtcatggtaatcttctagaactctaccctgtgtttcgtctattatttgtccaaccgttttgaaattatatactgcatttccgaagaataatactgaagaagctaactgcaatattgtcaatgctgaaggcgcctgtttatggtttatccacatatcaaagacatcgtagctggagtttatgataccaataccactgattcctatgtttgccatactaattgcatttactgctaatccaacaccctgaccaatattgactccacgtgaaattaattgtgaaacagccatatttgctcctgctccaacaaatcccaaagatcctgccacaatattaatatatattcctcgcgcttctgagttaaaaatactcaagtcttcatcatgagttatcttgtcatgcaaaccaaacgcacttctagtaatactgtaaacaccagctacagctcctacagcggctgcaccaataagaacgggaggtacgataacacttgttacagcacccgcaaacataagagtaccagatcccacaccagcaacggtactacttatatcaccaacttttagcaccgtgtttagtactccacagctgggagtttctcgcctttcgagtagtactctatcattatctacttggtatcttccatttaacggtaacaccattatactttcaggtaacttgttattttttaaaaaatcttgccaattcgaatatactctcccaccgtgatctataaaaattctgcaggcatcaccttcttctcttcggcactttcttaaaacaaatatcggggaaggagatatatcaatatgtggattatactttggatctttttttctacgagattttgcttgatcatctgttggctctaacacgatgtacatgaaacctatttcaacttgatctttgtattcggcatataaattattgtgttttagaataatcttgtacaaatttttaa

SEQ ID NO: 7233 - DNA, 1620 bp, Diabrotica virgifera
  SmartBlast Evalue=1E-89; Info=Glucosyl transferase n=1 Tax= Culex quinquefasciatus RepID=B0WBP4_CULQU
aatatcattttttaattaaacataataaatttctcatagcgtctctaatgttttttaatctttgattgtgtcgacgttttgataaccagtcttattattcgttttgtacagaaataaaatatataaataaaaattgctccgatcaaaaacaaaaacctatcacatctaaaagtaaatactggtaaaatggcatgtctgttacagcagtcctcataaacggagctcctttatacttggcaacatattcgatccaataaatggcggtgtccattggggacattggtctatctttgaatctttcggataatagtttggcattctgagcatactctggtcttagtactttattaatagcttctgtcaaagatttttctgttgcagatcttaatttaatatgtaaagaagctccagttttctctaaagcagctgcattcaagtgttgatcggcaaactgtggaagaattaacattggtacaccgcaatagaccgcttcctgtcctcccaaaagtcctccatgggttataaagagttttaggttaggatgacacaataaatcaaattgtggcaaccacttgtgtagtttcacattggatggtaacccctccatagtatcattttcccatttccatataacggtgtattttaactgtgaaaacactttgaggaacatttttctctgctcttcaggaaatgtacttcccttaagtgttgaacccatgctaattagtatgactccatttggtgcactgctcaccagtttatccagtgtctctggcaacttctttggtttgtccaagtgaattcctcctacttcaattatatttggagataaaggttttggagtttggtacgtatagtgcctgttagttagcaataaactcatgttgtataaaatatctcctccttcaaaaagatctacaccaaggtactttttggagtattcattccctgtaggagctattgaatacaggtgtactagtttggagaatagtagcattaacgtattttccactcgctggaaaaagctcagtttgtcagagtagtccatgaaaagaactggtatataagatggattctcagggctgccgtaccactggtacatccatggtagtaaatcggtggaggaaagcccaataacaggtgcattacagacatttgcgagaccaaagtagcagttggttgcaaataattctgctaaaattatgtcatagttctccaatccttgtaaaaatgtcttgatactatcactatgcataaacttttcacactgagtcttgctcaatgttgcacccacgaacaattccatgtattgctgagttctgctttcactgaataagtccatagataacgatttgtcggatgtgcctgtagtatcaacataataaatatattttaaatttttattggatgttttttcttttacactcgtaccacttacaatattaactgtatgtcccctgttggggactctttaaacattggattgaaaacaaaatagtgactttttgccacaattggaaataacactaaaatgtttaagctttcagcacaacaaaacacagaaagaaaaattgcaaaagagcaaaattttggtaacatcgcgttggtgttgttaacaat

SEQ ID NO: 7234 - DNA, 1618 bp, Diabrotica virgifera
  SmartBlast Evalue=1E-150; Info=Metal transporter CNNM2 n=1 Tax= Harpegnathos saltator RepID=E2BD06_9HYME
gttacagccagatttggaggaaaagtattaaaaaataataaatagcacaagaggagctgtcaacagacgaacttttcataggtatatatggtagttaatataaacaaatacaataaaacaaaatagttatttaaaattgataaaaacgacgtaaagttaaaatgaaatttcgaccattttcagctcaagtattcttattaggtagtaagtacttcacggaaaacatttaaaattaaaatcttaagtaccattttataatagtaagcaaaaaacgaccctaactgaatagggccttaaaatgtcgttatgaatttttgggtagcagcatagtattttcttcgtctttagggctcacgatttggatatcatctacgggactcgcctttatagagccgtttacgtcacgggcgctgactctgtgcggagggctggtgttgctgtagtgtgacggagttttgggactcgtctggctagagaggttagataagttttctggcttgatttcttgggatcttcttgaagatttccgtttcggtgtctgggcaccggcacttatgccatcatcttcgtccaatgaatgcaaaagtttatcgacttcttcgtcaaattgttgttgtgtttgatgctctcctttcttggaacgctccataagactagctcttttggctgctagatataaacttcttttgatttttaagtaaagcacttctgtactagcacgtactgaatagtcgggaatgaatgtatgtcgtagaagtgaatcgatattcagcgattccaaactgcccatagtggatgcagccactgaaggggattcaataccaacagtttgtactaaagcctgggtaccgaaatatgtgaacggtcctccttcaaacataagactttctttaccaacagtaacttccacgcgaccttctaggatgataacaaagaaatcaaccgattttccttgggagtaaatgatgttagcaggatccgtgcgccattccttgttctttttgatgtgtactgcaatgtcctgtttgagaagacgacgtaagattgtctcagatatcacatttggatggaagggttccacacttgtacttaaatattgataagcggcaagtgtcagttggggactgattctcatcttgtttaattcaccccgtttctcggcaaatactgtaaagtcttgtcttctttcagcattcctctttctcttagaacgattgtcagtaaatacatcggtctcgtccataatttctgcttggatcaactcttcaatgacgtcttctaaggtaatcagaccaacggtttcatagaatggatcaccttccccttcgttgttaactctatgtacaaatgccatatgacctttgttaccttccttaaatattttaaacataacatccaaagtaacatcctcgaaaacaaaattgcagggattctgatagaattgacacaatgttttcaaaggagtgttgtcgtctggatcgacgaacgccaggtccttaatgtacaacatggtgactatgtttagacgtgttccttcaaataccggaatacgtgaaaagccgctcttcattatttccgaaacggtttcgaaatccaaaatggcctcgtagtccaacat

SEQ ID NO: 7235 - DNA, 1618 bp, Diabrotica virgifera
aggaactttctctgcctcctatgaattttatctatatttccaaataaatagccgtgatagtccttgagttcgactggagtatgcctctcaatccatggtttatacgtcttgacaactttagccaggtcttcaacatattttcgttcagttgattttatttcatctattatgtactcaagcctttttaacgatgctgttgattcacttctggtgacaaagctgggaaatgggtggttatctgagaaagcaacacgttcaatacgtacaatacccttatcatcacagaacgtctctctccgaacactactatacacttctttgtttctgcccagttctattccctcgtcgtctgtgtcaaacacggaactttcttgagatgtaactgaatatatggtagagcgattggacattggagcaaacatcatgagtggttctttcgtttcttcactaggagtttctatattttcgtaaatattttcctctaagtttctagaagcacccgcacattgttctgatttgttttgatcaatatactcagttagttcattgcgtatgcaattatatgtgcggtctacattctcgtaaaataccatttctgaatcttttatcgcgtctgtgagaccttctttatccatactaacaggtcttctgtctatcataacttgcacttctattaattcccgtccatcatcgttgtaagcttccacgacaaacaggccattttcaagatcatctccaagactttcagtgaattcttcgtagctatttaatcttagtatatcttggtgacattttgcgtcgtcatgaaaatctgacagttcattttcagcaactgtagtaatgtcagtgcagaaagtattgatatctggatccaaattcattggttcctctaaatttttgttactaactaggtaatcactgttcacctcggagaacaaaggcgatgtttcatctaagacggtatgaggtgcatctgtcataaaattgtcttcatcgtctataaagccatcttctctcatgtgtgctatttccatatccatttggcttattaaactttttctgtattcctcagtggcatcttcattttctgcttcaacgaagctttttattttgttttctctcttttgtttataatttataccactgtttctcctctttacctcaacattggaaatactttgttttaaaattttgtcatcagctctactcgaatctgctaaagtatcactcttatcttctgcagatttgatttcagtttgttcaaactgttggcacaacttcttaacatttgcaccatgttcgtgttcgttgctatcaacattgttaacttctgaattctgttttttgtatttattttttagagattttttttctatagctttgatttctcacaaataatctttctttacctgtaggctcctcctccgatgattttcctgttgtcctagggaacgtagcattctgcactttcgcgggccttcttatatcaaataacttttttaatagactaacatcaccacttttactagttttctttgtactgcttgtttccatttttgtaatttagcacttttaacctttaacaactacttcgttcacataggtacatcacggtgta

SEQ ID NO: 7236 - DNA, 1620 bp, Diabrotica virgifera
  SmartBlast Evalue=1E-107; Info="Glucosylceramidase, putative n= 1 Tax=Pediculus humanus corporis RepID=E0VQX9_PEDHC"
gatttactctttgtcaattattcgcttttttatcctgtaaggtgtgccgtacgatgctacttaaaattgttgctctttttgtaagtgtgatccattgtttgtcagctgataacaaatgtgtaccccgaagttttggccacagtagcacggtatgtgtttgcaactccgacagctgtcacatgttggaatctattgaaactttaccgaccggtaactatgtaaagtatacaacaaaccaagcaggactacggtttgtgaaggagaagggtgtattggaatcgaaaattaacaatgcacaaaatcttattgaaatcggaagtcaaacgtatcaagaaattgttggtttcgggggtgcttttacagatgcggctggtattaatattagatctttaagtgaggatttacaagatttgattttaagatcctatttttcggaggagggaaatgagtatagattaggaagggtacccataggagctacagacttttccctcaatccttattcttattgtgataatcaaaccgaccctgaatttaaaagttttaaactggctaatgaagactatgattataagcttccgtttatacacaaggccaaagaactatcaaaaaacaaccttgaactcattgcttccctttgggtagccccgggttggatgaaaacaaatcctgaatttactgctagctactcttttattaaaagtgatatgtaccaagtgtatgctgactactatattaaatttttggatgcgtataaaaacgaaagcgtcagcttctggggcgtcaccactggcaatgaacctatgacagcatttatgcctaaagcgatccctagtgttggatggtttccagaaagtcagggccggtggattaaggaaaactttggaccgacacttagaaattctgagtacaaagatataaaaattattggacatgacgacagtactcttttagtgcctttgatactagaactgatgttccacgatgaggatgttaaatcatatatagacggtattggattacattggtattgggattttcttgtaggcatggagagggttaacgaaacccataatgaatatccagataaatttataatagttaccgaagcttgtaatggttatatcattcaacaagtactattaggcgaatgggaaggagctgaacgttatgcaggtgatattatccagaatattaatacctggtccagtggctggattgattggaatttggctttagacatgcaaggaggcccaacatttataaaaaactatgtagatgcccctataatcgttaattctgccgagaatgagttttataagcaacctacttattatgcgttaagtcacgtatccaaatttgctccaaaaggtacagttcgtcttcaagtcaccgctgacatcagcggtgtgggagtaaccgctcttaagagaccagatgggagcgttgctgtaattatattaaatacgaattttgaagaaacagaaacaacagtaagagacactactggagatataagtttaaaattaacaccaaagtcaattacgacagtagtatactcaaaataaaaccaattcataattatgtataacttgattgaatataaatattttaatgctt

SEQ ID NO: 7237 - DNA, 1617 bp, Diabrotica virgifera
  SmartBlast Evalue=1E-82; Info="ADP-ribosylation factor GTPase- activating protein, putative n=1 Tax=Pediculus humanus corporis RepID=E0VKG7_PEDHC"
cgtcatacaaaagtcaaatttctaattccaacactatacaatatattggtagtttattagttattcatattaatttaactttaacataaataaagatttaagaacatggacaaccagcccaccaaagaagacattcaagcagtatttaataggttacggtcaattccagccaacaaggtttgttttgattgtgaagccaaaaatccaacatgggcaagtgttacatatggtgttttcatctgtatagactgctcagcagttcacagaagtttgggagtacatttgacttttgtaagatctactcagttagacaccaattggactttaatgcaacttaggcaaatgcaattaggaggcaacagtaatgcgttgcagttctttagtcaacataactgtaacactaatgatgctcagaagaaatataattctagggcagcccaattatatagagaaaagcttaatcaagctgctgccagttcgttaagaaccaataaagagctgcatgttcatccccagccgcaagaaaaacaagaagagaaagaagccgactttttctcggaacaggatcatttcagtactcaggacacttcttctgttcgatcacaatcgaattttaacgaattaagctcgccagttagaaatgccgagtctattaaaccagcagaacaactgaatgtcggtgaaggacctaaagttgatttctcagtagctcattcacatgtcgaaccaaagaaatctacaattggagctagaaaaccagctgcaaaaaaatctacgctcggtgctaaaaaatctggtctgggcgccactaaggttaaaacgaactttgccgaaatcgaaaaggaagcggagcttgccgaagaactgcgtgccaaagcagctgaggatgcacttaaaatggctgctttgacggtgaaagaacaagaggaacgggacgcagccgtaagattggcctacaaagacctcagcttacaacaacaaaagaaagaggaacagctaaggaaagaagatccgaaaaaagctgctcagctggaaaggctgggaatgggacttggtgcaaggacgggagtgagccactcagctatcagtgacatgcaaacaatagagcaagaaaatatcaaaggttcaagtagtactgtgacatctttgggacaattgcgattattaatagataatggtttaattatggacgatgattttcatggaaatacactaagtatgattcgaaactccaacagttacggtaatagcaaacttaattcgttcatgacagatttggccgagaccaaatccgaaagtagtaaatcgagcaaagatagctgggtgataatagatgatccacctgagaaacccaaatctagttcttatgaaagagaaagagaaagggagcgtgaacgtgaaaagccaccgagaaaccttgaacccgttagcaataccgacgaagcgcaaaagaaattcggtaacgccaaagcaatttcatccgaccaattttcaatgatggtagtgccgactatgaagctcaggctaacttaagcagattccaaggttcttccagtatatcgtcggcagaattttttggtaacggtagagaggcaagttattcatctaacaatgtac

SEQ ID NO: 7238 - DNA, 1616 bp, Diabrotica virgifera
  SmartBlast Evalue=4E-99; Info=E3 UFM1-protein ligase 1 homolog n=1 Tax=Aedes aegypti RepID=UFL1_AEDAE
ccgggttttttaataactacaattcgctatctttttgactacaggaactttttcttttagcttttcctttgcgttttctgcttccgatccttcgctcaacattaaggttacaaaatcatgatatgaagtaagttctgaggtctgctcttctgtcaaatattgctttaaaaatgacagcacccccgcaacatgcctaccgctacaatgcagcatcgtttgtgtagcagccgtaaaaatagcaaccgtagctagatgtagaattaaagctaaatcttcagatttgtttagttcgtccaaaagttgatgtttgtgattaagcacagtaatacgatctttcttcttgtcgattttcttcaaaatcatactgcaagataccaacgcactctcagccgttgtcaaaaagtcatcaatgctctgtccagacaaagttttaacgaccgaataaagagattcttgatattccttgggtaattcgtttacaaattttattctctgatcttggttgaaattatctgttaaggagttcaggttctcttctgctgacacataattcaagatttccgtaacgatatccgtgcaaagggattttagaagatacttcactagctgtgattgcaaatcagctggaaaaagttttaaacctttatcaaataatcgaacatctccaatcaacgcattaagcttgttttgaatttcattgtgagtttgacgacgattagccgtgcgatcggtaacggtagtagcgaaaatgtttgctgcaatttgtatggcatcttcgtttaattttggaagcaaatggttcacaatttcatctaagatatcgtcctgtacgccctcttcttcaagcggaagttgcaaagtatttttaatatcatcaaatttaataatttccaacactattttcttttcagccacatctccatcactctccgagttgtttctttgagcggctctgtataacttttttgtagacttagttttcgtctctctgccttgagttcccccaccgctttttccaccagctgctttcctcctcctttcttctctcttgtcaaccttttcttctacatcctctactttttgcgatttagttgaagatgcttgtagactgatatgatactgctgatactttccactttctacaacattctttgctttttcttgaattaaattttcacaatctttaactagtttctcgatgaatgttttactaaagacgtagttctccaacagaacggtttgagaacgtttttggttacttaatactaagtctagaatcatttcttgatctgtttgattaaatactgacggcaaattaatctgtaaatctatgaatgacttgctagctatgcactcatcaatatcagcctctacgcgatccaatatggttttggatactacgcaagaattgagaatttggtaatcctgattggcaagctgttttttaatgtatgttttttggtcagttataccaagacgtgaaagcgcgtcaaactcaaggtaactattttgcttgtagaaatgactgacccattcattctgagacctggcataaacatttgggatatactgagcaccggccatccttccagttaaagatccgtaactaacagttt

SEQ ID NO: 7239 - DNA, 1616 bp, Diabrotica virgifera
  SmartBlast Evalue=1E-127; Info=Cytochrome P450 6BR2 n=1 Tax= Tribolium castaneum RepID=D7EJ98_TRICA
ttggtgctgcttgcaaataaagagtttctcgtgactgtaatataaagtaatcagggtctatttgtatgggcatcttggtacttggactaattgtcaatttaaatctccgtataatctctataataccaattttgctttgcatgtatccaaatcttaatcctatacagtttcgaggtccttctccaaacggtaaattcgaatacggaacaatattatttttattttcaggactaaatctgtcggggtcaaacgtcagaggatctttaaagaattcaggatctctctgtatactaaatatcggtatcacacaagttacacccttttctacgaccatattcgagtttttaaatgtgtaatctttcacacacttcctctgaagatttgaaaccactggatacaaccttaaagtttcatcaataacttgttgaaggtacttcatttcgttgatggactcgtaagttagttcttttttgtcgtttaaagctgtgttaatttcgtctcgaagtctgtcttgtagttctggatgtttcgctaactcatataaagcaaatgtcattgttgacgatgatgtttcaaaacctgccacgaagaagatgccgacttgagctatcacttgatcgaacgttagatgatttggagcatcctttggttgatctaataagttgatcatcaattgaagaaaatcttcccttcttacgttattttttcttctataatcgattgtcgaaccaattatattgacgaaaaattggcgttgttcctttttcatacttggaattcctaattgtaaagctagctccggagcataattcatcaacgatactttagctgcaagtaatacatccttaaaactgaagaacgacttgcctatatttctgaatttgttttctttatctgtaaaacagttactgttgagcccgaatgcgcaagatactatcacatctgtggtaaacatagccaaacactctctaagatcgatgtcttgtttcttttcgaccaattgttccatgaatttcgtcatttgtccacatgcgtgggttataagcggaaacatcattttcatttttcctgtcgtgaatgtaggggttagttttattcgaatatttttccaatttgtttcgtccattacgaagagattttctgatatcttatcatgcttgaagtaataaaatcctctgtctacgaagttactgaagtcctttaccaaaacatctctaacatattcaggatccaataccaagagtgttggtctggctattgtaaagaatcctccaactttccatccttgctccctcattttcttgtagcagctgtctaccacacctacagaatatcctctcaccttagcgaaaagactagtacagtttccatatggaaactttggctctagatacggtactccctttttagaccagtatgtgtaggaatacaggaaatatgcgtagaaagatactgctgctacaagaagtagagcagtcccgtaactcaagagggtaagaaacaagctcattttgataggctctgacaagataatgtacggttgacccctacacagaaatgcacggcttgaagaagaagactatagtcacagcatccgtcacacaatgtaagttacc

SEQ ID NO: 7240 - DNA, 1613 bp, Diabrotica virgifera
  SmartBlast Evalue=1E-129; Info="Asparagine-linked glycosylation 8 homolog (Yeast, alpha-1,3-glucosyltransferase) n=2 Tax=Danio rerio RepID=Q566T2_DANRE"
atctttcccaatctcaatataaaaatgtcttttgtaatgaaataattcatcaataaaaaattgattctaacaatgatatttacaactacatttttaacatcatgtcttaagctcttattgattcctgcctacaggtcgacagatttcgaagttcacagaaactggttgtctataacacacagtctaccagtcaagaagtggtactttgaagacacttcgcaatggaccttagactatccaccactttttgcttggttcgaatatattttgtcgtttcctgcttacctgtttgattcaaaaatgctcaatgttaaccatttgaattattcttcagaaaaggctgttctattccaaagactctcagttattattactgatttagtgtactcattaggtgtttatatgtgttgttgctctgtgaaaaaaagttggggtaaagaagtagttttgccaatacttttgatcacaaattgtggtcttttgatggtggaccatatacactttcagtacaatgggataatgtatggaatattattaatttcaattgcttatatgattcaggagaaatatcttcagtctgccttctggttcactattttgctaaatatgaaacacatctacatatatttagcaccagcttattttatttttttgttaagacactactgcctgaaaggaccattggttatccgtaatattttcagtcggaaaaatttgaaaaatgtgggaatgctaggatgtacagtcttggggatatttgtggtaacctttttaccattttatgatcaaatacctcaggttctgtcaagattgtttccattcaaaagaggtctgtgtcatgcctactgggccccaaatttatgggccttgtataacactgttgataaagttggatttgttttagcctcaaagctcaacaaaaacctggtcaagaatgacacagcctcaatgacaggtggcctagtccaagaattttcacattcttttttaccaaatgtgacacctgtagccaccattatactaacagcagtatttatggtaccagcaatgatcaagctgtttagagctgaaaaacaaccatttcagtttgttaggtgcatggtattatgtgccttgacttcatttctttttggttggcatgtccatgaaaaggcaattttgatggctataatacctttaagtatcctatcgatcatcaatcaaagagatgcaaaggtttttttgatactgtcaacagtaggccactactctctattccctctattatttccatcatcgcttttacttattaaagtgctgcttcttgttctatacgcattatactcgttccacagtttatcgaagttgtacccatccttaacaccatgtatatgcagctttagcttaccactgctcagtatatacgaaagtgtatatttgctaggtcttggtgcaatatttttctatgaaaatgcggtgcatgtagctctaggattgaacagcaagcttccgtttttaccattgatgatcacatcagtttattgtgcaataggcgttatttattgttggttgtattactactattactttttaagaagtcgtgatgaagtcagtgctgtgagtaatgtaaaaaa

SEQ ID NO: 7241 - DNA, 1608 bp, Diabrotica virgifera
gggagtagctggaaataaggaatatggaaaagataggaaaaattgataaggctataacggatacatattgtatttacacgtttatagttaatattgtttgtgactagtgcagaaccatctagtaatacgttaaaaaattcaagatggatgttctcgagtggtaaaattatggttggctttagtgagtgtgtcttgccgactaccctacaagtctaatcgttttttgtatctactacatccattttaaaaaatgtactattaatatggaatatcacaaagtcagtacttctaagacagatcattttattgcgcaataatggaagaactacctcatgcaggctggccactttgtgtaaacgggtttcaaactaacattaggtattttttggtattttaggttccgtcttgatatgccaaacacttattaaaacatttaacatgggactagatgacagcttgagcttttcatacaaaaataaaaaatacatacaatataaaaaatttaggaaacactctagtctactgtaagaatactgtaaacaccatttttatgaagtaagaaacacctataatctatatgactacgatttataaaaatctttctcaaattttcattgggaatctctttctatttcttataatatataaggtaaaactctgatagtccactagtaacattggattttacttttccttacgcgtatttttatttctaagattcgttttaaaaccattacttgaataaatagcgatggagttgtctggaataatacatatgatgtagaacgtgcgaatatatctatacagtgcgttcttctgcaaataaacgttattctaaaacttttaatacaacatttgcataaaaatccaccaaatatccaaaatatctaaataaaaatgtcaaaatcttacacacaaaaccacgcagataatacaaagataaatacaataaaatatagataaaagtacaatgaaagacatgagctttggagttttggatttcatatttctcggtagttaaagctcttcagttcctttttctttaaagaagcttaatattatttcgtgattgtgatgatttaggtcatcaaggttccacatccatgtattttcctatgcaaattttcataaaacgctaattactaatatgccttctttatcttttcaaacgtttgaactgcatatcactgaaattgttctttgtaaaatttccaatttaacgccaaatggtcatatttccagagacatgttaagaggatagacttggctagggatatgccactcaatgcatcggggtgtaacgtcgacataggattgagtggtctagccatctttgtcagtcacatgagcgggatcgtttggttaaaagagatagatagaccaccgatcgactgtttccatgctgtttccgcgatacgcttttttgaggagtatgctgagtctacgcttaatatgtcattgtcaatgcatatttctcgtccacatattgcatcaatttatgtgacatctgacatttgacgtgaatcacgtcaaatgtcacatttctggtcaaaatatcacataaatttacgtgaaatatgacatttgacatgaaatgtaacatttgat

SEQ ID NO: 7242 - DNA, 1616 bp, Diabrotica virgifera
cgtcgataatccgaaccctggtaatccgaacgttcgctaatccgaacgcaaaaaaaattataaaattaaaaaatatgatcgccggaccgaatttttggatttaatatgacaatatgggcaaaatatgacagcgaatttttgttttgtttatgcagaaatatatacaatatatttgtttattatgtaggtgttttattccttgtaactaaaatgtatttacacatcgtcgttctagaacaatactaagacaacttaaaaaatatagtttcgagtaaattgagttttaaatttcctccatagaaagtatgaaataaaaatattttacatcagtttattgcattgtttcttaaattttatggtgccctatttgttcttgagtgtgtttagagttcaactgaaaatttgaaataataaataatgacaataaactaagattttataacatgtcctcctcttacactttaaaattttttgatatatacaatttatctttgctaagtgttgaagttttcctagtattgtatttattttttgtaatattcttttaaaatttctttatttttcttcatcttatcctagtatttcaccaattctatttttcaacaattaattttgttaccattattagcatttcaaaatatcccactcttacactattttttgacgcacttgaccactttgtcttgtttctttaatttttcaagttatctttacacaataattattcgcaaaacaatgcagtaggtatgtattgtcattttttattttttactgaaacttcaagaaatagaaaacattatattattacataaatttataaaatgaaatcaaatattaccaactggttaaatcatttatactaaaattccactcaataaacaataataaattgaaaaaaaaaccgcgaacattttttaatcgctaacttcttgaacttgttgttgacctttcttgtacgattttagatttaaaaaaaaaatcgtgacgtttagcagggatatgtcggattaaacttaaaagatcttcttttttcttaaagggaattttagggcgttccatataagctggagcaatattgtcaacttcattcattcaaacgttaatttgtttaaatgaatcggtaccaaaggtttccttgtagatgtagataataatatttgggctttctttggtcactcgcagtaccttaatattgctccagagtattttctctccaattgaaattttagaaaaacttcaaaattcatgctaaactttttccaatctaaaatatcagaaaattgaagattattaaccatgtaaggctttcctgtttttttttggctaattttatgatcattgccatttcctgtggagttgaaataggtccactcagtataaagctctttttttggcagactctatgcagcaacgcatagagtcaccctcattttgggtatgccccacgataaggaatttaaaaaacgacttctcgcatccgcactctattgcagtcggagagcaacttgaactgaccagtgaaagtgaacaactttactgtaactgaccgactcatccacgaattcgtagatgagcgtggggatatactcggacatttactcaaacaatccttattt

SEQ ID NO: 7243 - DNA, 1611 bp, Diabrotica virgifera
  SmartBlast Evalue=1E-24; Info=MOG interacting and ectopic P- granules protein 1 n=1 Tax=Camponotus floridanus RepID=E2ABF8_ 9HYME
aaagttggtagcaagggagtcgtcagagcaggtgtaatcgtggcgggggataatttctgttggtgctgagccgacagtgcagacgagttcacagggatgggcgtaatcgtcgctctcatattgggtgggtacatcccttgcgcaggaagggccatggggagtacagtctgataactggcggtggttgggatggagttctggggctgcttattatttacaggaacaggtccgcgacctgataaaatagaattagtatctataataactaacgtaggttcttttttaccctgaggaacgctagtgctactactactactactactagtgttagatttagaggctatttctactagtcttttggtatcgtttacaactatcggcggtgctttcttcggcgtaactttggatttctctgacggtatcctctccacggtaattgcatcgttacacgccagcgggtcttgtggtaggatctcttcaatgtcagattcttcggagtcgcccttcggttggactgcctttgctcgaggagtttccacttctgctcgcacgggtttgctggactctttttcatcttctttgtcggtttccgcatagcttttggttttgttaaggttccttgaactccgccttctggggagctcttctacaacttctacaggcttcttcttcttttccggcgtcgctaaatctatgatttctgtggttgtaccatttgcttttgaagtttcagtatctacaatcattacatctccttcgtccccatcctctcccccagaatcgttcagttcaattggatcaccgttgttgattttagatatactgacctcctcatcatcttcgtctgaatcaatttcatgaatctcgacgactttctcttcttcgaactttttcgttgacaattccgaacttgttgcgctttgtttgctattttcgtcatcaatggtctttgactcggtatcgtcgtcttccgtttgatcctcactggcttttgtttcttggctactctcatctattgctgcttctaattggctctcattagtttcttgttcttctgagttttttacatctggagaggagtcttcttcttcctcttcttcatcttcttccattggagtttccttttctgatggtttatcttcttgtggagtctcttcttctgctaaggggttttccgattctgagtgattctcgataataccttcttcagacgcaccgttaccttcttcagacgcattgttaccttcttcagacgcatcattactttcttccgttccgctttctggtttctctttggtatctaaactattctctgtaggttttttaacgttgtcttcaatgtcttggttttccatatctacatcacttgataaatcaccgtttgtaacaatgttaccttcatctttggaaagcatatcctcaacctcgcccatttcagcaacagctgccatagccagtttcaattgaaccttggattgtttaattttctaaaattcccgccatagcacatgggatttcacttgaaagaaacagaacatctgcaccgccaatagaactctgtgacaatcgacaatcgtcgtaaatacccgcgatatttaaaactgttgacac

SEQ ID NO: 7244 - DNA, 1607 bp, Diabrotica virgifera
  SmartBlast Evalue=5E-15; Info=Endonuclease-reverse transcriptase n=1 Tax=Bombyx mori RepID=D7F157_BOMMO
atgccgctgctgcattttcgtgttgcaaagaaattgaaaatgtttatacgttcatatttttcatttcttagtatgtgaccaaagtagctcattttttcttttgcttcatagtgttagtatttctttttcttttttcacctttcgtaatatctccgtgtttgttatgtgttgtgtccatgatacggcggcatgataccatgtggcagcgaccgtgaaaggtatctagtagtaggcaggtgcttgtagaggattatcgctgttaactgctgtggaatactaaagtagtatttatttataattcacacaatggtaaacacacttgcaatatacaaccatactgattctaacgtttgaaaccgtgtgtagagtgtaggccacatgctgagaaataataagtaccacaacttatagtgaaaggaaagatcgagggaaagaggggactaggaaggaaaagactatcgtggttcagaaacatccgacaatgaacagagctaaattttgaacaggtaataagaacagctgaatacagagaagagtttacaattgtatgtagtagggccctaacctccattgaggagagggcactttaagaagaagaacgtatacagtattcgatatttctactttattgatgtcaatgattatttggactattgcttgacattttcttcttttatcctttaattcgtccaattttgaacatagacttcccccagtttcctccattcgtttctgttttgtgttttctgtttccattgcgtttctcctatctttctaatctcatctggggtcgtcctcgtgctctctttcctgtccattgtatccattgttgcatcgtgctattacacctattgtctgtttgtcttgcgttgggacctgcgaaactccattttatcctggctatatgttgttctgcgtctttgacttttgttttatttcttttccagttgttttgctttttgtcttttgattttactcctaacattgcctctctccatggctctttatgtcttatttaattcatttgcagtcctatacttcatttagtttgtttacatctattatacttcattttacatctattccagctcttcagtattcgtgctcaatatcatcaatatcaactatattagctatgaaccgtaagtggtttaaaaagcttgcatcgaagttaaaccattccagttacttaaaaacgttttttagggttaaggtaaacagttttaatgagatagaatgactttgtcttactcctgtataaacactataattatcgcaaattgaaatccactttacttcgtacaattacaatacataagtctgagaatatttcggagctactatttacatggttcgttcaaatttagaaattttgaacgttaacttagatgtaaagtactagaacccagtcgaggcctttgtcaaacgaaagaagttacatatgttttcgtttttttttgttttacgaattcaaaccgctagacgtgaaagggtatgggtctttaagttattaaagcacattataatgattgtgttattattaataattattaattaattccaacaaatcccgaagatggcggtaacaggttacggtgtatgactct

SEQ ID NO: 7245 - DNA, 1611 bp, Diabrotica virgifera
aagacctcgccaaatcgtccacagcaacacgcggtacgctacacaaatctctcgtttttttttattaaccgaaagaaaatcaaccccaaacatgacggataaggtagaacaacccagtgttgaagtcactgaagaagaaccaaaaatcaaggatgacaaagcctccccagtgaaacccgcagaaaaggtagaaaatggggatgccaaagcaaatgaagatgaggagaaagaaaaatcatccgagaatggtgctgaaaaaacagaagaaaatggaagttcagaatctgaagaaaaacctgccgtaaagaggaaatctacaggcggtggagatgcaacagacagtgtggacgttgagagcgccacaccagagaaaaaagccaagctggatgaaaaagaatcagcggaagcgaaagcagatacagaagtagaagcctaggtttctcttgaaaatatattcgtgttcagaagtttcttatgtttttatatatgtatgtaattaaataatgtaaaatgtaggggcaaacctgtgtgaatattttgatctagccctaacattcgacatattttataacataacacaaataattttagaaaaatcgcatttaatttttagttaatgttgcacttaaaagtagtgaaaaataaagtgtctgttggtcattctacaaagtttggttgattttaaacggtaacaataatcaatcttgccaaacatatcattcttcggatattgcaaataacgtactttcgttttgatttcaccgaatctaaactattcgcgttaagtgtattatctgttgataatttaacactgcctacttttagtatttgttttgggggccacaaggtttgtaccttttctagaaagtgtcccatattctcaaatcaattttagtgtaatatacattgacctatacctgttgtaatcaatatgtacaataatagtagtacaaacggcaattcaataagttttatattgtttttattataattaataaaagtatttatttgtgcatatgtagataaatagaatttttaaagttatacctaccgattgtggcaaataaatacgttgaaacccacacagaaacaaatcctgtatagaaatatatttttatattacaacgttttttaaaacacacaaggtccttattaaaagccaagacattctcagaataaattagtgacaatcttccacttctcaatcgctagacaaaattggcgttttgattttccattatgttaaaattttcctaagacagtttaatgtgcagatttactacataaaatagtagacccagttttaactgaacataacgatcaagaaactgacattcaaaataaagttactcctgttcgaaatgtcactaattcgttccgaaagagtcacctggcttttgcaacatgaactatgctttgtagaatggctaaaaatttccttaggtgttgatgtgggtgccaaggtttcatggtacgttttatgtacttaagttttctatttgtagtaatgactattcattttttcaataaataccacgtgttgtgaatcactgtaatatataaattaccattgtgttctttaaaatgttacagtaaatggtggcgtttcaa

SEQ ID NO: 7246 - DNA, 1611 bp, Diabrotica virgifera
  SmartBlast Evalue=1E-166; Info=Selenium-binding protein n=1 Tax= Aedes aegypti RepID=Q17JR3_AEDAE
gtagccgtgacctccaagtagaaacaacgataatacaacaaccggcaatatggcgaacggcagtggtcctggttacgctactccacttgatgccatgaaaaatggcccaaaagaaaagcttatgtacgtagtttgcattaatccaaatgaaggggaagataaaaccgatcttttggcgacggtagacgttgatccggagtcaccgacatattgccagattatccatcgtttaagaactggtcacaagaacgatgagcttcaccactctggttggaatgtctgttccagctgtcacagttccacaggctgttgtaatggtcttgtcagggacaaacttattctaccggctttgggatctgacaggatttacgtagtggatgttggaaagaatccaaaggcaccagaatttcacaaaattatagaaggaaccgagatgagacgtttcaactgcaggactcctcatactgctcattgcttagccagtggagaggttatgatctcaaccatgggagataacgaaggaaacgcgaaatgtgattttattttattggatggcaaaacttttgaagtcaaaggaacttggctcaaaggtgacaaagcaccaaaatacaattacgatttctggtaccaaccctacttcgacactatggtagctacggaatggggtgttccaaaagtattcaagaagggttttcaaccgtccgacacaagacccgaaatttacggaagaagtcttaacttcttctcgtggaagaaaagagaatttattcaaagcattaatttaggtgaagacggcattgcaccgctagaagtaagatttttacacaaccccaaagaaccacaaggatatgttggttgtgctgttaatgcaaatatctttaggttctatcgtaaagatgacggtacttgggctgcacataaagttatcgacgtccctcaaaagaaagtttctgggtggattggaccctacattcaaggaatgataactgacatcttaatctccttagacgacaagtatttatactttaacaattggctacatggagatgttagacagtacgatatcagtgatagagaacatccaaaattaactggtcaaattttcctcggtggcagaatactcagcgattcagaccttaaggttctagaagaccaggaattaaaagagcaaccgaaaccagtctacattaaaggtaaaagattccaagcaggaccacaaatgatgcagctctcgcttgatggtaagagactttatataacatctagcgtgctttctccttgggacaagcagttctacccccaagttgtagagaatggtacaaagatggtgaagattgatataaaccacgaaaacggcggtatgaagcttgatgagaacttctggttgattttggagaagggcccgacgggccacttttggcacatgaacctaggtatcctggaggagactgcacttcagatatttggttggcgtctaaatgaaatcacaatttaattgaagagagataatatatatttaatttttatacttaggattattttgtttgtaatatttgtttaaaaaaattgtcttttacttaaagctatttcaataaaatgagattaaatatg

SEQ ID NO: 7247 - DNA, 1610 bp, Diabrotica virgifera
  SmartBlast Evalue=1E-154; Info=Prolyl carboxypeptidase n=1 Tax= Tenebrio molitor RepID=C5H0E3_TENMO
tatgacaaaaaactgttttattttatgtagataagtgtataacacaaattaatttaagtgatatcaaagtaaaaagataataaatactaataattctatcattttttaataagatttacttgaggatcactgtaatattcccgcaaccattctttgattttacgaacgtgaaagttcctagcatacttcacgtcctccgtatctaaatcgtttttaccccttaggtcgtaatgatgagctccatcaggaatgattatcgacctaactctgtcattaatattccttaaaacgccaccaccagaccagggatcaagaagaccgttgctgaagactatgttggatgcagcttctatatccttgccaccgtattcaagaagtggtacgtttaggtttcttggacgtactttgaactgtttatagcaagtgtcggagaattctgcgaaatcccagttggcattttcaaacatatctgaggattgggaacacattggcatgatcatatcagtgcaagactggaaattccaaccgttatcactaaggctaggtgacgtcacatttatattattgcatttagctgttttggtataattggtatagactcccaatccatcaacaactgcaaccagtagatcataatctccattcaatttgtgactattaagtctattgcaaaattctctaacaggataagcaggcaagtctgctaaaaagttggtagggtacggataattaaccattgccatgttaacaataagttctgctgcccaatcgatcaattgattaatatcgtcatcagttttaattggggagcacagattccacgtagaagttaagtttgctttaccctcggcagttttagtaaaagaccttattgttttccaaacatttgtaataccatttgtacatttatctgttccaaaacttgcatatacactagtagtaatcctattaaatatctcgcacgaagtcagtcctcccaactgccaaatgggagcagaacttgctattgctcccaacacagagctgggatacttcattctgatccaactggataacatccctccgtaggaacccccaaacgctatgacaggaagattcttttgattatgagcatattgttcctgcaatgcttctattacatatacgaagtctgctagtgcttgttgagaggaaagataccccaacttgtcaatggatgagtaagattgattgccaaatggcaatgactcgccataatatctgtgttcaacaaataccagtaaagcactgaatgtcggggctatgtcgtacatgaaccctgtgttcttcgcaaaatttttaatatcaccttcatttcccgtataaaagaaaattgggcctctatcttcgtgataggtgtcattgattaagtatcttaattgaaacttcgtgtcctgtgcgaagctaaagtgatctaaaggcacatcaatatactttgtttcgaacaaataattatcttctgcaagtacaatggctaaaacgccgacaaagcaaacaatctcccaccgcattgttgaatagagcaacactaattagactatattaaatctaatcgctggctgctgctgaccttcgttatcataaccgagccc

SEQ ID NO: 7248 - DNA, 1609 bp, Diabrotica virgifera
  SmartBlast Evalue=0; Info=Translational activator GCN1 n=2 Tax= Formicidae RepID=E2B5Y8_9HYME
acgatacttgcctaccaaacagatccttagcctccttgtaggaatcataaactcaacacacggtagagtacaatcccaatgcgaagcttgtcttttagaagtggcttcttgtataagcggtcaactaggctgtgccaaagctagcactgacgaaatagatgtgctgctaggtgccttgcagagccccttttcagtactgagagacgccgcactcagaggactaaccatagacatattggcacttcctacttttgagaaagactacgcctatgccattaaagttttcaaaagagtttggatcgctaaattcgacgaagtcgaagagaacagagtgttggctgagcaattatgggacgaggccaaaatggaatttcctgcgcaattgagcgaagaactaatggatgacgttgaacatccagttgaatgtgtacagtctgctgcagccaaatcactagcagctcttttggaaaccgaccagtcacaagtcgaggaaataatgaagaaattagttaaattgtaccaagatcgtttgaagatggttcctgctaaaatagacgagtttggcagagaggtagaaaaatctgtagatacttggttccctcgcagaggagtagcactggctttggctgagttggctcccttgtttaccgacgagctcatcgctgatttgatacaattcttcgtattccaatctctaggagacagaaacgagactgttaggaaagaaatgctgaatgctgcattgagagttgtggatctccacgggaaagaaactgtaggtactctctggccagttttcgacgatttcatgggaaaatcttcaaagtctgccacctacgacgccgtcaaacaagctgttgtcattctaatgggttccttggctcggcatttagacaaagacgatccaagaatcaaacctatcgtgttaagactgatacaagcactaacaactccatcacaaaccgttcaagaagctgtgtccaattgtttacctccgttaatcccttccgttaaagatgatgctcctggatacgtcaataaactgctacatcaactattaaaaggtgacaaatatggcgaaaggaagggggctgcgtatggtttagccggtctggtgaaaggcatgggaattttggcactgaagcagcacgatatcatgacgaaactcacggacgctattcaggacaaaaagaactacaaacatagagagggagcgttattcgccttcgagatgctgttccagatgttgggtaagctgttcgagccttatattgtccacgttttgcctcatctcttgcagtgttttggtgattccagccagtatgtcagaacagctgctgacgatacagccaaagtcgtcatgagtaaattgtccggccatggtgtgaagctcgtcctgccatctctactagcagcgctggaggaagattcctggaggacaaaaaccggatcggtagaactcctgggagctatggcatattgcgctcccaaacaactatcttcatgtcttcccagcatcgtccctaaactgatagaagttctcagtgattcccacatgaaggttcaggaggctggagcagcagctttgaaagttattggatctgtcatt

SEQ ID NO: 7249 - DNA, 1607 bp, Diabrotica virgifera
tatagtaatttttctagtgaggttgtaagtcacgctgtttcagatgtacatagtattaaatattaaaaatctatcagaaatataaagttaatggaatttgaatatatatagtgaaaaaaaaaacaagttatgggagaaatttcgaaagaatattaagtgcaaagtacttgtgaaataaaaaaaaaatagtatgtaacactttgccttttgaataatagtcttttagatgtggcagataaccatagctaggggcactattttctgggttgtattattaaccgcggaaaatagagatttcaacagtagaaagggaaacaagtttggtgccaatatcgccaatatttggcaccaaaacattgaatcttacggtcagagtagtatttgtttcattttaacttgggggttctttcaatcttcaattaatgttttcttaaaaaaacctagatattttgactttgacacatgacgtctgttatttgacagatgccgtccattatttgacagatgacgtttaaaatacactttttggctttgtccttataaacataggccacattgacttggcaactcagtgaaaatactatattttattgcctcagcatttcaaatttgagatactgacggaaatttaaattttgttatttattttcgcagtgcaggtcaaggaaagctggtttctttttaaactagaaaccaataaccaaagttttgattaaaattgccgagaaatgcatactatttcaataaaatgatttatatgttttttagcatattttgacattagatctgaaagctagaaggttaatacagtttttagtttgcttatttatgtagtattattcccataaatgatatagcaaagatttcgcaccatattctgatctatggtgaaggaaagatatcttttttcatgaatacatcacagcttttttccttagcgatgctctcctccgtgaatgttgctaagatagtcgcccacaatgatattaagtaattttctactagcacatgaattcagctttccttgtcgtgacgtatatggaagattctatagtttcaaaaacatgtattttctgttcaaatattttaaacatttcttaatatacgttgatgttgttcatgatataaaacgtatatacctcgtacctcgtataaaacgtatatataaataacctcgtacttcaatctttttatctgtagtgtaaaatacatgcatttgatctgtttgaattgacctagtgggcctaataaattcaaaaattgacttatttaagaatgtctgaatatttttgtagattttatattctctagatttcatgatgtctgacctaaacttacgtgcatagaaatcggtccacttagggatttggtcatttctgatgtctgatatttcctaggcctgttggccgatttgagtgattttttgaacatgttgtggcctgattttttagcaatgccgccgtaataggactgttgctgggcaggtggattttcattgtatcccgggtgtaccagtcgaactgtgtttttttctcaaagttcgcgcatcaccctgtggaatgttctagcgtttgtaaagcactgaaattgaaaccatacatagcctc

SEQ ID NO: 7250 - DNA, 1608 bp, Diabrotica virgifera
  SmartBlast Evalue=1E-127; Info=Glycoside hydrolases n=1 Tax= Aedes aegypti RepID=Q16WF5_AEDAE
tttatacaaaaatgaattttgttttatcaatattatattgtgggtatatacaaaatgaaggtgtccttactactccttcttgtggtttcaagtgtatattctacaccagattccttaccgtttcctgaaggatttttgtttggtgtatcaactgccgcatatcaagtagaaggaggctggaatcaagatggaaagggggaaaacatctgggatcatcagcttcacacaaactcgaatatcactattgatcattcaaatggtgatgttgcctgtgactcttacaatcgtattaaacgagatgtggacattttaaacaacttagatgtggatcactacagattttccatttcgtggtcacgaattttacccacaggtttggatgacaatatcaacgaagctggtgttaactattataaaaaattaatcaacgaacttaaaatagtaggtatccaacctatggtgactctcttgcattttgatcttccccagaaacttcaagatatgggagggttcctaaacgaatctatagtcgactggtttggaaactattcaagggttgcctatagactttttggagatgatgttaagttttggatcacgataaatgaacctctgacaatatgttattatggttatggtacaggagccgtcccaccttttattcagtcagaaggtattttggagtatcagtgtttacgcaaccttcttaaagctcatgctagagcttaccatgtctacgctgaagagtttagaaataaacaacaaggaaaactatctatgtcctttaatacaaacgcctttctacctggaagtgacaatcccaaagatatcgaagccacggagagagttcagcaatttaatcttggagtctatgctcacccaattttcgttggagactggccagaaatagtaaaaacccgagtagccatccgcagtaaattagaaggaagaaatgaatcccgtcttccagcattcacaccagaagaaattgactacatcaagggaactgccgattttcttggacttaatacttacaccgcccagttggtactcgatacaggcgaagaacctccgctaggagatcatcctacaaaagaacacgatgcgttgataactactttccaagatgataaatgggaagatacgaatgttcccacggtaaaggttgttccacaaagcataaaacctttgttaaagtggatcaaagaccaatacaacaaccctggagtattcattacagaaaatggatacccatccccagcaggagatatgtatttgaaagatgacagaagagtacactacattgagtcttatttgaggtatataagagaatcaatggaagaagatgaagtttctatgctgggatatacagtttggagtctgatggataattttgaatggatcttcggctacactgtgaagtatggtttatatgatgttgatttcaccagtccagatttaacaagggcggcaaaaccatcagctcaatactataaggaggttattttaactagatgtgctactatcgttggctgttttaatgattaacttgtgaatgatatacaataactatgttattattaatatgttaaataaaattttaatttt

SEQ ID NO: 7251 - DNA, 1607 bp, Diabrotica virgifera
  SmartBlast Evalue=1E-50; Info=Cabut n=1 Tax=Culex quinquefasciatus RepID=B0X952_CULQU
acctactctcatcatattatgactgcagaaaaaaattagcatccgccgatttagaatcgtggaacaaacaaaccaaatttagcaactgcagataagataggaaaataatgttaacagctacaactgtttaaatatttagagatcattattatattagaaacagaccatggaaacgtgataatatttgttatgatatgatgattgtcgatatttctttgctgcccactgtttatgcaaccaatttttttgaaaatatcgtgattgacaaatattgctacaattttatcttaatgaagttatcaaacgaaatatgaacaattatcacagcatattacaacatcccgaaaatatacaatttcctgtaaataaactccacaaaaaaatacgaagattatgcaaaaaattgacctccttgtcaaaattatgacagcttaggtgcaggttgaatcggtctcagtacaggcatgacattaactttttgggtgttcagcctttctttggtgtgtcttttgacgtgtttggccaaatggtctgatcgcatgaacttcctttggcaatgggagcacttgaacttcttttctccagtgtgggttcttttatgcctggagagttcgtcagacctggagaatctccttccacagtcagcccattggcatacaaacggtttttccccagtgtggatgcggttgtgggccttaaggtgagaggatttgaagtagtttttcccacaaccttcatatttgcattcgtagactcttcttctcgtcggtactgtagctggaggggtgtgggtgatgagaacgaactgcgtaggtagaactgtaccatctgctgagatgaatattgtgttcggagtggcgggagatatcagtttaggagctagaataggcagggatattttctgggtaactactggctccggcttggcttcttccttctcctccctcgagacatctttttcacagctttttactcgttccttgttctttcccatcttaaacttcaaactcttcagtaagttttcttcccctttttctttcagttgaggaattggcaaggatgtgcagataccagttttgttggctttcataataacagaaactgatctagttggtgtcggctgtggttttgcaacaggtgcaactggtggagagggtgggaaaaatatttgaactggagcatatgtttgttgaggaactacattaggtttggggaaaatcggtgaagttgatttaattaaaggaataggactaggagtgggtggaggataaaggggtggtgtttttgaaggcgatttaggtggggttattgttgggggtgggtaagggatttctagattgctgatccggtacctttttttcaaaggaatatcatgttcttcaggttctgaatctgacggttgtggtgtaagcagtccagatgtttgtatagttcttttctggcccaagaagtttctgagttgcagaatcgttgattgctgcatgtgttcgtcatcagaaatattctttaggggcggtgtagatggaggggaaatgatcccctgggacatcttctcatgaatgagcatagtcttgcacaaataaacactaaacaaattcacaataata

SEQ ID NO: 7252 - DNA, 1582 bp, Diabrotica virgifera
aaccaaatggatgttagtaagcaaaacctaacaacgagcaagacaactgaaattagacaatcaaagaattgaacaggtggattcgtacacttacttaggaacaatagttaattcaaggtgggatcaggcgaaggagacacgtttaagaatagaaaaaactaacgcgtcgttcactagcatgaagctaaatgtttacctctaacagcctcaccctgcctctcaaaatctgacttctcgaattttatgtattcccggttttgttatatggaatgaaggcgtggacaatgactaacgatcctgcaccgagtccgtgaccaacgaggaggtactacgccagatgggtaaggagagagagagagctaggaataactataaagaaaagaaagttggaatacttgggtcacgttatgagtatataatattcagtgtattgaagctagcccgaatactcacttgagatttggtgtctatctgcccatttgatttgttcgtctgagctaagcccctcttaattagagttttaaatttcttctcttccattttccccctatttcgtcagttcttttcttcaaaaatctcaatacccagaatataggtttcaattggcgctcaacgtggggctcttttctgaccaactaaacttgaactccgctacgctttttcgcatcgcgcacagcaagctctgccaattgcacagctcgccataggcggatcgaagccaaattcctggagggtaacagttaaccgttacagcacagtaaatatagagtacttcagctaattatccaagggaaaatagacagcaaaaagggtccagggtccagaaggattatcatctgccgaactattcagatctgccgtaaacaacgtcagaatagccatgttaattgccaacgatcggaacggataaggcacgtgaagaagaatgtgtctaatcaagggaagaaccatagacgtatatattaacatagactgagcctaccctccacgcttcctgacgacaagatctcttggccaggtttgaggtatctctttctagcacattgtatcgagaaactaacatcaaactaagtgagactataggcacggaaagtgaagactgtcgcagctttactatgcgtaagagtgaaacagatggtgtcgtcacttcgctcaacatgatactctgtctatactagagtgaaagacaattttcctattcaaaaatgcaaatgggatgaacttcttctcttcctccacgccagattagcagattactcagtaacgtaccctttataaattgattaggtgtgaatagtctaaacgtaacagaccactttaaggctgtagtataccagaagtttctcagacaagcaaaaatgtttaatttttcgaagagaggaagtaaatatatccgttttgtaagttatttgctgtattctagatcaaatcagagtactgattttttttaaatatgtacaactagaagttaaatattattaatttgggaatttgctgaaagcttaaagaagagtgagtcgaggagtttttaacaacaatctttagtgtgttataaagataaactctactcatcatcgaaacg

SEQ ID NO: 7253 - DNA, 1598 bp, Diabrotica virgifera
  SmartBlast Evalue=1E-125; Info="Tyrosine-protein phosphatase non-receptor type, putative n=1 Tax=Pediculus humanus corporis RepID=E0VSF1_PEDHC"
acaaggactccaaggcctcacccgtcagcttcgttgcatatagactgaccaccctatagataaacgtatactgttccttggtctgcacagcgctagcccggtccctccttatcctatacactattttggggatatctacaagcctcgtctgctcaaactccctaattgctatatcacatgcaatcaccactcctgtcctgcccgttcctgggctacagtgaaccaccacaggattcacttcaagctttggtggaccgttggtgttgccattagcagcagcggtcttatccaaagttgatgatttcatatagcttctagcttctataagaaaagctatcagagaattttcttccgatggtactcctttctctggccaacctaaataccaaaaatgggtaacctctctccaactgttagaaaccatattttttaactggagattggatattatgtatttatccttaacatcccgcttttttaaagtgacctggaaatctccgaagagtctgttacaatccaggacttctgaaggtggaaataatcaacacatttttccactccattttcgaagagatgtgtgatcattaggataactttggtttgctgttcccaaatcattctccaaaaatcatctactgtgttctgcagagggccttggcaagctatatagtacccttttgtgttcttcggacccgttacataattggcattgatgtagtcactggtaggatatccatcgatgggttgcaatagacccttgtctctggaagcgggatcacgttggcgtatctatttttggtctcgcatccatccggtagttcgcttattttagctgtgatttgaggtatttcagagaattctgctttgatatcatcagcgttcgtagcaaatttcgccaacgctgggaaattcaatggatgggtaacgccagctggatcatcgaaagctggatttccgtatgatctcttcgactgtctttcagctttccttctttggctattaaaactggaaacattatccacattgtaatggtccaagcttactggtctgcatctttgtttatagttgaaccgtttttgtctcttcctcataatatacaaaagtccagccaacaatatgagcgatacagctcccactgttgatatcacaatagctgcaatttttcccgtattatcatccctgccactgctttcaccatcaggagcaggggatgaatcagaaacgtagtcttcagtactggaagtaacaagaggagaagtggtcacagtggttccacccaaatcattagagttattcctaaatttgactgttggtgtataagacccagtcgtgatggaagttgaagatcttgtagttgaagttgtagttggactagtagtagaagcggttgaaaatagtgttgaactggtgctgcttgagatctctgttaaaacacttggaggcgtaggtgaactggtagttgaagcagtcgaaatggatttcgtactagcgcttgagatctctggcaacacagttgtagtagtctgcactgtaggcactgtaaacacacttttcacttttacataattttcagtagtcacttgcttcgaaaacagttg

SEQ ID NO: 7254 - DNA, 1599 bp, Diabrotica virgifera
  SmartBlast Evalue=2E-40; Info="Sugar transporter, putative n=1 Tax=Pediculus humanus corporis RepID=E0VNX8_PEDHC"
caaacacacaatgtcaacagtttattttggatttaactagtgtaatagctgggttaaaaaaaaatgtaggcccactaaattattcagttgcgcttctacgtcaaatctagacgatatgaatcaagaggaagaaattaataacattaatagtaagaatgaggccgccgtcgggatgagtgttcaggatgaggctccaaaaaagcctgatactttgtttttgtactttacagtgttatcaggtaccataccgttatttgtaggcggtacgtcaatggtatggatgtctccagtgctgccaactcttttatcaaatgacacagatctcaatcctttaaataaacctataacgactgtcgaaatatccctgctagcagcgttgccttgcctagtaggcctcataggatgtttgattattccaaaattcgccgatttcatcggaagaaaatattttttgttactcatgggcgcggggatgtttataacctacctaggaaaaggatttgcccatcacgttattcttttattaatatacaggtgtatattcacggtttttctaaatggtgtagctgtgatattacaggtgtatatagcggaggtttgtgaagatcacaatagaggtaaatttatgtacctgaaaagtatattttaccccctcggaaatctatatgcttatgcgataggcccgcacttcaattttagagatttcaacttgtggtgcgggctgccgattgtgccatttttaatatttttttgtctagctccagaaacacctgtatattatttatcaaaaaataaaggagaagattgcagaaaatcgttaatgaggctacggggcaataaacttacaagaaattgaaaaagattatattaaaattgacgaaacactaaaaatgacaaaaagcatcacatctgcaactctgctctctctctatttaaaactaaagaatcactggttgcagttaaattgactgtttttctctcagctttggggtatatttctggtgctacaagtatctcaacgttcctgggaccattgttaaatcaagcgggtaccagttattctgaaggtaccatgactgttgtggttggtattacacaagtctcgtctttatttttaacttcgttcgttgtagaaagaacgggaagaaggggactcttactaatttctaatttgggttgttgtttatgtatattaatattcggtttattttactacttaaaacacgaaaacttcggtattgttacccaggtacagtggttaccagttgcttgcattattgtatattttttgtatctatgccattggtttaggtcctctacccattactatcatcacagaactatttccctctgacttggcatctgcggcactctcttttgccataaccgtcatgagtgttgtaatattcataataactttcctttaccccattattgtggaaaaagctggcgtgcattggtgtatgtggatctacggcattagcgggattttggggggatggatagcttataaaattataccagaaacgaaggggaaaagtattattgatattcaggaaatgttaaaacagtattagtattaataaaactaaaaaatgt

SEQ ID NO: 7255 - DNA, 1607 bp, Diabrotica virgifera
  SmartBlast Evalue=0; Info=Putative enolase n=1 Tax=Lutzomyia longipalpis RepID=A8CWB5_LUTLO
cgacggggtgacaatcttccaaatttttgacactttgcttcagccggttgacagacgtctgggtggtgcgattttatatccagaaaatatcaaatagctgctcttcaaagatgcccatcaaaagcatcctcgctcgccaaatcttcgactctcgtggtaaccccaccgtcgaagtcgatctcgtcaccgaattgggattgttccgtgctgctgtaccatctggagccagtactggtatctacgaagctcttgaactccgtgacaatgtcaagggagaataccacgccaaaggtgtcaaaactgccatcaacaacatcaattccataatcgcacctgaactgatcaaatcaggcctagaagttaccgcacaaacagacgtcgacaatttcatgttgaaactcgatggaaccgaaaacaaatccaaattgggggccaacgctatcttgggtgtgtcactagccgttgccaaagccggagccgccaagaagggagtaccattgtacagacatttggctgatttgtctggaaacaaagacatcattttgcccgttcctgccttcaacgtcatcaatggtggatctcacgctggtaacaagctagctatgcaggaattcatgatccttccaactggagctgccaacttcacagaagccatgcgcatgggaagcgaagtctaccatcacctcaagaaagtcatcaaggatagattcggcttggacgctactgctgtaggtgatgaaggtggttttgctcccaacatcctcaacaacaaagacggtctcgaactcatcaaggttgctatcgcaaatgctggatacacaggcaagatcgaaattggtatggatgttgctgcatctgaattctacaaagaaggcaaatacgacttagacttcaaaaaccccaactccgacaaaagcaaatggatcactcctgaccaacttcttgacctctaccaagaattcatcaaagaataccccatcgtttccattgaagatcccttcgaccaagatgactggccagcatggtccaaaatcactgctgcaacctccatccaaattgtcggtgacgatttaacagtcacaaacccaaaacgtatccaaaccgcagtagagaagaaagcttgtaactgcttgcttttgaaagtcaaccaaattggtaccgtgacagagtccatccaagcccacaatctggccaaggccaacggttggggcaccatggtttcccacaggtctggtgaaaccgaagacactttcatcgccgatcttgtcgtaggtctttccactggtcaaatcaagactggagctccttgcagatcagaacgtttggctaaatacaaccaaattctccgtatcgaagaagagttaggatccgcagctaaatatgctggaaaatcattccgtaaacctcagtaagtgacaataaggatatgtaaaaaaaaaactcgtagtttgagggtattgtcaagagaatgttgttttctctctaatatgttaagagcaaagtaaacgctatgttgtcaaaactgtactattgtcatcaaatagttgtactgtatgagatatttatctttttgtggttattataaatctaaaatatattgttattta

SEQ ID NO: 7256 - DNA, 1605 bp, Diabrotica virgifera
  SmartBlast Evalue=1E-161; Info=Cullin-associated NEDD8- dissociated protein 1 n=2 Tax=Aculeata RepID=E2BV20_9HYME
gtcaatttcaaatttgaagctagttatatttcagtcattttccgctatatcagaagaagtcaaatcagctgccagttatgctcttggtagcatatgtattggtaacttaccgcaatatttacccttcattttaaaagaaagtcaggaacaaccaaggaggcagtacttgcttttgcattcgttaaaagaggtaatcacctgtttgtcacaaacaccagatggaatacagcagttgcttccattcgtcaccccaatttggcagcagttatacaaacactgtgagtgtgctgaagaaggaacaagaaatgtagtggcagaatgtctaggaaaattaacattaatagatccgacaaatgtcttaccaaaattgaaacgttcactaaattcaccatcacctctaactaggactacagtagtgacagctgttaaatttaccatttctgatcagcctgcatcaattgatccattactgagacaatgcattggcgagttcttaaacactttacaagatccagacttaaacgtaagaagagttgctttggtagcattcaatacagcagcacataataaaccgtcgcttattagagatttgctagacaccacattaccacaactatatggagaaactataataaagagagacttgattagagaagtggaaatgggacctttcaaacacacagtagatgatggtctggacattagaaaagcagcatacgaatgcatgtacacattgctagactcctgcctcgacaaagttgatatatttgaattcatcaatcacgtagaaaccggattaaaagatcattatgatattaaaatgttaacataccttatggtagctagactgtcacagatctgtccaggagcagtatttcagatgttggataaattagttgaaccacttagagctacactaaccatgaaagtaaaagctaattcagtcaaacaagaatatgagaaacaagacgaactgaaaaaatccgctatgcgggctgtagcagctcttttgagcataccagatgcagataaaaatccacatctgattgaatttgtaagccaaatcaagaattcccctgacttggtaccaatatttgaggcagttaagaaagactcctcgacttctcacaatgactgcctcttgatggatcaaagttaaatttaattttttctccttgtgaatttaaagttgattaaattgtaatttttaagttactcgttaaattatttttatgtatttaaattttcaatttaatttcattgcttatttaaaatgtgaattcatttttttttattaatttgctacaacgtgaaaaggtaataagtttgaacgatggtttggcgaaatagtaataatactactttttgtaagtttgtaatgctacaacacatgctgttgaaataaaaacacttttttcttatttctacataaatcttactaaattatcatataagagacggttaaaacaaaaacatttgtgcaaataggccgagatatataatataacggtaaataattttcccataaagagagactgatatttccgatttgaattcttccaaattgatcctaattatccaaattttgatttatccccttttcac

SEQ ID NO: 7257 - DNA, 1604 bp, Diabrotica virgifera
  SmartBlast Evalue=1E-144; Info=Aromatic-L-amino-acid decarboxylase n=1 Tax=Harpegnathos saltator RepID=E2BCJ1_9HYME
acagaattggaaatcatcgtcttggattggtttggcaaagctattggtcttccagacgattttattacttcagctaaaaacagtaaaggtggaggagctttcgaaaccagtgctagtgagtgtgtcctagtgtgcatgctggcagcaagaaaccaagccatccagtatctcaaaagagacagtccaaacagcattcacgatagcgagtttttgccaaagttgatctgttatgcttcaaaagatgctcattcttgcgtcgaaaaagctgcgaagatactgctggtaaagattagaacactggaccctgacgaaaatggtagtttgagaggcgagaccgtccgtgcagccatggaagaagatatagctaaaggtctttttcctttcctcgttactgctacccttggtactacagggagcgcttcttttgataatttagaagagattggcccggtttgtaaattacagccatgtacatggcttcatgttgatgctgcttatgctggtagcggttttattttaccagaactgaaatatctgctaaagggggtcgaatatatagactcttttaatactaacccaaacaaatggttattaaccaactttgactgttcgtgtttatgggttagatgtaagcacaaactcactagtgctttcgtaatagatcctgtatatctgcaacacgccaattcagacgaagccattgattatagacactggggtattccacttagtagaagattccgatctttaaagttgtggttcgttctaagaaactacggactttctggtcttcagaattacatgaggaaccacatcaaactggcaaaatatttcgaatctttagttagaaacaactcacggttcgaggtagtcaacgatgttcgcctaggtctagtttgcttcagactaagaggcccagacagcgaaaacgtgaaactactaacaaacataaacgcttctggagaactcttcatggttcctagtattatcaaaggcaaatacagcattcgattttgtgtagtagctgaacatgctacacaagatgacatggacactgcctggaaaatcattcaaaaatacagtcaacaagtatcccccagaccacgccttacaaggcaaaagtccagcagactttcctttacaaggagtgtatccaaagagatgtaccaaaggtccaaaagcaagtccaacttgctggacggtgctactcctatcttggttgttgattctgatgaagatgaggaaggtaataataacacagatgatattctcgatgccttgacgagtgtgagtgtttatgacgacgatgttttcactaaagagaacgaagaggaaaagagaatgccacctcagagtccaccaaactatttgtaaccgaatataataattattgatgcattggtcctttttgatgatgatttatcagaaataaatgccagagttgttattgatactagtgagctggagtcttacagtatcaaaattttatatttatttgtatattttttaaatactataaagaacagtattattacgaattaagttattttaaattaatttttagtatttaatttaattgttacaataaattatttcttgcatgt

SEQ ID NO: 7258 - DNA, 1604 bp, Diabrotica virgifera
  SmartBlast Evalue=6E-87; Info=Protein-associating with the carboxyl-terminal domain of ezrin n=1 Tax=Camponotus floridanus RepID=E2AK74_9HYME
atacagacatccctgcattgtaaaatatgtatcttcttggcataaagacttggcaaagtattatctggccgttgaagaaataacccccttgtctcaggaaattgcaaaactaagtggtcttgaaatttcagttggattacattccattctgaaagcacttaattttttacacagtcatgccgaagtatctcacaataatttgtgcatatcctcaatatatgtatcaaaagaaggaaattggaaattggctggaatggaatttttatgcaaatacaaagatttaactgtggattatttaaacaaatgtaagtccaataggtacagtaaatcagttgacccaaatgaggaaaaactgttccagatgagttcgactaggaaagattttattgatatctatgcatttggagtgttagcatctgatctattaaaaacttttaaggatgaaagtgatatggactcattggaaagctttattggattttgtaaaaatgaattactgaatacagacttctcgaagaggccgacatttaaatcaatattagaacacgaatttttcaataacgattttatcacaataaattcatttctcttagaactacccgttaaaaatgataatgaaaaattaaatttctttcaaaatctgaaacacaggttgtttaaatttgaggaagaactagttgcatcacagctgagcggattgttgttgtcacggttggttttattaaataaaacagctcaaaccagttttcttccctttttgctaacacctcaaacaggtgatgaaaatgaagaaacgtcaacattgttttctgaaaacacatttaagaagtatctgtgtcctaaattgttggagatttttaaggttcgagatgttgaaattcgtttattattgttatcgttttttccaaaatatatgcacacttttaatcatgaagaccttcagaatcgaattttaccagagctgctagttggaattaaggataccaatgaccatctagtctccgtcacactgacaacattagcgttgcttgtaccagttttaggttccgaaactgtagtcggaggcaaaagggcgaaactatttaatgactttcgaccaacccattcagttagaagatcatcgaaaaaaagtaaacccggaaatctttcaaaactcatccacttcagcccagataccccaagaggccgatcagataagttttagtggtctagaaaatgaactaaatattgttagtgaattgcccgagagacccagacctgatggtgaagaaggtgaaacatcaaccgaagaagtggaaccttcggcagacgaggatgtagataattgggacgactgggacataaatgaaactcgccaaacgataactacagatacatcaacgtatagagacaatcgtgtcatattaattgatgaatcaagcacgaatatagcaacatctcagcataaagtaaaaattccagatatttccgaactagatataaaaactcaatctgtggttaacgagcagaatgatataaatttctttcaggatatggagccagtgatagaaagttgtaataagtttattgtagatgagagtaaggatgatattgtggttacaaat

SEQ ID NO: 7259 - DNA, 1600 bp, Diabrotica virgifera
  SmartBlast Evalue=1E-158; Info=Kynurenine aminotransferase n=2 Tax=Aedes aegypti RepID=Q17CS8_AEDAE
aaattattatactgtgatataatacagattatgttttgaattacaaggttttacttttatattttatgtgaagatcacaataaggttatgttttgtcatcattttcatttatctgctactcgtaacacgatcatatttttgtaacaaattgcagatgttcaaagtagtctccagttcaataaaacgtttctacaaatctccgaattcaattttaaaaatgagtgttagatcagcatcagcatcttgtgataaaagtaattctattgatcaaaagtttggactgcccaaaagatatgcaggaagcaaagaaagtgtctggactgaatatatacaaatggcaatcgatcttaaacctctcaacctgggacagggatttccagattttcctgccccacaattcattatggatgctttagcaacagtttccaataaatcagattatatgttgcatcaatacaccagaggattcggacacccaagattagtgaaggctttagcaaagttctattctaaattaataggtagagaaattaatgaaaaaactgaagttattaccactataggagcatacgaagcactaaatgctgctattatgggacatactgaagttggtgacgaagttattatcatagaacctttttatgattgttatgaacctatggttaagtatgctggtggggtcgctagatatattccgttaagattgaatcaacccgccgatgggagattacctagttcagcggattttaccctggataaaaaggaattggagggattatttaacgaaaaaacgaaaattattataatcaacacaccgaacaatcctctaggcaaagtcttcactgaagaagagttgactcatattgccgatctgtgtaaaaaatggaatgtcttgtgtatctctgacgaagtgtatgaatggatagtgtacaaaccgaataaacatgtgcgaatagcaagcttgcctggaatgtgggaaagaacaataactattggctctgctggtaagagctttagtgtaactgggtggaagttgggttgggcttattgtcccgcaaatttaatgaaaaatctgcaaattattcatcaaaatagtgtgtatactggcgtaactccaatacaggaggcttgtgccataggatttgaattagaaatggaacgtttcggaactgatgaatgtttcttcatgcagctacccaaagaaattgaatgtaaaagagactacatggcaaaattcttgcaggatgcaggaatgaaacctgttattccagaaggtggatattttatgttagctgattggacgccattagaatcaaaaattgacatgaattcagaaagtgatccacaaaaggactatcgagccaccaagtggatgacaaagaacattggtttacagggaattccaccatcagcgttttatggaccagatcataaaaatcttggtgaacagtttattagatattgtttcttaaagaaagacgaaaatttacagaaagcagccgatattctgaagaaatggaaagatggtttttaacaaaaaaatctgttgtaatctaaaaagatttgtgataagatgaaatttatgtaaatgtataataaa

SEQ ID NO: 7260 - DNA, 1580 bp, Diabrotica virgifera
  misc_feature (613)..(613): n is a, c, g, or t
  SmartBlast Evalue=6E-52; Info=CG3402 n=12 Tax=Diptera RepID= Q9W0P4_DROME
ctgaatttatcgattacaaatataataaaaaaacagtattttaagaatatcacatattcatattagaattattcaagatgtgtgcaaaaatggcatttcaacaccaagccggtacggctatggagtgtttaagtattccaataactcttcataaagaggttgatggcgatactctccgttgtggatttaaaatcggaggaggaatagaccaagatttccataaaagtcctcaaggatatacagataatggcatttatgtaacagaagtacatgatcatagtccagcgtctaaggcaggacttcggattcatgataaaatactacaatgcaatggttatgacttcacgatggtgactcataaaaaagctgtgagttatatcaagaaacatcccgttctaaaccttcttgtggcaagaaaaggtgtcacatcaacataaaacaattgttatttaaatttgtatgtattatattatagttgaatgtatgtgtgtataaaggtcgattctcactatacgttccgtttactttccatatccgtggctttccgtttacgtacaatattattaaatacaaatcacatagtatatgcccactttccgttccttttctaccnttcccgaagcctttggtaacaagtcgtgatgtgacaggtatgctatagatagtgtgaatatttttaaccctcgcggtttagttgaagttgttgagacaaaatatgaacgatgaaaaattgatagagctttgagaataagattcaggtcgagagcatttatactgatttgtcaaatgccttttacagggttaatcataacctgttggttcacaaacttcttgcatccggcattgttaattggattaaaagttttttatgggatgtacacaagttcgttttaacaattatatttcaaaataattccattgttgttctggtgtcccacaagggtctcattgtagtcccgtgtttttaacttgttttgtagagatatcttgcaagatgatgtaaataatatatgtttatggtcgaaacataatggtttaagctgaaatccaactaaatgttcttgtatttcatttggtcttataaatattttaatcttatctaatagatatgtttttaatgatgtactcttggattcagttactgagattagagattttggtgtattattggattgtgcattgacatttagaagccattttcttaaaattaagaaaacaggatgtcgtaattttggttttatttatcgtaacagtcatgatctctcatctacagtattagaattattgtacggctctctggtacactcaggtcttgaatactgctgtgttgtttggcctccatttcatcaggttggcaacttttgaaattgacacactgtagaactctcaacacactgcactttttatattacttttcataagactgattaggctcgtcattttcccttgccgagaatgctcagcttttgcaatcacctgttactgtatccattctgtccaaacattaatgttttcaaaaggcaacttagaagtctatcaaaaggcaacttagaagtttaatgatctaaatatgtgatatc

SEQ ID NO: 7261 - DNA, 1601 bp, Diabrotica virgifera
  SmartBlast Evalue=9E-45; Info="CG7702, isoform A n=5 Tax= melanogaster subgroup RepID=Q9VE49_DROME"
gtacataagtaggtatttattaatatatacaaaaaaatccatacaaaatatcatataatagcttatactaacaattctatgcgattatttggtaaatgatttgactacattactacgacgtttaacaaaaaaatcacaaattaatcatatgtgctgtgtttgcgttgtttgcactgggaagtagcttacttgagcggaaaatgggtagtttttaaacgcgattaacttcctgaatctcaatacagctacaacagctccaagtaccgtcacaactagcaagattgagcttagtattatcatgatgagtctgattttgttaaaatgttgggttattttggagctatgtgattgtcgatcctggttacatatatcggccgttaatgaataaattctttcactaccatcgttgtttcctacgtctatgcacataggactgtttcgatttctggttattgatgttggcagagcttgcgatatgttgtacaaactgcaactgcactccaaaggattgaggtttactttgaatatctttagttttgaccacttcgtcaagctcggatccaaatcaactagggaattgttgcttatatctaactcatcgagaatttgagtttccccgaaagcttccctgtcgataaattccaattgttgattgtcacgcaaatgtagttttttcagtcgtcttaaagttgcgaatgtgttcggtccgacaaattttagtcgtggcaagttatttaagtacaattcggataaattcattcccaggaaactttcatcggtcagctggaatatgtagttgttgcttaaattaaggatctgcaggtttttactgatgtaactcaatggtttcggaacaaaatcaaaatgattggaagataagtccaggtcttgtaagctgtgtacgtttctcatcacattttcttctattaccgtcaattcattgtctgctaagtttagaacctttatattcgttaaagatcctaaagcaatttgtgtcgatggatccaaaacgctgaaatcgttgccttgtaagtagaggtcttctagtaaaggcatatgttcgaaaaacttggtatttagactgtggatctgattgtacgctaaattcaaagtttttactccgataggacgatattgtctatcactgtagggacctttgaagacctctccggagattgcttcggtggttaacaaattgtgactcagatctatatattcgacgttttgaatcaaaaagaacattctatcttccaaatgcttgatacggcaatgatcgaaaacaaatttggctgtttgattcgtggccggaagttgtcctaaatttgtgatgttgttataactaaaagtggcgaccagcgactggttatggggaggccattccgccaagatgtgctcaaagttttgattggtgcagtccagaaggaactcgtccttactgttgcatttgcatcgcgtgcaaatgttggacgaattttggttagtttctccggctgttgcgaagtgtatgatgtacagcaaaattattaaccacttttccatcttttttcacttgtctggattcatccgacgtacatactaccacaggtaaatctaattaatac

SEQ ID NO: 7262 - DNA, 1601 bp, Diabrotica virgifera
  SmartBlast Evalue=1E-161; Info=Hippocampus abundant transcript 1 protein n=1 Tax=Harpegnathos saltator RepID=E2BJX4_9HYME
gccacgctctgacgtcagcaatcctgaacgacgcaagcccacctctgaagtaaaaaaatctttattaacaaatgagggtcgcactgatctaaaacgttccagagacctttgtttatcacccgcacacgcttatttacaattattcaaaatatatgtcgatctgagatctctgcgttttagataagtgtgattcctgcttaaattgtcattttatttctgttttctaaggtatacacatcctaacgtttacagtattgctgcgtctatgcttctgctgggaataagcggactgagggtgccagcaactttttgaccacgttcgatttcgtagtgtgtatccagtgggataccagaatcaacatgagatttactagtaatgaatgaagctacgaatagggcgcatatgactaggaaagctccgaagacgaaaggtggaccaggcacaagctgagaatatgtttcaaatgatgaagtagaatgcgtagcatctgcgttattattatttccattaagatcaacatggaacatagaaaaaactactccaaacatggcgggacccaatccattgcaaagacccctcataccagtaaccataccttgaacaactccctggcgatcgggagtactaagaactgacacaaacgcagaaatggcaggataagtaatggaactcattgaagctaatataccggcaccccacatcatccacgtcgtggtgccgaaaccataccataacagttggagcatttcaaatagaagacccaacatgatggtatgttttgaaccaagattctttattaaaatacctaaactaagttgggctatgacagccatcaggcccactaacccaacgaacacagctaccatgggatcactccaacccatcactaatttgagatacataaaaatacaactgtattgtcctgcttcgggtaaatatgacaagaatacggcaatacacagcagtagaatggtaggatcttgtccgacgtttcgaagtgatgcaaaagggtcagcctgttcccaactgatgggtgatacacggactttctctggtaaactttctggaactgcgaccaggatgaaaaatacatccaatatcgctacagctgtggcgagagcgactactagtgatactgaccacctttccattaagtacgctcctagcgccggtgaaattaccatgctggcagcaaacgtaccactgaccaacccataagccaaggacctctccctctcgtccgtaacatccgcaacgtaagcgaacactacactaaaagtcacagcgaacacaccggaaatactgaccatggcaaagaaccagaacgtgttaatagtcattaagggtataggaatacacgtgaagaacacggtgatgagcaaaaacaacttcctgccgcaaacgtccgacaacgctccgaccaagggcgcgctcagaaaggagaggatccccttgatgcccattatgaggccgttcatcaggaatgtgtggtctggaaatgtgtcgtttaatactgatatgaggggcatggttaggagaccccacgcgaaaaactccaggaaaataaccacagggcatggtataggctcggctgaccgat

SEQ ID NO: 7263 - DNA, 1597 bp, Diabrotica virgifera
  SmartBlast Evalue=1E-162; Info="Calcium uptake protein 1 homolog, mitochondrial n=5 Tax=melanogaster subgroup RepID= MICU1_DROME"
cgagtattgacgacattgtgacattttcaatatagtttccatttgaatgtcgaaacttaaataaataataaaatggaacggtttttaaaatattagagaaaaataatacttgctatagttaacggtataattttgtaatatgctaaaatagttgtcaccaagttttccgcaactaataagtgccctttctatttttaagttttccaaaaaatcataaataatgagctatctaaaattactggctcgttttggttctgctggatatcggtcgtgtctacaaacctatcgtaatgctcctaatacaattgctattttacatatacaagattttaaatacgaccagaaacgatattataaagattttggccacaaacgggaaaaagaacctacaataacaaaaatttattacacattcttatttactatgtgtttaattcctatgatagattgggtctggttgaaaaagttattatcagttaaagcagaaagtgagaatattagagaaggaattcacattccaagggaggaactggatgattctgctgaggatgatactaagaagaaaaagcatagaagggaaaaaataggatttagagatagaaagattatcgaatacgaaaacagaatgcgagcttattccacaccagacaagatttttagatactttgcaaccgttaagctcctgtaccacgatgtaacagaagtattcatgacacccgacgattttctgagagctataactcccggaatgaaacaaccagatggactgggtctagatcagtaccgaagatacgatcccaagacggtgcatcaaaaattggaacttacgctagatgaagacagcattttctacaagcttggaagttccggattaataacgttttcggattacatttttcttcttactgtgttatctacatctcgtcgtcacttcgaaattgcttttcgcatgtttgacctcaacggagatggtgatgtggattgtgaagagtttgaaaaagttgcgacgctcatcagacaacagaccagcattggatccagacatcgggaccatgcaaatacaggcaacactttcaagggtgttaactccgctttaacgacatatttctttggaccaactttaaaacaaaaattaaccatcgaaaagtttttggaatttcaagaaaaacttcagaaagaaattctaagcttggagtttcaaagaaaaactccagacgaaaatggaaatatatctgaagccgattttaccgaactgcttctggcctatgctggttatccccaaaagaagaaagctaggatgctaaaacgagtcaaaaagactttcagggaccatggacagggaatatctagacaagactatttaaatttcttccattttttaaataatataaacgacgtcgatacagctttgacgttctaccatatagcgggtgcctctatcgatcaacaaaccttaaaacatgttgccaaaacagttgctcatgttgatcttagtgatcatgttattcatgttgtgtttaccattttcgacgaaaaccaggacggtcaactgagtaacaaggaatttatcgctgttatgaagaatagattactaaga

SEQ ID NO: 7264 - DNA, 1600 bp, Diabrotica virgifera
ttttacctaacctaacataaccttaaaattaatgttgtcaatgtaaagtgtcttttgtggttcagttgtatatatttactgtaatatttttttaaatacagttaaccaaaaagaagtcttttgacgttctaggtggtccttgcaatccaacataatatgaaaaaaaggatacttatataaaatttaccatagacagatcgtttttgcacagagatcgtattacgtcttaatggataatctgaaaccgaatattttctatgaaacctaacactttcgaaccctaagaaatgtaacttatttacggccagtctgccaatgacattgttaatctgttttctatttttttatattttagtttcgattttagcgcgtaggttatttataatatacaaatggttacagctagtccttataaattcaggatataggataggaatcatatcagactgccttttgaattgtaattttcattgatgtcattttgaacgaacaaattacaaattaaaataaaaaagataagtaaccgactggggagagtaactcaagaacgtacctacaatatttgtaaagaaatacctcgtttgttagattgtagatgtctgtaattgtaggctttttatggggtaataagtaagggtagtatctgcaaagacggggcagttatgtacctttaaattgctagagcatcagaatctgaataaaaaaactattgttgacattacggtaagcaatgtagaagaagagtagagttaatattcatctttctagtagtttatctactataactagactataattaagattatccgtgttggtcacccatagttcacccattttcgtgatagtatagtggctataattgcagcaggttcatcatcatacatcacatataactctcagtggaataaagagcatcttacgatatttcaattattgtaaaaggtattgattcagaggagttgtctactctcaaaattgggtatggcgtattaagaagaagattgatggctatgctgctaatcttactaaccgatcgtatttgccagtttttccattcccttatgtttcatagtatcctttttggataatttaacagattttaagctagatgctagttctgcaagtacactaaccctgacttgtttttgaggaaaacggaatttgcaatgaattactcattcatttatttatgtaagataatattctcgattctttaaagcgacagccgtaaggcaaggtcttcctcgaggttcctgtatagccggaatcatatctgtcatcctctgaatacctccatgctttaaatttgacttgcatcgtgaaatctgggttccgagcctaggatctagagcacccacgggcaaagtttccttccaaagttgaagaagacgctattctcaacagtggatttaattgaagtcatggaaatcatgaaacttgtagcgagtatatctttcagattagaatcggttctaaacaaccgagagttcttcttgtagtgcctatccgtttcagatgttggcgaccatcattttaatctgtacttttcacatttctgctctgaaaagatttgcggttgttgtgttgaaccacgtacgta

SEQ ID NO: 7265 - DNA, 1594 bp, Diabrotica virgifera
tatacttgcagatgtataagttatggtacaaatgatatgtatatagctaaatatgaatgaattaatccaaaactgatatatttccaatcaattattttcacatcgcatcaatagtttaaacattctaaaatggctgggtgcttgccttgtttcatcattccactacttctatttattttccaccgattcatccaaccaatactactaaaattctggaacccatgggagaaatctccatcaaaaaggatggagaaaaagaaaattgtacctttagctgcgagtgtgcttggatgaagaaaaagccagttgaagataaagacaaagaggcagtgactacacctgaagataaaattaaagcatcataaactgtgaatttgagtttctagtgctcatcctaaccattgactatacttgcaatttcattgtttgttttaatgtatttatgataagtaagtaattctatgatgtgagtatatcaacaatatttgtattcgtatctggtacaatttataaatgatatgacaatgtatcagttttggattaattcattcatatttagctatatacttgcagatgtatcagttatggtacaaatgatatgtatcagtcttggattaattctttcatatttagctattaacttgcagtattttaaaacggaaaacacatcgtcgacctaatctgtaaactgcgtaactctatttatccaaattaggaggcacaaaaaagtatctctctaaatatgactaatgcgaaaactacgtatctcccaattcaaaagatttgatggtaaaacggaatattttatagatacacacattgctaaaatttgtatattgtttaataagtatttaatatttcttaccaccaactttttcttgaaaatatcactttctgaacagtgatatgtcagtcatgtggaatgacaaactagggagttatatatttttcgtaataaatttggcggcaagggagatacaatgtacacaaagaggtcgctatttactcatctggtaaaaatatgcacctgcatccttttttaaatgataagtagtgagtcaaacagatgtcagtaataactcattttcaggaaattatggagttacgcagtttacagattaggatttacatgtcaaaaatcattagtctactagactcatagatataatacctagactgcatgacaatcttaagctgttcacctagtgcaactgagaaaaacgtggtaagcagggtatgcatctttttgtaatcagctgcaatgggaaagtcacctggtccaaaaaccccgtcgattagagatacataccctacttacaatatttttctgtcacactcggaaaacagttttactctagggccagatgagcgacagttgcagtgctgcaaatgaagctcaaacaatgggtcccactgtgagtgtagtcgatggccaaactgagctgtaaatatcactgcagcaacatagggtggaacccatttttcgagcttcatttgcagcgctgtaattgtcgttcgtctggctgtaggctttaattgtgcaatgcatagtctagttattataggtgtatggctagactaagattcatcaaga

SEQ ID NO: 7266 - DNA, 1601 bp, Diabrotica virgifera
  SmartBlast Evalue=6E-43; Info=Regulator of microtubule dynamics protein 3 n=1 Tax=Camponotus floridanus RepID=E2AMC9_9HYME
ttttgaatatgctaaagtagcttgcctgttgtatgatttagtattttttattaagaatgaagaaaccgatgtggggatattttttgggagattcaatatacaatgtttacatattttggtgactttttcacaatgtataatatatcccctttgagtatattgatgtttgtatcacaaaaactctaagataacgagctctttaatagaagaaagttcaatgtaacctccattaaactctcgatatataagctaactttttcgaacacataaggaaaccataatgtataacattataaaggaatgcgatataaaaagacagtacaccacagttaaaacatagtcaatgagttcaacatattataaaactacctatagctattgtatttttccaaaagaacctgtatttcagaatctgctgcttcatccggtttaccatcattattactattttggctttatccaaccactcaacagcctctttatattccccactttgtataagacatttggctatcatcaatttgtttgatttccaatcataatctacaattttctcagcttccaggaagttttgaagggcgtcaggataggtagagcttggagggtccccaaaaaaggttgatgccaccttccgttcataccatttcaatccagctgcttcataattgaagtggcccatcaaatggtgtagagttccatccaagggatgtatttccaaagctctcaacacatgttttttgaacagagctccatccgcaagtttttcagaaatggagccgaagctacaccgatcgccaactagaatagcaaaccacttgtgggcctctgagctgtcttcttttaaccgtagcgatgcttcacaagcgtcaattccattataaacattttccttaatcacttctttgtcatcattaaaatctgctatcttcttatgggctttcccaatacgccagagcaattcggagttttcagggtgttctatacataaatctcttaatttaattaacgcctcgtctacttctttgaaaacaccactattcaatttaacatctatgatattcagaatttcttccatattgatagagttattgtcattttcgttgtcactgagatcataaaattctagatcagaactgtccagattggcagagcttaaatattcatccccatccccagtagatgttgatactatggagcgggcctttcttactttacttcttctggatttattggatttttcgctagttttagtgagcaaatgatccagttcctttctaacttgggacagttcttggtctaaacgagccaaatcctttgccatggcgtggcgtaccttgtcttgtctgtaatgctcgacgagatacatacttgcagcactaactacccccagaaaagcagctctctcggatttatttttgtttgcgagaatgaccccatagcctagtaatagctttggtacaattttcatatcacaatttctattataactggtagatttcacttgtttataaatatatcacaattactctgcacgcacagcatcaaacattagaatgactatgaccccgttgccccgtttgtttattcgccactcgccagtt

SEQ ID NO: 7267 - DNA, 1584 bp, Diabrotica virgifera
tttccgtcttttccgttatttttctggttattaaaccactcatcactgtatattacataaaactgttttaagtttctgattattgaccccattctttttgtagtatcattactcctgacagctatttctgtgttcaaaagttaaatctgttctacgtttcgctctgtatagaaaataaattacctgtactacagtcaacattcaacgcaactgatatgtcaactctaagctgcccaaaaataggcatacgtagtttgaactaaatcttatccggaactaaacataaaataaacgaaaaagaaaacagtcatctttatgtggttgataaagcacacgtatattacacgtaatgcaggaccctaaaaataaaaatatgtatctacttttatttaaatataaagattgaaattaagatcactgacactgctaagctcggccttaaatcataaaatgtataaagataatttatagatttggttcctgaaaattgctcaggtagattcttcgcaatttcttatggctagaagtcgccccatgtatcaacgtacaagccgtatacattattattcaattatttgtttcaagtttgcaactgtttgtgctgaactatatttcatattgtgtaccgttgtaccaattattaacattatcatgcctactaaagtccaatccttctattttttgatttgcttgttattaataattgtattaatttcattattattcgtacatgcaccactgattataattttcctttccttttattaataactgaatcaagttcaatattattcgtatatttatcgctgaataaattttggtgtgcctttattaaggtttattcatttcgttgctaatgagctttattgataattatgtgtatgtattgagatatttttcacctttgtatcacgtttataatattaacaacatattgcttgtattaaggttttatgccattagttcatataacaatcaactagcaatagaattaataaagcctattgttatttatgtgttttgtagcttctcgccagaatctattcattcaataagttttggattcgttcagatcatatataatatatatatcattattttaattttgtagatatcgatgatttagaattaaatgtatacataatacgtgatattttcttcttttatttcacttgcaaaatagattttactacagtccacttgagcattcctttgtatattttcataatatacatactcaattctaaggggagaaaccagcgtgttctatacaacgtatatatccattcttctgatgtcctcatatgttatgattagaccatcgtatgtacagacagcaacataatggatatactttcgtgcctcacaataagacagtttcggcagaacttactgttggcaattggctgcagtatgttgttgttgctgtagaatgccagtatcttggtcgctgagcaacggctgcattagttgtagtgttacagaactcgtcctggccgtaagagtaagaaaccaacagaaaatgagaaacagaacccaaggacaagatcaactgttgcaaaactaacgcatatagcattttta

SEQ ID NO: 7268 - DNA, 1598 bp, Diabrotica virgifera
  SmartBlast Evalue=1E-142; Info=Juvenile hormone epoxide hydrolase-like protein 3 n=2 Tax=Tribolium castaneum RepID= D0W013_TRICA
agcaacaaaacatactttatatacaaaaaaacaaaacaaaatacattgttgcaaaattagttcttcaattttaagattttttcgatgccatcatagaggtcgttagcgaatacttcaggtttctcgaatgcagaaaaatgtccaccatctatgtcagcaaagtgaacacaatttacaaaaatatcgttgatagcaccatctggtgagtagaagtcgtatttgtatcttgcgacggccgtgggtatctcaatagggtgctggaggatagctttacgattagttgctttgttaaaggtttctgcatataatctaaaagaagtagtggcagcactattaagccaatagaacattatgttatccaacaaagaatcgtaggtgtaactctccgcaaggccaccttcttccagtaaggctttttgatggtttgtggcgctcacaaatttttctaaaatatatgctgccaaaccaattggagactcattcatagcaacacctaatgtatcgggcttagtggcctgttcgtgaagatatccagtttcccttaatgttcgttcgaaaccctgcttcattggtaacactttattcctgtgttctggacgaacataccaactagacaaagatgggaacagactggccaagaacagttttatataatggcgagcacttgtaaccaccgggaaattgcaatggaaaccttcgatcacttccggatagagtacgaccatgttgcgaagaatgatggatccaaaatcaccgccttgtacatagaatttttggaatcctaaatgatgcatcatgttcttaaataccaaggcaatgttgtccgggctgagacctggtctcactgctggtttggaaaaaccaaaacctggaatatgtggagctataacttcaaaaacaaagtttcttcccttttgtggtgttgttaacaacggaaataattcatagaactcccttacggatcccggccacccatgtaaaattaaaagaggcagcactttgatatcagacgaaactttgggtttaatgtgaatgtagtgcaagtctaagccctggatattgactgtgaactgtggatattggttcaagtacttctccctttctctccagttatatttcgtcctccaatagtcgactatggtcttgactagattggtgttgatgccatattcgtggacgattccttcgagaggaggagtgaaaggtcggtggtggtcaaggcggtattgaagatctttgagtacctcatctgatacgctaatagtaaaaggtttaacttccggtttgacagatccaggagccccaggaccccaccatgtctcttctagttttttaggtagaggaggatggcccatgagccgtttaatcttcttgtatacgaaatacgcaatcacagaaaataacaataagagaaacatatcgattgaaaaattgccggcacaacactgatgtcaaactaaatttttcagttacgaatgtttgttacgatccaccggtattcatattcttaataatggcggtttaaataatattcaaggatattaataattggtagataataatgaacagggtcgggctaagagcacttttcactgcta

SEQ ID NO: 7269 - DNA, 1598 bp, Diabrotica virgifera
  SmartBlast Evalue=0; Info=Pre-mRNA-processing-splicing factor 8 n=1 Tax=Culex quinquefasciatus RepID=B0XAY2_CULQU
caacttagatggggtgattacgactctcacgatgtcgagcgatatgccagagcgaaatttttagattatacaactgataatatgtctatatatccctctccgactggagttcttattgccattgatttggcatacaatctgcatagcgcttatggcaactggttcccaggttgcaaaccattgatccaacaagctatggcaaaaatcatgaaggccaacccagctctctatgtacttcgagaacgcatacgaaaggctctacaattgtattccagtgaacctaccgaaccctacctttcgagtcagaattatggtgaactgttctcgaaccaaatcatttggttcgtcgacgatactaacgtatacagagtaacgattcataagacgttcgaaggcaacttgactacgaaacctatcaatggagctatatttatttttaacccaaggactgggcagttgttcttgaaattattcatacctcagtatgggcaggacagaagcgtttaggacagttggcaaaatggaaaaccgctgaagaagtggcagctcttatccgttcgctaccagttgaagaacaaccgaaacaaattattgtaacaaggaaaggaatgttggatcctcttgaagtacatttactagacttccctaatattgtcatcaaaggatccgaactgcaactacccttccaagcttgtttgaaaattgaaaagttcggtgatcttattcttaaagctacagagcctcagatggttcttttcaacttgtacgatgattggttgaagactatttcttcatatacggcattttcaagactgatattaatattaagagccttgcacgttaacactgaaagaaccaaagtaatattaaaaccggataagactaccatcacggaacttcatcacatttggccaactttatcagacgatgaatggattaaagttgaagtacagcttaaggatctaattctagcggattatggaaagaagaacaacgtaaatgttgcatctctaacccaatcagaaattcgtgatatcatcttgggtatggaaatcagcgctccatcggcccagagacagcaaatcgcagaaattgaaaagcagactaaagagcagtctcagcttactgcgacgactaccaaaacagtcaacaaacacggagacgaaattattaccagcactaccagtaattacgaaacgcaaacgtttagttcgaaaaccgaatggagagttagagctatttctgctactaatttacatttgagaaccaaccacatctatgtcagttctgatgatatcaaggaaactggctatacttatattttaccgaagaatgtcctgaagaagtttgtaacgatttcagatttgagagcacagatatgcgcgtttctttatggagtcagcccacccgataatccacaagtaaaagaactcagatgtttagttctggcaccgcaatggggtactcatcaaactgtacacgttcctaacacaccgcccaatcatccgttccttaaagatatggaaccactcggatggattcacactcaacccaacgaattaccccaactttcaccccaggacattaccaaccatgcc

SEQ ID NO: 7270 - DNA, 1599 bp, Diabrotica virgifera
  SmartBlast Evalue=2E-88; Info=Calcineurin subunit B type 1 n=35 Tax=Pancrustacea RepID=CANB1_DROME
tcacgaactacagtaaattatttatcctcagtttgtcgatcattaaaaagaatcataaatcaattagaagttagagtacttggagcagaccatgggtaacgagagctctctgcccatggagctatgctctaactttgacgccgacgaaattcgacgtctcggtaaaagattcagaaaattagatctggacaactcgggggccctcagcatcgacgagttcatgtctctgccggagctgcagcagaatccgctcgttcaacgtgtgattgacatcttcgatgccgatggtaacggagaagtcgacttcaaagaattcattcagggtgtgtctcaattcagcgtaaagggtgacaagctctccaagcttagatttgctttccggatctacgatatggataatgacggatacatctctaatggagaactatttcaggttctcaaaatgatggtcggaaacaatctgaaggacactcagctccagcagatcgtcgacaagaccatcctgttcgccgacaaagatgaagacggcaaaatttccttcgaggaattttgcaacgtggtcggcaacaccgatatccacaagaaaatggtcgttgacgtctaggcgtcaccaccaccctacttcaactcgacacctggtcttttagaaatacgcgatttacaaaaaaatcttagaacagcaagacatttttgtttcctgtcgctgaaacatcgccgtccaaatcgacaggagtctgtgagacgtctgtccgtttgggaggcggtgttttgtttgtagaggcggcttctctatatttactcctatgtatcgacttcacggcttttaaaatcaccacatagcaaatcaggtggtcgagttggtagcgcagtttatagctttaagtccatttcactgtataaatctaaagagctcatatgcatgttttgtgctttcctgttactaaatattttataaaaaacaaaaagaaaaagatacgatatagttgttctttatactttaatcttaatgtcgtgtgtgtatagataaggaagaaaaatatacttaaatattattaatcaacctaacgctttaaactataatgcttgtaacttattgaacttttcacacaaactgaattttcttctgggttcgtaggtacagaaaagtactcgaccaagccgttcggttgaaagggtgcgatagaacgcttgctccaactactttttgattctagtcactgagttcaacagctcaatgggacggttccgagacttgttcgctcgagcgtgggtcggaaaagcggaaaacagatcgggcgtcatactagttttgcccgcgccgttttcccgtcttctcttccgacacaccttctgatgtttcggaagcgtgctcgttctgtcggcaacaattcgctgctgactgttctcgaaaagtgtgcaatcgggaaccagacaccgaatattgtcttgttgacgttttagttgagatttttacctaacacaaaaagtaggtatacattagttatagattggaaagtttcattcaaatgtatcatatgttaatcgatgtgagatgttttaaaatttatgtttagtaataaatgttactcacctctctgc

SEQ ID NO: 7271 - DNA, 1588 bp, Diabrotica virgifera
  SmartBlast Evalue=4E-37; Info=transport and golgi organization 9 n=1 Tax=Nasonia vitripennis RepID=UPI0001A46D3B
ttggcttcactgtgctggcccttctgcaaataccgttttatttcatcagggctggtcctcctgttacgatgaatcccggagaccgtttagaagatgctattgatgcttttgtccaaattggcaacaactggagacttgctcttgcagttttaggtactgttgtgtctattgcctttttcaacttcactggtattagtgtgacaaaggaattgtccgcaactactaggatggtccttgacagcgtgaggacgatcgtcgtttgggtcttcagtttagcattcttcggtcaaaagtttcattttttgcagctttttggatttaacctgctgattatgggaatgtgtctttacaatggcatctcacccattgcgatcttcattaagatattccttaagataaaatcgttattcactagcagaaggtataattcaatggaggaagaaataatagaaaatagaaatgccgaggatactgaaccctgaataaaaattatagatttgtattgatttggaaatagtgaaaaatgataatggctaaagtgattgacaatattttgatttaaaagttagtttcgtgctatactcagtaattaactaattaactagttatttttatgcaggctatttttaatataaatagaaccaagtaaaataatattaaatttttgacgtaaagtgcacagcttgttgacttactgataaatgagtaaaaatgtgaactggttttaactgaaatgatcagatgaagtacgtaatatacaagcacttaattttaacttgaatcaaaaggcggataacctccttctgaccctaagtaatgatagaagtgacttcttccttaaggtgtcgtcttctttcgaatgttggcgatcatcataaccttgagatttccatgacatttgccgccttccaacggtacgctttcctaaaatctttccctgcataatactctgcaaaagctggtattttgttcctctcatgatgtgcccaaggtatggtagttttcgtatctttatttcaatatttagttaaggagttattatcctcctagtatcctctgtgagctcgtaggtaaaggggatatttaaagttcatgagcgccagtagtggcaagtcagtgaacttaggttgggaatttaacgttcttctgcataagagttgcatacatatttttacatggcttacgaaagttgttgtatcaaatattgtcaaaatactggttacaacagtaactgtgtagtctacagatttcctgtcgctaagcataaagtggctcaacgacaaaaatgtactgatgcaattagaaaaaagtacctaagtaaacataaccttcaattttaaaaaagcaaacattgaaagaatgacatgtgaaagtgaatttaaaacattgaaataataattaaaaatactagttggccaaagctgtgggatatattttaccttaaatatatttcaaatactgaaatgttgttttttaaactttctataagaattattaatctattaaaatagatcatgtcatatttctacaccatctacactataattgtgaaactatcggaaccaagaaagaatgaatctaatcggac

SEQ ID NO: 7272 - DNA, 1596 bp, Diabrotica virgifera
  SmartBlast Evalue=4E-48; Info=Endonuclease-reverse transcriptase n=1 Tax=Bombyx mori RepID=D5LB38_BOMMO
ttcatattcaaaatagagggcttaagctatctttattagaatctgtgagaattaataaattaaaaataacgatataattctgaatgaacaacataagacaaatagctccccactcctcaacctattcagttagagacttaaaatgcatgcacatagtaaagtaaatcacttaagaaaggcctgccgaaacagctgcagtgacattaagtttgcagtgactttagaacaagcagaaaactacaactatcttggcacaataattaatcacacaaacgattactccaaagaaatcaaagttcgaatagagaaagcaagaacaaacttcaataaaatgagaaaggtactttgtgcaagagaactgaaattagacttgagagttaggctggcaaggtgctatattttctggactctgctttacgggatagaagcatggacacttaacgcatcgactactaaaaagttggaagcatttgaactgtggatgtatagaagaatcctgaagatatcatggaccgagcatataacaaacaacgaagtcatgagaagagtcaacaaaagactggaaatattggaaaccatcaaaacacgaaagctgcagtacctggggcatgttatgcgtaatgagagatacaacatacttcagttgattatacaggggaaaatccagggcaagagaagtgtaggaaggagacgaatctcgtggttgcgtaacttgagggaatggtacggatgcacatcaaccgaactattcagagcagcagcatctaagatcagaatagccatgatgattgccaacctcagtcgcggagatggcacgtaaagaagaagattgataacatagaaagttatttattgtacaaaataaaattattttgaagaaataaattccacaaaatgttatgagtttagtatattactaacagtatttccaataattcttcttttttttaatgaaagagtaaggttatctgaactgttaatagcgaaaggtaggaatttttgtgttgtaggtttcctactatgaatctgtcaaaacgcgtctcagtaaatagtggatagtttccaatagatacaggcattgattctcttagtagaagtgagtgaaaaacgaaacagattgagattgtaatttctttaagacgtttaaaaatttcaggcacattgttacaaattttagtgggaacaaatttatagtaaaggctgataattttctgtgttttcacagcgtaactataatgacaccaatagctgcaataaaacatttgaggaaaaattctgcagaacaacttccctattattaaagatttttttttaattttagttataattatgtggagataacatccataaactacgtcgcgtcgtagagaagagggactgctttttacgacggtatacgacagggggttctattttgagctaaggccttcacctcattacaagactttccttgacctcttatctcgtccatgatggatcttctgcaagtttgtgcagggccacccctttttccttggggattccactctagggcagtctctgtactttatttcattttctacccgcttttattgggccaggtgtactagatcttag

SEQ ID NO: 7273 - DNA, 1595 bp, Diabrotica virgifera
  SmartBlast Evalue=1E-126; Info=Cat eye syndrome critical region protein 1 n=1 Tax=Harpegnathos saltator RepID=E2BFN2_9HYME
attaagaaagtatattacaaaactttttaaatcattttatttcaatcttacatcctatatcgaaaccgaatcagcatattttctatgaacacattccaatcattgtgccataaagacaacgcagcatttttctgaatactatccaagctgctgtacacaatcgagttaatggctagttgcttcagaaaacgcagatccgtctctctgctagtcatgcccataaaagccatgtaccaatcgtcactaagacccttggctccccaaaaagagggatcatccgaagcaataaccacaggaaaaccattagcaatcaacaggttcccagggtggtttcttaaatccgtaaccaacttgaggacttggttcgaaatggggcatatctccaaggcgatctgttgctctttgacgtattttgataatagaggatgttttagtatcgaatatccatgcccaattcgggtggagtttaacaagatggcgtcgaataggttcaggtctgtttcgccgtaccagtttgtttcgccagcatggaagaagaatttggctccaagatttttgagttctatcaattggggcacaaaggctgttagtggttgacccatatcttcctgacccactaaatcaaagccaacaacgaaatcaggatacagttttttgattttcctaaaagtttcaacaaatgtgtccattgtagagttatcgcagtgccgactgggggcatagataaatttggcgccaaaaaaatcggggaagtctctttggaatctctttaaaacgtctgagtagatccctaccacttcttcttggctgtatatgtttccttctaagtcatatagtgtcggaagaaaacctcgaagttccatgtacttgatgttatcgttgtaaagttctttaagtgccatgtagaagtaatcttcaaatactggtttgtatgttattaagccattaatcgatttgaaaatcgcctgaaaagttttccagactttgtttatgtcaggatagctcttctctggatcatctgtgattatcgtcaattttgttttcaaaaaacggttaaacctgacatcagattttcttatgtcactgagcaatttccagttacacgaatcgctgatgttattcttttgaaagaagtataacttgaagtcatctccatctatacaaccataaagattgtctctgaaggttaagctgaataaatagtcttctgacacaagagcttcatcatgcgaatgcagagacgcacctttaggaatcctctttattatatcaaacactttcgaatactgaatcttatccttcaccttaaagtaatgttgagcggccagaaacgtatccagatcttccaatccagcatcatactccgagagtttgtacttcataagaacattgttcaccctctgttccttctctgtaagcttaagggttgctcccaaaccgtagctcctatcattctcaatcaaatcctctcgatctgaccagtaatccgcgagaacacaaccttgaagcacacttgtagtgaagagcacgcataccacatgccacatttggtagttcatgttcattgtcgataccgatcaattgatcagttaaat

SEQ ID NO: 7274 - DNA, 1593 bp, Diabrotica virgifera
  SmartBlast Evalue=1E-135; Info=Tyrosine aminotransferase n=1 Tax=Aedes aegypti RepID=Q16X98_AEDAE
cttaacccttgataaagacatacatttgttgagttcatttttcatatcaaaagtggcgagccattggtttttgaaattcttgtgtgagcatgttcgaccgtgaattagagaaaagagcaagtagaagcattatagaagatcccaaggtagatatttggagggttgaagcttcttctgctgcaaagaacaccagaaatttcataagggaaattgttgataatttagatttgcagccaaatccagataaacctgtcattgctttatctataggagatccaacggtctacggtaatcttaaagctgcagatgaaactatcgatgcagtaaaggctgttgtggaggaaggattattcaatggatatgtaccaagtactgggcatcaggatgctaaagaagctgtggcagaatatctttcaaatgacggtgttgaagttagtcccaaagacgtaatcttatgcagcggttgctcgtcttcgttagagcattgtattactgccctagccgatggctcaaagaatcataacattctaattcctcggccaggattccctatttacagaaccttggctgaacatatcggagttgaagcaagatattataacctcataccagaaaataattgggaagctgatattgaccaccttgaatcccaaattgataagaatacagctgcgatcgtactgaacaatccatccaatccatgtggatccagctttagcaaagaacatcttcgaaatattctagaagtggcttacaataaccgaatacccgtgatcgctgatgaaatttatgaaaatttagtttttcctggtgaacagttcacatccacagcttctttaaattcaggagtacctatattaatttgtggtggacttgcaaaaagatttttgatacctggttggagactaggatggataatagtacacgatgaatttggagttcttgatgacattcgaaaagctttaaactctttgtctcaaagaataatcggcagcaataccttaatccaaggtgctctaccagcaattttaagaaacacaccccaaagtttcttcgattcgttaaccaataccttggctttaaacgccaaagtagccttcgaagaattaaagaatgccagaggtcttactccatttatgcctcagggcacaatgtatatgttggttgaaatacagatggcgaaatttccaatgtttgaaaatggattggaatttgcaaaaaagatgatggaggaagagtctgttttctgtttacctggcgactgttttgcaatatcaggatttcttagacttgtgattacagttccagaagagttgataagggaagcttgtcagagaatgactgaattttgcaatcgttattatacacattagaattttcacgacaaatctttaactacctcttaatttagtgcagcaaagcgtctcagtgatgttagatattagtgaaagtattttaccctgtaatttaaaatagaatatttaaattatattaagcttaatttagttattttgttttcttatttatataaaataaagtaagtaggtatcaataaaatcgtgtgctttgtggattcgattgtaactcagataa

SEQ ID NO: 7275 - DNA, 1592 bp, Diabrotica virgifera
  SmartBlast Evalue=2E-90; Info=Sodium-dependent phosphate transporter n=1 Tax=Aedes aegypti RepID=Q16UY5_AEDAE
cagctttgtcccgaattggactgacttggagttggtcacactagcatgcatttagttacaatgtaaatttttataaaataggtatttgacaaatacgttgtcaaacaacagagcaatcagctgaaactgtttaaatttaccaaaaatagttttgatttaatgctagctataattttaaccgtataaagaggtctacacaattaaagaaaaccagtcgacatcaacattttgtactactgattttagattttctaatgattttctgtatctgcaatcctattccacggttgctcctcaacactaccaaacaagataaagattataccagttccaatgtaaacgcatccgccgagtataaacgtataagaccattccttcaaaccgttatgtttctgaataaatgcccctgtaatcgcaggtactaagaatccagtggtacctcctatacaactaataattccgaaaatagaacctgcaaagttgggtgctagatcttgaggattctgtaaattagttaacacagctgctccattaatagccatgctgaatgttagtaaaattattaacggcacccaattgcaacccataaaaaatgacacatatcatcaatatcccaggtataatatgagacgctagaataaatgattttcttatagcttttggagacattactttattcttctttaagtaatctccaatcgacccatacgcagtaccaaagatcattctcattagatgaggtaaagctcctaatgctcctgcctctttaagactaaaaccaacaacttctgccatgaatttgggtacgctctgcagttgtaaatagagtccccacaaatttccgaaatgtaaaatatttaacatccaaaaaggaaaactcaggaaaatctgtttgtatggaggtgcatgctttttcttagtaaccgttgctccctgagcttctttgataaaagcaacctcctcttcggaaataaatttgtgatcctcgggactatcagcacagacaaagtagaaaactacacaaaatacaactagttgtacagtgataacatgaaatccccaattccaaccccatttggtaataacccaaccgactaaaggccacgttacacatgttgctaaagtattgcccatcagaccggctacaaaccggcccttttcggctggtggggcccattttgctattaatacctgaagagctggatataccaatccacctactgctccaatgagaaatctacaggcaatcagcaatccataatgaccattagctgctggaacactgacagaatttaaaatcagcgatactattgtggtccaaaatataactcttgctggaccccataactcagaaacagctcccgcaggtaatgaaaatatggtatagccccaaaagtaactgccaagtattattccctgaatgtgctcatcccaatcgtatcttggtccataatctgggagacccttctgagttgcagatgacgaattagtcatttcgtctagtagacattccggtgtcttctttgatttaccctttgtcatagagatgattgatatggccatattaactctcgttgcataatttacatacg

SEQ ID NO: 7276 - DNA, 1593 bp, Diabrotica virgifera
  SmartBlast Evalue=1E-132; Info=Beta-glucosidase (Fragment) n=1 Tax=Tenebrio molitor RepID=Q9GSE6_TENMO
ggcaaattatattcgtttaaataaaaagttactgcttcaattttatcatatgagatcagatttgcaaacaatggcgccagttccaaaaattttttttctaatctttgtcgtagtttctagctacgccgatgactaccaaattaacaataaacgctttccatccaattttatgtttggggtgggaacatcctctttgcagatagaaggtgctccgaatgaagatggaaaaacagaaacaatgtgggagcgctacattgcggatcatccgggttatgtcgcagatggttctgatgtaagcgttgcttgtgactcttaccatcagtataaaagagatgtggctatggtcaaggaactgggtgtcactcactacagattctctcttgcttggacaagaattctgcccaatggtgttaatgattatgttaatccactcggagtccaatactacaaaaatctcatcaaagaactgaaagctaacaacatcgaacctgtagtaagcatttttcattgggatattcctcaggttcttcaagatatggacggcttcttaaacgactcaatcgtggactggtacacagattacgctagagtttgctttgaagaatttggagatgatgttaaatactgggctacttttaacgaacctaaaacttattgcaatggtggatacggttacgcttataatcccccccaaattccttcacagggtcttttggaatatgtttgctcacataacctactcagagcacatgcgaagacctatagaatgtatgagcaagaatttagaccaaggcaaggaggaaaaatagccatagttcttgatacttattggtatagaggtgccactgattccgaagaagataaaacagctgccgcaactgctctacatttcgatcttggttggtatgccaatccagtcttcaatggtgactatccggaaataatgaaatcccgtatagctgcccgtagtgccgccgaaggaagagcacagtcccgtcttccagaatttacagatgccgaaaaagctgctttgaaaggtagcgctgactattttgccctaaacacgtacactggaaacctggttaaaagtattcccgatcctcctatattcaatattccatctaggtatcaagatgtgggagttctgacttacactgatccaaaatgggaatctagttctttggattggcttaaggtagctccttggggtattgttgatcttttgaattttatcaaaaataactacaatgatcccgatattatggttacagagaacgggctctgtgataagggaggactagatgatcctcgaagagtcaactaccataaactttatttgagttatattcatgacgcaatgatcaatgatcaagtcaaagttttcggatacaccgcttggagtcttatggacaatttcgaatgggcatcaggttatacgcaaaagtttggtttatttagcgttgacttcagcagtcctaatagaacaagaaccataaagcaatctggaaagttctaccaaaatgtttgccataccagatgtctattagatgaagatcaatgtgcagattattaataaattaattattgtaaaaa

SEQ ID NO: 7277 - DNA, 1589 bp, Diabrotica virgifera
  SmartBlast Evalue=1E-102; Info=Basement membrane-specific heparan sulfate proteoglycan core protein (Fragment) n=1 Tax= Harpegnathos saltator RepID=E2BPV9_9HYME
gccagtcgccaatagtaataggtctgtctgctctaaccagggtcgttcctgctcccaagttgtatttgaattcgggaacgccacctttcaaagccagagagatgtagtctccgcttatgtcgctacctttgttgccgttgtagagaagtaaaccagtgtcttgttggggcttgaaggagatctcgaagttgaactgcatgtatgagtcagatagagtcgggactgttatgtaactgttgggagcttgagtgaagtagggaacgatgccggttactactagaatgactggaatgtcgatgcttctttcaccgttgctagcagtacacgtgtaagcacctgcatcggatccatctacgtcatccaattggatagatttcgagaattcatcaacacctcgtggtagctctcctccttgtttggtccagacgtaatccacagcatcgaaatcagagttgcagtccagacggacagtggaacctcgttgggcttccttaatttgtactgggggctggtctttatattggtcatcaattacattgaggttgtaatctctgtactgtactccttgtctaccattcgcttcgcatctgtacaaaccagaattttcaggagtcaagctaacaatcttcagcgaaccagtaacacctactacattgttcgataaaggtccggatattttagaccacatggttactaccccacgttcggaagattggcagtgaacttcaaggtcttcacctgcgtagtggtcctcatctggaggattgatgtagaggctgggtctggagggaggtagggtctgcgtgtcgttggttctggtcctgtcagcagaagatcaacataatcgctaactgtaccgttcctagtctgaatctcgcagtagtaccgtccttgatcctgttgttggacgtttctaaggtaaagcacttctccgttttgttgggatcctaatggaagttcgggaccttctctgaaccagcgcacagagctgtaggaactgggattgtctactctacaacgaagttggacgttggtgccgagaggagcttgttgttgtttctgttcggctttgatagcgggccttgatacgtactcttctacaataacatcagctacagcctctgcttttccagctctattggtagccacgcacaaatatctaccagcatcttgcatttggatactgttgaacctaatgtatccgtctctggtgtaaactgttctaggcatgtcacgtcctattggagaccaggagatgtcgataggttggtcgccagttgcgctgcagttgatataagcgtgctcgccagggtgaactacttgtctaggaggaatcaaggtgatttgtggagggaatataaccgtgaggtaagcgttcacgttgaagatgggtctagcactggaatcgaaacctgtgcatttatattctccttgagcttccacctcgacattgtcgatgtacaaaactccacttcgttggatagagttggcaggcaatggacgaccgtctgttcttgaccaacttacttcaaagtttgaatcctctccattagcaattctgcatcttagctcagctctaccaacctaaa

SEQ ID NO: 7278 - DNA, 1587 bp, Diabrotica virgifera
  SmartBlast Evalue=1E-103; Info="Ankyrin repeat-containing protein, putative n=1 Tax=Pediculus humanus corporis RepID= E0VTB9_PEDHC"
cgcttgtgttacaggaagtgtgcaaaatgacacagtgttttcgatttccttcatttaaaagagtgggcggcatgtcgcggccacccaagccagcggcaaccgcaaagaaagtagcccctcccgctgtaccccatgagtttcgacattctggaagctccttcggatccgcggggtacgccagctcagaggacaccggactgttggcttcctccgatgcacccggaattcctagagatgatcattccgattatggtagcacagtcagtggtagcacagggaaatctcccgggcccatatttccagcacctagcttcacgtttccatcacagctacccggaccaggaactgttcttacccataaggcagccgtttattaccaccaccaacttagtctccaagaagatcagggtattgacatgacgcagtctcccggtagggacagtccaggttcgtcgagtggcagtgcaggttcaggttccagacatagcacagcttccttagatagcggaagggcatcctatcatcccctcagtacggcgggtagaagtacaattggttcctccaatagtccacgatgttccttaagttcatgttcgatcggttccgaccagggccgtattgaacggatgatccaccaaggaataccggatcaagaaatcattcattcctggctagtagatttacaattcgaagaatactttccactatttatatcgtccggttacgatttacctacgatcggaagaatgacgccagaggacttgactgccataggaattaaaaaacccaatcatagaaaacggctaaaagctgaaatcgcccaacttaatcttccagacaacttgccagaattcataccagggtccttagaagagtggttaaatctgctacgtctagacgaatatcttccagctcttttggaacaaaactatcagacagtagacgacgttacccagttaacatgggaagatttagaagagttcggaatagtgaaattaggccatcaaaagaaaataatgctagccattaaacgaattaaagatattaagtcgggaaaaagaatacatactgatgctaacagaatatacgccacacaagacgtcctggtgcacgctcccggggagctcccatcgcctggtgtacctccagtccacagcacttttcgctcttttcaccaaccatgggagatcgaccagactcgccagttgcaggctgcaggacaaccgcactacgtacaaccgtcactgttttgcactgacattgttcccattaagattcgaaccggtagaggaaagtccttagaatctttagaggatcccagtgagagaacccaccacacattcaccgcagacaaccatcaaacagtatactaccaacctatcggctggcgcacaagatcctatgacgacggagacataactccaacaaacgagtcagcattgttatatgaaggtggaggaactcttcctagaccgcgcggtatcattcgtcctagaccaatcgccaaaatagcagctaaggcccgtgagaccttcacagagtttgaaaaaccccagtttaatccccagtataagcccttgtccaggg

SEQ ID NO: 7279 - DNA, 1590 bp, Diabrotica virgifera
  SmartBlast Evalue=1E-177; Info="Heat shock protein 75 kDa, putative n=1 Tax=Pediculus humanus corporis RepID=E0VHX6_PEDHC"
gcaacgtgagtgaagttagttattttattaacggcaacggcgcaagcaaggcgcaaggcaagtgtcaaaatcaatccaaaaattaaaataattcaaaaaatattttttggaataatgtctctaagtagatttagccggttacttgcttttagacatttaaggctagtaacaagaaatcacaactttacaaacattaactctggaagaatttcatcttgcggtaaccagaaccttagaagacttttaagcacacaaacgtcgcctaatgaagatgaacatcattcaattattaaagacacagagaaaccaacaggtgaaagtacaaaatatgaatttaaagctgaaaccaaaatgctcttggatatagtggccagatcattatattcagaaaaagaagtttttatacgagaactaatatccaatgctagtgatgcattggaaaagttcagatacttggcggtttcaggagacgagtctgccaaaaaaatacaagatgttgatcgaccattagaaatacatatatcaacagataaacaaaatcgaacaattacaatacaggatacaggtattggaatgacaaaggaggaccttatatcacatttgggtataatagccaagtcaggatctaaggcgtttattgaacaaatcaaagaaaaagctgctgcaggtgataataatattataggacaattcggtgttggtttctacagttcctttatggtagctgataaagtagatgtttattcaagagctgttggagaagaaactggatataaatggtcctctgatggaagcggtacttatgaaatacagcctgcagaaggtgtacaaaacggaaccaagattgttatccatttgaaagcagattgtagagaatttgcagatgacgatactattaagaatgtagtcaataagtacagcaacttcgtcggtagtcctttgtaccttaatggcaaaaaaacaaacattgtacagccactatggttatcagatgctaaaaatgtcacagcacaacagcataacgagttctatagatatataagtggcagttatgatgtacctagatatactttacattacaagactgatgtgcctctttctattagggctttgttatattttcctgaaggaaaacctggtttatttgaaatgtcgagggaaactgaatcaggaatcgcactatatactaaaaaaattctgattaagaacaggactgataatattttgccgaaatggttaaggttcgtaaaaggtgttgtagactcggaagatattccattaaatttaagtagagaacttttacaaaacagtgctctaattggcaaattacgtgacgttctaacagcaagagttttgaaattcctacaagaacagctgaaaaagaatccagaagagtacgaaaagttctacaaagattatggtttattcattaaagaaggtattataacaaattacaacatgactgaaaaggaaagtgctgcaaatttattattattcgaatcatctcatgaagctcctgaaaaaaaagtaaccttaaatgattatctggcaagagctacagataataggactatttattatttagcagcc

SEQ ID NO: 7280 - DNA, 1585 bp, Diabrotica virgifera
  SmartBlast Evalue=7E-73; Info=Ubiquitin carboxyl-terminal hydrolase 16 n=1 Tax=Camponotus floridanus RepID=E2A605_9HYME
aaagtgatctgggtttttttaattagaaattatcttatacttctgattatagtagttatacatttttgtgttatacgtttagactatatagggtgaaaacgagtaggtaattaaattctgaaatcaaccctcaacacgttttcagaaagtttaaagagccttgacatgttcaattagcataaaagatcgtggaaaattagaaaatcaaagcaactatgaacaaaaagaagcaccaaagtgatccaaacgccgatatttcgtcagaatccgctgatgagaaccaaaataatgtagaatgttctcacatcaataaatctgttgatctacagaaggtgagaaaagctctaaatggaactggctttctcacagattgtgagttttgtaaaaagactcctgaaactaacgatatgggtgatcttgaatttgacaactctctatggctttgcttaaaatgtggaaatcaggcctgtggtagaggaagaaatcagcatgctttgcagcattttgaaactccacgttcagattctcattctatgtgtgtaaataccactatctggagtgtttggtgctatggttgtgatgaagaagttaatttaacatgcaaaagaaaactactagatgctgtggaaaaccttcggaaacaggctgaatctaataagataaagcaacaactacatatacctcaattatctgataaagcattggacattagtccatcactgccatctacagcgagtacaggagcaactccaaagctgaataattcggctacagctcaactgccaagggcaagaggtctctcaaatttaggaaatacttgtttttttaactcagttctgcaatgtcttggacaaactccttatttactgaaattgttagaagaaacatcggcagataaccaatatttcaaacttcctggtggtaaaattacattagaaaataaagaggtgattgaactggaaccactagaaggtgatcttgagaagtggaaaccattaccttcaactttagctgacactttaagagaattacagagtggtagacaagaagtgtatgttccgagaatgcttttgttgaggtttactaacaaagtaccacaatttggatttggagatcaacatgatgcccacgagttattaagacatttattggaagctgcccgagaagaagacttgcgacgatataagactgttattcttgagaaattaggttttaatgttaaaactaatccagcatcggtggaaggtgataaaaaagaaaattgtgaaattttatggtcagcaagcttctgaaatgctgttaccgacagaacaggtatttagaggcgtacttgtaagtactcttcaatgccaggattgtggacacacttcacaccgtgacgagttcttcttagatttaagtttacctattagtgagaaaaaacttccgcctttattgagaagaaaagccgaagacatagaggataacaacaaaccctccaaacaccaaattaaaaaagaaaacgagcagagagaaagaaaaataaaaaacagaagagtagcaagaatgtattgtccaataccattatattcaacgacgatggtac

SEQ ID NO: 7281 - DNA, 1590 bp, Diabrotica virgifera
gtagataccacactccagtgcctcggccgagacagaaaagaaataccaaagccatagcgggagtagacggctatttcgtaagttacccagtgaccagtcgtttttttttaagtgccagtgaaccagtgtccgttgtttgcagaaaaatgacgtcggtcacagtcgttctcgacaaagaaaagaaacaccagtacaaggattacgtgaattttctaggaaactataaaaatggcaaaaaaagcgagagtgataccaattcgtcgctgaattcttctgttagcgacttgaacgaactcaacgaaatgccgacgaaaagcttcaacgagtatctcaaagactacaacacaaagaaattccaaccggttcagccagcgtttatcaagaaagaagaagcgccaaaaaatgtcaagactgaagtgttcatacagatcaacaacacgaaaaatacaaacaacagccagattcaagtcactttgccgaaaccaaaactagacgagactgatggcgaacaaatcaaaatatctgtcggcgaattatcacaaaaattctgcaacactagtgtccataataacaagacacagacgcatatattgaagagaagctccagcattacagaaaagacaaaaatcttcgaagaaaaccacgacgaaaacaaaaaagttataactaaaataaacaaagtaaccacatagaaaagtttccgaaaaaggtgcaagcagcaacaaaaaagcccaaccaaactttcatcgaaataaggaaacaagaactacagaacagccccaaaattaatgacagtgtttctccaccacctggaaaaatagatgtcgctaaattcagcagtcaacttgaacataccatcaacaacaattcgactgttcctgttaaacatagccaagaagaagtttgtagtgaagttcctattgaaccaataacagtggatgctcaggaaagtataattaaagtagaaatccccgtatccaatagtgcaattcctcctcctccaccgccacctcttcctccagcaaatttaccaccaagacctgttgttaccagtcctaaagtgtccaactctagtccaaaaactttccaccaagtaccaaaagccccagtgtccaatggttacagtactctaccaagaacgggcaataacactcttcctagaacacaaaaccatgccaatgatggcagtttagacaggaatgatcccagggtgaagaaactggtttatggtgcattgcaaggaatgtatggagcgtatcatgataaagccaatgattatttggctactttaccgaagaatagggtgaaaaagggaaatggactggatagtatcatcaacagcattgcagcacaaggaggacttgataaactatgtggcagagccattcctaaaagtgagacagagtcagtagaaacgaacattcttatatgactgtattcttttacccttcagacattttctgtgaaaattatttatgttctgtgtatttatatgtttatgtgattgctttttgtataggtatatcaaataaagtgacatttcagcttttaaaaaaatatgtaaagtgatattttaataaaatataaaat

SEQ ID NO: 7282 - DNA, 1581 bp, Diabrotica virgifera
tgagttgagaaagacgattttgactttaaactaacgttcactaaaagttcaggttaaactggtgttgaactcgatatgagaaattggcccttagcgtccaaacctccattccatataataacacagaaaatacataacaccgcagtattcatactttgagttgcagattcaaatcattgctgcaaagtacttttcttgcgttattatattttactacaatactaatattttgagatgttctctctgtcaactgaaccttgtttgttattacttctccggacaatttcctttttagacactcccaggcattttcgatggtgttcatgtctgataaattgctgggccatggtaacggaggaattccttgccctatcaaatgcataagcatttgatatggtaagaaattaagatcattaccatgattggaaccagtcttgtctttttccaatttactccttatatctccatgagtgactcttccgtgttttagagccaaattcgttgccctcttgggggcggctctaagctttctaccacaccgaaccgacaggacagtacatttcttttgcctcaaccttcaaactgacgattgagatacaccacattttcttgtgatattgttatgattagaaattaaccaaattcaaaattaacgttactatagaataatgtcaacactagtgaaaattttacaaaagttgaacaccaatcactaatttaagtaaaaaactggagttactgcatctattagtttttattagtatttatttgttgtctattgccatctgtcagatttggacaatttaataaaaaatttccaccattttaaaattatttatgtagcatgggttattcactaataattgttatttaacctactcagtagctctgtattactttaaatatgcttgtaaggcgcttgaaatttaaaaaagttgaaatttctagggcaggtctaataatttgaacagggactgtaagtttgttattctatgaaagggcgtatggatgtattgttcttaatgtagcaatacgaattatgtgtagaatcactcttttctattttacagctacagaataaagacgcaatacctttttcaagtagaaagataagttttgagtatgttagaagccactcaagtcgttttttctttgtctactggacgtgaaaaatatagtggttaattttgattttacatatttgatatactgtgaatgctgttactttttctgggatccacgctcttacttattaattatgaattcttatcttgtttaattatgtttagatttgaatcgatctgtatatttcacagttccgactcactaatccggatcatatccgattcgcccatctctaaagaatacattcctatagtactatggcctggttaagcgcgtgcggaccagaatgttgaacataaatcagcaacgaaaactatttttatacaaaatttgtttgtcagttgagattaatggataaaatatctagtagaatcaaaatataggatcacttaacattaatgtgacttaatatagagccaactgctcaaagacacagtatttaaccctaatgtttaa

SEQ ID NO: 7283 - DNA, 1583 bp, Diabrotica virgifera
  SmartBlast Evalue=1E-135; Info=Cytochrome P450 9Z4 n=1 Tax= Tribolium castaneum RepID=D6WWU4_TRICA
ctttcatattcataagagcatatctagatccaatgcagttacgagggccttctccaaacggaaggtaagtgtatggtgtaagattatctctattattactaccaaatctttctggatcgaatttttccggatttggataatatttgggatctttgtgaataccccatattggaaaccagactggtgtacctactggaagtgttacgtcgttttcgtctggacgttctgctgggattgtgtagggtttgttgcatatcctttccaaaacaatggcattgggccatttcctcattagttctgaaaccaccatatccaaataattcatggtcatgatattttcatatgtaacatttccttggcaattttcatatatttcaataatctcctttcttagcttatcttgaacgtctgggtttactgctagctcataggccatgaaccggttagatgttgcagtggtatcaaacccaccgaagaaaaatattaaagcttgagcagctacgtctgtacttgaaatgtttatattttccatagttttgttagcgaaatatgaagatgttttggcagttgcataacccgtttctacagcagtttcttcctcaaacgtactccgaccttttctagcttccatcaataagtgaattaaatcttttcgaattatttgtttatcttcacgtattttaatagattgttcaacggtgttcacaaaaaactttgacactctttcggagaaaaatcgaaaaccaaatagcttaatgatccactctggtgcaataaatactattagaaatagcagcgatctccatccagtaaagtccgtaaattctttaccacattcgtaaaattcgttggaaggcatatttaacgtatcaagttctattccaagagctactgatacaataacgtcgcatgtaaatcggttaaaatgatctttgaaatccaactctataatattttcctttttagattcgaaaaaatttacaaacttctctgcctctgccatcatacatttgaacatgtttttcattttgctgctggtgaaagccgggctcaatatcattctcatttctttccatctttgactttccagagagaacaaattgtttccccataacggatctatggacgccggtataatttgtctgtgattcacaaaatgatcaaaatccttaatagtaatttttttaactagctcaggatctctaaccacaaaaataggtgtgatgaactgataagtaccaaaatatcttttattcggaaatgtattatatatccgaccagaactttctgcaaagctttcttgtttgagcacactcttgaacgactcaccaaatagccatggaggatttgcttgaacgactcctctatctttccaataattttgagatttaactatcgttatataaaaaatataaacaagcaatgcaaatattataaatattaatatagagactaacatactgataaaaccgcgacgcggacaaaaatttttatttgcaactttgtttaaactgcaattgtgttatataatatggggctcaatttaaatcaataaatttaactcaggttgttgttgaacatac

SEQ ID NO: 7284 - DNA, 1581 bp, Diabrotica virgifera
tgttgttaatggccactgcttcgctcaacgcgaagttgttactttgttggccatccccaccatccagaagttgcataatttcatctggcacaaactctatgacctgatcaagaagttcagaaagcaaaggatcgttggaaggttgcatattggtatcccagatggaattgtccgtggtagaagtagcaggtgaagcataacagctcgaattaacctgactcatctggcggttatcattgcgttgtacattattattactggacagaacgttactgaggtagtttgtggtttgacgtccaggcagcctgttaacgcccattctagaattgttcattgtgttttggcccataaccatttgtatagatttgttggggtctgagatcctcggcagtttttcttgaggagtggcagagatcacgctggcaggaattggtggtattggctggtggtttgaaaaagtttttgtctaagagagaagccaacattttatttttctctctcaaggaagtacccgttgatgttcctgaagaagatacctgagaaccatctgaagtccgtttagcgggaatattatctttatcgtcgatggatcgttttctacttctatctgtaggagatgaaggaaatcccaagcttctcatcaatgtatcatcattacattgtgtttccttcttcttgtcgtcgtcagcatctctttctggtttcaacagttgttgaagtaactcgcttttatttttcatgccagctctttctagatcgtcatcgtcgtttttatcgttgagtaactttcttaacatgtcgtttccagttgatgagctcgaagtctttggctgttcagaaggcccaggtatggacgctctattcatcattcctcttggactgccccggttatcgtttcgtatactctcttcgtcttgctggttcagcaattcttttaatatccgatctttatttttatcatcgttctcgttattgttattttgaggtttggtaagcaattttcgtaacttattaggttcagccatcatagccgattcttccaaaacgttggctttggtatctttctgctcatccatagaaaatccttggtcgttcatagaattaaagaaatttcctgttcccgtgttgtagggattggtagccacaggagtagggggattcggaacagttgggctgggttgggaggaaaaaggggaagactgcaccacagtgggagcattgctgtaggagggattgctgggcggacgaggtgtaggagtcacacttgtacgcgaatctggcctgccttcaggccaattagtagattccagttcccaagtggatgaagggaatatatcaaagttgaattcgttgtcaagatgaaaggtttgataagtggagcttgaatttagaagagtgttgttagaattttcgctacctgaactaatgggtggaccattgcggtttccgttgactacactaggcatcaagggtcctcctacgcccgtgcttgaggaattgctggtaccactgaccgattctgttccgacaagatcgttttcgccaatcacagagtgtgttgccataataaaatccgaatcg

SEQ ID NO: 7285 - DNA, 1588 bp, Diabrotica virgifera
  SmartBlast Evalue=0; Info=Exportin-1 n=25 Tax=Euteleostomi RepID=XPO1_HUMAN
tgttgaggaaggctccgaaacagtggttgttaaccgcttggaggagtaaaaagaagtttgtacggtgctccgggtattcctcgaagtctttgttgatcatttctagggtgcattcgaagactgcgtcgaatatcttcgggacctccattgtgatgtgtccctcaagcctgttaacaatcgtcgcgatcgcactcaaaacttcgggttccctcgccagaggtacaggcgttctctgataatccaacaaaacggcgtccaagaatggaggaatgaaactgtcgagcaccatcgtgttgtcggtcgatcgagatatccaatctgagattaatttcaacgtttctttcttcacggccctcatcgattttatcaacggttgcttcactacggcctcgccgttcagtaggatagctgccgttatgtttttagacataaccttataaacattcaacatatctaaataaattctgcccaattgaagaacatacgcgtgatttaaggccttacacgctcgaacattagtcttaaggatacttgtcaattgcttggcgatttcaatttccttcaggaagtcgacatttttgctggctttgcttattacgtcgtcccagacctgattgggtaacatcatatatttctctatcaaagcctcttgtgtagcagtgtcaacttgagccgaaatcatgtagccaacagcttcgtaaaatgtgtgaacctgttgttgctgcagatcacaaatgatggtcggaattgaagccaagatatcttcaatgaatggacaagattccccaatttgtgttgttacgaaatgtcgcctgcatttcagtgctatcttaataaaagtatcacacgccatgtcctgtaccccgtcatgggtttcgtgcataaattcaaacaatttatttacaacagttttcaagaatttccagtgagctcggagaaatcttggatactggccaactacatacataatgttggaggctattatagctttattatccttgcctcgtttctgttcgcaaagtgccaagagatctttaataacagtaacaaggaatcgtttttcgtcttcttcatgcattgcaccagatatactaccgatcgcccaacaaagcgtgttaaggtttttccacgaccactccgtcccattcacctgattctgtagcttattggtcataatactttctgtgtcagcacaatctaagtgggtaagataaactagcgtctctctcatatttttatataaattaatagaatctgtatctttcataaattctctcaccacttcgccattgtcattttctacaacgagcacctcttcaggttttgccattcgagaaatcattatatatcttattttattgagaacctctttatacaaatcgtggtagaagttaccatagtctttagctttgttagcgaatatagcgatgccatggggtacttcttgatatagttgaaaagcgaagctattccagtattcaaggcagatcgttaaatatttctacgtcttctacttcagaaattaataacaaataacgcaaagctttcctaaattatgaacttgactctcagcaatactagtgtgttc

SEQ ID NO: 7286 - DNA, 1579 bp, Diabrotica virgifera
ctctccagctctttctgttttgccagtccacttcatgtagatctcttctttccattgcttcatccacttcatctctgaaaaatcttcggggtctgcctctcctcctttctatcgggctccactctgttattcgatttatccaacgattttggtcttctcttctgacatccgtaccaggttaatctcttctgttcaaagtagcctattatatcctgtacatatcctttttctttggaagactcatttggatttgtattaaggcgtagagcaagagacaattttcaaatcggcgcccgacaattaagaaattgggcaatgtgtaaacaattttaaaattggccatccaccatttttaaaagggtcctcgaccaatttaaaattatccagtacaatgtggcaattttaaagaggtcctcgacaattataaaatggctcgttacaaagttatacttacaattttaaaatgggtcattacaaaattaatattatccgataaaaagtggctttcaatcaaggcatttcagtttttttgtccacattgtagatttcaatcaaaaataaatatttctttatcattcttcttctcttattctcctcatgcgctttcaaacagctttgaactatctagagatgcctattttacagtttttcgccacttttttcacgtttttgtatttccttcagatttattttcatactttttatactcttattgttttgaacatcattttcgttgccatttattaagtagtactttccaacatttgacattgacattttttaaaatgctagtaccatctttctcccactaggtaaaattcttcaagcatgatagtacctttcaacgggctagcgttatttttaattgttttgactgtctttttgtatttttaaaagcgttgtggtacttgttgacactattttaactgcttgtagtacttttggacaatttttaattgttacaataacgctaatgacacttttttaaattctgatataatctttccaccgctagtatatttgtagtacttttcaaaacatttttcaacctttcaaccgttagtaatgattttcaacagtttgtaggacttttcaaccatcatatcagcttgtcaatcgcagcagtaacgattttactaccgctaataatgtttttcaacagctggtagtactttttaaccagcaatgacacttttttagatgctagtgatattttttcactgttcgtaaaattcttaaaagactaacagtactttccaacagtttatggatttttcaatctagtagcatcatttttcaaagctatgcatttttcaataatgttagcaatgtgctaacattatttcaaccacatttgagacttttcaattgcttgtagtatttttaggctccggtagtactactcaattgctagtaacacttttttcactgctaataacgttttttaaaagcatttagtatttttctaccgatagtactattctacaatcgttggtagtatttttcaaccggttgctagcattttttaacacatggtggtactttttgaccgctatcggtactttttgaccgatggtgg

SEQ ID NO: 7287 - DNA, 1583 bp, Diabrotica virgifera
  SmartBlast Evalue=1E-100; Info=Caspase-1 n=1 Tax=Bombyx mori RepID=Q8I9V7_BOMMO
ttacttctgatgctagatactttttaaaaaacaaaattaaacctttttttaagttgtgctgagttcatttttggttcttacttaaaatttatttaaaataagtttgcttatttttttgatataacagttatcttttgtgtgttatttgtgaaaaaccgtctaaaaacttggttctttgtttaaaaagaaatactttcaatcgcaaacaactagaaaagtattgatttagtgaaaaaattttatagaacaaaaattgcgtggaattagtcactctatccactccaggacttactttgttttgaccccctagaaggaggtgataccccagggaaaaagcacagatcgacacaatatcactttcttccttgacgtgttagccatgtgtataccaaacttcacgccaattcaagcggttcttaaaatccggaggtttggcaatatcttaccgtgagtgaatggactatgaagaaaaacttcaaagtttgaagatatacttaaaatatgaactaaggcgatgttttttgttgagttttacagaattacttaatgtatatatccgaaaaaaacttatccacaagctggcaataatattcctaaatcttaaggttaaactggatcaatctagtgagcatgctcaccacacagggtatctgcttttggcggtgcatggtcatgttgtctggaacgttgctttcgaagtctaaggcgacacgttgagagacgaaggtcaggatggtgacgaggtccagctcaagagctctcttcttcagttcgtcgcacagcgattggatgaaccaggagcctttagtggtattacgccatgagtaataaccttttactgttgaatacactataaggaagtcagcttgaactgggattttatatgtattgtgaatttctccatcggtttcagttctcgacaaactcaccccaccatctaatttatcaccttggcaagcttgcaagaaaaatatttttggttttcctgcaagactggggcaccgatctgcagtaaaagatgcccatagattgtcaggcttatatggtgtatcttttgcatatattattcccatttcaccatgggaaaggacagaaattagtagacaatcatgcttattgtgatcagcttgggcagtttcacgaacgtgttgttcaatatccctataatttaaatccttgaaaacatgcacatcaaatcccaaaacaataaggcactctttgaggtttttgcagtcttcgttagtaccatttcttggcttcaaattaccacattcgaacacttcatggttgaaaatgagggccaagcctcttttaggatgttccatgttgtagtgggaagaatatttgtgcactggcattcttgcatatttttctccagaagagtttccagctcttcccagggcatctctttcatcagatttgccattccccatgtgcccgaggcattggccatcctcagcatcttgaaaagagtcttcgacttctatattccgcaaaccattacctacttgatctgtaccagcgtcttccatcgtcactataatagcattgaatataaatttcaaaataattaaacaaaggaa

SEQ ID NO: 7288 - DNA, 1586 bp, Diabrotica virgifera
  SmartBlast Evalue=1E-163; Info=Ethanolamine-phosphate cytidylyltransferase n=3 Tax=Apocrita RepID=E2AQE1_9HYME
tactcactccatacatatggatccatttctttacttactgttataatgtttagttgttccatcatagatttaaaagttactcaatattatagaactaatacctcttaaaatttcgttgacttaattgtctactatttataccagtttccaaatgttgccatggtatataagcaattgtacaagccataattttgttataagaaaaatatttgtttctacactggtacaaacagaaactaaacaaaaacaaatatacaaaaaggaggtaataatgtagaatgtaaatgatcataccattaaaattttaaaagcattacgacgcatttgctgttataccgttttgttttatctcgagctcttccatttttttaagtacttctaattcctttaattctttcttagagtttctgtcttcgaactgcaatctatttctgattattctttctacgattctctccgtagtcatgtcgttgccggactttacactcacgaatttaccaagcgatttaggatattcgtacggatcactcccatccacgtccatcataacagatgtatctccatgtatcactacgtcgactttgaaatgttccatcaaatcctttgtaacggtatagggagcaccaattaccacttcggaaacgtacttgcacgcaaggacactgagtaccctttcgtgtaggttcattattggataattggtgcccttatatctgttgacgactggatctgtatgaagtccgactattatgtagtcgccctgctctttggctttttccaagaagtccagatgaccgacgtggaagagatcgaaagctccagcaacgtagataatcttatcgccgggtttcggagattttccatctgaaaactggataatcttctgtgtagtcggcaaaaactgcgaacaacctgtccaaggagatctagcgaatgagtcctggcccatagaagaagaatgttcccgagcgacatcgtactcatactgaccttgtttaaaatggttcctcgttagtaatagcatccgacctaccaaatccgtcgtggagacgcctgctgtccgttggacttccctatatctacccgcttctttaaccaagtgataagtatccaccccatcagcggtcaacgtaatgtcatcaccatgtacacaaaaatcacagtcatatttatccaaagtttccaacgtcgttacatacggagctccttccacaacttcgtccacccatttgatacctcggaccatcttgtagcgttcctctgcagtgaatactggaggtcccttgtgtttcattatttcttcgtccgtgtggatacctaccacgaggcgatcgcccaatgccttcgcttgacgcaaggaatttgcgtgtccgaaatgtaccatgtcataacatccatcgcaccaaactctagtaaagtgtttatccccattctgtaaagtattttccggcattttactttaaattataatgccaaataaaattgtataaaattattattttttaaaatttataatcacagcactctttatcaccaagaaactaaattttgctttgagaaattcgacctagtcttcctccttttag

SEQ ID NO: 7289 - DNA, 1570 bp, Diabrotica virgifera
ggacgaaacattgactgaattcttttgaaatgttttttatgaatcactgtttataacaatataatcattgtttataatccaaccaagctattttgaccagtctgtaatttccgtcttctttgaatattcttaaaatatttatatcgtaaaatgttttccgttagcatcagttaatggctcctttgaaatgaaatcatcctcactttgccagcaatttttttttcactcttcgacggaaaatatttcaagcactcatccggcaatttttgaagagaattaaaagtgaaatctacatttcatgttccaacataattttttagtgctgcccaaacaagctcttcttctttaggggccgtcttcttagcgaaggctggcgatgacttctgcagtctttgaaaagtctaatcctgttcattctttgatgttgcgcacccaggtcatttgtcgtctacccgggccgcgtctaccttctattttcccttctataataatctgaaggaagttatacctgtcgtgtctaaatatgtgtcaacatacgtgttttacgtttcttgacaatttctgagttcacgttctctacaagctatatcgggtttaaatctggatgatgtggagggagccttaatacatcatggccgttatttgtaatatggaatgaacagcaaatctaacatatttcggtttatgtaattttataatggcatacagatctggcttgagcatgttagcaggaaaagggattctagcttttagtcaatatatcattttactctttactattgaaaaggttggtgctttatcctcttgagtattatgatagggagcattgtttattacgatgacaccgttgggagataaattactaaacaatttttcttctacctagtttttgtagttgacaaaattcatatcatcatggtaatcacccgatttagtttggtacttgttacacacagaaaatcctgaaaatgctaccgaaaaatcgtattataatccactattctttttattagattgtttatcaaattactcgttattgtagttacacgctcctgtacttttttaaatgtaattttttagattaaatgaagaattacagcacgaccaaattcacttggatgcgcagtggtgttgaggttcggtttttccaaattttttgaattgtattttggtaacgtctcggcaagtaaaatacctgcacagtaccaaagtaaatttgagaaaatgtggagaaaccgaacgtcaacaatagtgcgcatccaaatctcaaatacaaagtacatatgaatttggtcgtgttgtacaagattcaaaatcactagtattaaaaattgagattcgcaaaacttggcaacgtcgcgaaaagtggtactgaataaactgagcgctctgcgccgtaatttgaaatctgccaagcgcgcacagtatgttaacgtgtattcctatttcggttcatctgttatagaaaaaataatccatggtgttctttataaatagcctcattttgtttttcttttcgattatagtatagagtcttgaaataactgattattgtttcaattatttatat

SEQ ID NO: 7290 - DNA, 1586 bp, Diabrotica virgifera
  SmartBlast Evalue=8E-62; Info=Endonuclease-reverse transcriptase n=1 Tax=Bombyx mori RepID=D7F164_BOMMO
tggacagcagtagactaccagctttatctcctgtggaattagaagagataagtaccgcttacccttgattttagggatagtataatctcacaaaccagtagcgtctgtctcagagtgagcggctacaaacagcgtctgacccagagtgggcggctgaataagaactcaccaacccgcatggcaagcgtggtgttttaactgccattacccccctctttatcatggcgaataataaaacaaacggaaatggtccccaggtgggtaaggaaatttctgaatcccacacctcaaaggtctgcctcacggattctgggggaggcaataattcgctcttgatagataaaaacaaaaacccactaagacgaacacaacagaaaccaagaaaatctatcaatctgtcaatagggacatacaatattaaatcaatgtccacagatgaaaaaatacatgaactggaggaagaactaaaaaatataaaatgggatatcataggcctatcggaaactcgaaggaaagaagaaaaccgaatacagctaaactccgggaatctactgtattataaaggaaatgaaaagaatagtaattttggagtaggatttataataaataaaaccataagtaagcatgttcaaataatcaaaggtatatcagatcgtgtcgcctatgtcatactcaaaataagaagaacaacaattaaaattatccaggtatatgcccccacgacagcttatgatgacgaagatatcgaactattttatgaagatatttcaaaggctatggtagaacataaaaatcgtctcacactagtaataggagatttcaatgctaaactgggtaagaaactaaacaaagaagaaactaaaataggaaatttcggatacggccagagaaatgatagaggtgctactttgatgaactacctagaagaaaagcgtctatacgcaatgaactccttctacaaaaaaaaagtcccaaagaaaatggacatggatcagccctaatgggtccacaaaaaaatgagatcgactacatactgtccacggaacgatatatcattaaagatgtaacagttcttaacaaattcacaacaggtagcgatcacaggatggtcagagcaaaaattaatatcgacggtaactatgagatgaaaagaaaaataataagaaactcggatatagtagatagaaacaaactagggcaatataaagagaaatacaaagacctgttaaaagaacaattcaccgaaaaattagacagtgatgataaggatatagacgaaataaacaacatacttacagcaacgatggttacatcaggaaaagaaatagcaaaaaaggatgttaaaaaggacaactatgtatcagaagaaacaaagaagcttatggataaaagaagaaagcttgtcgaagaaggcaaaaggaaatctatagaatatgtagaaatcaataagacaataagcaaaatgataaaagaaactaagagaaaagaataagaaataaaaatagaagaagtaatacagaacaacaagaatatgaaatgcttaagaccgaaatcggcagatttgaaataaacaaaagaaaagacgt

SEQ ID NO: 7291 - DNA, 1588 bp, Diabrotica virgifera
aactggggtattttttcgtcgttgaattaatctatttggttacataatacaaaattaaacgactaggcgttttttcagagtaaagttaacttcctcactcaagtataagttgatttatcttttatcacttttgtcatcctcgaactgcaaatataaaatggaagatagatttctttaaaggaccattgaaactatcacagacataccactacattttcatgacagttaaggtgttttttaccacttgttttgctggtattgaatagcgcgatattactttttaagtattgttttttataaaaacttgtagaacacaaccataccttttgctaagaatcgcttccactaatccagaaatatacatgaagaaaaatacgaagtaatatactctttcagtaagcttgtttcttgttaaacataaacatatttatgatttctcaagattttgatggcatttgttttttaattgatttagaaataaactatttaaaatatatttatatgatgaaaattttatgttaattgcatctttctaattttgtagtatattttcaacctttttttttaatgtaagtaaaatacatggttggaataaattattaacacttccataatatcattcaaaaacaatacgaattattataaactaaaaacaattttgaaaaaaatattcctacctatttattcgtttattcataactatctgctcgattttatctcatattgttttgtttacctcatttacgttttagtaattcattttaatagttttagatctcacaaaccaaattttaacttttttgaaacaagtaaaagattctgctgaaagtttgttattgtatatattttcagatctacactaaaacctccgttaaccgaaacaattggggggaggctgtttcggataacaagaactcttcttgtatcatcaaatgacgtattattggagagatatggctgcaaaacattgttgtcaaaggaaaacccaaaagaaaataggagatttcttaaaagacaaactgttaaacatgttcattttcttaactttattgatttttttaaattaatttttttaaaccttttattgatgaagttattgaaactttcagtcatttcagttaaacgatgttttggttaacggaggatatactgtattacaatcagggtaaaatggatattttctatctattccttactgttaaatactggtatgtggaattaacaccttggctgcatttagacatatttatatttttagttgaaaatatggtaaaccgtatttatcaccatgcattacaacacagtcgacgcagccaaggtgttaatgcaggagctataaaatacatctagctgctatggtttgcatcaatcaaatattaaaagcactaattatcagtggtcaaattggacttacgaggacgaggaaatctactgaccaaccgaacggttcaactggccgcttatgctgatgatattaatattatgagtagaacatcaacaggagcacaggaaacatatgcagagttaaaaacacaaacaaaaatgctaggtctggaaattaccacagaaaaaacaaaaataatgactc

SEQ ID NO: 7292 - DNA, 1586 bp, Diabrotica virgifera
  SmartBlast Evalue=3E-67; Info=Pheromone-degrading enzyme 2 n=2 Tax=Antheraea polyphemus RepID=Q2TIL4_ANTPO
agctaaataaactaggttggaatgaaaagtttattttaaaacatgattaaattacttgttttattatttgggctggctttacacgtttcatgtgaaaatccaatcgttagtttacccaatggacaaattagaggccgccaagtatcagcaccagctgtagagaatttcaaatattatgcttttctgggaataccatatgctgccccacctattggaaaactgcgattccaagcacctcaacctcataacaattgggaaggggtttttgaagccaccgataactcaaaaatttgcatccaagtgggattgaaacatgctcatgcttcagaagattgtttgtatctcaacgtgtattctccagatctgtcacctttgcagaagctaccggtcttggtctttatacatggagggactttcagacgtggtagtgcatttgggggctacaaggcaccagcatttatagtcaaagagggcattgttgttgtcactataaattatagactgggaccgtttggtttcttgactagtcaggataacgccatgcctggtaattatggattaaaggatcaacattttgctttagaatgggtacatcaaaatatacacttatttggtggtgatccagaccaagttactctatctggccaaagtgctggagcagcttctgtggcgttccatattatgaacccaaaatcagaagatttatttagagccgctatagcacatagtggttccgctctcaacaactgggcctatcaacataatggaagagaaatagcatatggtattgctgcagagattgatcctaattttacaagaaacaaaaccaccgatgaaatattagagtttttgacaaatgttcctgcttctgatatcgaaaagacagcggacaaattcagcgctttcgctcctgcaatagaagtccccaacaatgactcggtattttccaatctgatttatgatgctgctacgatgcgattatttaataaggttcctcttttgatcggaattaattcagaagaagctgtttttaaagctaaagatctacattcattaacaaaagaagctgctggagttgataaagatcctagtaaattagttacgtttgaagttttaccatacaatgattcaatgccctcacttgtgggcaataaaattaaagatctttatgtgggcgaccaatcttttgaggaaaatcttggaaaatatctacagtattttggagacaacaggtacatgagaccagtaattaaattcgctgaactgatttccacagctgccaacgtatatttctatcagttttcgtatagtggaaaattggggggaaacgatgtttcttacccaggtattggaaaggtcgcacatggtgaagatttgaattatctgtgggtttaccacgacgactatacaagttttccagattctgatcttattgcattaaggcgatatgtacaaatagtggcaaattttgttaaaaatctggaaccttcaatttccgatgaaaccatagactggcctctggtacaatctggatctatttcttatctggatattgacgaacaattatctattaaagaaaacccgag

SEQ ID NO: 7293 - DNA, 1586 bp, Diabrotica virgifera
  SmartBlast Evalue=1E-144; Info=Prophenoloxidase activating factor n=1 Tax=Tenebrio molitor RepID=Q9GRG2_TENMO
ctccaaccaaagcacttcaacaaacagagagaaattgtgattgtgatattgaaatacatatcgacattatcaagctatttgtgatttattagcgcatgccagcgttatatattttgaccagtgcgtcactttactggcgtttattgaaattaaattgatattcaagccggttttgagactcaaggtgctgcttctcagttgaatctacctctctctttttgatatcaagtttacagttcgtgatcagaaggctacttttggaataaacactatacaaagttgcaccatggtatcacccttggtcggcatagccgttttgtgtttagtttgttcgataaatggacaaggtgaagatctagactctctaataaactccgtgttctccagaccagcagaggataaaccgacaactgaagcgacaaagccagtaacttcttctccaggaatcaacttacaacccgtagaaagccacggcggtgaaactggtattccaggaattggggaatgcaattgtgtaccgtattacctttgcaataatggcagtatcaataccaatggagagggaattattgacattagaataaacgagggtccttgtggtaaccaatatattgatgtatgctgtgataagaaaaatacagtcgatgaacccataactccaactcccaacacaaatactgttggatgtggccatagaaactcaagaggagctggagtaagaattaccggggcgactgatggagaagctgaattcggagagtttccttggatggtggcaatcttaagagaggaatcggtagaaggtaacccgctaaaactgaacgtgtaccaatgcggtggttcattgatccatcctcaggttgcgcttaccgcggcccactgtgtcgcaggtaaaaataaagtatttaaggttagagctggagagtgggacacccagcacgagaaggagctttacccgttccaagacagagaggtgcaatcgattgttgttcatccacagttctacgctggagccctctacaatgatatagctcttctctttttaaaatcccctgtcagtgccgctgaacatatatccacagtgtgtttaccttcacaaaatcaagcgccatctggatctgggtttgccactggttggggaaaagatcagtttggcaaaaaaggaaaataccaggttattctaaagaagattgaattaccggtagtatcaaataatatttgccaagataaactaagaacgactcgtttgggtaggttctttgaacttcacaatagttttatgtgcgcgggaggagagtctggtaaagatacttgtaagggagatggaggaagtcctttcgtgcttagtactggtacagaagaggataaattttaccaggctggtattgtagcttggggaattggttgtggtgaaaatggcaccccaggtgtttacgtaaatattgctaagtttaggagttggatcgatgagcaaatggccaaacagaatttggatacttctacttataaatactaaatttaggtgacttattatgtaattatgattgacttttatacgctttatttcaataaagtttaaaattttt

SEQ ID NO: 7294 - DNA, 1581 bp, Diabrotica virgifera
tagtcatttatattggctgatttaattctgtcaaagacattattactttatattgcaactttggaaattggaattttttatactttgtttcacgttaagaacgaaacattacgcttatggagatcaatgtgaaatataaaggtatgtagtttgctcttgagtgaaattcatattttttgacatacctcgtatactgttgacaaaatttgatatctgatgattgcatcttaggttttagactatgcagagcactttataaaaaatgactttttttcgtaaaattgatattaaaaagtttcccatattatggttccaagttacgcagacaccctgtatatctaactagcgacgtcatccatctgggcgtgatggcgtaatcgatgatttttttaaatgaaataggggtcgcgtactagctcatttgaaagattgtccaattgtctattcagtggaataaacattaacgtaattatttatacagtgtgtctaaaacatttattaagtgacacaaaaagcagaagactgtaatttatttaaatcaaaaatatttcactgctgtcagaaaacagaaacaagcttgaacattgaatttaagtgaaaacaatgtttatttatgaaataaacattttttctgttttctgacagcaataaaatgtattttgaattaaataaattacatgtaaatattcttccttttgtgtcacttaatttatttcaaaatttatttttttgggtaccctgtataaataattatgttagtgtttatattgctgaataaagaattgaataacgtttcaaatgagctagcacacgagcccttttctcattaaaaaatcagtgattacgttatcacgcccaggtggatgacttcactaatagtatgaaatataatgtcagaaaatcataatttaaaaataatccacctgtttcaggatttttcgttaaaagtcgccgccatacaaaataccgaatttattcctttcatttgtaccatactgtatacattagttaggattttatatacgttcagacaaagtttctatttcaaataataccaacagagatttcctatttcaggtgaaatagggactgtcttatttttgtaggtactaaacgtcactgactctattgtacttttggcatcacgacctgtattgaaactatggcaagaattttttaagacttgcactgcacagtctgacaaaacagtgtattagatattttaggaatatagtttttagaacaaacttgagttacttttaaagataatagtaggaaaattattttaaaatacgtaaccgtgtcccatatgccggggggtactacttttttaacgaagttacaaacgacaatacttatttttttacttaatatatatatagcaaatgtctaaacaaatatattattttttctttatgttgttttatctattgtagttttaatttattgatgtgtgccgttttgtaataatgttttctattaaagtgtcagatgtattgcatttttgtataaccagtattttacagcatagtaaattttgtattatgacgagaaatactaatgtttgtgataaattcttac

SEQ ID NO: 7295 - DNA, 1578 bp, Diabrotica virgifera
gggtatatcgacaaaggttttaggtatatttgccaaaaaggcgacgtgagcatgatgatttttgtaagattgctcgttgttgatactggaaacagtttttagtccccgtattctttttaaattcaattgcttcattttgttacttcctcttcttccacctttccctctgaatactagaaaaatagctactggtgccgacaaatttgaatttaacactctaccacctcctaagactgacctcttccacacttttttatgatttcctctaaacaatttttctcagtgtatatttttcgcaagcggatatgcgtaaaacctttgtgtttatcctcgatttgtttagaaatgtcactcaaacgaatttgcacacgatatttatgactgcactttgcttttgatgtcgataagttaaaaaaaataacagcagatgatcgattaggttatgataatctatgcgtactgctgcacgtatttaggctcaaaccgatcaaatattcctgcggcagattaccaactgtaaacaaaaaattcaggaagaggataccgatgagagaattaaaaaatataattgaaaaatgagatctacacagtagtgatgttgaaaaagtaacttcgttacaaagtactcgttccttaggaataccgaaagtaacggttactatacgaagaggcaaatcgttactttgattactctgattactgcataccaatcgtatcagagcgagtaacgactattatatctactttgattacttcgttatttcgtaccaatcgtatcagagcgagtaacgactattgtatctacaacctgtgcacttgattactttctacccatcgtatcccagcgagtaacggacgggacccgtattttacgagtgttatcgaatatcgttatcggtttgaagcgttgtaagggtgtgagggcgaagagaagatagggtggtatacgtaaaatatgtaatgtatgtcactaataaagatcgaatgcgagaaccctatatttttatctatatctatacctatacaaaatacctacctactgagaaatacgattctcgatatgattaccggtactcaaatacaaaaggaacaaaagtaatcatagtaatcaaagtatcgaatactgtaaatgattactttatacaaaagtaacgatttgtaacgaatactcgaaagtaactgtaatcaacatcactactacacagtcaccgagttcataaaaccaaaactcgttgttaccagatcaacactccggcagaactattctctatgttgtggcgaacctcgtattatatcgttgctgatgatctatctcgtttttatcacgtgtatacgatcttatgatacagttttaggcataagagctgaaacagacttacagattaaaagcctgacgtgacaatgtaaaaaatggtagtttttccattcataagagcggaaaaaagggaaaaaaatgaagcgtcgaaaaaccgtataccattgttccatacaattagatcttattcgagtgattttgctattgcgcataaaaaatccactcgacaagcaacaggcatgcgcaccatacatgattcgtta

SEQ ID NO: 7296 - DNA, 1585 bp, Diabrotica virgifera
  SmartBlast Evalue=3E-43; Info=Glutathione S-transferase n=1 Tax= Glossina morsitans morsitans RepID=D3TPR9_GLOMM
cagagccaattgaaagatatatttataattaaattatcatattataataacatacaatttttgaatttaaatattatgtatttaaatacaaaaattataagtaggggagcccaagcggggatttttgcagttactcgagcgcgtcaaattatcatatggggagaaaccttgtaccctgcagatgtacccctaccatatattggctcttaacacagggaagttcgttaaggaagcccgaaaaaaaatctatccttaaaagtactcgaaattgtcaaattaatacacggtaagttaagtacatgcaaaagagtgtatatttaaaaaatctgacgatttgagcagagcgtaagccaatgggtgagtcaaaagtttcacaaaaaaaaaagagaatatttcgcgaaataaacgtcagatcgaaaaactaaaaaatacgtcttcaatatttttcaaaaatctatcgaatggtactaaccatggagaagggtggggggtaaatttaaaattttaaatacaaaccccgcgatatttcgcaaaatcaatatcagatcgaaaaactgcaaaatacactttcaaaatgtttttgaataatgtatcgaatggtaccaaacacgaccccccacggaggtggggttactttaaaatctaaaatgggacccccaaatttttattgctttggattctttacgtaaaaataagcaacttttatttgagacattttttcgaattatggatagatggcgctataatagataaaagcgattgttggatatggaaaattaaattaaaaaatgaaaattttacttaacttttttttattttaggacctaataatcacaacccaataggtccccataacactcgagtgactgcacatttagtatactttgctcccctaccggccctaccataacaaaaaatttatttttttaatactgcattgattaattttttaaatgttgctgctcccggttcattaatttccttatatggattctgattcataagctccatccattccgtaattcttgggaaatttgtttcttctataggaactaggtttgaagaattagttaaagtagcccaaatactaaaatcagcaatggtcatttcatctcccgcgacatatttactactcttgagaaaaacttccaggaattgaagagcctttatttcctcagaagcaatatcttcagaaaaaatttttttaccgaaaagttcagcacataagtacctatgcatagaaaatagttcaccacattcaaaaaatagaagtctatttattctagctcttttcgctacatctgtggggtagaagggtgtatctttaccatatttttcggccaaataaatcataatagcgtgactatcccaaatgacaacaccatcgtcatccaatgtcggaacggtgtgttgaggattgatctttaaatattctgccgataaatgttctccgcctacaaggtttattggattaaattctagattaatatttaaagcttttgccgttaacaaaactgctctaacacaaggacttagaacatctccatataacttgggagccatatttccaattgcagtataaagc

SEQ ID NO: 7297 - DNA, 1584 bp, Diabrotica virgifera
  SmartBlast Evalue=1E-115; Info=Beta-glucosidase (Fragment) n=1 Tax=Tenebrio molitor RepID=Q9GSE6_TENMO
atactattataaagccaaccacatatccgttaaccttggtgatgctttgtcctccatcactatgagaattatcctctatactctttgtcttgatgacatttttatagtactctgcagaagctttggctgttctcgttctgttatcgtctgtaaaatctacggaatataatccaaaatgggccgaatatccctttagccattcaagattatccattaaactccaaattgttactccgattacattcacgtcatggtcgtatacagcatcaaggatagcgctaaaatagtttttaagtgttttaattcttgattcatcttctaaggttccgttatcagaaataccaatttcagttataagaattttaggaacattgtattcagtcttaatatgatttaaaacttttgtgaggcccaaaggtactatcggaaaacccgtaacgtcaatatcagcatttgaaacattacccaagacgatccttacatcattatcgtagctggtaacatttgtgggaccttctttgccatccgctaccgtaaaggtaacataataatttaagccgaagaagtcagttgtcccgtagatatagctgatttgagctagagtgagttcgggcaatctgctcgtgttataattttctgccatgcttctttcgtatatacgcatctttacatcctcaggccaatctcctataaagagtgggtgagcatagagtccgcactcaaagtttaggttccgtttggctgcttgtttgtcttggaccgaatcagtcaggggttcgtaccactcacagtctatagtaatacccataggggctttaaggtttagggacttatacatatgatacgtctttgcatgggcattcagcacagtatatgcacaccaatattctcgtagtcctgaactgtgtatggctggtgcaacagtaccaacaccgtatccataatgacaaatttgtttcggttcattaaaagttatccatactcctacatccggaagtccttgaatgactattctggagtactctacaaaaagatcagctagtctaggatttgaccatccatctatctcagaaaggggttggggaagatcccagtggaaaattgttgcaactggggtaatgttgcggcttaccaattccttcgtaaggttcttataatattcaagtccggctttattcaccgtggagggatagccagttggaagtattctcgaccaagaaattgagaatctgtagaaatttactcccaagtcttccaaaatatctacatcttctttatatttgtgataggagtcgcatgctatatctcctgtgtcattgttcttgattggagaaggaacttggtggaccatatggtcccagatattttctcctttcccatcttcatcccatgcaccttcaatttggtacgccgatgtagctacaccaaataaaaagtctttggggaaggatccattatttttggcttgagcatacgtaaccagaaataaaaaataaaagaagtgattcgcagtcatttttgctgaacaactgcgggtcctcttctctttggaggtcttataagatacgttgcaaattttcagac

SEQ ID NO: 7298 - DNA, 1580 bp, Diabrotica virgifera
  SmartBlast Evalue=1E-104; Info="Para-hydroxybenzoate-- polyprenyltransferase, mitochondrial n=1 Tax=Camponotus floridanus RepID=E2AFK6_9HYME"
ggcccttcacatcatgcaataatgaataatactgatcaattttatcttgatgatgcccaaactcctccctcaaagctaggagctcttctgtagtaaatcccgctttttcggctttttcccacaatttattcagcttcttatctttaaaaatactcttattaatgtgcttgtcgctgacttcattgagtggtttccatcgttttgctttttcaacatctgagatatcatcagcttggtccaataacccaaagttctccataatctgtagctaatttttttcttaattgggcttctatggtaccatctttgtccttgccttctgctcgaagatgcttccaagttatttcttctttatcatgaagtttgaggtctccaaagatggattttaatttgatatcagatagtctcaaaaactgctttggaccataaaagattcaatttggccatacgaaaaggccgatccaggtgcttcagagttataggacgtaaatccactggttcatcaacatcatccttatttttgttcacatcgtttgtttccaaattagcttctttggtatatttgttataacacgtggtattgataacgaaaactcaaataattacacatgattacatattattttagccgttaataataaaacatgtatcctaaaagatagtataattcatatagaaaatttaatataccaaaaaaatgttatcaagaatagttataagaaattttgacaagtcgcatttgctcaggaggaaacaattgtgtagtgtaacaatatttaattctagttttactaatcccatagaagatgaagcaccaccaaaacctactttagttgcaaaattagtatcaaactctccaaaatcgatacagccctatttaaaattggtaagatttgatcgacccatagggacctttctattattttggccatgcagttggagtattgcctcggctgcagctcctggagctctacccgatccctacatgctggcattgtttgcaacaggtgcattagttatgcgaggagctggttgtaccataaatgatatgtgggataaggacattgacggaaaagttgaaagaactaaggaacgacccctggtgaatggtgatatatctatgaaacaagccctagtgtttcttagtggacaattaagtgttggtttggcgattctattacagctgaattggccaagtgtattccttggggcaagctctttagcattagtgatcagttatccacttatgaaaagaattacttattggccacaactagttttaggatttacgtttaactggggtgctcttttaggatatagtgccattcatggatatgttgatttgccagtttgcttgcctttatatatggctggtgtttgttggactattatttacgacaccatatatgcacatcaggataaaacagatgatttaagagtaggtatcaagtcaactgctcttaaatttgacgaagataccaaattatggttgagtggctttgcatcgacaatgataggaagccttgtgatatcgggagtaatgaactcgcaaacctggccatattatactgctgttggtt

SEQ ID NO: 7299 - DNA, 1576 bp, Diabrotica virgifera
  SmartBlast Evalue=7E-71; Info=Sulfhydryl oxidase 1 n=1 Tax= Harpegnathos saltator RepID=E2BAZ4_9HYME
aatcggaatctagtttaaatgactttgctttgaattaattaactaaacaaattttgttaaaaaatcatacttttccatgtatatcatgcaaatacgcctttttcttataacctcttttcgaaaacagatatattagtactaagatcaacataaaacaagctaaataaagtataaaacaaaatgctgtgtctacggttttaaaaaatcctggttcagatttgtaatctggagaaccatcaagtcctagatgcaatattcttgtatctgaaccaatatatcgcacattaatactagtgtagacgtgtttgagatagtaaaatattctggaatgttccaagtattttctttggtgtaacacctcgggcaattcactttggagggaaattggtatttgggatattctggatcttccgtttcgtctcccgacaatcttttgttgacttcattatgtgcgctccacagccacaaaaccgaatcatcccatgacgatacattagatagagcccttcttctggccaagtcttggaaatgttgactgcaatcataacaaccaaaaaaggatttgatatagccatgcattgcttcgagaacaactctaggatttgaaccgacagcttcgtctgcagcgttgacagtcagataatggaataacttccacatgccacaagtatatcctcgataattatctgcactacctttacaacctaaccactggcctagtggcgaagaaaacactagttgattttccatttcagcgtgtttaagaaaatttgcaatatcagatcctttaactgcagttttgtaccacacaaactcttttaagtcgtgaaggaatagttttccatttcttccaaacggaaaatacttgtagaggacgtttatgtagtttttaagtgcttggagtctctcgtcagtaatttccttaactagtcctacctcatgtttaagagaatacctaagagtagattctaaatccatttggaagactacgtcgcccatcctctttattttatctttcaacctggctctctccctttcgtctaagaaattaactacattttgtgaatgtttatcttctctattaataattagttcttcattactattagttgttttgtgtggatataaatatttttgaatggcatttttaattgattcagcattggctttaacatctaaaagtttgtgcgtttcatctttgtttataactaccaatgctggaaaacttgtaacgccaaatttagttactaaacctgtttcatttttcagaatatacctaacattaacgtttttaactttatgtaaatccatcataacttcctgacctacataatcggagacattttgttgtacaacgagaaacgcgagatcattgtccaatgtaaacaaatctttgagactacctgtaaaaggttgaagtgtagggaacattttacccctatcggcagtttgttcatccattatagtatgtaaaagaacacgtttgtgtgctgctgcgtctcctcctgttttaatattcagtcctaaatttgtggcgccctcttcatacatctcatggaaatatttaagagttgga

SEQ ID NO: 7300 - DNA, 1568 bp, Diabrotica virgifera
  SmartBlast Evalue=1E-103; Info=Ubiquitin protein ligase n=1 Tax= Culex quinquefasciatus RepID=B0W765_CULQU
ttgctccttctgaacttctgtgaatttatgaacaatcttccaaaataatttaatagttacatgatctgcagtaaagtctcctccgtatacagtgttagcacataagtcgacagtatcaatttctttcgtatcaccaccaataataactttcagttctgtatgactgaacaatttcaaccaagtcagtggtacaacgctattgatgccatctctaaatgctgtacattgtcttcgtaactgactgtttaacttcagatctgccaacctctgaatgtattctaatctattttcgtttgtcacgggaatgttggctccgtttggtttgagctccatcaccctggtttcacccagatcgttatttacagtagtaaaatccaaacctaaatcgcttatatcgccattgtaatctctcaaatagagtagatttctgtacaatacaggatctaatgattttaaataatgagcaggtgctctatctactaataatttcgctaaaaaaaaattctgctactggaaggtccactaaaatattttcgaatattgcttcccaaccagccttcctataaaataataatgatctgtgaaattatccactatcaggtgaacatttggattaggatatacagaatagtcggctgttattaaaaagaatcctctgtttggatcaaaagcggtttttaggacttcattcaggaattctttaaatatacctcctccgtctattcccgcttcttctaatccaacgttgttaatgaattttattctaagtttgtgtttcaggtccaattcacttttttgtgaaattttgtcaaaggcgtcttcgtatatgtgagtccttcttatggctactacattttcatgcatcagttcgtggtgtagtctttgataatcgtcctctcccaaactgttcctacataagtctctgagcaataaaaatcttgtgttgaaattaactaaaaatggaagttcttctagtaccgccaatgaacgttgttcgattgtagacagaggtggcaaatgttcgtcttcttcattgcgggctccataaaacgacgatattttcttcgacaaatagtccttccgagccagatcgggcggtatatgcatcttatcgcttgtccaaaaaccaattggacaaaactttttccgcaagtccaacgtgtatagcatacgaacgcagttcaggcaggccctgtacaaatgttggacttccggcgttgatggaatcgagctggatcgacacataggaaatgctacttcgattaatcctctcgctacattcttcagcaattttgacattgacaataggtcgttttgggtgaatgtatggctcgtgtctgaggtttcactatctgttagagtttcagtatagaaagtaaacatatcacagaaaactgataaagttgtatggtattctctccaagctataaacgatgatatcttggtttcaaattgtcctgtattgttttgttcaaataagcccagagccgttttaaatatgtactgctaagtccaaacttatacagtaaaagatatttcctcatagaatccttgtacaccagtaacaa

SEQ ID NO: 7301 - DNA, 1580 bp, Diabrotica virgifera
cggaattaattaaaaaaggtcttttaaatactattctcgaaagaaattggaacttatatcagtaggtagaatgagagagatgtgtactacaaaatccttatattttcttgtaccttattaacctaattctacaacaaagagcagaaaataatcaagaagcaagtgattaccaattggacaatttagaagatccaaatggagctaacaaagaatactttttaatgagacagatgtgattaaaactaaataaacttgaagatttcacaacacgagattttgaattactgcttcggttgagacaaatttgtgatcatccgtcttttataactcaaatgcttgaggaagatctagagttagccgacaatgaagagaatgcacttgatagagaaggcgctctagttcttctggaccaacttaacaaattagccatagacgatacggaacagcttcgtatatccgaagcagttgaaggtcttagcaaagaagccactatgctaaaacaggtcgtaaacaaagtactacctccttcagatccagtatttgcaaaacaagaaacagttataattgaaaaaaaaattagtctttttagttataattgaatttaaaagttattaaacattcatccctggtgtacattaaaattagaaagaaaaattggaaaaactctacgagtttgctcgaaaaagtttgaagcttcaaagtgactttcgaaagagataacacattaggggtataaaatagcaaaaggacattgttcgaaacttcaacgaaactggcagggcccgaataccgtcctgcagaaaataaacgatctaatctacctcatccagttttgagctagaagtaaacccaaagtagttcatatcgagatattgtaacgatgggatgttcctctcagcggatcaccggcaagataccgagcgcgcatcaactccaacgcactcccactagactccctccactaacgatggatgccaggtgagggaccgccgaaatggcgtttaagaagagagccgaggaagaacagtcagtctagcggcgttaagctctaggctccctggctaactagtgtactaaagtgacttggtaaaccaatctgggcgaaggaactctgtagtgaagagatgcatcgctcgtaattaaacaaaatccgtgtaactatgcagtgaacggttgctgccatatctggagttgttgtatgggtatctgtatagttattgttattttgattgtgagaatatgtgtgtttacactggattgaagtgtaatgaggtatgagtctgtgcgtaattgcttcttgtattagattaatggcattttcttctgattttagtaaatacaattttctttttcttttgcagacgtccgccaagggggcttccttcgcgggcggggcgaagacgggatattgttttattttatcattttaattttactttctacatgaataacaagaatacatttattttacttttaacctgtgttttaccgagtctgttatcctgaaagaactacctgtcataagattagctccatatcatggaactgatgcatcctgccgtgttcagtcggttcctgat

SEQ ID NO: 7302 - DNA, 1579 bp, Diabrotica virgifera
  SmartBlast Evalue=1E-125; Info=44 kDa zymogen n=1 Tax=Tenebrio molitor RepID=B1B5K1_TENMO
aaattttcaaagtaacccttaaggtatagtttaaatatatatgttccgaaagtctcactatagaacaaagagtcattttgactacgtcctaaaagcctaattttcacgtaaatgtatgtgtatattctgccataataataatgtcacatacatttttttacatagtttatatcgaaaagttaaaagtctaagttatttaacagtgactgtagaaacttcttattgtatgattccttaacaagcattgataatgtccaaaaaagtgtttaaggcctcaacttcgacactatccagggcacataattagcaactttcgtgtagactccgggccagttttccattccacaaggggaaggtccaaaggaaactacaccaataatgaaccagttcaactggaactcttcatcggcagcgtaagccataagtggtccaccgctgtcgcctctgcaggaatctttgcctttctcacctcctgcgcacagttgaccgttgttgacttgaacgccggcttgtcggtaggttcttgaacactcggtattagcttttactggtacatctagtttgagttttatgttactttccgaccgtgtttccgttttaccccatccagcaactgttagttttttgcctgtgtaatttttagattggtcatcagcagtttttggaagacaaatgggtctaacgaatccggtaatttttacatttcttgcaagtctaagtaaggcaatgtcatggtattggttttgatcgtacggcttgtactgctcatgggcaatttgttcttctacagcaacattaactggaggaggtgcacatttttgaccacttactgtctgtacacaatctgtgtctgtttctaaattatattctccaagtctaacaccaactagtttccaatttcttggtaaatcttttcctttaacacaatgggctgcagtaagtatatatcttgagttaattagtacccctccacaataaaatccatgattgccattatctttctcgtaatcaaggagtgccatccatggaaattcatcgagatccgttgtgttgcctccataaattttgtctggtatacttccaataccgcagtcttcttttgatggtaacagggggctatctgcaggtttaggggtgtcatagtctacttgacgctgcgtggtagtttgaacagtttcttgcagagcacagcacacttttggtaacgtcccctcgaaaccacattgtgattttcttaaataatccgcgtcctcagatctaataggacgatttttaaaattttaaatagacttggacattgtgtaattattttgcaatctcctccttcctgtcttggggtcatacaatattccgtttgtgctatacacaatgtccacaatcctagaaaaactagcagtaatccaaaagtacgcctcattttgatatcacaacaactacaaaaatcacagtctttcattaacagccgatttaaaaatgaagagatcactaaacaagtttaaaagttgattcgttgatgacccatgctgatctttcggtcaatcgttagttacccagccagccttggaaataccaacaacac

SEQ ID NO: 7303 - DNA, 1563 bp, Diabrotica virgifera
  SmartBlast Evalue=7E-28; Info=Transposase n=1 Tax=Agrilus planipennis RepID=D2WLV0_AGRPL
cacccctaaaaattttatataggcgcccgtgttctggagatatttaaaaaaaaaaccgattacaggggccatcttcaaagagctccagctcccttaggaaacattttcggactaggtgaattggctagactgtcttcaaaactacctgaggaatctccggtcttcgcttgtcagaagagctcctggacaccctgtataatttaatctgaaacttgttagaaacatagatatcgccattcatgatgaagtggtgcaaacgacgtacctgcacctcgagtgacatgacacccgcacctacgaaacgatcgagaactcagcattcgcttagtggcctagtagatggcgccactatcgcaagagaaatctactatagtgtagtacattttcatagacggttactgtcaaaatttcagccaaagcagactcgtagttttgtttatattctgatttaattttgagcaagagaacgtaataggtgccgcatttgctcactctggacaaccagcccaaccgtgagaccaattcagagcagtttaacggtgtttaagcgcaatatggagaaatttctgtgtcgtttcgtggccgtcgacgaaacatgtatccaatggtaaacaacagagaccaaggaaaagtcgaaagagtgaaattcacctgccgaacgtgctccggagaaggcgaatattgtcctatcgaccggaaaggttatggtcatcgttttctggaattcataatgtgtgatctacatcgacactctaaagagggacaaaaaaggtctttactattaaacgcagaattgcagaaaaaacggcccctttgctgaagaaaaaagggctcttccaccatgaaaacatatcggctcacaccactgccgtcgccacggccaaattttactacgaactgatgccccatccaccgtattctccagatttggcagcggaggacttctttttgtttccaaacttcaaacctcgccgggtttgagtcgaatgtggtcatcgccgccatggagacccactttgcaaactatgagaaaatgtatttttcagacgggttaaagaagttggagcatcgtttggtcaagtgttacaagcttacacaattgacacgagcggctcaaaccaagtgcggaagtgcgattaaaagttattcttgtcttttcttaatgtgccataatcaattctgaacatgagcaaccactctgcatatatctgtgttgtgtatcattaagtgtacgagatctacagaatgttaaatccgaatgactaagtatatgtagaagagctgtactagacagagtaagacgtcgtggtttgtgagggccttctaagcatcggcctaacattatacttttatactgatcttcgaagctatatcattgagcaccaatgacagatacactcacttctgaagtatctaggtgcagctcctctagagtgacaaagtttcagaaataaacactttctaaacattacaagattaaaaaataggatctatggatcatttttccgtcagttaagtcgagttaaagctagatttaaatgtcctttatataaagagttacag

SEQ ID NO: 7304 - DNA, 1576 bp, Diabrotica virgifera
  SmartBlast Evalue=6E-54; Info=Pol-like protein n=1 Tax= Biomphalaria glabrata RepID=A3FMR3_BIOGL
ctatagtatgttgtataatttacccatacataagaaagttcaactactaaacgtaataaacaatatctggatgagtatggatataccacgtgcatggaaagagtacatcatagttccaattcttaagccacacaaatcaccaaactgtccggattcgtatagaggcatttcactatcatcatgtgtgttaaaaacaatggaaagaatgattaaatgtagactagaattatggttagaaaaaaattctaaaatacctgcaacacaattcggctttagaaaatcatgttctacgatggaaaatttaacgcacttaatactggatatatataactcattttccgccaacaagtcggtatttgctacattcatagacatagaaaacgcatatgacaatgtgaacctacaacttctataccacaaaatgaaggaaataggactgccagatacactctgctggaaacttcatcaactttacatcaatagaactctttatcttcaaatcaataacaaactaataggacccagagtttcaaacatcgggttaccccaagggagcatcttaagtccaatattatacactatttatacagcgcatataggtcaaagcataattactagcaaacaaggtaaaatattacaattcgcagatgatatatgcatatatgtagaccaattggaaatagaacaaggcagtagaaaaataaatacagtatttaaacatctacaagaagacctagatcaaatagcattaaacatatcaacaaaaaaaacacaagcttgtatattctcccgaaaacgaaacattccagaagtagtggagttgcaaaatgtctcgtttaaagttcaacctaaagttaaatatttgggtattatactggataggaaaatgatttggaaagatcatattgagtatatcgtagcaagagctgacaaagggtacaatgcgttacgagcagtaaactatacaacctggggagcagatcccaacatagcattactaatgtataggtcatatataaggtcaatattagattacggatgttacttttacaatcaagccgccaaaacccatcttcaaaaaatagacatcctttcaaataaatgtctcagattatgtataggagctttgatgagtactccaatatcaaacctaagcgtagaatgtaatgaaccaccgttatggttaagaaggaaaattctgtgtgaaaaatttataactaaaatgataactaaagaaagcataatatgtaacaactgccacaaactttgtataaatgacctaaccacagaatactggaggaaaaagacaacattactacttgctgaaagttacaatagattaagacaatttaaaaataaactacatacatcaactctgccatctatgtttcagataaatctaaacaatataccaaacatacaaccaacctacatgagagattactcgaaatttccagtgtacttaaggaatgccatgtttaatgtggatatagaaactttatttccgggacattaccaaatttataccgatgcctcaaaaatgaattcgagggtggccgctgccgtgtgggaccct

SEQ ID NO: 7305 - DNA, 1578 bp, Diabrotica virgifera
  SmartBlast Evalue=0; Info=Paraplegin n=1 Tax=Aedes aegypti RepID=Q16I01_AEDAE
gtattcgtcctcctatcagcatggattcaataactcagctaggccgagccaaattcacactggtagatcctctaaaaggcccaggaaagggggtacacttttcggatgttgccgggttgagggaagctaaattagaagtcatggagtttgtggattatttaaagaggcctgaacactacaagatgttgggagccaaggtacccaagggggctcttttactaggacctcctggttgtggaaagacaatgttggccaaagcggttgctacagaggctaatgttccattcttgtcaatgaatggatcagagtttatcgagatgattggaggtctcggtgcagctagagtgagagacttgttcaaagaagcccgaaaacgctctccctgcattatttacatcgacgaaatcgatgctgtaggacgtaagcgcagtggcagattaggagcagaaggtattagtggcgaaagcgaacaaactctcaatcaattgctggtagaaatggacggaatggccagcaaggaaaacgtgataatgttaggtagcaccaacagaccggatatcctagataaagctttactacgtccaggcagattcgatcggcatatactgatcgattaccccgatcttgtcgagaggaagcagatattcgaacagcatcttaaaggaatagctttggagcagacccccgatacgtactccaaacgattggcctacttgacgcccggatttagtggcgccgatatcgctaacgtttgtaacgaagccgctcttcatgctgctcgtttgaagaagaagaaagtcgaaaaagaagatctggaatatgcggtggaacgtttggtgggtggaacagagaagcgtaaccatgctatgtcgcctcaagaaaagagagtggtcgcttaccacgaatccggacatgctttagtcggttggttactggaacacactgacgctcttctgaaagtaacaatcgtccctagaacaagtttagccctaggtttcgcacagtacatcccgagagatcaaaagctgtacaccaaagaagagttattcgacagaatgtgtatgatactcggaggtcgagccgcagaagccgtagtttttaatagagtgaccactggggcccagaacgacctcgaaaaagtcacaaaaatggcttacgcacaagtaaaagagtttggaatgaatgaacacatcggtctagtcagttttcccgacaaggaagaaaaagacttaggacggaggccttacagtaaaaccttaactaacctcatagacgccgaatcgagaaccttggtagctagagcgtatcagcacactgaggaggttttgcgaaagaacaggaaattgttggaggctttagctgaagctttgttggttaaagaaactttaaattatgacgatgttgagaagctgcttggtcctccgccgtttggtgcgaaaaagttaatcgagcctgcggaatttgaagaaactcttagaaaagatgctggtgattatgctactccaaaatccgaaaataattcgactgtcacatctacgaaatcttagtttttttatagtgtaaataatatagtgtttg

SEQ ID NO: 7306 - DNA, 1570 bp, Diabrotica virgifera
  SmartBlast Evalue=4E-59; Info=Endonuclease-reverse transcriptase n=1 Tax=Bombyx mori RepID=D5LB38_BOMMO
ataataattattattaaaataaatattattgttttataaatattattataataaataaatattattataataaataaatattaaaatattaaaataaataaaaaaatggtattaaaataaatggtgttagattaaacaatctgagatttgctgacgacaccgttctgatcgcagaaacacttgaagagctacagacattggtgaataagatagcagactgcagcgaagaatatgaaccatctttgaacataaagaaaactaaatttatggtaatatcgaaatcaacacgaaatgtccaaaatttatatttacacaatgaaattatcgatcgagttagcaaatacaaatatttaggcacttttataaatgaagacaacgatagctcagcagaaatcaaaataagaatagaaaaagccagatccatattcagtaaaatgaagagagtgttctgtggaagagatttgagccttcaaatgaaacttcgcctgatgagatgttacgtactttctgtgctgttttacggaatggagtcatggacgctgaaaaagattgataccaaaaaattggaggcatttgaactgtggatgtatcgcagaatcttgagaatatcatggacggagagagtcacaaacgtcgaggtcttgagaagaatgaataaagaaaagaagtcatatttacgatcaaaaaacgaaaactgcaatacttgggacacattacaacaggcgaaagatatgaactgcttcgaataattatgcaggtgaagatagcaggaaaaggtccataggaagaagacgaaactcctggctaaagaatctacgggaatggtatagctgtagcaacaacgaattgtttcggttagcagtttcgaaaatacgtatagccctgatgatcgttaaccttcggaacgaggatggcacttgaagaagaagattaataaaaataaagtaatcttgcaaagttttttcaaagttgaaacaattactttcaaaatgatggggtttgaaagtgaatcgtacgtatgaaagctgagtcatacttggaaaagccccacgaaatgcgtattttgcaattatttttcacgaaatttgctataactccggctctaacaagcggatcaaagtttaccaaacgccattttgttaaatttttcaaaaagaacaattttaattttggtaaaataaatatctctaatagtttaggagatacaatcaattaaacaattaaaaaaatttaataacaaattatctgacgatttttttttcggcgtggtatcctcgaaaaatcgaatctacgcaccaaaaaacaaaaagcgtgtagatatccaggggacgtaaaagtgcataatccagtggcggatccagggagggcgatcggccccacctctcaaacaaagttatatataaagattataaaaacattcatttattcatttaattttcatagaaatttagccaatcggcccccctcttgacgatgctggatctgccactggcataatcaacaccctcgtcgcctagaaatattgagtaaatacataatttataaatatataatagccgactacttttcg

SEQ ID NO: 7307 - DNA, 1579 bp, Diabrotica virgifera
  SmartBlast Evalue=1E-152; Info=Succinyl-coa synthetase beta chain n=1 Tax=Aedes aegypti RepID=Q179P9_AEDAE
gtccgggaattttgtcgtgttaggaggttttgtcagggcgtgtgtagacggttttaaccttaactttgtgataaaatattttaaaagttgataaaccatttttatgaaaacaataaacaataattatataactgaaacgaaaaacttatcaaaagatataaaaagagtacataaatctaacaatataaaaagacaaaattcagtctatttctttatggcaataatattaaatgctatggatagctttttgagctgcgtcatccaaatcttcagcagtaataatatcaagtccggaactactaatgattttcctagcctcaactgcattagtgccctctagtctaacaattaatggaattttcaaattcatagtttttagggcccccacgataccattggctattgttgcgcagttgacaatgcccccaaatacatttactaaaactgccttaacattcacatcagatgtgattattttaaatgcggcttttacttgatcttctttcactccacctcctacgtccaaaaaatttgctggatctccaccgtgtaatttgatgatgtccattgttgccattgcaagtccagcaccatttactaaacacccaatattacccgtcattccaatataattcaagttatgtttggaagcttcaacttctctgggatcactttcagtgacatcttccattgcaaaaatttccttttgtctgaatttagcattatcatcaaaattaattttggcatctacagatataacccttttatcatcagtctcaactaatgggttaatttctaactgtgtggcatctatagttacaaataactgccagagtttcttgatttctgcactggctttggccttgagttctcctttaaattctaaaaagtcggcgatttcatctgccattttatcagtaatcccctcgtaaatgtctatgggaagattttttaaaagatgaggagttttctctgctactgcttcgatgtctacccctcctgcgggcgaagctataatcactggtccatttctttgcctatccattaaaatacaaacataagtttctcttttgatatttacactgtctgctatcataactttgcttacttctatcccatcttttggagtttgcttggttatcaatttgtgacctatcatttgatgggctagttttggtacttcatctcgattttgagtaatgtggactcctcctttaaacccagtatcaaaatgtccttttcctctacccccagctaatatttgtgcttttactacatattctttaacatgaaaattatccagttcttgaaatccatttttatcaaccatacagaagtcctggattgcaacattactttttcttagaagatttttactctggtattctaggagatttaaacaacgatgagggatttgtagaatttctcttcgcttagttgctcttaataaaaaattccagtgtaacatgttgaaatttaaaaaatcatataagtaacagaaatatttttgatataataatacagtattttttacaaaactatgaactttgaaacttgaattttattgtttgataaagat

SEQ ID NO: 7308 - DNA, 1574 bp, Diabrotica virgifera
tagtcaatagtctacgcaggtataaatggtgtgtgctttcatagtagtagttgtttttttcagtgtcgtattctacatattttataattgtcagtatagacgtttgcttaagactatcacacacggtacggttgattttgataaagaaatttgattgttacccaaccatgcttaatgttcctttgagggaccagtgttttatatgaaagtattaactttttcgacaaaactacgtagggataaatgtgatacagaataaaaatctttatttttaaaacgtttttatacactccacttgttctttgtcactttgtccggaaaaaattaaacatacttcctgactagctagaggtctgaaattttccgaatatgtcagaactcgatgacaatgcatattcaacagcttttacatggatgcactgagttttattattccaaaaattcatttattttaatactgttgcactataacttatatgccaagtatttatatccatacctaacatccaatatggtgtagtaggatacctggcttttacccaggaggctcgggtttgatttccgctatcggaaatcctttttgtttttaaaattgacatttttatttaaaaataattgtttttattatactttttatattgtgtcctattaaataataaaaacttggtatgtattataaaaagttctttttctaaagtacaattattttaaatttatgacataaataacttccatctaaacaaaatgggatatcaaatcttttttatatgctaatagtgctgacgctcaaaatctttaggactaatgtgcaatatttttaagtaatatttcaatcgtgttcagagaaatttttgttgtcgctttcaaaatctttatatttaatatttaaaattattgttatatatatcacttttgcattaagttttgtaaccttaatattatcttcgcaatttactaaaaatgtatgtattggtaaaaatttgtcaatattttataagatttatacagtagcgggaattgtgatattcgatttacaaaatttacagatttagacacaaaaataatcattttattcataaaagggttagttttgagtcttatattgatgtcttctgagtctttgatgagaaaataattttaagggagcaaagtatgaatttaggagtttacttccaacattaatatcacaagagagtgagaataaattgacaataatgcgaaaatttttcgaaaacttgttgcctggcaataaaaacgaaagcccggaggactcgagtgactattgccgaatagaaacaagtttgattggtgggagacttttactacatagattgacattaagtgacaactatgtttattttattaggtgtaatatttctttcatttttagtgccagagtcaaaaaggcaaactgttatgatccaatctacactgttagttgcaatagttagaaaccttcaacaaaaacttctcttttgaactgcattcttactatgagataaagtcaaaataactttaatttagcgctattataaaatataattgttgtttagtgttaaggttatatctaatat

SEQ ID NO: 7309 - DNA, 1577 bp, Diabrotica virgifera
  SmartBlast Evalue=2E-99; Info=Integrator complex subunit 7 n=1 Tax=Camponotus floridanus RepID=E2ACI1_9HYME
accagaaccagccatagcagctcaagcgattcaaattcttagccaaatattttgctactgttacaaagaaaacatagagactgatggtgagcaagaagtgatagcagcattagaaacgctgattttactattgactttcattaaggaacaacattccacacaattaaaaactgttctgaagtgcgctgttcgattgtgcgaagctaaacatcagtattgtgaagtatttgtggaacttctaggaactcgactggataatatcgaaagtgataacactttgacaatttgcgaagccttgggggccattggcagcctaaaagccgaaacgctgcttccacttatcgataccattctaagtcttcttaatgttctctctacggttaaaagtcctactgctcttcagacgcaaacaaagacgatgctgtgtactctcatctttcagtcattgtccggctataaatggaatgacaccacttacaatactattattaatgttattgacaacaacaatttatgggcaaattattgcattgcaagagcagccatgcgatatgggcatcataaggtagctcatcatatttttctgggactcgccgaacaggttagttcggaacattttcatttttggttaatatgtttgaaagaattatccgaggctgaagctcaactctacagtgaagattcaaattctctcgttaataggttggataccgctgtgatacattacaataaggctatagctgccttaaaggctgccagtaccccacaacacaccctcacgttccaagcagagtacatgaaaattcgaagtgaatatttacaatgtttacttcagttaatttatagttgtaacattttgtgcatagtgcctcctcctgccatagcagcaaccatagtccaaagtacgagagatgaatatcaaaggcacggctatattactaaccaactcagaaaatgtgtcaaggacttcaagaattgtggagatttgcattggaagttgtatcaaactacttttgatgctgatcctgctaccttagaaaatatgcaaattctgcaacaaatgtgtgtgttactggaaaaatgtgtacaaagtgtgtgcgtcaatggtagcaaaataaaagacgaatatattgaatttgggtcgaagactacgagactagaatctcaacaactggtcaaagcttgcgaaagtgctctcaagattgccaaaagcattggtgaagatggaatcaattctactataacacataaccaagtggaagttctcaaaaaaatcatagagatcctcgtgaacgcatctctatcaattccgaggtactttttccaagtattacaatcaacaagcgtaaaactagctatttctccacaacctagggtatccggagaattcataagtgtccaggcggggtcacagttggctgtgaaagtggaaggtgtgatacagcacggaatgaaaccaggtctatttagaaaaataaaagaagtcgttattaacgttacttcgcagttacaaagcaattcgaaaaacaaggatattgtggatcctaagttacttgaacaagtatcactgctgactc

SEQ ID NO: 7310 - DNA, 1577 bp, Diabrotica virgifera
  SmartBlast Evalue=3E-73; Info=Glucosyl/glucuronosyl transferases n=1 Tax=Aedes aegypti RepID=Q17LC9_AEDAE
tcgcgttaaaaaattgggttacggaagtagctgctgatataaagtgtagtgtagtgatttttacgtgaattaaaacaacaaataacaatgtttacaaaaaccttaatatcaatattcatatttacgttagcatcaatagatgcagcaaggattcttgttataataccaactccagctatcagtcatcagtacggcttgcgtccaatatggaaggaactgtctttgcgaggccaccatgtaacactagctacttctgaaccgatgaacgatcctgcattaccaaatcttaccgaaataagcctaaagagttcctacaaacatcctttaatgttggaattgtatagccaaatggccaacgcttcgaatattaagatattggacatcatccacaaaatggcagaaacagaactggatatccacctttcaacacattacagccatctcattaagaatgaaaccctatttgatgtggttattaccgaatacattataggtgagtttctggcatttgctgatctgtacaattgtcctggcatactaatatcctcttttgaagtgactgccttgctacacggctactttggcaacccagcaaatccagttgctcatccagatatgtttttaccatttgttgaagggaagctgagttttagcgaaagaatagttagcttcatctacaaatatttgtattatgtttataaagtttccgtggctaatcccaacaggctgaaagttttacagaaatattttggagctagtgtcagggatcctgaagagttctatacgaaagcggatttattaatgttgaatattaatcctatacttaacaacgtcaggcctcttgcaccaaatgttattactttcgggggaggtattcacatttctccgccaaaacagttaccaaaggatctgcaagactacctggatagtgccacagaaggctgtatttatttcagcttgggatcgaacaccaaaagtgcgtttatgggagagaagaaaataaagatcattatggaagctcttggtgaattaccctataaggtgttgtggaagtttgaagacgaaggtgttgttgtaccgaaaaatattaaacttgtctcgtgggttcctcagcaggatgtattaagacatcccaacataaaagtattcgtgactcaatgtggaatgcaatctctggaagaggctgtcgtgaatcacgtccccatggttatgatgccaatgtacggtgatcaggaagcaaacgcaaaacgaatggaactgaaaggaatagcaaaaatcgtaccacataaaccattacctgacaaagagtcctttaaaagtgctataattgaagtcattactaatcctagctacaagcaaaacatcatcaaaattgcagaattactacttgataccccaatgacaggagttgagaaagctgtgtggtggattgaatacgttattaggcataaaggagcaaagcatttaagagttactgatgtagatgttcccttttatcaatattactgtttggacgttatagctacactaagtttagttgtgtatatattctttaaagttatctgtattgtacttag

SEQ ID NO: 7311 - DNA, 1572 bp, Diabrotica virgifera
  SmartBlast Evalue=1E-144; Info=Fatty acyl-CoA reductase 1 n=1 Tax=Camponotus floridanus RepID=E2AKA0_9HYME
atggcttcatcttctgtgggagttaaagatttttataagaacaaaaatatatttataactggtggtactggatttgttggtgtcacccttctggaaaagatattaagatccattcccgatcatggagaaattttcctcctgatgagacctaagaaaggaaaagaaatttccgagagactaaatgagattaaaaagaattccgtctttgaaactttgttgaaagacaaggacgttgaacaggtatttgctaaagtcaaagcaatcgctggtgatgttggtgaagataaattaggaatttcagactcagattggcaactgttaactgagaaaataaacgtaattttccactcagcagcaactttagattttggagatacccttgatactacagtaaatattaacctattgggaacacgaagagttactgagttggccaaagcatgtagaaacttagcagttttcgtccatgtaagcagtgcttacgtcaattcatacaaacttcatgctgatgagattatttatccactacctagagatgccgatgaattaatagctaccgttaaaaaactcagtaaagaggagttactgaaagaaacacctgcactcttaggagaccacccaaatacatacacaattacaaaacatatggctgaacatgaaattcaaaaatgtgaaagtttgtttccttgtaccattgttcgaccaagtatgataattggatgttggaaggaacctgttcctggatggacaataagcaaaaatggaccacaaggtttcttaatgggtgccgcaaaaggagtcatcagaaggttgccagttgcaacaaatttagtgtatgattacattcctgtcgatatagtagttaacagtcttattgttgcaggcgctcatgctggtcataccaaaacatcaaaggtggaagtctaccatgcaacatccagtacacgggaacccttccgttggtcgtccgtagaaaacaaaatcacggagtatctccacaaataccctcttaaatctgcagtttggtatccacatttgaagtttttacctacaattacatggtacaaagtttctgcgtttttcgttcatttcttccctgcaattttattagatactgtgacaagattaacgggcggtcgtcctattttaatgaagttacacagaaacgtcaataattcattaggcatgctatctaaattcatatttactgaatggacattcccagctgtgaaaaccgttgaattacaaaattggttaacaaaaagtgatcagcaagaattcaatgttgatttgcaaggactctgctggccagaatattttgtcgatttaacactaggagctagggtttatttgaacaaggaccctaggaaaaccttggacgctgcgagatcaaaagataaagtattgttggttatccacatcttatggcaccttatgatattttcacttttgtggtacatcttcgccagcattacaggaatgacaatgtctgcttcaattttcatcgtgcctcttctccacatttgtttcaaatgttgtagtttagtgttttagaatttattgtttcacagt

SEQ ID NO: 7312 - DNA, 1572 bp, Diabrotica virgifera
gttacatacataggtgtgtattataaattaaaattttgttaaaaataaatattagggaatatgaatcaagtggtgctatactattaatagattaatattatatgcttcttttcatgagcatttttcagtgcgtcacaaatgatagaaaaaaggtaagtccgtgataataggtatacatttataacatttattctaacatgacattttagtcaaatctgacagttgtcacattttatttgcataaaaacaaatcaattgtggttattgcatttataaaatgatatttttttatttgtatagtcttataaattgcacagattaaatgagtagatatattatataattcgtaaataaatttatcgccaaccgtcactaaagccattcattattgtactcatttgccctcatttgcggcagtaaattaacactttattgtactgaaagaatatttttactttacctgccgtaattaatcaaattaaccgtgattgaatgtaactggtcgatggcagtaatcgaatagcgagtatttgagtgaacttaaaatttatttactttaattattaaaaatattgtacacaatttgcgatattatcaattaaatttatgtcaaaaagtgaagttctgtattttttgtaattatattcatataaaataaattaaaatttcaccgattaagtaattattcaatactgataactacttatcgattaaaaaatcgaaagttgactgtcatcaatgtcatgaaattattatgacatctaaaatttataaagttcttaaattattgtaaattgcaagtaagtgttaaaaccaatatcaaattattatagaaagtgaaattttagataaaatatattttggcattgtccaagctgtcaagttttcaccacttcattcttcagtttttcattcggggattattaaaattaaacatgattaattttatgaaataatgaagatactaaaatttaaaaaatggtgtggtgttataatgagattttaaagaagttaaataaccgaccgatttttattaatttttttataaattttatattattttttaaatcattacagagcccaaactcttacgtagtcaactttaaggtgcgaatcatcggaagtcaaattccaagtttttttccaatcaaataatattggcgttaaattttgtatgcaccacgtcagtaaagactctttatcgaactcgtctattactcgcctcgctcgccacgctcactcttctcgtaatatcagactcgttcgataaagagtcattttactgacttggtacacaaataaatttttttcgattatagcgaaatctatcgacaactagaataaatattataaatgtctgtaatcacagacgtgcctttttttctgtcacatacaatttaatgcgttagaaagaaatcgaaaaactgtgacgcactgaaagatgtctatgagaaaaagaatacataaacaatatcacatattttttaccattttaaaatacactatatttaaagtttacgttaaatagctatttgcttttagaccctccgcagaaaatttcaacgtcttctt

SEQ ID NO: 7313 - DNA, 1566 bp, Diabrotica virgifera
  SmartBlast Evalue=2E-88; Info=Putative GTpase activator protein n=1 Tax=Glossina morsitans morsitans RepID=D3TQC2_GLOMM
ggggagaagaggttataaaagtaatttgtttagaatcggtttcaggatgttttaaagaatattttgtatacaataaactaataatggagcactttgaagatgaaattagcagtgtagatgatgaaactacttcattgttcaataatgaatcgtcctttgaaaagaagtcggacgaatataataaccatgatttggatgatgatatggaggatacaagatcagaattaaaatttgacagagcattggaaaccgaagaagaaactgaaaaaaggttgttaatagaagaggctttgaacaatgaatacactaccataaagacttggaaaaaatttgctctgacagaatatggtttggtagcagatgacttgagatgcaaggtatggccattactactcgaagtagatccaacttctaatgaaaaaataccctctctagaagaactatctagtcatagtgaatatcagcaggtagtcttagacgttaataggtctttaaaaagatttccgccaggcattccatacaagcagaggctagctctgcaagaccaactaacagttcttatattacgtgtcattataaaatatccacatctacgatattaccagggttatcacgacgtcgccataacatttttattagtggtaggggaagtagtagcttttagaatcatggaaaacctcagcacgacacatttgagagattgcatggagcccaccatggagaaaacttcctataggttaaattacatttatgcccttttgtcaaaggtcgatcatgatctctataattttttggatagtgcttcagtaggtacgatgttcgcgcttccttggtacctgacgtggttcggccactccctcaaccaatacaaagacgtggtgcggttgtacgacttcttcctggcctcgccccaggacatgtcgctctacgtctccgcatctcttgtcattcacagaaggcaagaagtgttcgcagaaggctgtgatatggcgagcattcactgcctgctgtcccagatacccgataatctaaacttcgaagccatcctggagaaggcttcagagtactacaggaagttccctccggagaaactggaacagctggtgaagagacgggtggaaaaagagttggaacaacgaaagcgagatgagcagctgatgaagaatagactgaacaggaacaaaagcatctggcacaggataaacgggaatctgcccgcttggtgtatatttaaagggaaatacggattgctatttgccgctgccacagttctgctcggctatatctattacttgaggttcagtgaaggacgccatccattcaaaagcatcttcaatacatgacatttgctggtccctggtactattaggtctattacccatcaaagattttataccattttttaatttattttttataatgtgtacattactacatactattaccttaagaaaaaagaagagtaaatattcgtttattatgaagacttattaaatataaagaagtaaaaaatgcttaattgtctgtagaagagacaacagtgtactcgataacataaataccggg

SEQ ID NO: 7314 - DNA, 1558 bp, Diabrotica virgifera
  SmartBlast Evalue=1E-122; Info=6-phosphofructokinase n=13 Tax= Drosophila RepID=K6PF_DROME
ggtccgatgtcaccggatgggttgggacaaggtggtgcttacttgggaacgaaaagatctttacctaccaacaaactggatcaagtagcgaagagattagtcgagtatggaatccaggcattgttaattatcggtggttttgaggcttatcaatctggattgatgtttaccgaaaatagagataaatacgaagccttccgcattcctatcatggtgattcccagtaccattagtaacaatgtaccaggaactgaattttctctaggttgtgatactgctttgaatgagatcaccgaaatatgtgatcgcatcagacaatccgctcagggaacaaagagaagagtatttgtgatcgaaaccatgggtggatattgtggatatttggcaactttagcaggtttggctggcggtgctgacgcggcctatatccacgaagaaaagtttaccatcaaagaacttcaagaagatgtctatcatatggctgctaagatgtctgaaggtgtccaaagaggattgatcttgcgtaacgagaaagcatcagataattataacaccgaatttatatatcgtctatattctgaagaaggaaaaggattgtttagcgccaggatgaatatattaggtcatatgcaacaaggtggttccccaactccatttgacagaaacttaggaacaaaaatggcggccaaagcagtggactggtttgtctgccaattgaaaaacaacatggtagatggcaaaccgaattgcactgatccaaacactgcctgtttgttaggagtcctaaaaagacagtataagtgtactccactgtcagtgttgaaagaggagactaactttgacaaacgtattcccaaggagcagtggtggttgaaattacgtcccctacttcgtattttggcgaagcacgattcagcatatcaggaagaaggcatgtatctaacagtcgaggaacataatcaagccgacaacctctatggttgatcaggccaaatattcagggaatattttagttaaaattcttctcgtaaagaatttacacatgtttatgaaataagtaaaaaaatgacagaaaataagtatcaaaattgtgatttctcacaatatttgtagattctttaggatgaaagtgtattcgttgattttgaaatgtttacattgagttgttatacatatatcgcgctgtggtaattctttatggatgtatttattctaaatatttttaacggggcatcaaaatcagctttatttattttattgatatttaatgtaggaatttttagatatacagattttacaggctattaattgtgagacactatgggatcatattctcttaaaaggaaattattttcaacatagattgttatcgtattatcttctttattgtactaaattaaccttccagtagtcgcgtatatttttggacattgatactcgtgccggtccaagagaccgctatttatttaacattgtgtttggaaaaatattatcacttttcattggtaacaacttgggcttttaggattaatcatacacacatagtacaagaaacata

SEQ ID NO: 7315 - DNA, 1573 bp, Diabrotica virgifera
  SmartBlast Evalue=0; Info=S-adenosylhomocysteine hydrolase n=1 Tax=Nasonia vitripennis RepID=UPI0001A46D63
gtctgaatctcttttctcttttaattgcttttaatcttttctgtttggttggtctggtacccgggtacccggtagagacggtgacggtagagcgaggattcaaataaaaatcataaatcattcagttttttgtgaagacatttgggaagaagttcagtacagtttaacagtcctttagaaataatttaccatggctaaacaatcatacaaagttgccgacatgagcttggccgaatggggccgcaaagaaatcactttggccgaaaatgaaatgcccggcctgatgagtctacgagcgaaatacaaggacaacaaaattttgaagggggccaaaatagctggatgtcttcacatgactgtacaaacagcagtattaattgaaaccctcgcagatcttggggctgaggtacaatggtccagttgcaacatcttcagtactcaagatcacgccgctgcagcaattgccaaaaggggaattccagtatatgcgtggaaaggggaaacagacgaagaatacgtttggtgtatcgaacagaccttagttttcccagacggaaaaccattcaacatgattcttgacgacggaggtgatctcacgaacttggtacacactaaatacccacaatatttgaccggatgtaaaggaattagcgaagaaaccaccactggagttcacaacttgtacaaaatgtacaaggaaggtacattgaaggttccagctatcaacgtcaacgattcagtcacaaagagtaaattcgacaatctgtacggctgtagggaatctctcatcgatggaatcaaaagagcaacagatgttatgctcgctggtaaggtctgtgtcgtagctggatacggagatgtaggcaaaggctgtgcacaatctttaagagcatttggtggacgagtattgatcacagaaattgaccctatcaatgctttgcaagcagctatggaaggttacgaagtcaccacgatggaagaagcctccaaagaagcccaaatctacgtcacgacaactggttgtaaggatatcatacggggtgaacatttcctcaatatgagagacgacagcatagtgtgtaacattggacattttgactgcgaaatcgacgtcgcttggttagaaaagaacgccaaggaaaaagtcactatcaagccacaagttgaccgttatctcctctccaccggtaaccacgtgattgtcttggccgaaggtcgattggtcaatctaggttgtgccacaggtcactcttcattcgtaatgtcaaattccttcaccaaccaagtcttggcccagatcgaattgtggacaaaaccaggagcatattccctaggagttcatatgttacccaaacatcttgacgaagaagtagcaagactccatttgaaacatttgggagttaaactgactaccttatcagctgatcaagcacaatatttgggtatatctgcccaaggacccttcaagcccgatcactacagatactaattttgtatggtaacagttaatattaagcagatctaagtgggacttttaaaactatttttaataaagtatgaagcaatttgaaaa

SEQ ID NO: 7316 - DNA, 1571 bp, Diabrotica virgifera
  SmartBlast Evalue=0; Info=H/ACA ribonucleoprotein complex subunit 4 n=12 Tax=Drosophila RepID=DKC1_DROME
ctatgcggtgtattggttttgaattatttattgttgtgttattaataaagtaattattatgaactacagttaaaagtgtgttggaactaaatagtatagtgtgtattaaaacaaaacattaaataagagactagtgcaagaaataccataacgtggtaaataacctcaaataacaacacgtgtttttcctgtaagcatcagcatggaggataccacaaaaactaaaaagaaaaagtcaaagcagctcgatataagcaaaatacaaaccgaaaaggactttgctctcgagtcttcagaaaaaacagccaagcttgatgcctcaaattggccccttttgttgaagcactttgatcgtttgaatataagaactaatcactatgtaccactgccaaatggagcttctcctttgaagagggatatctcagagtatgtaaaatccggatttattaatttagataagcccagtaatcccagtagccatgaagttgttgcttggattaaaagaattttacgggtggataaaacaggtcattctggtactctggatcctaaaactactggttgtttaattgtttgtattgaaagggcaactcgcttagtaaagtcacaacaagccgcaggtaaggagtatgtttctgtgttcaaattacattcagctgtcgaatttaagaaagtagtacaatcacttgaaaaactaaaaggtgcattgttccaaagaccacctttgatctctgcagttaaaagacagttgagggtgaggacagtatatgatagcaaactactagattatgatgaaacgagaaatatgggagttttctgggtaaaatgtgaagctggatcttatattaggaccatgtgtgtccatcttggtttgctgtcaggtgtaggaggtcagatgttggaattaagaagagttagatcaggcatacagggagaaatggaccaaacagctacattacatgatgttttagatgcccagtggatttttgacaatcataaagatgaaacctacctcagaagagtaatcaaaccactagaaggtttactgatacagcacaagagaataatcatgaaagatagctccataaatgctgtatgctacggagctaaaattctaatccctggtatattgaggtatgaagacggaattgagctaaacgaagaaatagtaattgtaaccacaaagggtgaagccattgcattaggtatagctttaatgacaacatcaactattgctagttgtagtcatggtatagctgcaaaaataaaaagggtaattatggaaagagacttgtatcccagaaaatggggtttggggccgagggctagccaaaagaaaatccttattgctcaaggtcaattggaccagcatggaaaaccaaacgagaacacacccaaggagtggctcaacagttatgttgattattctgcatctaaagataaacaagatacagacacccaagagagctcagaagaaaagaaacgtaaactcagcaattctgttttagatacaacaactgaagattctgaagtaagaacagaaaagaagaagaaaaaagaaaaggaaagta

SEQ ID NO: 7317 - DNA, 1571 bp, Diabrotica virgifera
  SmartBlast Evalue=1E-148; Info=TAR DNA-binding protein 43 n=3 Tax=Apocrita RepID=E2BW55_9HYME
tttccttaaaataatatataataatgcatatttaacttaataaaattatttcgactatatagatcttctacgtagaagtgacttaatgctctaaaaacagagaccagttattcgtatttcaaaaatcctttttcctggttttgctgtggctgtctgttccactgacttccatccggattattttggttcccaccccctgggttcatccaatttaaaaaacctgggttgtttccaactctcccaccgccattctggttattctgattacccgcgttaggtccattgttaaatccctgattgaagttcggctccggctggttttgtagatttccaatcaaaccccatccagcttgattcaaagctgcagcaacaatagcaggattcatcggcagtgctcccaaagcatttaaacccatacccagtggattgcagttgccttggttattaccttgctgaccttgcccagttattcccaaagcttgtaagtttggcatatcaatattgccacgaggaccgccttgatttccccaattgccttgattgggacctgcgccgttatatcgttgattgtacattccaggaccgtcagggcctccaggaccaacgccgccccctcgattctgtaaaccattgtttctatcgccacgatagttgccacctcgggtatcggatttcggagcagcattcgacacatgcaccgaaacaccttttataatatgatcttcaccacagagtgactgagcaacttcagggtccaaaaatgttacaaaactaaaagctcgaaaaggtttcggtataaaaacatcagtaacttcgccaaacttgccaaaatagtctctcagatcatcagctgtcaagtcctcggtacaccttccaataaaaactttgcatggcacttgttgaatcagtccttctttcgaattgggaactttcacatcacaccaccttccatcaatcatatgcctctgcgctaaaactctcatctgagattcatacgatgcaaacctgataaatccaaatcctttggattgtcctgtctttgggtctttcttaacttgcgccattagcacctcaccaaatgtttcaaaatactctctcaaattctgctcagttgtcttccaaggtaaaccaagtacaatcaaatcagtacaacgcaattttgtctccatacgctttgtctttgcagttgaattctccaaattatcatcactctttcgtttattctctttcggaaaaacgcagtaaaatatatgagaaccccatccatcatcaggtggaggatgtagtcttccttccgataatcgaactcctctgaaagttttagtttccggatttttgtattttaagccagacgaacccggaaactgggccgataaggtacttaacaaaagtgtaccatcatcttcagtggggagttcgataggttcctctccttcatcttcggctacttgcaaatattcaatcgacatctttcactctccaatcacctaagcactcaaatttcgacaaaatagcgcaaatttacgccaattctgttcactcgtcagtcaattaattcaactaaaatggcg

SEQ ID NO: 7318 - DNA, 1566 bp, Diabrotica virgifera
  SmartBlast Evalue=3E-47; Info="Solute carrier family 2, facilitated glucose transporter member 8 n=1 Tax=Camponotus floridanus RepID=E2B123_9HYME"
ctacgacagtttccccttcgttctggaatcataaataaataaatgttgccccagctagacaagacacgctgaacatccagatacaccagtgcaagcctagaaactctttaatgattggaaaactggtcgagccgcaaaacagacatgtgaacatcactgtcataataaatgatacgcctgcggttctgacatctggagtgaaaagttctcccatgatggccattggaattggaccaattcctagagagtaagttatcatgaacaccatatgctagtcaaaggtagccactggagtgaagcaaccaatggggaattgatatgcttgaggaagaaaaatccacccaacattaaaagtggtatagaagatcctattgtagagataagaagcatagaccttcttccagttttctcgacaataaacgaaacgattataaaactgatagcctttataccaccagctactattgccagatgattactgttatactttgtgccagctgcaataaatataggtgccatgaattggatcaaaatgggaactcctgaaaaaacttgtatcataggaggaattaatgctaaaagagttgcgtacctcttctcttttgttgagaataagctaaagatattaccagaagaagaatttgcccgaagctttaaagtttcttctatttggtacatatcatcctcaatttctttgtcatttttattgcttcttaactttctaagagcgcgtaaacattcttctcttctccctctagatagggaatagactggagactcgggtgcacatacgcaaaagaaaataaagaataataatggacttagtgttaataaagtaaatactctgatggtgaaaaatgagcccactacgtaaccgaagaggcttcctgaaggtagcataccgcccatcaaacaaccataccttgctctgttgtggtcttcgcaaatttctgtcaaataaacaggtaacacagttatagctccgttaaaaaacataaatattatacatcgaaacacgacaatgcaatatacattggtactaaatgccaagcaaactactgttgtgagattccctaaagccaggatcagtatagacctttttcttccgaatacttctgccaactgtcccagaaataaagatcccgcaagagatgctaatggtggaaaaccagcaatcatcgatatttcgtaagttgttgccgttcttcccaaaggattgtcatcagagatgtttgaggtgatttttgggattacgggtgacgtccacaccatttgggatccggcaatagtggcaagcatagtacctgaaagaattgtcatgattaagaaaggtgtgtccgatttagcgccttggttttgaggctttagttggacgaggttattcttttctgtactttccgtattgtaaggtacatattccaccccatgtctttcactgggctcaacgatggtcatgacggagctgttttatattaaaaaattcgttcaaaaaatgctcgtcacaccagcacccaactcactgctagttttggcaaactgtttcatcagtatatttttacgacgtta

SEQ ID NO: 7319 - DNA, 1571 bp, Diabrotica virgifera
  SmartBlast Evalue=1E-148; Info=Calreticulin n=1 Tax=Galleria mellonella RepID=Q8WPG8_GALME
gacactatatgtataaaagagagatgcaataatatacggttgtctgtgatattaatgtaggtttgtcatttctacacacctcgagttgttttttggcatttctagaaagaacttgtcgaaggtttgacgtatcggagaaggtcctaacagtttagaataatgaaatatcttgcagtttttgtgatttttgcgtatttatacgcagctcatgctagtgtttatttagaagagaaattcagtgatgattcctgggaaaagaattggatatacagcaaaaacccagataaagaatttggaaaatttgttaggacagctggaaaattctttaatgatgaagaagaagataaaggtcttcagacatctgaagatgcacgtttctatgccttaagtagaaaattcaaatccttctccacagaaggtaaagatctagttatccaatttactgtaaaacacgaacaaaacattgattgtggaggtggatacgttaaagtatttgattgttccttgaaacctgaagaattacatggggaaactccatacaggcttatgttcggtcccgatatttgtggacctggtaccaaaaaagtacatgttatccttaactacaaggataaaaatgtccttattaacaaggacatcagatgtaaggatgatatctacactcacgcctacactcttattgttcgcccagataacacttatgaagtacaaatcgatggtgaaaaggtagaatctggagaactagaaagtgattgggatcttcttccacccaagaaaattaaagacccagaagccaaaaaaccagaagattgggatgacagggctactattccagacccagatgactccaaacctgaagattgggacaagccagaacacatcccagacccagatgccaccaaacctgatgactgggacgatgaaatggatggcgaatgggaaccaccaatgattgataaccccgaatacaaaggtgaatggaaaccaaagcaaatcgataaccctgcatacaaaggtgcctgggttcaccctgaaatcgacaatcccgaatacactcccgatgcaaacctttacaaacaaaaagaaatctgtggaatcggtttcgatttatggcaagtcaaatctggtaccatcttcgataatgtcctcgtcactgatgatgtagattatgccaagaaagcactatcaggtcttaaagataaacaagagggtgaaaagaaggttaaagaagaacaagacaaagccgaaagagaatctaccagtgaagatgaaaagaaagaggatgacgatgatgatgatgaggatgatgatgcagaagaacatgtgccacaagtagaagaaggcgatcacgatgagttataaaaatagtgtaaagtgaactaaagagactttttttatatattacaggtgtgaagtgttttgttcgatagtgtgtactgttccttgactgatttttgttatttttgatcgtattacttctaataaaacacaaaatcgacaagttgttttcataatttcacattttatttgtacaaaattacaataaattatattttgtaaatagaaaaaaa

SEQ ID NO: 7320 - DNA, 1567 bp, Diabrotica virgifera
ccaactttgtttccgaatatgttttaaagcattctaaaaatttaaaatattctattacaatattgtgtctgcaagttattggtaatgaacattattctttttatttaatattaacaattttgctatttttgaatcatcatctttatcacgatgttgtttaccattattgaaaaaaatgtgttgacaaaaatatagtttattcttgctgaattggacatattgaataaaaatttactgagtatcaataattgccttttaattattgaataatattattcatacaattttcatatatttttataatataattttgactccttccgtattaatcaatagaggattgaactacagtttttagattttttaatgtattatacttttttaaagtcagtggtcccaatgtttaatatattaattattaaatattacgcaaaaatgtcatggatacatatggcataacctttgaatcagaacaaatttttttagcaaattgatttttattaatatttttttgttctgatgtcttacaaaaccatcatttttaacgagttattggtcaactacgaacatgtaacgcagttcgaaataatttagtgaaaacttagtttacaaaataaacaaaaactattaaaagaaaaagtcatgtcacctattatataaaaatgggtcctttatttctcgttgccatgccatgacttgagaacgacttattcggtttcattcaacttttttttaagtgatctaacactgtattcgctccgtgcgtgaccatggtggggatacacgaaactatgcctgcgtccgtagcgacgaaatatgacaattttggcgaatttttgtaatggcagtgtcattatgttagttcgcggaccctgtcggtgacttttagtacacgacaacgcatgcgcactttaattccatattttatttatttaatgtattatcgcttattgataaatataccagtatattaatgtaccttatattaattaatagtaaatataccttataaatttatctatcaacggtattatttatattattttaaagtgcgcatgctccacttgtcgtggactagtcacgacatgacacttattgtttgtataacaaatgttatcaaaaaaagtaaataaatattacatattaacgtcatatttgtcatatgtgtatcatacgtttaacgtcaaattgaggtcgccaaaatgtcaggcgactacgctaggtgtcgcgttagtcatgcacggagcgaatagaaggttcttacggaaataaattttaagaaaattgcactgagaattgaaaaatttcaggaaacaacgattatttaaatttcgcgcgtttaataattttgcggttggcagtaaccacgattcacatgtcgtactgggtaatgcagtggtgagtatccacgtctgtcacgcggtggaccggggttcggtaacattaacccttatccgggcaaggtgggcccaatgggcccgagacgccaattcttttatcataaactgataaaagaatttttattgaattttatgcatcactgaatttgtttagaagtatgcttcct

SEQ ID NO: 7321 - DNA, 1562 bp, Diabrotica virgifera
  SmartBlast Evalue=1E-112; Info=Choline-phosphate cytidylyltransferase B n=1 Tax=Camponotus floridanus RepID= E2A246_9HYME
tgatgttagacgttcccttaaagtcatctgatccaatagatttcgagatgtccagaaaacgaacaagaagtcattcagaagaaatgaattccccgcgtttgcccttacaattaccacacttgtcatcgcattgtggaccagcgcttttcagcgatgagttggaagcgtataggatcagagaagcatgcgattatgctcaaaaaattacatacgaaatggcgaagtgtgggagatcacctaggcgaataagagtctacgctgacggtatttatgatttgttccatcaaggccatgctaggcagctaatgcaggctaaaaacgtttttcctaatgtctatctgattgttggcgtttgcagtgatgcgttaacgcatagccaaaaaggtcgtactgttatgaatgaggaagaaaggtatgaagctctcaggcattgtcgttacgtcgacgaaattgttagggacgccccctgggaagtgactgaagattacattaaaaaacacaaaatcgactttatcgcccatgatgatctaccttatggctcagatagcagcaacgatatctatgccccttggaaagctaaaggaatattcgtagcgactgaaagaactgaaggtgtgtcgacatcagatatagttgcacgaatagtaagagattacgatatatatgtaaggagaaacttggcgaggggatattccgccaaagatttaaatatttcctacctcagtgaaaagaagataaggttgcagaataaaatgcacgacctaaaagataaaggaaaaagagttcttgataccataggtgaacggaagggtgacataatcgctaaatgggaagaaaaatctagggaattcatcgaaaacttcttactgctttttggacgtgaaagattaaccaacatttggaacgaaagcaaaggaaaaattttgagtgctttaagcccgcccgtatctccgcacccccctgccagtccaacgtccagcgaaggagagtttgatttttcggaggacggtatgccccctctcaaatcaccacgagtcgagtccccttcgcctccatcttcttcgtccgcatcgagaaataattattacagtgtggaggattatagcgacgaggaagagatttcattgccaataaaaaatggaaaattataatattgaacgggtgtcttagttgtttaaaatcgttagtgcttgttgaatgtgatgctgtcttggtttctcatttttacaatataatcttttttgaaaagaaaacgtattatatcctgcagccaaaaagtttaataccaactttaataaaattattcatagatcggtattttacatcgacaatatacaagtttttagaatatactggtcaacaagtcactaatgacacgtgcttgtgtattcttagtaaaaccgaagcgtagtaatactatagaaattatttattcacaccaggtataaattttagaagtcattcgtaataattaacacaaaataattaacgtaaaataaaatgtatataccaaagtaaaatggttaccctacatcgctgtttctaatttttgtttcagttca

SEQ ID NO: 7322 - DNA, 1567 bp, Diabrotica virgifera
  SmartBlast Evalue=3E-98; Info=UPF0630 protein KIAA0652-like protein n=1 Tax=Camponotus floridanus RepID=E2AYF8_9HYME
gaaagggacaaatacatgttactgcaaaatacaaattaaaatagtataaaatacagttaattatttgtcgacgactggcaaatcgactgaaccatcgcatcgtattctggtgcatcggcctcgaacgtctctagctgtctgttgataatcgattcgtcaaggggtggtatctccgcgaagacctgtaaggttttcggtgctctctgacagtatcgaaaaaattcgccaagttcggtggtttttgtggttctgctagcaaatggcgctttcaagtctaccatgacaaaattattttcgtcgtcgttcgtcgattccatcgtcaacttttccaacttattcgctaaattatcagtcattttgttcccattcttctcctctgttgattcgttgtccatcttcttcgagtccgccgatgacgtggacgcgctcccgtcggtttccgactcctcttctttcttctccacgggcttctttggaggcggtggcgggttgatcctgctgtacggcagcttcgggattaagtacacggtctccagcttcttgtactggttggcaaaggcaccccttctcatcggtatctccaacgatatagtcttatcctctttttggttatttctcctactcttcggactcatcttggtgttgaaatggtcgcttttcaacatgatcgagttctgtcgtccggtttgtgtcggtgaaattgtcattttggtgcggtacgaaacggaaaggtttaacgtgccgatgggtgtgcagatctgaccaatctggactttgttgaagtcttctccgagacattgaatcaacggctcacctaaaaatatacgataacatataacgaatgagtcaggcccttgccttcgagacagtttataagcaggaacaactcgcgttatcgacactagcgattttagcagagtccccatacgattatagattgtatgcactattcttgtggtaggatcacactgttgttcgggcaacatgcccagacaccaattttcgaggaccatatggtcaccctcgaccgtacgcaaagaaatttcgacacataagggcagatttgaggataggatttcgccgttgagaactcttttcgtttccgcaaggacttccgggagatcactgatgttcaagttgaaccaatccgtgcttgtggtttgtgatctgcagttgcttgttactttttctccaagtctggactgtacgatgatctgagtacattttaaagccaaaaattttgtaaatttatccaattcccgtttttcctgagtgctgagcttcattgttgataagtattgcctgtcagttctgatatttcacaaaagttcgcccattgggccgtttaatcacaaattccacactgttgctgtaagaactttaaacgtcaacacctttccctaccaccacagcaatatcgtgtcgtgtcgcagcccacatgaaattccaattccaaacatacatagagacgaaaagcatgaattctcgtctctcttacttacacactgaactgaagtagtagactacgtgtttttatttgggttttttaatccaaaacaagaggaaa

SEQ ID NO: 7323 - DNA, 1562 bp, Diabrotica virgifera
  SmartBlast Evalue=0; Info=Cullin-1 n=3 Tax=Apocrita RepID= E2A8D1_9HYME
agcaaaggcttgcagaagaacaaaaacgagtccaaaactacctccatataacaacaagtgaacgattagcgggaacttgtgaacgtgttctgattcagaaacatttggaactgttccattcggaattccagcaacttttagacgatgacaaagacgccgatcttggtaggatgtacagcttagttgctaggattccagacggtctcggtgagctgaaaacgttactggaacaacacatagctgcacaaggtttagctgcaatcgagaagtgtggagaaagtgcagttaatgatcctaaggtttacgtcaacacgatattagaggtgcacaagaaatataatgctctagttttagtggcgtttagtaatgacagtggcttcgttgctgccttggacaaggcctgtggcagattcattaatgccaacgctgtcactaaacaagctaattcaagcagtaggtctccggaactacttgcaaaatactgtgatcttttattgaaaaaatcaaataaaaacgctgaagaggctgagctcgaagacactttaaatcaagtgatggtagtgttcaaatatatagaagataaggacgtctttcaaaagttctatagtaaaatgttggccaaaaggttagtgcagcatatgtcggctagtgatgatgctgaagcttcgatgatctcaaaattaaaacaagcttgtgggtttgaatatacgtctaaacttcaaaggatgttccaagacattggagtctcgaaggatttaaatgaacaatttagaaatcacttactcaagtcaaatgaatctttaggaatcgattttactattcaagtattatcttcgggctcctggccctttcaacaatcttttacgtttggtttaccctctgagttggaacgcagcgtacataggtttacaaatttttactcaggtcagcactcagggaggaaactaaattggctgtataatatgtcgaaaggagagttaaatactaattgttttaagaatagatatacactacaagccagcacttttcaaatggcagtattactgcaatacaacgtagccgactcgtggacaatagctcaactagaagaaaatacacaaattaaaaacgactttcttatacaagttgtacaaatactacttaaggctaagttactcaattgtgatgacgacgaaaatgaactcggtttaaattcgatggttactctaaatttaggatttaaaaataagaaacttcgagtgaacataaatattcctatgaaaacagaattaaaattggaacaggaaacgactcacaaacacatagaagaggatagaaaattgttgatacaagccgctatagttagaattatgaaaacgagaaaggtgttgaaacatcaacagttggtagccgaagttttgaatcagctgtcctcgaggtttaaaccaagagttcatattattaagaaatgtatagatattctaatcgaaaaggaatatttggaaagaactgatggccagaaagacacatatagttaccttgcatgattcggaagtagcaaggaatgataaaataatttattt

SEQ ID NO: 7324 - DNA, 1564 bp, Diabrotica virgifera
gtcagtagttgttgatacacgagataaggttaccctctctttatatggactgtgttgtattgtttttgtgatcctgtagtgattctgtggtaatgtttttaaccagtgattgaataattaaagagtagataccaagtttcgataataagactaaaaaggatattatattactattttgaaaagaaaatataaatatacctaaatcatgggttcatcacaagaagatataacagatgatgaattcgacattgaagaagccagtcgagatcctactgttgtgctacaaagactgaaagaattttcattttatctcgtagaaaacattgaatttaatctagatttctgcctcaaattattagaagagcgaacagttcctgctaaaccaaatagcatgcatgtcactgcccttagtatgctttgttctgcaataccaaagataggaggtggattgggaagtgccttaaaaacgggtgaggtaacggtgttcagaaaaatagagaagaaaaattctagactgttggctgatctcgtctactactttagcgacaataaggaagcttttagaaatactattttagaagctgcagctgaaatttttaccagtttcgaaaataagtttatggaatttacgtgcaaaggaggtgaaaaacgagccatgatgaaattagccatagatgcttctgacagaatatttaactactttcttagcactgaacaaaagagggatgttactaaaaatgaagttattagaggcgttctatatggtgactctaaaagaaacagaggtggcaaaaaagaaggaaaatctgttaccaaaaacgacaacgccgaacaagaaattaaaataaaaacagataagctgtactccaagtcaggtatatacattcctgaaagaaacttgttctacaaaaatgatcacacaaaaccagcaaagtatggatacagaaaaatcttttcatgggaagacgaatctgaaatcatgaaaacttggattttggatgacactcatgaaacacctgtttatacaataagtattacggacgaattattactatcaattaaggagtacgtgatgagtaaaaatcgtttcgaagaagctgcattagcgagacaaaaattgagcgacgaagctatggaagataggcaagaaaagcacgaagcagcattaacaatgcttaaagactgttatgataaaattataagtgaattagaaaatatacaccaaaagacccttgacatgtttaaagaaaatacaaccttaatggaaaaagtaattgaaaatcaggaagaagacaaagaaactaaaacagtgataattacaaaactagaaactgcccacaatgacattttgaatactaaagaaaaacaagaagatattttaaaatcaaacgaagatattaaaaataatatagttgcaataaggactaaccaagaggaactagccactagtacccttaaacacgaagatgttgaaagtattgttaacgataaagttaaagaaggtgccaaagatggcgttaaagaattcattagtgaaacgttaaggaaaaatgatccccggtcc

SEQ ID NO: 7325 - DNA, 1558 bp, Diabrotica virgifera
atgtaaattagagtcaggatcaacatcctgttgtctgtgagtaactagggaacattttcttaatctgcagtttctttagaaattgatttacttgttctctagtatttccttagttggatttatttataagagttattgatatgtgacttcttgaattctttcatgagagatgacttcgaaatattggttagcttcttctggccattcttatcaatctgttgtagctatagctatagttagagaatcccagagtaagctaacttctgttaggtcaactattcgattagttacccttagatagatctcccattgaatctgatacaaatctgatgatcagttgagttaggtcatggtaacaaatatgtaatcatcattagtacatttagcgctaagtgtagcattgctcaattaaatctgcctgattgttccaccttggatatgcttctatataaatctgttgtccactgtcggatcaatttaggataaaaggcttgctacaataatttcttttcttgtcaataacttatatttattttgatatatactatggcctatgtttggcttatcaagaattggctacgagatctactgattgttcactttggatatgctctatttaaatctgttgtccatcgatagaacaatttgtactactcgtcccattcgacattttttgtagttagaatttatctgaattatgaaatttagcaaagggttataataaaccttaactatgtatgttggtaccatatgagatatattggtcattaagacaactccatttacatgactcataatttgcggttaggtataatcgatcgagtcagctgtaagtgtgagtaagttagtcgtcgtataggttatattaagttttgtattcgaatattgttgttatggttgttcttgttgactataatttggggttttatataaatctactaaatcaactggaacacaatttggtctttaggatatatatcagaggactggtcctacgagtttggacgatgtcctacgataggttagtttagagtagtgaagtaatcataggttcgcactatatttttgctatttggtttgttcacgcctgtgttggatcccacagcgtgtgatttttctctatgaatacttgcattgagtatttataagtatatatggaaaaaaattgttcctaagatcaatttttttttccgagtaatgggggaatgtaacgatgagtgccatcgttacgataatattatatttattcctataagccacctaataagtatgcaaccagttatgcgttcgtgcttagaacgggttacctaaatttgggaccaaatacaatataaggttggtactagattggggaaattctggtctcagcgtgtggctgtacggcttccgacggaggggcatatcatatcgccagcggagcggattgtcacttgaatttccaatctcgttggatgaacccataacttcttccatggccattgtttgaagaatactattttttggttgaaatattcgtttatagcagagcagtttacgttggaaggaattattattattt

SEQ ID NO: 7326 - DNA, 1566 bp, Diabrotica virgifera
  SmartBlast Evalue=1E-146; Info=Beta-glucosidase (Fragment) n=1 Tax=Tenebrio molitor RepID=Q9GSE6_TENMO
ttttagtacttaatctgattttttaataagaaataaaaaaattaattatcacaggtagaatttcctaaaacacatccatattgtatcacatttttaaaatattccactgatttctttggtgttctttttcgatttggactagtaaaatctacgtggtacaatccaaaatgttccgtatatccacgtaaccattcgaaattatccatcaaactccatgctgtgaaaccgaaaacatttactccatcatccattgcatctagcacagcgctcaagtgttgctggtaatagtcaaccctcatatcatcttctagagaggtaccgtcttccgatataccattttccgttattattattgggatatcgccatatgtgttcttgatccagttcaataattttcttagtccccatggaactacccttaaccatgatgaggccgatttaggccattcgtctttttggtacgtatcaacttccgaatctgcgtcgtaagaaacaacgtctatctgtttatcagcagcatttcgtgccattcttgtggtataatagttcagccccaaatagtcaagagtacctttcaagtactggatttcgtcttgagtgaattctggaagacgcgactggctgaagccttgaagtaagcttctccttgcgattgctttcttcatttgctctggataatcgcctattgttaaaggtcttacatacaatccatgattaaactgttgtgctcgttctgcagcaactacatcgtcagcaatatttgtgtctggctcaaaccaagctgtatctacagtaattccaacctttcctttttgtgtactacgaaactgctcgtcatacaaacgccacgctttagcgtgagccttaagaagattatgggcacaaaggtattccccaataccaggtgaatcaacgagaggtgccttttgtttgttaccgtagccttcgttgcatatttgtttcggttcgttgaatgtcaaccaataagtaacatcatcaccgaaattttcaaaggctactttggcgaaatctacaaatctatcaactattagctcgttggtccatccacccaagttttccaatggttggggtgtatcccaatggaatatagttactaatggttcaatgttgttggctctaagttccttgatgaggtttttgtaataagcgattccaagggggttgaccttattgttgaaacctgtgggtagaatcctggaccaggataatgaaaatctgtaatgggtgactcccaaatgcttcagcatcgccacatcttctttatatttgtgataagagtcgcaagctacatctccggttgagttatccacaattggtgatggcactctgtgagatacttcatcccaagtattttctcctttaccatcttcgttccatccaccttctacttggtaagaagcagttgctgtaccaaacataaaatctttggggaatttggaaacattgattgttgttgccaaactagttgacaacacaatgcatagaagccacacttccttagtgatcattacggcagcgaaaaatattaaacagtaaagaaattac

SEQ ID NO: 7327 - DNA, 1561 bp, Diabrotica virgifera
  SmartBlast Evalue=1E-150; Info=Protein FAM40A n=1 Tax= Camponotus floridanus RepID=E1ZY19_9HYME
tgcacttatacagcagaaacactgaaagataacacaaagcgaagagacgccaacttgaagggtgataagaacattacagtgcgtaaaattggatgaaggtgaaggttaattacgacatttaaaacagactgtcccattcaacagcattctggaacacctcatcctctaaccatagatagtagttcttttgaaaactctcagaaaagtctagctcgtgtcccaagacgctagtcaagttattatcgacaggctccaagtctaggtctgcttccaaactcttaacatatctgcgattgttgaatttgtcaacagcagtccgcaaagtgatttcttccgactgatagtcccaaggtttggcgtccaagaagttaccgaacgcccaatcgtcgttcaagtgatgcctcactttctggtagatcaaactgacggtcttcaaattagactttcgccaattccttcccaagtacttcgtctgcatcttcagcagcttcagtacatagagttgagacattccgtgacgaacttttagaattctcttgaggatcggagcagatttaaacacgaccaagaccattatcctagaattcttccatttgcaaagcttgttaagtactctgagcaaattgatgctggagaaacgtttctccagcaatacttagtgtcgcagcctatttctatgctcgaactgagttcgactccatctcccaaaaacgcaggaagggaaatcaaaaaacgggaatatcgttaccggcttttatgtaattcattatttcttgattgtggaatttgaggatgagggggatacagttggcaaacaccaggtgttgggacataaactcaaactgataaatatgatttcgtttgaagtgtttcaaaaggaggatcaatattcctgagacagctttgactataatttccttgtgtctattaacatcgatgcctagctttagagattggaaattggtcaagggcatttctttaggtaaaatatcacccagtatattaatagagtcggagctacttttagctctagacatggtagctaaaagaattttcaacagacaaatcatgtattggggcaaattagggaatatagactgatacagtatttcaaccggtgaaagatctatgtcgtctttggtagttagaggattcctattaatttcttcttctctttgtatctgcagttcagctacagacgtgtaaacatgctcttttaacgtattaatgctttcgtgtatcggtttaggtaaaccaaagatcgtcgtatcgtcgccctctaagctgtatcccaaaaatttctccctggccatatttagaaacatatcaacctcaatcttgtgcactttcggcttccacggcagctttgaatatctagaagaatccataacataatgagaatcaaatgaaggttttgaagaggtgttgtatgtcatgtacgtttgatccccttcagcggaatccatatcacacggttcaaaatcttctaaactactttgtttaatgagacttcttttccttctttggttctggtcctcgagaagatcagggggaatgtagg

SEQ ID NO: 7328 - DNA, 1563 bp, Diabrotica virgifera
  SmartBlast Evalue=5E-75; Info=Serine-arginine protein 55 n=1 Tax=Camponotus floridanus RepID=E1ZYC0_9HYME
gagcgaagtatcttttcactttcgctaatttgcgctgtaaattacagcgtggtatagttatttcaattagttaaattgtttactagtacatcaagatcgtcaagatactcaaaatacgcaagtacgaaggactgtggctgcgttgatagcattagcacaaggtaaaatttcgcttagcgacataaagttaatgctagaggttccttcacggcattcttggtgtccacaaataaaaacattgccggcgcacggactatatctttgcgaagtggaatactcgaagggagacctggacacttttagagcagagctggatttggataaaaaggttgtagtttaagtatggtagggtctagggtttatgtaggtggtctgccctatggtgcctcggagcgggacctggagcgattctttcgaggatacggccgtatgagagatgttttaattaaaaatggatatgggtttgttgagtttgacgattatagagatgctgatgatgctgtatatgaattaaatggtaaaaaacttttaggggagcgagttacagttgagagggcaagaggcactcctagaggtcgagaccagtatgcatcaggtggcagcagaagcagtagaaataatgacgatcgtcgctcctcaaataatgacagatatggaccccctacccgcactaactacagggtgctcgtggaaaacctttcctcccgtatcagttggcaagatttaaaggattacatgcgacaagctggggaagttacctacgcagatgcccataaacaacatcgcaatgaaggagtggttgagtttgcttcatattctgatatgaaaaatgctatagaaaagctagatgacactgagcttaatggtagaaaactccgcctggtcgaagacaaaaagaacaaatcccggcgctcagcatctgacagcagccgtagcagatcccgaagtcgtagccgttcagcaagacgttccaggtcacgtagtcgcagttcccgctccaagtctaagagtaagtcaagatccaggtcacggtcgctaagtaataaagacgaccgagaaaaatccaagtctaggtctcgttcgaggtccaactctcgcaaaaagtctgacagatccaggtccaattcacgaaagaagtctgtaggaagtgatcattcccgttctagatcacgttctagaaccccagataagcgttccaaatctcgtgaagcctccaaagaaaggtccaggtcaagatccaggtccagatcagaaagcaaggaaagaagtaaatcaagaagtagatccagatcaccaaactaacactgttacgagtttgcaaccacagtaaggtttatatttgtaattaatttttaataacaaaaacaaagtaaattttaattaagtaaataaaccagaacaactgttagcagtagaaattgttaaataattttactcattggaaagataagtagattcatttgtacagggttgtgtcacatttgaattttaaaaggggtataattttccatagtaatttatctacaattttttacatgatacaaattgtagaacttggatgtt

SEQ ID NO: 7329 - DNA, 1560 bp, Diabrotica virgifera
  SmartBlast Evalue=0; Info=Mediator of RNA polymerase II transcription subunit 14 n=1 Tax=Harpegnathos saltator RepID= E2BQN4_9HYME
ttagcagtcgtcaaacattcaagtatcgatgatagtcccgacgatgatccatagaagctgaagcgcccaaagttttctaaaggtgcaaacattgatagaatttgatacatttgtttctacacacggaccgtttacgagcgtctcaggtaccttggattcagatcaaacggaacctgggagtctgaaaagaaaatgtggaatgaaacaagaatcttcatctaggagagcaaaacaaccggcttattttattgctgagctagcgcatgtgatagccatgtgtgacgagagattaccattcgtcactctggcgagcgagttaaccaagagaaacgttttccatcaaggtttacaagtagaatcgaatgctactggtttggtgttgaaactgatacagctacctgctcctactaaggaaattggaacgtcgtcggcctggaatgctctaatgaaacgactgctttctgtttcgatgcgagttttgagtaaaggagtacttaagagttggatggttgaatttgttttttattctactccgttatctagtacgcatcctaaagaacaaggatcaagacgaccaatatatttccaatatgaaatgaccaccgtagacaacacatcaaagactgcagatgcccttattagcgattggaaccaaatagtacatttatatacactcgtacacgatttaagcgaatatttgaagatagacaagtatagtttcttagccaacatgttctgtatcaaatcctacaattacaccaaactgattctttgctatggctccgataaaggagctatggtctccatcacatggatgagttcagaaaaaatgtttaagttagcatttggagccacgaacagcgctcttaatgctcactctatgatccaggaacaactagaatctcatctaaacgaacataggaatttggcgcagatcattcaattattacacgagacttacgagccgctattatctataagtaagttgccgacaattcctcaattgggaatacataattcaagaccacaagtacctgtacaaacattcaccatcatggcccaatcgtgcactcttctgcgtctagcttaccagggcatgtactgcttggagctgcgaattagaggatccggtttggtttccctgcgtgatggggcctacagtagatttgatagaagcaacgttgtcgatgtgttctctcctactcagggtttgaaaacatttttatcgaaatatgtcgacgaaacggctgtgtttagaagaagatctcaatctgaggatgataatcctccatcgccgatggaagtggaaggcagtgggttcttaggtcaccatcgaggtcctcagtctccagccggtcaaagagaaccaggcctccgtttccacccacctttaacgccaccatcaggctccaatcctcacacacccgctagtccccacacgtctatgaatcaaccaaccacccacaccagttttggttccagtccagctacctcatttaacttagcatctcccacatcgctacagccgaatataaacccaagccccatgcctcaccctag

SEQ ID NO: 7330 - DNA, 1562 bp, Diabrotica virgifera
  SmartBlast Evalue=5E-18; Info=Endonuclease-reverse transcriptase n=1 Tax=Bombyx mori RepID=D5LB38_BOMMO
tccctgtacattgccttatgttttggagccagtatttttttgcgttccatttctctcttgccttcaattttaccataagttagaggaactggtatttttcatttcgcatgatgtgacctagatacgcagctttccttttcttggtggtttcgaaaagttggtgttattggttgattcttttaaagacatctacatttgtgactttcgccgtctatggtatacggcgatacaaccacatttcgaaagcttctaatcaggtcaataacttcctgaattttacgaaagcttgtcgagcttgcttaatgcgacattttacttccatgtacgatgcccagtattcaaatagccacgcaccccgctttttaaatttgctcattctttcaatggacttggtattcagtgctatggtggagttttcaagtgcatccaagtattcactagtcagatggaatcggtttctttttcctttgaagcttcttgtgtgactttttctgcgataagtcgcttgtagagcttcttggtgaagtggctaacagtagtccccatcatgttggtattccagcgaccctggtagcgtttgctcctcacgaacttcttccaaaatttcgggaaagtaatcaagatgactgttcaagactaaacttttatgttcatcaaacatcctgatttttgaaacttctttaagattttagctacaatagtaccatcttctgggtcttttatatttactaaaaattttgtaacaacttgcttgaatgatacccattcttctttctcttttatggtcattgtgtgtttcagtagtgttgttcttctacattcagtatgttcttttaaagttctgtttgaacttggtacctatattaaagctgttaagtcctttaaaaaatcacaaaatttaagtgtaaatgtgaaaaaaggtacctaggtgatacagcttaataagtgtcatatttggatttagcaccctaaaatatatacgaataacgtgttttaagtaaaaagtttttcatcgttggcctgtgtaatttatttactgttcagtgcattgaaaattaagttttctcgtttaataaaatatttaactgtaactttgcacatattcaaactttattgtaaaaatttgaatgacttgctacccatttacagggatattatgaaacataaaatatgggagctgtttcttttaaaatgtcctttcagtcggctctgtgactcattgaaatggcagacacacgtcgaatgtagtcactagtcactttgaactggaagtcactactgaaatcgagtcagccaatggacgggaagtacggtgaacgatgtgatctcacagctcagtggtcgctcattcattaatttgtattgcaaatcgttaactctttcggtgccgatcaggcgccagcgcgttatatgtttacttgagtcaggtgccgtttacgcgccatcgagtcatgtgaatacgtcagtcaggtgccgttcaacaaaatggttcctacttgagttccatctatagatgctagaaactcggatataatacaccaaagtatagacatcgatacttt

SEQ ID NO: 7331 - DNA, 1559 bp, Diabrotica virgifera
attagatataaaacctgtatatattaatagtttaagaatgtcgatattgggatgtaccttccatgtttatggattagttaggatctctctaatgataaataatttgtacatatttgtataatttatattttttgtaccgacgtcttaactatagttttaactatagtcacttttctatttttgatactgcattatgcataatattaagtggattattgcgttctatcctggacgaaaaccgggtaatgcttttttataaatagttatttttttaattgacgctgttccgcctaaaaatctaaacccagtgggtattcaaccacacgaaacgtcatcaggccgttggctatcatttaccaaattgttctgtattacacagaaaaagatattctatattgtaacatttttagacggaacgagacagtaaacaataattaacagtaacttttaaaggacaattttataaaaaccgcaagtatctgaaatatgcatatacataaagtaaatgttttctaatagaaatagtcattattaaacaattcaagtttctcgtttttcctagttttctatttcctcgtttctaagtacttttttttcattttcacatttttcgtcatctttcctttatttcgctgtacctatatgctcctttctgttttatttgcttcttttctgctttatatggataattttttgtattaccctttcttttttcttgatttctttcttcttttctctctttttgcgttttttctatatttttcttcggttcggcttctttttccttcttttttcttcttaaggtttataacaaaccattagaaatagatgagctaaacctatggaataccaagaagataataagagatttgggacaacctatatatgcctaggaagaagaagaatccttctctactggcgtcaaaccatatcttgagacattcaagaatgaattaaatttgaatatctacaataatttccatcatttgtaaaataatttaaaagcttgtagcgacgttattaaagaaattagacatatcaaacatcacattttacatcaaatgttacatttcatgtcaaatgtcatatttcacgtaaatttatgtgatattttgaccagaaatgtgacatttgacgtgattcacgtcaaatgtcagatgtcacataaattgatgcaatatgcatagagttatatattagcatagagagagccttcactatgcgcgtcctgacgacaagatctcttcgactggtttgcgctatctctttataacacatcgtaccgagaaactaagatgacattaaggtgtgagtataggcacggaagaggaggacaactgtctcagcttaatatgcgtaagagtgaaacagcactaatccaaagaaaaaagatagtgtcgtcacttcgctttgaatgacactctctctatgtcaatatatacctctatggcaatatgtggacgagaaatatgcattgacaatgacatattaagcgtagactcagcatactcatcaaaaaagcgtatcgcggaaacagcatggaaacagtcgatcggtgg

SEQ ID NO: 7332 - DNA, 1560 bp, Diabrotica virgifera
  SmartBlast Evalue=1E-156; Info=Cytochrome P450 9Z4 n=1 Tax= Tribolium castaneum RepID=D6WWU4_TRICA
gttatttttgttagataaagtaaagaacgtatataattaataaacgtgtaacctcaaaaattactgaaaaaagttcaatatgttttggattcttggagcagtactgttagcaactctaacctactacttccttataaaaccactttatttctggaaagaacgaggtgttccacagaaagacttcttcgaagcttttagcttctcgtggtttggtctgttctatcgcatgacgtttacagaaaatataatcagcctttacaggggtttccctgggagcagatatcacggcttctatcaattcaattctccttctctgttaatcaaagatgttgatttgatcaagcaaatggtaataaaggactttgattattttaacgaacatcgtgttttcgctagggaagatgtagatcctatgtgggcaaaaaatctgtttgctttaacaggtagcaaatggagaaatatgagatcaacccttagtccctcgttcaccagcagcaagatgaaaggaatgtttctcttaatgaaagctaacgctgagaggttcgtcaatttttacctcagtcaaaacaaagatgtggtcccagtggaaatgaaagaagtatcttcgcggtatagtaacgatgtgatagcttcaactgcctttggatttgaagttgattcgctggccaagccgaacaacgaattctacgtcaacggaaagagtttaactgcatttggtagcatcagagccttatttagatttgtttttaacatatttctaccaagtgtcgcgaagctcttgaacatcagaatcatcgaagaaagcgtcggggacttctttacgaagattattgaagattctattaaaatgagagaagaaaaaggaattgtgaggccagatatgatccatttacttctagaggcaagaaaaggaacctctaaagccgatgaacagcagactactgatgatactggatatgccattgtcgaagaacatcttaaatctgaagtaaaaaccgatatcaccaacgacgatattgtcgcccaagctcttgtcttcttctttgcgggttttgactcgagttccaacttaatgagcttcttaggacatgaactatgtgccaatccagatattcaagagagccttagagatgaagttaaagaaactatggaaaattgtaatggaaaattaacatacgaagctcttgtaaacatgaaatatatggatatggtggtgtcagaatgcctaagaaaatggccagctatgccaacattggacagactatgtaccaaaccgtataccatcgagccagttttacctgaagaaaagccagttcaactaaaaccaggtgacatcgtacatctgtccatctactccatccatcacgatcctgaactatttccagatccagaatctttcgatcctgaaagattcagtgaagaaaacaaagctaacattaaaccctattcttatatgccattcggactgggacccaggaattgtatcggctccagatttgcgcttctagaaacaaaaatattatttttctatattttgagatattttaaaatagtcccgac

SEQ ID NO: 7333 - DNA, 1556 bp, Diabrotica virgifera
  SmartBlast Evalue=7E-26; Info=CG1105 n=9 Tax=Drosophila RepID= Q9VI53_DROME
tcctatgagtaagtcatcgaaacatttaaaataacttaaatataaggcaattttgtgtacctgagtcttcacaatagtctcggcagctcaaatcttacttttgtgggttgatgctatcgtaggaaggtggaagttgttccgttggtggagctgcaggtgccgaaggatacccagatgcttcttgtgcttttcccgagtattcttttgtagaaggggccccataggcaccagacggataaccttgtggtggataagccccaggaggttgtgggaatggttgggttggggctggaggataagcgccaggaggatattgactcgcaggaggatactgtggaccgccgttccaaccggcgccgttcgttggtggaggttgattaattggataagaaggaccgattggatatgaagtaggattaggactaccaaagcctccgatgggtgcttgctggtttatgtcgatatttcctacttctatggaagtttcgatgactagattactgtgaacgttcggaagtttggcaatgatcttgtacgtatagtttactttaaacaatttgcattgcgtaaagttcggaaccgaaaaactacttggtaactgcactggtaatgtgaacgtatgttctccatgggctcctactccaacttcgtttatgtctgcggctaagttctcaactgttttcacttccgcagatgccgtctgcctacaggtaattaactgttttagtttcaattccagtccttctacattagtattggacatattagaaagtctaactgcaatatttaaaacttctcctagtacaagtgcctttttggaatagaacgtccatgctgattggaccctccgcacaacaaaagcagcatattgttttctcatctgaatagtttgtgggttgcagcaagtcaggtttttgaaggtaattcagatctactaatgagacaacaatgaaaatgaatgtatcctcatagtcaaaagccattggtcggtcaacaatagcaataactttgtaggtgatgcttccatatggacaattgtatgtagaaggaatattattgggtagtatcaaactaaatggatacatgtgttgaccagtaggcagtttagttgttccagaatgtcctccatgcaaaattacttcagtagacacaacataattgtctgattgtactgttacatctctggtttttgattcattactgccaggttctgtatagctttctgtagttgtccactctgtgtgttcatggccaatcatgcgcactttgacatttcttaatgtagtttcactactgaaattcaaaacaactttcccttgaatttggctgccaggataatattgaccagtgtggtagttatctaaccatatcttgcagtgagccatttttaccgagactgatcagtttaaacttcaagtacacaccctattcggtttgtttgtgaaaaaaagtggaatttgttggtaacagaaacagatcacagtaaaggacaggaagtcatgtactgtggaaacagataactaattgatgatacctctgaccttgatagtaaaatt

SEQ ID NO: 7334 - DNA, 1560 bp, Diabrotica virgifera
  SmartBlast Evalue=7E-66; Info=Pheromone-degrading enzyme n=1 Tax=Popillia japonica RepID=Q2TIL3_POPJA
tataaacaagatgcgttggttttactttttggtgcttttcccaggattattgcatatcaatgctgagataattgtcacaaccccaaatggaaaaatccgaggaagacaagaatattcccaaaggggaatatcgttttatgccttccaacaaataccttttgcccaaccacctattggatcattgcgatttaaagctcctgtaccagcagaaccatggagtggaattctagatgctacaaaaaatgataggttatgttttcaacaaacaaatatgttaggaccaggtataacgccacttcaaaacgaagattgtctttatttaaacgtatataccccgatggatccatcaaaaaatggttctcttcccgtcatgttttacatatatggtggaggatttgttaacggagccaacaattttgattacaatggtccccattacttaatggaatatgatgtcatcattgtcaatgttaattatcgtgttggtccttttggtttcctttcaactggagacaccgttatacctggtaataacggattaaaagatcaactgcttggtttaaagtgggtacaagaaaacattgaatattttggaggagacaaaactaaagtgaccatttttggtgaaagtgcaggtgcagcatcggtgacttatcaacttatgagccagaaatctaaaggtttgttcagggctgccattgcacaaagtggatccattcttagtccatggaccttccaaagaaactatcgtgacatagcatacggtttgtctgttcaattagatcctaccttcgatccaaaagctagttcccaagaattgctggagtttttgcaaagcaaaactgccgagaaaattaatgatgcagccaaatctatgatgtcgcaaacatttatcaacaaccaaatcatccaggggtttcagttcactccagtcatcgaaccaaatcacgacgatgcttttatcaccaaaagaatgtacgaagcaataataaacggagaaatgcaaagagttcctctaatattaggaatttgttctgaagaaatgatctggtacgctctagatcccgaatcattcaaatggactgctcgtgcattggacagtaatcttagcttgctggttaatgacaatatgcgcatagaagatgcatctcagaaacaaactgtaggagctgctatcagacaggtgtatactgatggattattcatagataaaattggaaatgctgtagagtttttcagtgatacgtcatttggaagatcaattattcatcacgcgaagaaacaatcccagtttagtgatgtttacttctaccagttttcttactatggaagcattccaggagtgcgaccttatatagagggtgcctacaaagtagcacattcagacgacaaccagtatatttgggtttcaatgaacaactctaacttgaacacatatcctaaaggagatgttttgaccagtgaacgttttcttaccttatttacaaattttgcaaaatctttagatcctgtcgctaacaacaccgaactgttagggataacatcctggccgaaggtaac

SEQ ID NO: 7335 - DNA, 1557 bp, Diabrotica virgifera
  SmartBlast Evalue=1E-172; Info="U2 snRNP component prp10, putative n=1 Tax=Pediculus humanus corporis RepID=E0VK59_PEDHC"
atcttcctgttgaatgaagaatcctgtcggagtatgtgtactccctatcatcggagtgggagtagcagttaactttctagctggagttctaatgggaatatatccagcaggtcttggaagaactttataaccaggagggaacatcgcatccaactcttcgtctgagtaaggtcggttgcgttcatcgatttctctttcccacctgtaggcttgaagttgctcgggtgtcattgatgctagatgacctggagtcggcgtctgcatgcccatggctttggaaccgactggagtactacctccaggagtcaacataggggtggagtttccgtggcttggagttgcatgtggggtaccatgaggagttgtgggcgtcatagctccaggcgtcatcacctgcgacggtgtcgctgaaggcgtctcgtcccatcgagaccttcttttagaagcgcccggagtgggagtctcttgtataagatccgctccggttctgtcggtcctcggcgtctccgcccaaccgctgttgtgtccgggagtctcacgttccgttttgggagtctcgtcccatctgtttcttctggacgtgctcttatcgccgtgcccgggagtttctctgcccggtgttgcggggcccggggtagcgtcccacattctggtggactgacctggggtggcgccgggagtctcacttcctttgtggcctggcgtttcgtcccagcggatatctgatggtgttttgtctccttcccacactggcgtagcagcattactaccgctcgaaggaatagacaaagttttcttcttttgaggtattatgacctcatctaccgtctgatcccatcttccgcgcttctttggagctgatttggcctcgccgtttgtagcttttaaagtaccatcctttgctctctcaataagttgtttgcgaatctctgcttcttctccctttagcagctgctctttcataatctgggagtagtttctggtttggaaatccggcgtcttcccaccgtctgcaaaaggatccactctttcaggagaaataatcatccttctccttttttgcctatattcatcttctctatctgcaattgtaggtctacgacggtcagcaaatggatcatagcctttttcactctctgcaacatcgtttaaaagagctacacgtcctcccaatcctgtccgtttactagaaaagcctacatcttcttcatcatcatctacttcatcattagcagcaatggatgtaacatatccttcatactttcctttaccggtttcgtaaatttcatcgtcgaaatatccaccctcccctagtttcgactttttctcatcgggtttttctgtaggaatttcttttttctttgactgaatttcccgaatttgtgcttcaatgtcttcgtgtgtgcgagggatgttgtccatggttataatttacaataccattagattagcgaggtaaaatattattttctctgtttctgtgcttgtaattatttattgaatgtaaaataacaacactacaatgtgaaaataaatgggcgattagcctgctgtcat

SEQ ID NO: 7336 - DNA, 1559 bp, Diabrotica virgifera
  SmartBlast Evalue=6E-72; Info=ADRM1 n=1 Tax=Culex quinquefasciatus RepID=B0W763_CULQU
gcagtgaatttattttatattacgataatgtatgatacaggaaataaggctcaaaaagttaatcaataatagaagataataaagtcagctagattatatttatatagtgttactagttgtacaacattgcaacttaaaaacaacattttctaattagtccaactgcatttgatcctcatcatctttcttcttatcatctttcttctcagacttatccttatccttgttttctgaggcagctccttcgccctggcttgatgttttctccagagctttgacaaaatcagccatattcccttgagctgcagctgcaactgcatctggattgacagctaactgcgacacaatgggacctaactggcccgattctaaagcacttgaaaactgggacacagcctgatgaaattgaggtgacgctagtgtagatctcaatgcttcgtgagtactttcatcaactgctggcaaatgattctgtaattgctgaagagtctctggattactcaaaactcctgctagactctcactggttaaagcagtagataaatcaactgattgagcctgctgagcccctccagcaggtgctcctgctccaggtggtggagtaagacctgaaagaaagttctgcaaatctgctaactgaataggacttgaagaaggaaatgatgaaggagaactctcatcttggggtctagtcgtacttcctcttacccttggagcatcaggagtaactgttggaattggattctgaggggttgtagttcctggtgcgggtgtagtactagtttgagagttggtcgctggtgttggtgtgggggtagtaggtacagtagttctgtgtgtaatagcaggtgttgtgctagttcgagcgcttccactatttggacctctaatggttcccagaagactcgacaatcctccgatctggccaactccactgccaaacagctgcatcagctgggactgggacatattatttagaagagactgcaaatcttgatcaggatttggtgtattttgaacagcactcgatggattatttagtagttcattaattcttttacagttatcttcatccttatcagttttaggttcctgtaaccagaaaaagaatttcttatttgatgacttgaattttagcaagtaagcacgacctgttgtgcattgaggaacctttacatattcacagtcatctggaaaaataatcagatcatcctcaacaatgcctgtagttctgtcttgccaacaaaagtgcattaaagagtcatcactttgatacacatacagtaaacctttgcgtttgtctgcattaaccgtccgcccttttaaattcatttttccagctctcacttcaataagatgtttatttcccccggtagaacctgggccagcagctgagctaccaaataaggctcccccagcaggcataatttcgattatttgaatagagatatattatctaaataataattactacagaaatagttattaaaattaaagttttaaaatatatgatacagcaaacagcactctgaaagaaacctactagtcataccatagag

SEQ ID NO: 7337 - DNA, 1557 bp, Diabrotica virgifera
  SmartBlast Evalue=2E-30; Info=Uracil-DNA glycosylase n=2 Tax= Ruminococcus albus RepID=E0LA06_RUMAL
aatattgtagtaaagaagtgatgtagttctttagttatattttgctcacagatttgccctaaacctttaaattttttatcatcaattattattgttaacagcttcacggcttcccatattttcttcttggcacaaaagttttttaattgaaaattcgtgacatacaaacttttgtgctacgactgcacatttttctgttaatactgacaaaatcacaatattaaatacataattacgacaaatcgacaaatagataataatatgtgaccgacaatcagaaaataacataaaaaatgtaatgagtaatcagattattctaccatataatattattatggtagaatcgaacaacatcaaaaataaaccaatttatttaagtatccagtatcaaaataacgtttttcaaacgaatacaaattataaataataacgctgtctacaattacagcttaaaatattagtgtcaataaaagttaaccgtcgataactgtacttgatgtatcacgaaattccctgtgaaataacgttatcatctatcacctcttagattaccagatgttagtacactcacggtagtgagactcacgggtatagtaatgggtgctattatctattaaaaaatagcgaataatgagcacattattaaacggtcgtagaaaaataaaatttcacgatattacataattaggaactatttgtggaggaggaactggacaccaatcaataggattaatatcgtgttctactaaccatccattggcttgcgaaaaatgcttgcagcccgaaaaattgtttaattgattattaggagagggatgcccagcggaatattgattccagtaatggatctcaaacctattctcaagaccacctcttaatgccttagcacactctccccaaaacataaacactatatttttattcagtgcttgtaactttttaattaattcttctacaattacattccaccccagcgacaaatgtgatttatatgtagagtttgttagagctgaatttaacagaaggactccttgtttagcccagtagtcaagatttccataatctgttcgaaattctggtctaaggttctgttcaccaatatcacttttaacttcttctaaaatattctgtgtagatggataaatccctgaatctttactgaacgccaggccagtaccatcactatcacttggatcttgaccaattataaccactttcacatcgacagggctacaaaatcttgtaaaagaccataatttaccactgtttggaaaccaatcggtttcacgaatgtatgataaaacgactgctatcgtattaagttggttaaactgagtgcaaaaaacctctcccagtagaggtttccatgagtcaggtatattgctgttactaaataacacaggaagtcgttcaaaactaaaattaaaccattgaagataatgattttgcaattctactagttgagcatagtagttaggtaagtcattactcacaaaggtttgttgcgccattagaagatgcagactgtggggacaataaaacttgactagacttcac

SEQ ID NO: 7338 - DNA, 1558 bp, Diabrotica virgifera
  SmartBlast Evalue=1E-74; Info=Serine palmitoyltransferase 1 n=1 Tax=Harpegnathos saltator RepID=E2BWC6_9HYME
acttcacgttagtgcgtgcttaaaatttaaacgtcatcttttaaaattgtaagttttagttttgaagataaacatcttattagcttattatttaaaactaaaagttataattataaaaagggacaagggactacatcgtgttgcttatcttttaatcgctattaactcatagagtcgctggaattgaggttaaatcattttgggagtggtgttatattttaaacaattacaatgttggatgaaaacttattgcaagaacgattagctcaatttaatcccgaacctttagtagacattactcacaataaacccaaagaaagcatcgaatcctatactatccaggaggatgagaacaacattgatttggccaaaaccaactttttgaattttttggacaatgaagaaataaaaaaatcggctgaaaatataatacgaaaatatggtgtaggaacatgtggcccaagagctttttacggcacaaccgatgttcatctcgatctagaacagagacttgcagactttctgaatatgtcagattcgattgtttattcctacggttttgtagctatatcaagctcaattgcagcatattgtaaaagaagtgacactgtatttctagacaaggaaaccaactttccaatactacaaggtgtaatagcttccaaaagtaaaattgtgtattttgaccataatgatccaaatagtttgagaagagaagtggagaaagtgattaaaaatgagaagaaaccatcaaggaagtttttaattgtagaaggagtatcttggaagactggtaaactgctgcctttggaagaattcttaaaagtagctgaagattacaaaatccgcattttcctagaagaatcttattctatcggtatatacggagatcatggtaaaggtttaactgaacattttaacattgatccctcaagaatcgatatgataatagctaccttggaagcagcatttggttccataggaggattttgcgctggctcccatttaacaatcgaacaccaaagattatcaggagctggatatatattttcagcttccttgcccaccttcctcgtacaagcatgtatagagtctattagactcatggaagaccgtcccaaacaaataagagcatttgcaagggaattccaggtatttttagaagagacatgccaatacaaagttgatagtgaccctgaatgtgcttttaaagtttttactgttaaggaggaaaacggcagaaaagagaaagaggaagtaattcactcatattgcaaacaaaatggtgtacatttcctgataactgaagggggtctaatgataaacctttcaattaatatctttactaacaagagtagattggagaaggtttataaagttctggaagatgcatcaaaactataataattaagtctggtagcaccattttaggaatattaagcacaactgcacaattatgggcatttacttgataaactactgtaatatattttaatttaaaatccaattaatattatggtaacacaaagctggtattaacattccttgcgcaaaaata

SEQ ID NO: 7339 - DNA, 1556 bp, Diabrotica virgifera
  SmartBlast Evalue=5E-15; Info=Putative mediator of RNA polymerase II transcription subunit 26 n=1 Tax=Dictyostelium discoideum RepID=MED26_DICDI
ggtacatcaatcaatatgaagttcttcattctcctttcgctggttgctctttgcagctgttcaccagctcatcaaaagcaaaacaaatatgaacaatcaaagaacgctgttcaaggaaataatccttacaacaccttttggaagacatatagccaacagcgtcaaggagaagaaccatggaaccagtgggctcaatatggccaagacaatcaagctggtaattactggagacaatacgtacaaggcaaaaaccaagttggcggtgctactgtaccctggatctaccattactgggataaccaggattacgaaaacttgagccctgcacaacgtgtccaacttgttcttaattatatgcaagttcaccaacagtggaaccaattgaactctgatgtaaacaatgaagattatttgcaccagctgatgtaccaacatcttcctgaatacgtacaatataaccacgaagatgtactaccccacttagtacaatacttcgaacaaaatcccgcaagatataccaatatgttgcaccaagcgtatcaatattcacagtcccaacaacaacttatgtaccatgtaatgtaccaattgtaccaacattatggtcaagctccatggtcccaagaacaaatcagaaaccaaattgtaaagtaccaatcagtttaccctcatcaattatctcagggtcaaatcgaacaattggtagaatttgtataccacattcaacaagaattaacaccaaggcactaccaacaattagaacaagtacaaccccaattagaaaattaccttgaacaaagtccaatgtctcaccaacaatatccatggtctcaaagacaacttatgtaccatgtaatgtatgaattgtaccatcattatggtcaagctccatggtcccaagaacaaatcagaaaccacattgtacaataccaaaatgctttccctaaccaattatctcaagagcaaatcgaacaattggtaggatttgtatacaacattcaacaggaactgatgccaatgcactaccaacaactcgaacaaatgcaaccatggggccaatataccgctcaaccatcaaactatcaaacttattattcaaggaacaaccagaatggtttgtcatggacctacagacaagctcaacaaggatatggatctgctcaaccatggacctacagacaaactcaacaaggatatcaatctgctcaaccatggacctacagccaaactcaacaaagatatgaagctgcccaaccatggtcctacagacaaactcaacaaggatacgaaggtgcccaaccatggtcccattatcaaaccgtttcacaaacatacggaaatccattagctcaatactattctaatcaacaaaaccaacaaccatggacccaatactggaaccgatatggacaacagtaccaacatcaacaacagtatgttatgtaaaattatttatttttattaattattttaaaaaataagtgagtcacattttgttatatatcaaatatatacaaataatgatttgccaaataaaaaaatattttcaaataaaa

SEQ ID NO: 7340 - DNA, 1552 bp, Diabrotica virgifera
  SmartBlast Evalue=3E-94; Info=CAS1 domain containing 1 n=1 Tax= Culex quinquefasciatus RepID=B0W8N6_CULQU
aacaaaactgttcataacctaacaaaaataaataagccgatatcagcactttaatatgcatatttatcaaaagaaccttagaagctccagtgacgtggtacactaaaatcacaatctgcatccaccctttccattcattcaattgatccctgtgtaataccttgttgaatttactttcttccataaaaaataaacctaaaacggtaatgtatccaataggcagccaaaaactaaattcggaatagtatttatttccttcataaaaaaatttgtgcgatcgcagataaaaaagtaagcgatgagcagagtcatcttcgagatggttttgaacaggaataaataattgttgcttgtgagtggtatctggggctgcgaatcgttttcgggtagtctgtggtagtcgtagaccggtttgccgcaatatcggagtaacagtcttctgagtatcatcactattgcaattgtcacacaaatagccataacggcgaaagtgacaatctgcaaagtcgttcttggctccactgaactgcagcaagtaccatcattgaaagccatataatcattgcaatacatgttaagaagaatctgcgtatcatgtatttgtggtttttctgcaaggtgaattccatccgggctttcctgcagcatcccttggcctaccaaacgggcactccaccaaagatcagcggcagaatgggataaaacctcaattgcagcattgttgtattgatcaattagtgcatttgtaaccatatgctcgtcgggttttaatttgtcctcgtttacaggtgcctgtagagcccataatgtccaggttttccgtcgagacaatctgtcgatgggttgaactaatctggtaagattcacgtaatattctttcgcggccacctttgaagcatttgacgatattattggccataacgcgctgccagccactatgactgatggaggacgatcagagttttcccaatgcctgaaaagattgaccatttgtcgtgaaacatatggtgaccatatgaagtccacctttatttttaatctatcatcgatgtgtgttaaattagtgtacacaagagttggtttctggctaacattttcctcttgtttcaaatggtgtacaaaagccttatataattcctcgattctggtatctcccacaaaaacaaagtgggtttctaatccaatatatcctaagtaacggaggcatcgtttagtatcactgttagtgtagagatgtagcatacacccataaggctgccattctttatctgctttataccttccatcagataatagccatttacaagagttagtaccaaatctcaagtgtaatatgccatgataacaagcaaatccaatcaccagaaaaagagctaccttctttgcatttgtcgaatttatttcttcaataattctctcgatttttgatttttctccagccataatagattatacaaataaatttgtttcattctgaaaaagttaatactatttatctactgtgcatattttatgaaatcaagttacgtttagaatggtcgaggtcgattct

SEQ ID NO: 7341 - DNA, 1555 bp, Diabrotica virgifera
  misc_feature (1548)..(1548): n is a, c, g, or t
aatcatataggtcatgtttaatgaatatacaatgaaatagatttaatccgatttaattaatagtacacattagaaactaaaacttaacttatactggacaatacctgcttgtcttctaaaaacttcgtactaaaagcaacactgattgtccattagaaggtaacattaatttaagtgttcaagtctttgcaagtatcacccgaaatattctcagtgggactaatgtcctgcgaagttaagccacaaaaatattgtgtgatcattaaaagtatgaaacttgtttctatatttgtgtaacttcggctgctaaatactaccctctagaactagctttggcagtagcttgtcgagaagcactaacagatggtggctgtacaatatggatgcatgttctttctcacttgaaatgaatcattttggactcgatacattgttcagtgatggaagctcaaaaccttggtttcgctcttttagtacatttctgaatcacaatgtatatagtcctgaagctactttcttatggcatcttaatacaatttactatttttattaggaataagccacaattgtagtttgaaattatgtttatttaactttggaaatcattcttacaatacacaaaaaattgtagtgttgcaaaggcagggacaagaaagtggatagcttacaaatctctgagatagtggaggaattcaccaggacaaagacagacgaaacagcacattagagaacattcgccaaaatttaacatacctaatagcaaagacaagtcaaagccatagtaggtctgctcataggccactgtaagctgaataggcagttaaactgattggcacatgatatatgcagattttgtcacctacaagaagaaacaacagggaacattttgtcagtcttatagacttgggaagttattagaccttaaaaagagtaagactagatctaaaggagcaaaatggatctgaaaaggtcgcaatggaataggccaaaagcctattagccggatactactctcaggggcaattgatatccacagccatgaaagttagtaatacgtgtatatcaaaaatgagcgacgtggcccttggcaaaatatctggagaaatatctctgaaccggaatgaaaaaataagttgtctttcattttactcatattttgagtacacagaatcaactttggttggaatttttcctagatgaatagacggaatgtgactgtattgtaatcccttttttggcagagattaacgatgtacccagaaattggttccacgggaggtttcagatttattgtttacataatatggaacttctcatttcattctgatatgtttggtatttctgcatcaccacaattgttctacattctcatctatcattctttcacgtgataaatgatgaaaaagcatgaaaaacatatgaagggtcaggggggaagaacgatgaatttctatctgcaaagcattttcggtaaaatgagaaacaaagttacatattcgttgaattttacccccttgcgtccaatctttgtgacgtgattttaagatnattatta

SEQ ID NO: 7342 - DNA, 1553 bp, Diabrotica virgifera
aaataaaaatgttttattttaaacatataggtaccatatataatattaatatgtacaagaataaaatactcttaaaacagagtacaaaatctctatatacaaaacaactgtaaccatggacatttaaaacattttttaaatccaccccatcccttgccctatcgccctcacaaagagctcaggtagaaaatttaacctctgtatatccggtaccgaataaaattggaatgtattcaaaacagcagatggttcgacagacacattttaaatttccatggtcacatccttgtctcacgtcatttttacaaaaatacaatcatctcactatcacaatggtcaggtattttaaatacctcgcacaattttctttacaacttaccaattgaaaataaattaaatatcacaaaacagaatatagactccagttattctgagattacctattatagccaaagtcaacaagtcaaaaaaagtcaacgattaacaatttggattattctgtctataattgacaatttggtcactagctactggagttattactttaagaacaaaacaatgttaaagttgcaaagaaaattgagtcgttgttagggagatctctttttaaaacacaacagatgcgagttttcaaaattgcctaaaaaacacaataatttaagtctagttacactgtcatggctagaaactgtctttgttgcaaactgtctggggcgtcttttgcttgagtagaacacaaatctggtgtagacatggacctgttgagctttccatctcccatactaaaactaaatatggacactagtgacgtaatgcggtcgatttccattgaagaaccaccggtagaagactcttgttgtcgttctgctgcactagcactgacttctttgctaactgaatcagacaacaacgtagcgtcgtctaggaacactgaatcgtcactgtcatcttcctgtttgctctttttgggaagaatggactggacggcctcctccgtctcccattcaccaacagcacgccgcctctttagagcggcgtgcgaaacttgagaattagcacggtcccgtaacacattagaactcttatctaagtcaaaataggttaactcgggggtataaggaggatgattctccttgtcctgattttcggagcacttaacacaagtaggttgtaaaaaatcactagaagacgattcctgaatggtctctgaggaagcactggattccaaacctgcttcttcagccgtaagtccaacaagttcctcctgggcaataatcgggcgagaaatgacaggcgcagcggactgatagtgcaccatattataagcttcttccataaagatataacgcgctttctgcagcacagtagcaacaagtaaatttttatgtaaactaacgccaccacgatgtgatctactctgtgcgattttggtcagagagataccaattaacctttcagcctcacttgccattgtaaacagttcaaaacacaaacacactgcgtcgattattgcgcgtcgaagaacttgagttctacttccactacctaacttt

SEQ ID NO: 7343 - DNA, 1548 bp, Diabrotica virgifera
  SmartBlast Evalue=3E-53; Info="RhoGEF2, isoform E n=1 Tax= Drosophila melanogaster RepID=A1ZAN7_DROME"
ccgaactatttttttaattttcgactgacgtgttagtgcttttcttgtgcggtgccgagttttccgaaaatcttatgcagtaatgttatttagtgaattatttggaaatgactgcttccgtggacattcattatttactattttgtggtgtaaatattggattattgtacatctaaatggataactcatcgacaccaacagatcgcaacagcccatctttgtgcatgaacggttccatgaggcggccgtctccaagtcctggcacgccagtctcgggcggtgtggggcggccggcctcccttatggatcatgctcaaagccaacagcacgtggtgcgcgtcgtagtgaatagggatgagaaagggtacgggatgaaagtatccggcgacaaccccgtctatgtacaaagtgtaaaagaaggtggtgcagcagagaaagctggtcttcacgccggggataaaatcgtcaaagtcaatggggttaatgtaatgcaatcgacgcacacccaggttgttgccctcattaagtcttcctctcaagtggtattaacagtgcagcaaagatccaatattcaaagaaatatgggatccccaggtcatgttcgaccggttactactcctacgtcttcgcgaataacaggaccacagcctgttgataacgaaaaacagtatcaactgcagctagaaaaagagcagtactataaattaatgatagaaaaagagcagcactacatagaccttctgcgcagccaaatagcttcatctacttctccagacgaaaagaagtgccaggaattacttaagacagagaaaaacctccatacattgcgggcgatgttacaacggaatcaaagcgagtctccaactcaccacagaacaaaatcgagtcccgaaactttatcgggtctcacaacaaacgagggtcatctgaaaacttccgagagtctgaacgatttaaatcgacaagaagattgggaaactccgccgggtacaccaccaccaccgtatcctagtccacaggcaacaagaagagaagggattggtggaaatgatgaccaccatttcgatgagagcttcacagactctcccgatacttcatttcgaagtaatggaactagagttttagccaacagttctcccattcatgcagctactccacaaacttcccaacaacccatcatgagtatggaggatgatgaaatctcagatcaagaaattagccaattggaagaccatggacattttaagtcattgtccagactttgggaacatttaccacatcttgcagtatttatgaactatatactgtcgaattctgatcctaacggcctaatgttttaccttttgactgacctgtataaagaaggtaacgccaaagaaatgaggaagtgggctttcgaaatccattcctgtttctggtgcctggagcgccactcagattgggcaacgtagacgaaaatatcgcacgcgaaattgacgaagtgctcacgagggaattcgacaaagaagaaattctccggaaatcttctggaaagcacgatctcgagcc

SEQ ID NO: 7344 - DNA, 1553 bp, Diabrotica virgifera
actgtgtatatcatcaaggtcggctgcaggaagcatgtaggttattaatatagatgtccatactactcagaaagtttggtttcggcctggaggggatgtgtcacgagaaaaatcttatttctctggactaataataattcacattaattatgtaacaaaagaaagcttcaacaaaaatattgtcaaataataagcaacaaagattttatggtgtcaaccgattttccatgttgcacttcgaaaaataaagattacactttttctttctttattgataactcaacattacaatcgtggtccgagtcagttcaacagcgtaaacaaaagacagacagactctactactaacaataataatatcgtaaaaccaaaagttgcttttaaatactaaatctatggcacataatttctgctgactacaaggtcgcgcaaaaggttttttgactatgaattcacaattcacgtattgtttagttgacattgaattaaatcacgcaaggttttcagctttctccgatgttactctcaagcttatatgtattttaataataaatgtaacctaaatattcaaaaatctcatgtgggatatttcaccatttatgtgccgttaaaagtgaacgttagttaaaaaataagtttatgtaattatggtgaaagttcttgtatattttcaagaaattggaaaaaaattatgatatgaaaggtagagtagtcattgaaactgcaatacaaacggctgggttataagttgttgtcttattctcttcagtcatctttggtttaaatttgatgacaacttcatgtaatgctttatacagtttagaccagcggttctcaatctgtggtacatgtaccactggtggtacatatcattatttgcggtggtacacaaaagcaaaactgtcaaaatcaccactattacagttaattagattacctatctattatacataggtagttatttcagttaggtggtaccaaaaatattaaaaagtattttgtggtacatgactcaaaaagattgagaaccactggtttagactctttacctcttcgagttattctacaacgatattatgcaaccactatttgacagtattttgaagttccgcaagattctgtttgagggcttttatctttttatcaagtttttttattgtgtttgtttttatcatttcatttatttgtttatattgaagtcctttataattgaaacaagacgacagtgaatggaattatttaatttaattttgggaggtccaaagtaacaataaatatttgaaatttctataattcgtgaaaataaagactttaaactgaattttactagcgtttttgagacatatttcttaaatataactcatttgatcaacttaagcgcataaatgaaatgaattatttggaattttaaaaatttatgaaactttaaatttattttgtatttattttataagaaaactgtatcctactacaaccagttgtaggacgtgttaaaagcttaaaaaataagttttttgtatatatattacctaagtataatttgcctttcggga

SEQ ID NO: 7345 - DNA, 1546 bp, Diabrotica virgifera
  SmartBlast Evalue=0; Info="RAC protein kinase DRAC-PK85, putative n=1 Tax=Pediculus humanus corporis RepID=E0VM17_PEDHC"
tcatgcgtattttgtattttgtattttgatgaatctaaaaaaatattaaagttaatgaattttggtaattaaacgtgtttaatgaaagtatgaactgtatggattagtagcattttggtatttaatagtcgttgagaatatgaatgaagcctcatcagtaggtggtcctacgggacctttaaccataagcaaggagcttatcgttaaggaaggatggttacaaaaaagaggagagcactggaaaaactggagaccaagatatttcatcctgctcaactatggagcattggtcggtttcaaaagtaaactagaagactactaccatgtcgaaccattaaacaattttactgtaaaaggttgccagatcatgtccatcgacagaccaaaaccttttacgttcatcataagaggattgcagtggaccacagtcatcgagaggatgttctgtgttgaaagtgaacaagaaagagaagaatgggtagctgctataaaaatggtatctgaaaagatatcagactgcgaagatgtagaaatgaatccagctaacagcgagactggcactatggaggacctatgcgagaaattctccctccaaggtacttccatttctaaattgactggaaaacgaaaagttactctcgaaagctttgagtttatcaaggtgctgggcaaaggtacttttggtaaggttattttgtgcagagaaaagacaactggtaggttgtatgccattaagattctcaagaaggaagtgatcattcaaaaggatgaggtggctcatactcaaaccgaaaatcgtgttctaagaactactcatcatccatttttgacttcgttaaaatattctttccaaaccaatgaccgcttgtgctttgtgatggaatatgtcaacggaggggaactcttctttcacttgtctagagaacgggtattttctgaagacagaactcgtttttatggtgctgaaataatatctgccttagcctatctccactcgcaaggcatcatttacagagacctcaaactggagaatctgcttcttgacaaagacggtcatattaaaatagcagactttggactgtgcaaagaggacataacttacggaagaactacgaagactttctgtggtactccggaatatttagcccctgaagtactagaagacaacgattatggcagagctgttgattggtggggaatcggtgttgttatgtatgaaatgatgtgtggcagactgcccttctacaaccgcgaccatgatgtcctattcacgctcattctgatggaagaagtcaaattcccgaagaatttgagcaccgaagccaaggaactgcttgccggactgcttgtgaaggaccctaccaagagattaggaggtggacctgaagatgccaagcaaatcatggctcatcccttcttcagcagcatcaactggagggatttggaacagaaaaagattcctccaccgttcaaaccccaagtaactagcgacatcgacaccagatacttcgactctgaatttaccggagaaagcgtcgaattaacg

SEQ ID NO: 7346 - DNA, 1551 bp, Diabrotica virgifera
  SmartBlast Evalue=3E-71; Info=Methenyltetrahydrofolate synthetase domain-containing protein n=1 Tax=Harpegnathos saltator RepID=E2BLW7_9HYME
aatacaattttgatttcaattaacaaccataaccagcttatagtctttttcttttaccaagagtgaatcccctgttcccaaaatggagcaaaccaagttagaaactaacaacacttcagtagaaaaaataaaagatttggttcttgatgagcaagaaacgaaactcacaatacgagagaaagtttggaaatatctaatatccaataaaatcactaatttcccaaaaccttatagaattccgaatttccaagagatcgaagaagcatctctaaaattattagatctaccagcatttaaatctgccaaatccgtggaggtattatcagataaacctttagcatctatcagagaattggtaataactaataataaagatctatatgttcctattcttagatctcaaaaatgtttcatgagaaaacttaagttagatgaaaaaacagatacaaagacgatagtttctagttggggcattcatcatataggggagaaagttgaagttactggtgatattaaatttgatatatttgtattaggcagtgttgcagtttctaaagatggatatcgaattggtaaaggaggaggatttgttgatttggagttcgctatttataaggaaatgaaagcaatcactgaggataccattattattacaatcgttcatgattcgcaggtatttgacactcttccccaagaattatttaaaacgcacgatattcctgttgatgtcataataacgccaacccgcgtcataacggtggagaataaattgtccaggccaagtggaatattttggaatgaattgaccggcgcacagattagaagcagaaaaatattgcagactttaaaaacaaaatgtgaaagcgaaggaagggatacaacattgtgtgttccaaatgataaaagtatccgagtacgtagacctttttattggccttataacagaaagcgcatcagtaatcgcagcgtacctcttgttgccacgaatcaaaatcaacaaactagtcagcaacgccgaagacgagttaagtttcaagaagaaaaagatacaaataaccaaactaatgaaggcactgaaaatgctgagaatattgcacaaaagaaacacaaaaagaagaagaggaagcaaattgattattctttgagagttagtaacatcaacaaaagtttaagacctaaggaatttaaagaactcttaaaagaaaggggcatcaaacctaccaatataacatggcgaggttatagaggtatctgctttcttcattacgccaaaaagaattataagaaagaaaatgatgattcagatgccattaatagcgttatagaaattattcaggagcttaaactgaaccctacaaaacccgaggagaatttaaacgttgaggtaatggagcccattaccagaattgagactgttgatgttactgccgtttaatagaacattttaaggtggttttttcaagagaaacattgttccagatttacgtattgtgatttctaggtattattacatttaagtagttagtttttgcagttatgtattgctgatat

SEQ ID NO: 7347 - DNA, 1551 bp, Diabrotica virgifera
  SmartBlast Evalue=0; Info=Inducible heat shock 70 kDa protein (Fragment) n=1 Tax=Leptinotarsa decemlineata RepID=Q9GPH9_LEPDE
gaacgtaaaaccttcgctccagaagagattagttcgatggttcttacaaaaatgaaagaaactgcagaagcttatttgggtaccaaaatagtagatgccgtcattaccgttccagcctatttcaacgattcacaaagacaagctaccaaagatgccggtgctatagctggtctcaacgttttgagaattattaatgaaccaacagcagcagccttagcttatggtcttgacaaaaatctgaaaggtgaaaagaatgtactcatcttcgacttgggtggaggtacctttgatgtttccattttgaccatcgatgagggctcattgtttgaagtaaaatccacagctggtgacactcatcttggtggcgaagacttcgacaacaggttagtcaatcattttgctgatgaatttaagagaaaatataagaaagatttgacgagtaatcctagagccataagaagactaagaacagcagctgaaagggcaaaacgtactttatcatccagtactgaagccacacttgaaattgatgccctttacgaaggtatcgacttttataccagaatcagcagagcaagatttgaagaattatgctcagatttgttcagaagtacgttacaaccagttgagaaagccctgaatgatgccaaactagataaagggcacatccatgatattgttcttgtcggtggctctactagaattccaaagatccagcaactgctacaaaatttgtttaatggaaaactctgaacctttccatcaacccagatgaagcagtagcatatggagccgcagtacaagcagctgttttaagtggagagacccattccaaaatccaagatgtcttattggttgatgttgctccattatctctaggtatcgaaacagcaggaggggtgatgtcgaaaatcgtcgaaagaaactctagaattccatgtaaacaaacccagacgtttacaacatacgctgataaccaacctgcagtaaccatccaagtatttgaaggtgaaagaactatgacgaaagataacaatcgtctgggaacatttgatctcactggcattcctcctgcacctcgtggagttccaaagattgaagttaccttcgacttagatgccaatggtatccttaacgtttccgctaaagacacaagctcaggcaaatcacgcaacatcaccataaagaatgacaaagggcgattgacacaacaagaaatcgacagaatgttatcggaagccgaaaaatacaaagaagaagatgaacgacagaaagagaaaataacaacaagaaaccaacttgaagggtacattttccaactaaaacaagctgctcaagaatcgggagacaagctatcagctgaagacaaagctactgttgaacgagaatgcgatagttgcttgaaatggttagaccgcaacactttagctgacaaagaagaatacgaagacaaacaaaaagaattgactagaatttgcagtccaattatgtccaaattacaccaatctggaggtcaaggcaacactccttatggtggagggatgccgggag

SEQ ID NO: 7348 - DNA, 1546 bp, Diabrotica virgifera
  SmartBlast Evalue=0; Info=60S ribosomal export protein NMD3 n=1 Tax=Harpegnathos saltator RepID=E2BQM7_9HYME
cttttaagttaagttgacgttttcgtttcgatttcgggttttcgttatattttacttaaactgtgatctaccattaccagctttaatacgtattaaaacgatggagtacattcaagaaccagtctcaagtgaaccattaaaaacaacaatattatgttgtgaatgtggtatagctatagaacccaaccctgctaatatgtgcgtggggtgtcttcgatcacaagtggacataacagaaggaatccctaaacaagctactttgcatttctgcagaggatgtgaaagatattttcaaccacctggggaatgggtcaaatgtacattagagtctagagaactcttaacattgtgtcttaaaaaacttaagggcttaaatagagttaagcttatagatgcttcttttgtttggactgaacctcactcaaaaagaatcaagataaagcttactgttcatggagaagttgcaggtggtgcaatattgcaacaagtatttgtagttgaatatacagtggcacatcaaatgtgcgatgaatgccatagatcagaagctcaagacttttggagagcctcggttcaagttagacaaaaatcggaaaacaagaaaactttttactatttagaacagcttatattaaaacacaaggcacatgaaaatacattaggaattaagcctattcatggtggcttggatttcttctacacaacagagggtcatgcaagaaagatggttgatttcttgtcagctgttcttccatgtaaataccaacattcaaagaaattaatttctcatgatattcacagcaacatttacaattataagtttacctattcagtggatattgttcctgtatcaaaagatagcattatttgtttaccaaaaaagttaactcaacaactgggaggaatttcaccaatttgtttaatctacagggttacaaattcagttcatcttatagatccttctacagctcaaattgcagaaataagtgctacagtattttaccgttatccatttggagccatttgtaatccaaagcagttagtagaatatgttgtaatggacatagaacccatcatggataaagataggaagatattccctggacaaggagctatttcccacagacatgttctggctgatatttgggtagttaaagcatctgaattgggtgtaaatgataatactattcatactagaactcacttgggtcatgtcttaaaacctggagattccgttttagggtacaatatagaagacagtaacataaatgacacaaacttcgacaaacttgatataagttcagttccagatgttattttagtaaagaaacactatggagacaggtcatttagaagaagacagaggatttggaaactcaaaagacttgctgaaggtgatacagcttttgatcctgatgcaaatgactaccacgagttcttggatgatttggaagaagatcccgaactgagacaaaacatcaacattttcaaagataagtcaaagcagatacctgttgatacatttgatgataatggtgattcagca

SEQ ID NO: 7349 - DNA, 1548 bp, Diabrotica virgifera
  misc_feature (18)..(18): n is a, c, g, or t
caaatatgcatggaaggngaaaaggctcccaaaagattgggaaagcaattaaatactaccaatatataagaagggcgaggaaactctttgtcactgacggaaataattaaaaaatttattttggtcatttattaaatctccaaaaagtgtatgatataaacctacttctttcctctcttcttccattgattggatgcaccaaatgttggcgattacgtctctgtcttttttacggcgataaattaaccataaagccaaaatttttgcccgattcattctacgccttgtgctctctacgacaataagatgaatactgtcgtaaagtgtgaaagtccgatgagtacgacaaacggtcgtacgaccgtttgtcgtgacgaccgaaatcgtaaagtatgaaagaggcgtaagagatctgtcttgcctgattatctttatctctgaagcattagttataatatttaaggtatctcgattgtttacttgttttctcagcggattatcttttttaagagccagcacgttttcgcctttacttttaactttttaacctaataaaatctttaaataaattctttatcctatcctaacatatgcagcggagacaaggacagatacaagaaagacgaaacaacaaatcaacaatatcgaaatgaaagtattaagatcaatagcgggcatatcattatgagacagaagtatacaagaacgatgcaaaattcaaaatattaacaggtggataaaaacaagaaataaaaactgcaacgaacatgtaaaccgaatggaaccagatagattagcgaacatctgtaaaaacaacaatatagcagaagactcgttggaaggccgtcgaaaaggtggaaagacaatgtacagtcaataacaactgaaacataataagaggcagacaaacaggagtaattctattcgcacgaagaagaagaataaattatttattgcgtcgatgcttttatacaataatctaacgtttttatagacatactaatagaagcattactaaccatagaagttcggctagtatgggaatgcagagaataattccatataatggcggaatatgagtatgtataaatatgcgcgccgtgcgttcttggcgccgacagaagttggatcgtgtgcgcaccgtttgtgtgtcacttaaaaacacctcctaacgcgtactaatctaacgaaccctacacaaacgcgtaccgcacacacagcgcgcatatctatacgtaccttaacagtgtcatactagtatgagtaccaggaaatttgtcaatacacgacaactaaaaagctgactaaattgctagaagaggatcagcgataaaatactttggtccagagttgaccttcggagtactgaaaagcactgtccgccactgaacagaacataactgccactgggaaaataacataacggcccagcacaaatttatattggacgggcatactacgctaaaagggctaaagcactgcggaaaacaagcaggaatcatttcagaatcataacagacttccatactggacaagtgctgttcaagg

SEQ ID NO: 7350 - DNA, 1548 bp, Diabrotica virgifera
gtagtagtagacagtccacaggtgttttgtagaatttagcaaatgctaaatatcataaaaatagaaaaaaatagtatagaagtgattatcacatctgaaaagaaaatagtattgaaaaatatctatagattaatacaatctgatatagaagaaagggttcttctagccaagccagaaaaagataaggatattgtattaataatcttcccaggcaaaaatatcaattttccagaagatatcaagataaagacagataaagctttggaattaataaaggattggtccatttatttcaaagatataaataaatttggcaatacagttgtttttgaagcagttataaaagaattgaataacaatgtcttcaactgaattggtagcaagtcagttttttgcaactgatgttaacatggattataaaataccttccataatgactagagacagggaagaaactgttgctacaagagagatatcagatgtacttgatctcttaagtaacaaattgccaactgtaaaggattattactctgagactgacaaggcatggagcctttctaaacagatagacataaaatttgaggaaaatgttgcattgccggctcatctagcatttggattatatttaaatgctaatttttatactaaccagttgaaaactgttaataagctgacagtgttcaacttcaaaatgaactaccaatcagaagataataaagtgtataacaccactgtgcccatatattcaaccaaaggtaatattgataatgctaaattggagaccacttggataacaaccaatgatatcgaaggttattcaacagtagtaatcaactccttgattgatactgctatagctcaaaagaagctgtatcctctaaaccctaaaatcagaagagcaataactgatgatggtatttatcaactagcagatgaagatgtggatatggtgcctgatgttatcaaatgcctgaatgtagcagcaatgagaaagccaacgttgttttctaagacgacttattacgacgtcaatttgataattgctaatatcatagtaacagtttttgggaataagaaggcatcacacttagccttagatattggcatgaagagaatcaagcaagtcttaaaggcagataattccaagagctttgatgctgatacagttgcatctcaagttagatgcttcggttatactgacagaattgacattgatgatataaatgacatattacggatggcaaaatcaggtaaatcatttgatggaggactttctaacaaagctaaaactgcaggcactaagccaatagaagaaaaaggctctgtactctcaaaaaaccaaagaaagaagttaaacagacaacaaagatcgattaataataatcagtaatatggttggtaatataaataagataatataaataaaataagcaaaaaaataaaaaaataaaaaaataaaataaaaaaacaaaaaaagtgcaaaagcacaaataatgatattaattcttatttttccgtaagtgcaaaagatataaaatcttatatagg

SEQ ID NO: 7351 - DNA, 1546 bp, Diabrotica virgifera
  SmartBlast Evalue=1E-123; Info="Elongase, putative n=1 Tax= Aedes aegypti RepID=Q16VG4_AEDAE"
aacaaaaaatatataaattaatataaaaaggattgttaattttgtgtaaaatctctcggatactgttttttataaattaattttattcagtagcaaattccaggtcttgttacaaatcatttcatgtaatcgatataaatataaatattaaacctaggtaaaattaaaaacaaaaaacaattgatcttatctactctatcttcttggtgttgtttggtttggttatagattgtgtgacgaatccctttgtgctaccgttcgcgtaaccttcgtacgattccgagaattcacttttgatgtagccgttgttgacggttccgttgctactggattttgttacgccgttcgatttttctttttcttcatcaagaagtggcatacaaattccgttatcgcttcttttcacagcctgcttggggcccaagtatttgactttataaaagtcggagaacaagaataggaacatgattccgtggagggcgatccacaccataaacgcttttggataattacactcaacgaacataagttggaactggtgagcgaaaatggcgacgaattgaacaagttgtaaactagtcaggtacttcttccaccagatgtatttttggtattctggacccatggcagcaaccatataataaaagtacataataatatgaacaaaagtgtttaatagagcgaagaatgtactgtggccacctggagcaaatttaactcccatccataccgagaatggcatacaaccgtggtggatgacgtgcagcgtggacacgtgactatttttcttccttaaaataaagaaaagcgtatcgaagaactccgtaaatttcgagaaatagtaccaccaacacgtccttgccatccttaaagctacgggattatttgaataatctacaggttgacactgaaaactatagctgccccaccatccactcattaaatattcatacattaaccaaatactaaataaagtttgtagaaaattgtatactattaaaacgtccctaagatcgaatggtttcttattttccattaattttggacctatcactttggaaaaaactgcgtagaacatacatataaatagagttggtaatggactatccatcatccaccatccttccaccctaggatctccatgctctaatatatcgttgtatttttctacgacactggtaactagatgtgacatgttggtatctatttttgaatctttatacctaaaagtcaacaaaaaatgcacaaaatcgtccagatcacaggcttcagttcacatacaaaataggtataatcactgtttttataaatgcacccggcaattgcaaaaatttgataactcaaaaagtttttaaaacgagtaggtaagtacgttcactcaaaattaaccataaaataaagtagtccttgctagaaatggatgttttatatcacggtcttgaacacattgttttaattttaaattaagataggcgtgcctcagtttacgtacaaaatcggtcaaaacgtctatgaatatgacagctcactcgattcgatatctagg

SEQ ID NO: 7352 - DNA, 1545 bp, Diabrotica virgifera
  SmartBlast Evalue=0; Info="Seryl-tRNA synthetase, cytoplasmic n= 1 Tax=Harpegnathos saltator RepID=E2B6U7_9HYME"
cagtacatgttactgtgggcacaaccgaaagtcttttgcaattactgcagagtattgcagtatattattataaattataacccttttgttttgcggtgtgtaaaatagtgtaagaaaaatggtattggacttagatctctttagaaaggataagggtggtaatcccgaattaataaaggacaatcaaaaaaggcgatttaaagatgttgcattagtagacacagtaatagaaaaagataccacatggagaagtcttagacataaggccgacacctggaataaattaaagaacctttgcagcaaagcaattggtgaaaaaatgaagaaaaaggaagaccaaggaagccctaccgaaagtttaccggaaaatataattgctagttttgaaaacttagacctagaaggcatgaagccccttactgtaaatcagataaaaaagataagaacattaatagatgaagctatacaatcaaacgaagaagcattattacgagtagaaattgaaaggaatagtgcactgaaagaagtaggaaatcatttacatgagtcagttccagtagatgacaatgaagataacaacaaagtcgagagaacatttggagattgtgaaagccgaaagaaatattcacatgttgatttgatagtcatgattgatggtatggatggagaacgaggagcagttgtttctggaggaagaggatattatttaaccggtccagctgtcttcttagaacaagcaataatccaattagctttacgagtattacataaaaaagggtataaaccattatatacaccttttttcatgagaaaagagatcatgcaagaagttgcccagctctctcagtttgatgaagaactgtacaaggtagtaggaaaaggcagcgaaaaatcagaagaaaaagaaattgaagaaaagtatctaatagcaacatcggaacaaccaattgctgctttccacagagacgagtggatagctgaaaatatgctaccaattaaatattgtggctattcaacatgttttaggcaagaagttggatcccatggtcgcgataccagaggcatttttagagttcatcaatttgaaaaggtagaacagttttgtttaacttcaccatttgataataagtcatgggaaatgatggacgaaatgattgaaaatgcagaaaacttttacaaatcattggaaatccctttcagaattgtaaacatcgtttcaggagcattaaatcatgccgcggctaaaaaactggatttagaagcatggtttccaggatcaggagcctttagagaattagtatcgtgcagcaactgtttggaataccaagctagaaggttacaagtgcgttacggtcaaaccaagaagatgaatgctgtaactgattacgttcacatgttaaacgcaactatgtgcgctacgaccagagtaatctgcgcaattttagagaactatcaaacggaaacgggggtaagagttcccacggccttaaagcctttcatgccagaagattaccaagacgagattccatttgtgaaacccgctcc

SEQ ID NO: 7353 - DNA, 1536 bp, Diabrotica virgifera
  SmartBlast Evalue=0.000000003; Info=Histone-lysine N- methyltransferase SETMAR (Fragment) n=2 Tax=Camponotus floridanus RepID=E2A795_9HYME
acttaaggtcttttttcctagtagggcagagtgggaaacccaaaatgtcacatagatcatatcctgcatgaaattttgggcatgggaaagctatcggcgcgatgggcgccgcgttttctcactccggcaaacaagcgcaaccatgagaccagttcagagcagtgtctgaggctgattaagcgtaatccgaaagaagtttctacgtttcttcataaccgtcaacaaaacatggaccagccggtactcaccagagactaaggagtagtcaatacagtgaacaacaagaagacacgttatttaacccttgcaggaccaacctttcgtgagaaacatcgaggaccaatagggtcaataaatgtccacacataaattaactaaaaaaacgtgcttttttttaaaccagttcaaaataatacttttacaaataaaaaacttacctggacattaatggaacagttaaaacataagaatttataatttaaccggagtcttcggcttcaagggaattggcatcatcgtaacagaaacatttgattacttgctgtgcttaccacatacatacttctggcgttttgaacaaactatggttgttttttccaactatttttccctgttcttttagattttgctattaatttgcaacatgaatggcatcgtccctttccattctggatggtgttgaaggtatttaagggggattattcatagtccaccatcaagtttttataaaagtatgagaaaaatgatagaaatgctgattatggcatttaatagggcagaaagtagtacgccgacaactactaattatatgagatatttaggaacaaaggtatttagacaatcgggtgtaatgcaatgttgtggatactttttaacccccttggtccgtctagggttaagacgcgtttaggctttcccgcctcttcaactcttcacggaaaggggactagtttggattggaatggggatcgtatgacattcaacggaagagcgccagtcgcatcaatgctaccgccaccagacgagctcttcttgggttttctttctttttttcccctagtgttggtaccaagtctgcaacggagaccaaagtccagttgttttcagattttggttctgtttgttttttgacaaccgcgtggaggttagctgtgggtaggtcctctcctaggtataggtatcattgtgcaatgaaggtaggaaaccacagaaaactaccttctccctatcctgtgtgattttaggcggctctgagggaacatacgcgagtgctcagttatctcttcggattatgtatgtgtttggtgttttagtgtatattttcttagacagttaagtgtagtgtagtatagtgttttatgtttgttttacgtattaggtgaggtgagtgtgcagggtgtggtgtaaggtctatgtatgtatgtgatgtgtgtgagagcgtattatatttttttttattttttattgatttttttgttagtttttttaattttgttaaacgttacagtggacgtcactccgcaaacgtgcttaaag

SEQ ID NO: 7354 - DNA, 1543 bp, Diabrotica virgifera
  SmartBlast Evalue=8E-56; Info=Wiskott-Aldrich syndrome protein n=1 Tax=Harpegnathos saltator RepID=E2BEB9_9HYME
cttcagaatgtatgacttcgcttcgttttgctaacgccctagctaaagcactagctaagtcgtcacttctgctgggtaatggatttgctgctggtttgatgtcccgttcatctactggccttagcttacaacccttcctaatctcgctaagtagatcgcccctagcatcttcttgttgtggcggaggagcttttcgatcgtccacggatttgagagtggtcccatttctaatactttccaacaaagccgcatttcccatagctcccgctgctggtccaggagacagaggtcccataggtggtggtggtggtcctaggctttctttcggactggaaacttcgtccatcataggcggcaaaggaggtggaggaggaggcgcaggcgctggaggtgctgctggaacagaatctcgagatggtggtgttccaaagttgggcacaggtgctggcttcttaggcggcggcacgtccatccgaggcttcctaggagtggcattgttgttagcgttgggtgttttatttggaataggaggcggtggtgcgttacgaaagtgtgacggcctagaaacaggaggtcctctaggtggcactgcgggtggagctgtattcgtgtctatcgttttgttcgtctgttcgattgcttctcggcctccatttcgattaatataatcgtaaatgaaatcccgggtacttttgtcttgaagttgttgttcagaaacgccagcctttttaaagaaagcttttaagctttcgtcttctgtgttgacatcaaatccatgagttgagtcccatccaacatgcgagatatgtttaaaatctctaggaattccaatatcggctttagtgatgttccttcttctcttcgcttgttgagacgccggatctaatgtctttctgtagttattaaaattaagttgagtcgttggtggaggcagcgtttggctttgactaataactttatttttcttgtcttctcgttttttcctagcattgactttttgatttactactattcgaaggtctcgagcatcttgaatactcgcgaagttgaaagctacgtgacagttctcgccttcgaacatgtggaagaatggagtggcttcgatgtagtccatatggttgtacatttcatgttcccacagctttatatttctgtcgatggaaaataagcggaagaagaaattcttttttgtattgtcttttacaaagcacaaaacaccagtggtctttttgatccattttgaatgatccggaggggtcgtcaaatataactgaactactgtggtacatagggattggcaacgatttcctagtaatttaaatatttgcacattttcttcgtccgttaaaatgtcacaatagtgattttcaatggcaggaggcatgttgcagttaaatacgaattgtaaacattttaaaagaaactgtatataacaaaattaactgtgtattgttgtaagacttctcattatcaccaaaaaagtagagtagataacctagaattagtcatatttgtcgtatttgtcccccttgacaagacaaat

SEQ ID NO: 7355 - DNA, 1535 bp, Diabrotica virgifera
tcattggagtttttgttttatttgtttctcgggttggggtcgagaaacacattcttaagtacctacgctgggtttattgcagtttcgacatttctattggaatacaataaattgaaatatacaatatttacaataatgttaagtgcaataggaacttcgacaccataatttaatggatgtcttgtaatttaataggtgcctagcggcagtttcacatagcagttcactgttatcacagcgactgttaggtaggcgtggtttgactgtcaccttttcttcgttgtgaatcataccacttcgatcgcagtagattgttataagaattactgcgataagtagaaataattctagttttgctatcgcagttactaatttataaaataaaaatggcgaaatctggcgaaagcacattacgttctcggacgaaaaaaatgtttttattcatttaagagaaaggatgcaattgcaaaaattgcggaaaaggtgcgtatagattatagataaagaaaccataaaaagaaggtagcatccataagagcaacgtatctactagaaaaaaagaaaattcatgatatccaaccaacaggaatgagcacagatgattatttactgtccaacagtgccatggttttaatggttctgttaataaattattttccatgtcaaaggcaggtctgtttaataacggtgtgttcacccaatatcttttttactgtatgttcgtttctccaccaagggtagtttttttccataatatttttttttcttcaatagtaataaataagttgttacaccatctacacctttttttattcggcgttatctttaaaaactgactatttcatttggacatacgggtagtgaatcagtaggtagcagtaaaattcatcgcagtagatatatccccaccgctaaaatccgctgcgataacagtgagctgctgtgtggaaactgccgcttaatcaatgagggtctatagcgtaatagtgtgtttcaggggctgaccgatttcagtactctggtgccgtagtatgggagtatttgtaaatatgctcgccggacgtgtctctccgctgcgaaacgttgcaataaatacattaatcaagatgggtatcaattttaacacttacagcttacagtaaacttttttcgaaacccttttgttatttttttgaaaaaattcattttgacgctacattttttttttcttaatgcaaatttgttgcctgacttatgccgatctctgtataataaatcaaatttaataatataaattaaattctctatttaatttgttcaatctgtagatatgcctatgtacttatcttaacttataatgcctttaaatatatcggttctgaactataaaacatcaaacaactagtcaatttcagtagatcaatataataaatccgatctttcagaagtttcattagttcactttttctttgaatgaataaagtttacatgttttctagataccgcttttgtgtagctacgtgttttaacatgttgagttatttgcgctatatgaa

SEQ ID NO: 7356 - DNA, 1543 bp, Diabrotica virgifera
ttatctcaatttaatacaatgtttgtatttatgtatctaaatatatacaatttactttacctatgtccagctgaacgatttacgtactgtacatattatgtatgtatgtatgtatgtctatacgaacctatctacgttatatggttcttttcatgaggatttttcagtacgtcacaaatgatagaaaaaaaaggttattccgtgataaatacacatttatgacatttattctaacatgacattttaaataaatctgacagttgtcaaattttatgtgcaattgggcataaaaacaaatcaattgtctttattgcacttataaaatggtattttctttgatttgtatagtcttataaattgtacagattatattcgtagatatattatataattagtaaataaatttatttctattatagcgcaatctatcgacaactggaataatcaccgaactagaataattaccaaagtaagtgcctttttttcggtcatatacaatttcatgcgttagaaagaaatcgaaaaactgtgacgcactgaaaaatactcatgagaaaaagcatacatcttaagaataacgttaattcgccaaaaccaaattatattacggacggactccaagtccgtctacataaaaccgccacactgagctcaaagtttccataagatttacataaccatatgtttctcatactgtaaagtggctgcgaaacactataaacactaaaaacacttcaaagaccgaaaatggaatttatttcggggtttgtttaaaggttttggtgaaaactaggataaactaggtatacggcgaagagactgtatgtcgaccttttattatgacatatacatataaagagccatatttgtcaaagggtataaatcaatgtgattctagtgcatcaaaagtttaaatggggttaaaacgaaaaaaaaatattttgtatgtagcattgattcttttgcataaaaaatgtgataaatatatttatgcacggtattgaaatgtacttattacattgtaaaatcatatacatatcttctattttatttctgatctctttttgtagtttgtcatcctgtagattatttctttactgaaatagcttcattccccatatcatttatttaccattattgtttactacttaggtttaagtatcttagaattatgaaatttattgtagattcgtttggtaccattgaacaattttttaaactgtgttttttttactgatgtgaatatacacatatttttctatatttcaatttaaaaatgttttctataaaatatacgaaaccaataagatccattttttattgcagttgttatattacgtaagtattttaaaagacttcagatttttgaggttataaaaatcagtgaatttttaaaaataagtttaaatagtaccaaatgtagagtaaaacgtattttataaaactttttcttgccttttggcttttagaactgatactatgtagataatgaacatactattgtaaaacatatacattacaactatttttcgctttatacaat

SEQ ID NO: 7357 - DNA, 1541 bp, Diabrotica virgifera
  SmartBlast Evalue=1E-120; Info=Venom serine carboxypeptidase n= 1 Tax=Apis mellifera RepID=VCP_APIME
gttaagattatcctataaatattgtcgtcaatgaatattattacgattgtctgagccgttcacgatgaagagtttcctcagtattagcttcggacttttcctgtttttaggaatagaatcaaagtctttaaatgacaatattgttaaaaagcgagtatttgcggatctctatggaaaacttaacccaacggtaagaggagatcccggagaacccctcattttaacggacttgattgaagcaggaaaactggatgaagctcaagataaagctcgtgttcaaggattggacacggatattgaaagttactctgggtatttgactgttgataaagaacatgattctaatttgttcttctggttctttccttcacaaggcaatgcaagttttgacccggtagttctgtggctccaaggaggaccaggatctacatctatgtttggactttttaaagaaaatggaccggttctattaaaagacggcaagcttgatattagagagacaacttggaataagaacaactcacttatatacattgaccagccagctggaactggatggagttttaccactgatggatatgcttccaatcaaactaaagtagctgctgatttatatgaagccttacatcagtttttcaccctattttatcagtaccaacatcaagacttttacgttacaggagaatcttatgcaggaaaatatgttcctgctataagttataaaattcatcaagcaaatacggaagcagagctgaagattaacctcaagggtttagctattggtaatggtcatactgatcctattgaacagattcattatgctgagtatgcgtatcaaattggagtcattgatttgaatgcaagaaatatactacaaggtacacagcagagagttgtggaacttataaaatcagaagattatgctgaagcgtacgacctttggagtgatatcatacaaactatacaggaattttcagcattaaacatatataactatttaacaattaaagatactgttaatgatgaaacagaaatgaatgaatttttaagtacagaagaggtcagaaaggcaattcatgttggaaatgctactttcaatccaccggacgaagtttacgctaatctcgaagaagattttcctaaatcagaggcactgcacgtcgctgaacttttgaaatactatagagttttaatttacagcggacaaacagatctcatgatcccttatgttttgacagagagctatttacagaatcttaaatttcctggatccgatgattatgcaaaagcagaaaggattgtatggcatgacgaaaatgatccagatgtggttgctgggtacgcgaagacagctggaaatttaaccgaaattttggttagaaacgctggtcatctggtaccgacagatcaaccagaatgggcgctacaacttattaataagtttacaagaaacgtaacttttatctaattgacaataattaaataacattaacaaaaatttgcaaaattgtgtgattctataaataaagaatacaaaatag

SEQ ID NO: 7358 - DNA, 1537 bp, Diabrotica virgifera
  SmartBlast Evalue=0; Info=Insecticide resistance-associated cytochrome P450 n=1 Tax=Diabrotica virgifera virgifera RepID= Q9NGQ5_DIAVI
catgaacagaattaataatattagtgaagcaatggatgtttttaaaaacttatctgccgtgttagcagcagtgtttgttatttatattgtttacaaatttttaaaaatacgtagtgttttaaaaaaagtttacaagttgccaggtcctccgaaacttccgattttggggaacttcaatgatttattctactctgattcagtgcaactatttaaaaattttcgagaatggagtcgaaaatattcaccactttattcagtcgttgtacttgacatacccgtagtagttgtcactggacctgatgagtttgaaaaaatcgcatctggatcaaaacatattaccaaaggaatgatttacggtcttgtagaaccgtggcttggaaaaggtcttctgacaaattcaggttccctgtggcagcaaagaaggaagattttgacacctgcatttcacttcagtattctacaggagttcgttaaagtgtttaataaagaaactgctaggttggtcgagaccatcaaacaagaaaataagaaatcggcaacaaatataattccactaatttctcaaaccgctttaaacactattgcagaaacatctttcggaacaacgctcgatttgaccaaaaaagacgacaaaaattatgtctctgcaattcacgaaatgggaaaaatcttgatatatagaatggtaagaccttggttctattctttatttgtattttatatattatcttctgttggcgctaaactcaaacaagtcttatcaacgctaaatagctttacagaacgcattatactagaacgatcaagagattttaaacctttcgaagttaatacagatggcgaaacaaagagaaagaaactagcttttctagatttattgttgaatgcaaaactctccaagggcatcatcgatgaccaaggtattaaggatgaagtgaatacatttatgtttgaaggacacgatacaactgccactggaatatcatggattttacgtcaactggcaacacatagcgaatatcaggatcaaatttatgaagaaatcataactgtattaggagatgcacaaaaacagccagacctgaacgacctaaatgaactaaaggtaatggaaagatttatcaaagaaactttacgtcttttccctcctgtaccatatatagcaaggacgttggacgaagacattgagctgaatggatatttgattcctaaggaggcgtctattgatatctggatatatgacattcatagaaacccgaaacattggccagaacctgagaaatttgatccggatcggtttttacctgaaaattgtgttaacagacatccatttgcttatgtacccttcagtgctggacccagaaattgcattggtcagagatttgccatgtacgagatgaaggccattatttgtggaattatgcagaacttctcagtgaaactcgctgataaaaatgaaaaagttgaaataatgactgatttggtgctaagaagtgcacacgaaattaatttgaacttcatacctcgtactaactaa

SEQ ID NO: 7359 - DNA, 1537 bp, Diabrotica virgifera
  SmartBlast Evalue=1E-104; Info=TAR DNA-binding protein 43 n=3 Tax=Apocrita RepID=E2BW55_9HYME
tttctgtttctgtttctcttttatcttgttattctacgagaggagattcgtttgtttctaaacccgtttgtacttcgagtattcgagtctaatagatagaaaagtttggaaactccgtttgtatttaactatttatacataaaatatcgtggaagtatccgtagttctaataaaagattaattttttcgccataacatttctgtcaatatggttgtcgaatacgtgcaggtagccgaaaatgaagatgaagatccagttgaactacctagtgaggataatgggaccttgttgttaagtactgtcacagcacaattcccgggagcatctggtttaaaatacaaagtatccgctgaaaataagaattttagaggggttcgactttctgatggtatcctccatccaccaccagacggtgaaggatggggtgaaacagttttctgttgcgtatatcccaaagagaataagcgtaagtatagtgaatctgtggaaagtccagcttctaaagtcaaacgtgtagagtctaagttgaaatgtactgatctgattgtgcttggtttgccttggaaggcaactgaggaggacttgaaagaatattttgagaagtatggtgaaatagtagtagctcaagttaaaagagatagaggaggaaaatcgaagggatacggtttcataagatttgaaaagtatgagtctcaggtgaaagttactgggcaaagacatatgattgaaggcaggtggtgtgatgtgaaaatacccagttctaaagacggaaactcacagctacttccctgcaaggtgtttgttggcagattaactgaggaaatatcagtggaaaatctaagagattatttcagtgaatacggttcagttacagatgtatttataccaaaacctttcagagcatttggttttattacctttgcagatccagaagttgctcaagctctttgcggagaagaccatataattaaaggagtttctgtccatgtctccactgctgctcctaaaaatgaatcaagaaggccatttggtaatgatagatctggaggtggtaactttggaaatgtatgggaaggaaatggatattccagtagaaacggatttggtggaggtaaccagggatcaggtggttggaataaccaaggaggaagtaggggtggtggtaacaatatgaatgatgtgaacaatttggcacctttcatgaatccagctttcattgctgcagctctgaatcaagctgctaattggggcttaatgggaggtggcggcggtaataaccaagatggaccacataaccaaaaaaatggaggcggccgttacaataattccgataattactgggggcgctcacaaaatcgtgatgggcccagatattaagagaatgatttattttttaatcacaaagacttgaatttaataatttgcattaactgtgaagttggtaatttatagttatttatcataggtaattttttattgacttacacatgtatgaacactgtatactatttgatccaacaataaaatcacagtgtg

SEQ ID NO: 7360 - DNA, 1533 bp, Diabrotica virgifera
gcgggttcgttatagttattaaggtaccaatggtattataaggataataacgcttgaggtcaatgctgtatatagcgagggcctttggcccgaggatatacgttgaccgaaagcgttattacctataatacccgtggtgccttcaacgtttaatgtccgactaaatattctttatatgcaaaaaatttgaatgaattttgaattaattagttttcaaataagtacatttagcagcaatagtcgtaacgtaattgtggtaaccatagttttacttaggttgctatttgtcaacttgacagtatttaactagttatttaaatttaataccctagggcgttatttttcaaaataacgccatagggcattatatcatacttaactgacttcgaaatcatgtcattatttgtcaaataatataccagtcggacattaaatttataaacacaatttcaattgtaactgaaacaacagatagtttccacgttaacaaaaataaacagaataatttaattttgacgttacgaattgtcgcgttacaaaatgtcttgtcacgaaaatattaaactaggcctaaagcaaaataaacagtcggcactaaaggttaaggtgcgtgtcaaataaaagcgcgtaattagagcttaattagggcatcagtttcggtgtatcctcccattttgctagtgagtattctagagaaaataaaaaaaaaaatgtttgaagtcaataatatcaaaaaaatatataggtattgcacataatacatatatttgccttcacgtagtatttagttgacaattccataattccttataagcacaattttgaactttttaaaacacagctgtagcatttgaagttgtcaaaattttctgttttttagagagtaccattgtagagtactaaaaccaagtgaatatttcaaatgatactttattaaaattttaaggatatattccttcaaacaaatcaggacaactttaaaagtgagattctggttctttttaaaaaaaacaagcgaagagtttgaatgaattcccttataggcatggctagtaaatagtacatgaacataagtgcatacacttaatattattttttacgttagtgacctacataagtggcttttttgattttctcgtaaatcgtctactagcaaaattggaagatacgccgaaatggctccgcttttgagtttttgagctttttatttgactcataccttaacgttgaatgatgattatgtttattttacctataaatataacaaaattcttcatttgcattcctgaatgatccgaacatgccactagttcttgctgattaaatatattacgtggaattttcaacttcttggtgattctgtgttccacgtactttctccatactagtaacatcatggtaatacatggtataagactctaagggctttaattatatcgatatcaattattgcacgtatttccagttggaatcgtacatactgttctaataacagattgatgacatcgaaattattaggctacagaacaatga

SEQ ID NO: 7361 - DNA, 1539 bp, Diabrotica virgifera
  SmartBlast Evalue=1E-149; Info=Cytochrome P450-like protein n=1 Tax=Tribolium castaneum RepID=D6WKD6_TRICA
aaccgtatcgataccatgttcgtattattattctgtgcagcaatcgtttcggggattttgtggctaatatattctcacagaaactttgtaaacagacgaaaaaagtacttgcagaatgtgccgggaccaaagccgaatcccatttttgggaatatgttggagtttgctggcccctcttacaaaatattggacaccatgaaaaaatttttaacaaatcacggtccgatttgccatatttaccttggaccactgagtgatgctgtgttagtgtcagatgagaaatttatagaatttatccttagttccagtaagattattgataaagctagtcaatacgactatcttcatagttggttgggaacaggacttttaactagcacagggcaaaagtggaaacagagaagaagaacgataactccagcgtttcatttttcaattttggataattttgtagatgtttttaacgatgtaggagaaatatttgttcaaaaacttgaagagcatgtaggcgaagaaaattttaatatctatcctatggtttcattgtgtactttggatattatttgccaagccgcaatgggagtgtccgttaatgcacaaactgatggcaactcagaatacgttaggaatgtaaaggagatgtgcagaattctaaccgatagaaacttttctccactggatccaagtctctacccatttactataaattactataaagaattaaaagctattaaagttcttcatgatcatactgattcagtagttaatagaaaaatagaagagttgaaaaaatccgaggagaaaaatcaaaattatgttgacgatgatggcgtaaaaagaaagtttgcctttttggatttgctgttaaagagcactattaatggaaagccactaagtaaatcagatatccgagaggaagttgacacatttatgtttgaaggacacgataccacatcatccgctatatcttttgctttatacttattggctaaccatcctttagtacaggctaaggtttatcaagaacagaaagaaatatttggtaatttacataatgtgaaaaatactataaacgatttacaaaatatgaaatatctagatctagttgtcaaagaaactttaagaatgtatccatcagttccattttacgcacgaaaagttactgaggactttatatggggagacattgcatttccaaaaggtatagaaatagtagtattcccgtatgtttgccaaagaaatccagaatattttccaaatccgttacaatttattccagagaggtttgtggacatagatggaaaaaatccttatagatacgtccccttcagcgcaggaccaagaaattgtataggtcaaaaattcgccatgctagaaattaaaagtacagtttcccaagttattagaaattttgaactatctccagcaaaagaagaaaaaccaatgcagctagctccagagattatattggtatcaaaaaatggtatacggctatcacttaagaagcgagtttagaatatattatgcattttttaatta

SEQ ID NO: 7362 - DNA, 1535 bp, Diabrotica virgifera
cttcttcttgatgtgtctatccgtgacgaatgttggcgatcatcatggcaatctttaacttatctgcagcagcacggagaagctccacaaatattgtattgaaacaggttctgaggttctttaatcaggatgttcttcttcctggacctcgctttccaaatatttttccttgcaggatggcttgtaggagggcgtatctggattcatttcgcataatgtgtacgaagtacatattgtaacttttgagatcggatgatggtcagtacatacaagtttgttctcaaatcaattctaaacttgtgaagtttatgtaaaagagcaattataagaacaatctgatcaacaatttacaatataagagatttaatagatgtatttaatgcagaaatgatacactaagttttaacactaagttataacaaatgtgaagaaaaaatttgaataaagtatgtatgtattgctacatatacataaactacgttatccgttaaagaattttcagatctttttgttcagatctttttgtttcagaccttttgtagtaaagtaaaatgtgcgctttccatgcaattcttcaacttatactctccgggataaaataataccgatgaaaagcctatctagataatgcctttcttttgtaagacagatagcaaaaagaaagtagtaaaagcaatgaatacttaataaaaactgaccacataacatataagctgtcatacaatattatttagtagatgggaaaccaaatgtttttatataggttggcctgcgtggcttacggaactgccacttaagccatttatgtcgccaaatcggccaagttgactagaaaagttagataccatagtatatgtaggccgttgtaaaatataggaaagaaaaaacattagaatatgttaaatgcgttattgaattagaatgttaccattaatgaaatccattttgcatttaaaaaacgtattaaagcacgaatttcacattggcggtaacagcgactgagaactccatcttcgaaggctgctaggccgacactgagcaatgcagcgaggcgaaactggtgggttaagagagaggaaaagttgatgtataaggcagtgttgccagatttctcctaacacgtcgcacgctttctcagcggcatagggaacctttttttacgaatgtccctcgtgtttgaaatagaaattccattattatagtttgcaacgacctacgaacaaactaaaaataaatctaaatagatttgtcaattaagtacaataaaatatgaaaaagcgtgttatcgtagaacgtgacttagatataaattagtgatgtgtcacttagtatactagtagtattatgtacacactttaaattctaacgaaacaagtaaatttagaaagtattatagattttgtaaatataggccttcttaaagtaagaacaatataaaaatgttaaaatatacaaaaatttctttcgcgtattactgaaaggtagtttaaataggatatggttactaggaaaactgatgatctgtcagatcaaat

SEQ ID NO: 7363 - DNA, 1529 bp, Diabrotica virgifera
gcttttccgcactagattgccatgatgatagacacattaagaagaatgagagaaatttcggatacaattcttctcttcttcttgaatacaattcaaaagcctataaaacagaagctgttgacgttttttaaaatatcttcgttattatgtgcatgtgtatttattattgagtgacgtcagcttatgcgtagattttagggtaaaagtaaatacttcagaataacattgccgaatttgtagaagaaaattattcctttataagcatgctttgaactgagaaatatttgcgtatcttcttacaaaatgtttgaataacaaaactcaccacaaattctgggctgtagcttgaatatctatacatcttttatatgtacatactagttatattacatatgagtagtacatagtacatatgtagtgatcaactaaattgtttaaagattaactattttgtaccagattatgtctatttttaataagtttttacaggttctttcattatttggtataaagagtatctttagagttcgtattgaatttgtttattttgtatttttacttgaatgggacatttaaattaatttgtgacctatctctcttaatttcctgtgatgtttccttgaagtacagttttgctctctgttttagtagtacttagttttgtgaagccatatacattttttgtattagatatcattccgagaaaaagacttgcgataactatatctgccacattgcagtatttaaattttgatacaattttacatttggaagaaatagacttttttctatttattgtattataatgtaaagagattatatagtcgaatggatgtaggatttaaaaaatttcctcagatgccataaaaaaataattttttaacaatatacagtacaatgtgccttcctgtagagtatattttgaccaccactatatgaaaaaatgcctagaacaaaccgcctactttgaatgctgtgacaataatacttcctaatgtttatagcattatgggatctctttgttgactgtacttatcacgttttatgcatctgtagaatacacagtgctttggtaatttattaccatgcattttttcatacagtgaggttttgtgtcattaggttgaagtgataccaaaacgtaaccttatatttttaaaaatacatatctaaatttgaagtagtcatattgtcaattctatgcttattaatttgtaccaaatttaattattgtacacttctattgtattaaagctatggaacctttagcttgataaagaaaaatttggcgattctctttgatattttcagctggaaagtttctgtcttggaaagaataaggactattttatcaacacactaacatatgaaaaatttaaattccgttcatggatgaagtacagaacttccgttcatggatgaagccattaaagacattggaggcatttactttatcatgtccaaacatgtcattcatataatttaggccgagtagcgggctacgtctgttccatatttgttggcgagcc

SEQ ID NO: 7364 - DNA, 1535 bp, Diabrotica virgifera
  SmartBlast Evalue=1E-154; Info=Alcohol dehydrogenase class-3 n= 5 Tax=Percomorpha RepID=ADHX_SPAAU
aatccggcaaagagagaagaatgtgaattattcggaagttaaacaaagaagaaaaaacgagtgcaagtgcaactttttcaactgtgatttgatgtaaattgcatagtggaataaattaattgatgcaaatttgatattctaatttctaatattgcacttaatacattgcatttttgagatcaaggttcaaggttacaaatcctgataagtaatggttttttaacattttgacctgtgccactcgaaaaatatctgtccttttgaccacatcactaaccctactgattactaaatatttttcactttccggtctacaatgagtacagtaggacaggttattaaatgcaaagcagcagttgcgtggggtcccaaagaagatcttaagatagaaaccattgaagtagatccaccaaaggctcacgaagtaagattaaaagttgtgtatactgctgtctgccacacagatgcgtacactctaagcggacaagatccagaaggccttttcccagttgttttgggacatgaaggatctgggattgttgagagtgtaggggaaggtgtaacaaacgtaaaaccaggtgaccatgtaattcctttgtatgtacctcaatgtggagaatgtaaattctgcaaaacaccaaagacaaacttgtgccagaagattcgtataactcaaggacagggcaagatgccagatggtacctctagattcagatgcaacggcaaggaattgtatcattttatgggttgttcaacattcagtgaatatactgttgtagctgatatttctgtaacaaagataaattccaatgcacccttggacaaagtctgccttttgggttgtggagtccccacaggctatggtgctgcccttaacactgccaaagtagagaaaggaagtacttgtgcagtttggggacttggtgctgttggattggcagtaggattaggatgtcaggctgcgggagcttccagaataattggagttgatttaaatccagataaattcaaaacagcaaaaaattttggattcactgaatttgtcaaccccaaggattatgaaaaacccattactgaagtacttgtagaactgacagatggaggccttgactacacctttgaatgtgtaggtaacatccacaccatgagagctgctttagaatcctgccacaaaggttggggtgtttccactattgttggagttgctggtgcaggacaagaaatcagcacaagacctttccaactggttactggacgtgtctggaaaggaacagcttttgggggatggaaaagccgtgatagtgtaccaaagcttgtagaggagtatttgaataaaaagctcaagttagatgagtttgtttcacattccttgaaatttgaagaaatcaatgaagcttttcacctcatgcacaaaggtgtaagcattcgcactgttctggctctgacacaaaacagcaacctttagaaccaatattgaataaaaggtatctatttttataccagtggtattaatgaaataaaatgtatttctgttt

SEQ ID NO: 7365 - DNA, 1530 bp, Diabrotica virgifera
  SmartBlast Evalue=2E-92; Info=E3 ubiquitin-protein ligase Bre1 n=2 Tax=Formicidae RepID=E2ACV6_9HYME
aattggaagatttaatcaaagaagtagaagaatggaaggaattggccaataacagactgcaagaattagacaaactacaccagactcacagagaaactctgaaagaagtagagaaattgaagatggacattcgacaacttccggaaagtgttattgttgagactacagaatacaaatgtctgcagtctcaattttctgttttatataacgaatctatgcaattgaaaactcaattagatgaagctcgacaacaactgcagactagtaaaaatgcgcatttaaggaatatagaaatgatggagggagaagaactgattgcccaaaagaaactgcgacaagaagtgatgcaacttgaagatttcctggcacaacttagaaaggaatacgaaatgttaaggatagaattcgaacagaacttagcggctaacgaacagaccggtcctataaatcgagaaatgaggcatttgataacgtctctgcaaaataacactcaacagttgaagggagaagtccacagatataagaggaaatacaaagaagctaatgctgaactacccaaattacggaaagaaatagacgatcttcagcagaaactaagccaagttcagggcgccaatcaggatagtaaagatggaatcaaaaaagaggagattaaagaagaagacatgtcaagcagtgaatgttctcaaatcaaagaagagcctaatcttactgtcaaaaagaagaggaagatacagagcaagctgaagatgcggaaggaaacaaagaccaaaatcccggtgctagcgattcccctggggttaaaaaagagggtgttcctaaacaggagaaaaatacagtgaagaaagaagtagttcctaaaactgagaaagatcacagagaagccatgaaagcgaaagaagctaaaattgctgagaatgaattggtcagggacttaaagaatcaacttaagaaagcgttgaacgaacagaaggagatgaagctgcttttggacatgtacaaaggtgtcagcaaagagcagagggacaaggtgcaattgatggcagctgagaagaagctgagaaccgatttggatgaacttcggcagacgatgaaaaagttgcagagggacgataagagaaaactagccgaagacgaagctctaaagaaaatcaagcaattggaagaacagaaatacgaacttcagaaacaagttgcaaaccaaaaaccgagcgatggcaactggggaggtcacaatgttcatcaaagacctttcgtcggctcgttggaggaagaagctcttttgaacgagatggaagtcactggacaagctttcgaggatatgcaggaacaaaactctagactgatccaacaacttagagaaaaagacgacgccaatttcaaattaatgtcggaaagaatcaagtctaaccaacttcacaagctggccagggaagaaaaggacgttttgaaagagcaagtgggtaccttaacgacgcaggtagatgccgctaatatagttgtaagaaagttagaggaaaaagagcggat

SEQ ID NO: 7366 - DNA, 1532 bp, Diabrotica virgifera
  SmartBlast Evalue=8E-23; Info=Histone-lysine N- methyltransferase SETMAR (Fragment) n=12 Tax=Harpegnathos saltator RepID=E2C6C7_9HYME
cactacaattgcaacaaaatctaaacaaaggtcaaatttggttaaaatgtacaccaatagtagtagctaatatttatacatgttgaaattgtgaacaaaaacaagttatgctgtgcttgataaaaatttaaacttaaaacaaattaaacactgcttagaaaccaaaaaaattgataatccattgacaaatattaaatacaatgaatttattattaggatacagagttaaggtattagaatatgatctagagaagactgcatccataagtaaactgtacattataagaccttttgtaatttttatttagaacccgtttaggtgtaatattattagtttgcagtctgccagtacccgcaacagctctttatgccagaatttgtggggttattcctaaatacttggggtagctatatatttgcaaatattttcaccacaataggcacgtattaggcaaattagatccaattgatttttataaatgtatttcctttctgatcgtcagaagaaattcactgtgtaaatggctgtaaatgtttcattatctcatgacactggtgccataggacatggaaaagttactgtgaaatctgtctagcctgtcagtgtttttaatgcttacttatttgttcgcgcgtgtgagttcatgagattgtgaaacagaatagttgagcaagcgccaaacataattagattttgacagacaaaaacagcatgtttacaatatgattgataatgcaatcatatcagataagaattgtaccatgaaattgtattgaatttcataaagaaaacgtgacatcacgttagtgattatagaagtttcttttgtatggatacatttgtcacagcataaggaccgtttcgttttaatataaatagttatgtgactcgaagttttagaatctacacaatgctaaatcatactagggcggtctgagaagtacttagtctttaaaagaaaaagggaaaattttggaaaagtggtgatttatttgtgaacgtattctcctttgagctcgatacacttaaaccagcgatgattcgatttctttaaacctgaaaaatattttttctcgaggtctgcaaagtaggcttccgtggcggcgatgaacattagactaaaatgtctgcccggcgagtgactttctcaagtttctaaacaaaaagaagtcgtacagtgccaaatctggagagtacggtggatgggacagaagttcgcagcccaattcgaccagtttggccattgcgagaggcggaagtgtgagtcggtgcgatgtcaattcgacgtagaatcggcccaataatgtgcatagtaatgctatgagaccgttttgcccttttccagaaagttgatgtagatcacaccttgtcaatcccaaaaaacggtggccatcacatttgcggccgataggacagtcttcggagcacgttcgcggggtgacgtctactgtatggactgttccttggtctctggtgagtaccggtaggtccatgtttcgccgttgattgtgaaggaatgttagtccagggc

SEQ ID NO: 7367 - DNA, 1532 bp, Diabrotica virgifera
  SmartBlast Evalue=1E-73; Info="WD-repeat protein, putative n=1 Tax=Pediculus humanus corporis RepID=E0VJQ3_PEDHC"
tgaggttagaacatgtgttaatggcgcttttgagatggcttcccaattcagtgaagacggaaaatattttgcccatttatccacggatggtaaattaaaaatatgggacacattgtccaataccttcgaacaggaatttactcccgactttcatttgacttcaccatgtacatgtttacatttcattcaaaacgattctgtaaaatacaagggtggttcgccaaaaaagaaaaacgaagagattccgagtcagttgttagtccaaaaatagtcttaggaacaacttctggtgttttgctgttatattcaatcacaaatgctggcttagaaaattcattcaatagtgacacaaatcaagcaattaactgcttatccaccgttgaccataacatcatatattcaggtttagaacagaatgttgttatctggaatttagaaaaacaaaaagttatcaacaaatggaaggttggaaatgaaaaagtaacagcaatattggcaataccagaaagcagtcaattattaacagcttcaagaaacattaaattgtgggacctagaagtaaaagaagtacttaggacatttactggtcataagtcagaagtgatgtttctctattatgtgaatccttattcaagagacgggtcatattttatgtcaggctctaagggagacagaacccttagttgttggagtttgaacaccaatgtctcagagaaaaatgcagttgctaatttccttatggaggatattgttcttaatgtttctataaatgttgaggatgatggaactacacaaatggctgctactgttagaagtggagtggtgcacttttataggcatacattaaatggcaaatctggtaagccaataaagcccaaaacaacaattcaagtagtttcagatactggtcaatctgaagaagaagtagttaatcctattagaattgttggtgcctttcatagagatagtgaaacattatgtataggacatggtacagatgtgctacttactttcgagaatattgtaccaaatacgtcaaggaaactccattgcctcatacggcaggatcctcagaagctcaagtcacagaaaaaactacaaagcaccaaaacgataacaccagttgtaaatgattctgtccaatacctaacaccagaaacctctgtaatatcctcaacgaaaaggaaaaatgatggcactttagaagtacccatggaaaaacggttagaaaaccttagtttgggtaaagctgagggaggaaaagtgcccaaagctgataatgttgcgcaactgctgatacaggggctacatagtaaagataagaagatattgaggactgttttgtatcaaaaaaatgaagaggtggtaaggaatactgtcaagaggctacctgtaacggcgtttgtgccgttattgcaggagctcgccagttacatccaaggaaaaactttatcgagtcaaatgggttcaatgtggatgaaatacatacttcaaatgcatgccggaatcctaatgtcgaaccctcaacttcc

SEQ ID NO: 7368 - DNA, 1529 bp, Diabrotica virgifera
aagaaatgcctcgaaccttcttttctatacaggaagtcaaaaaatttaaacctacaaaacattttttataattttccggatcgaacattcctttttcacttaatggcttttaaaatataggtttacaaattaagataaacggttattttaagttttctttatatataaaacagtctttaattgcaccaaatatccaactacgatttttatgtatgatgtttctggtttagatcatttggtatggtttagatttatgttttagataaatttcgtgagaaataatattgagtataatttttaatagagtccaataacgctcgagcaatatatgtattagaatatcgacctaaagtgatttctctaattagagacattgttaaagaactaaaattctcatactgaaagaaagaagtccctatccaataatattctaccatcaagttcaacactagtatcgccattaccacaggtatttacgtttattttctataattctacataattacatataatctagaaaaaaattggtcttacataatgagcaattagaagaggtatgttcttacaaagatctagggatgaagttaacaaatagtggaagaacggaacccagtatagatgataagagtgacgaaggctagaaaggttactagagccctaaaccctgtcttgtggcaacataacataaccttaaatacaaaaatgaggatgtacgacgctattctgaaatcaattttaacgtttggctccgaagcgtggcaaatgacaaaaaaatccgaaaataagctgcttactaccgaaatggatctttttagaagagctgccagaatatcgaagtgtgaccatggtcgaaacgaaaaaaatcatagaaaaagtaggtaagcagaaaacaatagtggaagaggtataacggaaccaactcacttggtatggacacgttcaacgaatgggagatgaaagacttccaaaaattacaatgagacgccgccagaaaaacggaaaaagcggactttgcccatcacagtgcaccctcgatgatttatggctcgcaaatacaaagagtgtagacgtagatactgggcaaaaaaaactgtagtcggatccagactagaaaaagtaaagtagtatgaaaaacattattgataatcattatactgtacgttattctgttctttgatatcttttggtgatgagtgaaacacttgctgatctaaaaccaatacgattacgattgaaaatacacacaacaatcgtcttctttcccataccaattgatccaaaccgtttataaaacccttaattacagtgcaaccattgaaacacatgtatgtttaaaaatcatagcaaaatccacaattagacaaaacaaagttaacaataatacacaggttttttgacttatcctgtcataaaatactataaactaataccactgatatatttgttgtattgttacatcactaaatgaaaattcgtaaaacacaaaagatacagggcttgattgatttgagcaaggtgtatatttatag

SEQ ID NO: 7369 - DNA, 1533 bp, Diabrotica virgifera
  SmartBlast Evalue=1E-103; Info=DnaJ-like protein subfamily B member 12 n=1 Tax=Camponotus floridanus RepID=E2AC96_9HYME
caaactgtcaacagtatgagtgacatcagctgttgaattattaaattaatccaaaaagtatttattccaacaatttaggctgcttgtaaaaaaatggaaggaaacaaagacgaagctcttaggtgtgtagatttagcagaaaaattcatccaggaaaaaaacagacagaaagctgagaaatacttgaacaaagcagagaaactctttcctactgataaagcaaaagatctattacttaaaatcaatctgatggctcctagtaaccctgaaaccacccaacccagaagaagagtaaccactcagaaatcagaagaaaaggaaaacaaagctccggactatactccagaacaagaagaagcagtcaagagaataaaaaaatgtaaagattattatgaaattcttggagtcagcaaggatgctaccgattctgaaatcaagaagtcttataagaaattggcattgcagatgcatcctgataagaacaaatgccctggagcatctgaagcgtttaaagctgtaggtaatgctgttgctgtgctgactgatacagaaaagagaaagcagtacgatctgtatggatcagatgaagaccggttgtcatctcattcccatcatcacacttacacaagaggttttgaatcggacgctacagctgaagaactctttaatatgttcttcggtggaggtttcagcggacccaatgtctacgtccgcagaggaggcagatggcaaagacaaacggcttctagtcagtcacatcaagaacattcacatcacagagagcaacaaagcagttacacggcgtttattcaactcttgcccatcttgctggctatcttattatcgatggcttcaagtctctttatttccgatccagcatatagtttacaagtcagcacgaaataccctattttaagaaagacagccaatttgaacataccttactacgtcaaagacaatttccacatggagtaccaaggttctgtcaaacgtctcgagatgtccgttgaagaagactacatacagacgctcaaacacgcctgctacagggaaaaaagctacaaggaatcaatgatttggaaagcaagaaattttggggaccaggaattgtatcataatgctcagaacataaagatgccttcgtgtgagaatctacagaatttacggaatagatagtcaaataattagtgttcgtatatttccacatttagagattttaacaatatatttatagttaatttattttgtgtcatacaggaaggtttcagtcaagttggatattatatattattgcaaattttgtcgacgtgaatatagatgatgtagaaatacgtgttaagtactataatgacacatttttagataatcaggatataccatttagttaaattttgaaaaatattgcacgaatcaagcaaaaaatatttatgtcataagtgcataccaaatagatgtttatgtttaaattttcgttgaattatgtatgttttaaattctgttgtagtgtaactagaaggcatgaaaacaaatgtt

SEQ ID NO: 7370 - DNA, 1530 bp, Diabrotica virgifera
  SmartBlast Evalue=1E-158; Info=Farnesyl diphosphate synthase n= 1 Tax=Anthonomus grandis RepID=Q56CY8_ANTGR
gcctgctttacggtgattcttcaggtgcgttcagtatgttcaatttaagacttacaacaaatacatgtaactaattattttcgtaacagattgaaactgacaataactatctccatactttctataccaattacacattcctaacaatctcttttgtaaatcttttttacaattttaaagaacaaatcatgcggcaatcccttcgagatttggtgaatgtgcgttcgaataatattaaagctttcttcttcgtacactgcgtatgtcgatggcaaatttaattcttcgtataagtttttaataatcttaatagattcttcctcattacgtccgtaatggtcttccataatctttctttgagccgatgttgctctttgtaaagctaccacggctagccagctgcattttccatcttggatatccgttccaattttaccagttactgctgggtctccaaatacatctaggaagtcatcctgaatttggaaaaactccccgatttctaataatatcgtctttgcttgcctgtgctgttccgcgtcgaacatattcgccaaatacattcctaaagcaacgggcaactggaagctataatacgaagttttatatttgactatcgaattgtatctattcatggtgaactgatccaatcttggctttccgtcttggatacaaagacagtccagggattgtcccattgaagttttcaaagttacgtcgtggaaaagttctatgatcggtacgtagcagttatgattcgagaagtaccttctaagtactgaataaatgctgttttctaataatattccgtcgttaatggccactagaccgacgtcttcgttacgatgccagcagggctggcctctgcgatacagtgaattgtccattatgtcatcggcgactaggaaatatgcttgaagcaattctacacaccatcccaaaatattggccagcctaatattttcaggagtgaggttttctggtcgttccaacatcttgtaggcgatgacagtggatagacctctggtcttttttccagtgggtacgttatactgtagtactttagcgaaccttttggttacttccggaatgtctgtgtgccttccggcatccgttaaatcgcgtactatatctggaaatatagccatgaactctctgctttcctctttcgagaacatcggggtgttgtttactgacggttttgcttttgtttgaatcgtggatagagctcttatattgttctgtttgctgtggacagaccatttttcgttggcaaacttttgttcagagccgtttaagtccagatttttcacaccaagtttatgatcttgtctggatatggcatcgctatttggagcgctggatgttttactgatgtgtcttctaatattctttagcagctctcggctggaccggttaaacatcagattctttgaagacatcattttttatgcactacactaacacctcacagaagaaattacagtttaataatgaaaagttcaatcaaatgttcaacgcgtgaaccgt

SEQ ID NO: 7371 - DNA, 1524 bp, Diabrotica virgifera
  SmartBlast Evalue=8E-21; Info=Sorting nexin n=1 Tax=Culex quinquefasciatus RepID=B0X2U4_CULQU
ctattattgcaagagaaattggaaccacgccttaacttacatcagataaaagaaagccttatatccacttgccagtggagttaaggttttcttttctctgatgagtttctttacaagtggcttttgatgctgtttttcactaaaactaacaggtgtttcttttatgctcagctgtttccctccattattaggtatattattttgacagtgattacttagttactaacctcaattattcaagaagagtgttttgttatggtgtcgtgggttgtatgaaagttttacgcttttttttttgtgacatacttgtgacttgatcttgtgaccttgtgaacttgtgacataaattaatttacaacgtgacattggacatgtgtagttcaagatcaagttatattttgagtttagtgaaggatgtaaaaaatcgaaacgaagatgatcctgacgatccgttgccgctagcagctattatgtcaacttcaacaactactcctgttgttaactttgattgtaataatagtgaggagcacgacaacagtcttgttttaactcagctttcaccagttcaacttactaatttcgacaataattcaggttctcatgacctcgacgttcaggatggcctaggcgtagggattgttcagcctattaacttattgccagaaagcgaagaccaacctgctgaaaatatacaaccgaaagacacccgagaggtaactaaaaaagggacaccaagaattagaaaaaagtcagttttaagcaaacaagaaaaacatgaacagaataaagataaatataataaaaacatgacttgtatcctccttgccaagcttgtagactgaaatgcattgaaaatattccagaagtaagaagaaaacaaatcatttctgtgtattgcgcaaaaagttggctagagagaagaaactttatgttgatttcgacaactaggcgtggggttaagaggcgaagaggcagtgaaagttcgtcaagaaagttttcattcaagtattatctaacaaaccaaaatgaagaaaatgtccacgtgtgtaagacatttttttttgactactttaggctactctaaaaacaacgacacagttcttcacaatgtcttgtgtgttaacaaagatccaacaaatattgctcctgatggtcgagggaaatgtactccgccaacaaaaattgaccgagaagttgtaaaagcacatatagagtcatacaacccatccattgcacactaccgcagagaacacgctccactgaggcgctacctccctagtgatatcaccataaataacatgcatcaaaactttgtggccagacatccgaacttgaaatgctcctatgatttgtatagggctattttaaaagaaatgaatatatcgtttaccaaattgggaaacgaagaatgtgaaacttgtgaagtctttattaaccataacactgaccacagcaaagaaaatttaaactccgaatgtagtacttgcaacgagtggtctgatcatattgctagaagtaatgatg

SEQ ID NO: 7372 - DNA, 1525 bp, Diabrotica virgifera
  SmartBlast Evalue=4E-46; Info=Transposable element Tc3 transposase (Fragment) n=1 Tax=Camponotus floridanus RepID= E1ZZC4_9HYME
cgacagtaattttaacttatcttacttaagtaaggtgttcaaaatgacctcccaaaatatctatgcacacttgaaagcggtcattgaaagagttgcttacattactaagcattatttgtaaagaaatattttgaaatgcaattcggattctatttttcatatcagcccttgttgttggaggtattttatatacttcgttcttaacgcaaccccaaaaaaatgagtccattttatttaaatctggtgaccatggggggccaccttaccggtccatcccttccgatccatctttcaccaaactgatcattaagttcaccacgtactaattcgttgtggtgcgcaggagcaccgtcatgtagaaaccacatttgttcacgtatattaagtggaacctcttctaataatatcggtaactgatttacgataaaatctaaataaatctcaccatataagttaccttcaaaaaaatatggtcctactacatggttaccgacgatacctccccacacatttagagaccaacttgtttgacttgtgtatggattacttgttgaatagtagtgaaaggtatgcctattaacagaaccgtttcgatggaatgtaacttcatcaccaaataggacataatcagaaaaatctctctgctcattaattttttctaaggcccattaacaaaatgctattcgtttctgaaaacattattatttaattcttggtgcttttgaatataagggtgcatcttgtttttagatggaatgttttgaagagagtagtaactaagttcttgttcattggaaatactccttatacttgtgtgtgggttttctgtaactgccatcaacacactcatttcgttttcctctgtcacactagtttttgttcgttcatgtttttcataattcactgaaccagtgcggttaaatcgatctttcaatttttcaaatgtatcttgtctaggttgccgcctatctgaaaaccgttcttgataaattctagctgatagtaatgaatttttattgaattcccccaaaatccagatcatatctaccatttcatcagtagtaaaattcattattgctaatttaaattgaattaattactgaattactaaataataattgttgctaatttacggtgtgccccaatactgaattaataaacaataatgtcaaactgtcagtctctgacaaatcaatcatggccaactcacaacaatcactggtaaacgttaaaatatctaccaaatcaatactttaatggaaaaacaaaaatatctagaaaactgacaactttaggtatagggagtacttcataaaatttgaagtacgatagtagtacttttcgatagagatataaaatacagggtgttccatttaaaatcaccaagaaaacaatgcacttgcatcttgacccacccgtatttgatataacgaatattattactatataacgaataatataacgaatatattttataatttttaacaactatcaaaaaactatggttgcaacagatcaatgttcc

SEQ ID NO: 7373 - DNA, 1530 bp, Diabrotica virgifera
  SmartBlast Evalue=1E-138; Info=ATPase family AAA domain- containing protein 1-B n=1 Tax=Camponotus floridanus RepID= E2AJE7_9HYME
gtcattgaattgtcaagttagaacaaaaaattagttttacattttcaaaattaagatgattattcctttttaacattacatcatagaagaatattaaaaacagttcaagtaattcacaaaaatggcagacactgccttcacaaagaacgaagtaataggattggtggtgaggttaacccttgtctctgcagttacatttttaagtataaaatggattatgaaccaggttgaccccacgaataaaagcaagaaaaaggcaagacgacaagcagaagagcagttgaaaagattatctgctacaggacatgcacctgtacttattgagaaattaaatgattatgagatgatgatagcagctcacttggttcatccccaagatattaaagtaacttggagtagtattgctggtctggaagggcttatccaggaattgagggagactgtaatactgcctattcagagaaaagaattgtttgctgattcacaacttaccacagcaccaaaaggtgtacttctacacggacctccaggctgtggaaaaactcttatcgcaaaagccaccgctagagaagccggtacccgcttcatcaacttagatctatccattctgaccgacaaatggtacggcgaaagccaaaaactagcagctgccgtcttcacgttagccgttaaaattcaaccttgcatcatcttcattgatgaaatcgactccttccttcggtctcgcacaagttcagatcacgaagctacagctatgatgaaagcacaatttatgtcactatgggacggtctaattacagatttgaattgtaccgttatcgtgatgggtgccacgaatagaccccaggatttggataaagccattctacgaagaatgcctgccacttttcacgtgccaatgcccaacgccgcacaaaggagacagatcatgaggttaattttagaaaacgaaccagtatcagatgatgtggatatggaagcactagcgtcatctaccgacggtttttcaggctccgatttaagagaaatgtgcagaaacgcctctgtgtatagagtcagagactacttgcggaaccatatcgatactcccattcctgcgtcttcccaaaaagatgacgaagaggaagaagtgtttcacgacactctccgtcccatatcgatggaagatctgaagttatccttcaacaaaatgagaggcagtaaactacagtgcggttcgttacagatacagactagaatcgatctcgattaaaagtgatagaaaataaatgttagtgctgagtacctattaagagaagacattctacttgaaacttgttgaaatttatattaagtattaggcgtagatattatttttgtttttctatgtaaaaaatacatctacaaagtcaaagttcttttatgaccactgtatatatgtttgatataccaaatgtaaacaggtgcatgcgacttaagccttaaatgttatttatgtagagtagcacacattggaaattgtttaaaacacgttaaatacagtttctgccc

SEQ ID NO: 7374 - DNA, 1527 bp, Diabrotica virgifera
  SmartBlast Evalue=1E-96; Info=CDK5 regulatory subunit- associated protein 3 n=1 Tax=Camponotus floridanus RepID=E2ADZ9_ 9HYME
cgcaaaatcaacaaagtgttaaaaaacatatgtttaactgattaattgccaataacatgatggatgaacaaaatataccaattgatattaatactaccaaattactagagtggttaataagtcgtagacatgttaaaacagattggcagaactctatattaaaaattcgagagaaaattaacaatgctattcaagacatgccagctcatgaaggtataataaaattactttccggacaacatatcaattatttccattgtttgaaaattgttgaaatcctcaaagaaacagaagcagattctaaaaacctatttggtagatatggttcccagagaatgaaagattggcaagatatagtcacatcttaccaaaaagacaatgtatatgtcgcggaggtatctcaaatgttgatccgaaacgtaagttttgaaatacccagtttgcgaaaacaagtctcaaaattagagcaaagtcaattggaatgcgagaagaaaattaaggattattccagagcagagtccactgctcaaaaggaatttaagaattcttgtgatcaattaggaatttcaggaaagaagattaaaagtgaaataatagatttacttaaagatctaccaggtacatataaaactatttcggaaaagataaaaatcgtcgctccagctgtggaattgtataatgcatttaataagtatttatctggtaaaaaaattgatgaaagtgctcttccactcctagaataccttataaacatggtaacactactacatatgaatacatttatggagaaaagcctgtctcaatagaagaaagtactcccgatatttcagaagacaaaagttcctctgatagtgataaaattgactttggcgacattgattttggagataatggtggtgaaattaacttcgatattaacactgataatggtactattgattttggagatgtgatcgaagaaagtcaaaatattgattggggagcaagtaatccagaagaaggttttgaaatagtaacgcatgcagatttagatatcaatttggaggaatcgggtatagtagttgaaaaaactggcattgatggaggagtagccaaaggagaagaagctctgactatcctcgataatcccaagactcaggaacaggttattaatagtcttatggaattgagtgccttcattaaaatgagactatacgaaatgatgaatgatactgatatgctctccacttcgcaaatgcaagatgctccaactataattcaaatgcaaactgtagaatcgattacaatgctaaacgattatattagtatagctttagaccaattaacgaataagaaaattcagcatttgcacaatataaaacattctccaaggtacgtagatatattaactgcaaatctaaatcaaaagttggctattgttgacaaaatgaaagccaacaaggcaattttggaagataaaattaaaactcttagagaggaagcaggcagtatcgaaccaattataaaactgttgatagaaaaaaccaa

SEQ ID NO: 7375 - DNA, 1529 bp, Diabrotica virgifera
  SmartBlast Evalue=0; Info=Eukaryotic translation initiation factor 2 gamma n=4 Tax=Endopterygota RepID=Q9NAR5_CLYAR
tctttaataaaacgatattaaatagaaaacaaaaattggcttaaagtgtcctgaaaagaccggtacgagtataaaaagcctagcttgtggtaggctcgattgtctcccctccgcggatctgcccccatccgatgagacgccaatgtttttcaacacgtctactgagtgcaatcttttcgccgatttccgtacagactggattcgttaaagcgatcttgcacaaatcggccttagtggctacaactcgtcctcccgtgctgagggatccaatgttgacaaggagtacttcacttctggttaatctctggactttggcccctttcttgtctccttctgtacggactcccagcaaacgtttcaatagatagtaactcacctcaagttctgtaaagatactaggtagagcaccaactgctcccaaaacttgacctacaagtcgatcggctctgcaaagggttggttcgattttggtaccgacaccaatgagtcctcctggaactgcaaactgcagttcgttttgttcggtatatagagatactattctagagaatattggtcggcaggccagctttccttctgagtccttgctaactagtccaggtcttacttcaatttcttgtcccaccttcaacactcctcttaaaatactgccaccagctacacctccttttaaatcgttaacttcacaaccaggtttattaacatcaaaagatctgatcacgatcagccttggttcagaagtaaaatctctcattggtattggaatttttttagtgatatattcgcacaaaacctcgatgttatatttcaactgagcggatatgggaattataggggctccttcagctacagttccttggacaaatttcacaatttgctcatgttgctccttggcttgcccttccttcaccaaatctattttattttgaagaatgaggatgtgtttcaacttcatgatttcgatagcagccaaatgttcactagtttgaggttgaggacatgattcgtttcctgctattaataacaatgctgcgtccatcacagcggctccgttaagcatggtagccataagaatgtcgtgaccagggcaatctacaaagctgacatgtctgaccaattggaatctacccgaacatgctggacgtaaacaagggaaactgtcgtcctttgaagaactgcccgaaataaagcaggagggcctggggcatttcggattatcacatttgtagatttttgcgttagcataacctagcttaatggtaatgttcctttccagttcattcttaaatctgacagtttgtaccccagatatggccttaaccacagtcgattttccatgcgctacatgtccaattgtaccaatgttaatggtagcttgtctacttataacttctggagataaagccgtcaatcttttaacatccaatttagataaatcttgtttgtgtaaatttggttgacctgtagtcacgcctgcaccttctgaagacgccatgatgcaactttagaacgttggccgttgtcaaaag

SEQ ID NO: 7376 - DNA, 1528 bp, Diabrotica virgifera
  SmartBlast Evalue=1E-73; Info=Glucosyl/glucuronosyl transferases n=1 Tax=Aedes aegypti RepID=Q17GE3_AEDAE
ttcacgtaaagactactgcgccgtggtcaggagtgtttgcactatctctactctactagtgaaaggtgcagtcgccgcggtacatattcggatatcgcttctcgtatcgggatgaagcaagtgactttgatttttttgttcgccgggctgctagctgcggaaagcgcgaatattttggggatttttgtggcccaagggagaagtcaattccttttgggggagaggttgttaggggaactggcgagaagaggacataatgttacacttttggggaaattcgtgcctcaagaaaaacatgaaaatttgcatttaattcgtgttaatttgatggaggaaaattcttttgattttctgtcgtgggaaactcaaaatgactttgagcatgtcaaagctatacacgacaaatggcttaagataacagaaggattgttcgatgaacaactggttaaggatctaatcaattcaaacagtacctttgacatggtcatattcgaatcctttggaagtgaggccgcaatgggttttgcaaagcattttaatgcttctttggtcgtatttaattctttggcaatgaatgagtggtgcagcaacctcattggaaatgtaagaataccatctataacaccttacagtttaacccaaaaaaccagcagcatgacattttatgaacgtctcacgaacactttacttttcctatacgacaagtactacaaagaatatgtatattacccacagcaacaaaaaatattgaaacaacactttggcaatgaaatggatcttcacgaagttatgacaagtactagcttcctccttctgaactctcaccccctcaccactgaaccttctttgcttaccagcgctgctgtagaaattggaggattccatgtttctactagaaagttgcctaacgatatcaagaagtttttagacgatgctaagcatggtgcagttttaatcagttttggaactaacattgatatgaagacattttcgaataatacaattgagagtttgctgagagctattcaaaatctaccacagcggtttatctggaagtttgatgcacttcaagttcctaataaacctgataatttgttgatttcaaaatggctacctcagtcggatattcttgcccatccaaatgtagtcgcattcgtttcccattccggacttataagtatcacagaagcagtacaccatggagtgccacttgttgttgttcctatattcggtgatcaacatatgaacgcccttagagctgttgagaaaggcattgcagttaaaattgaattctctaaattggatggagacactcttcttggcggagttcagaaaatcataaatgataaccaataccaaaagaatgccaaggaaatctccaagatgttcagagatcgacccgttcatccaatggacttagcggtacatacaattgaatacgtcttgaagtttaatcctgagaggcactttagaagtcctgcattagatctctcttggttccagctctatttactagatattgtatttg

SEQ ID NO: 7377 - DNA, 1526 bp, Diabrotica virgifera
  SmartBlast Evalue=4E-66; Info=Endonuclease-reverse transcriptase n=1 Tax=Bombyx mori RepID=D7F170_BOMMO
tttgtatactttcatttttgatttcttactcaataacttatttttaagtaattttttatttgcatggaagctcttatttgctgtaataatcctttctttgatttcggtttctctttctccattgtttgttattaatattcctaaatatttaaatttttcgacttcttcaaaagtgtattctcctactctaacctttctgttttcaaagtttttgtcaaatctcattattttggttttctcttggtttatttttaatcccattacttttccttctgttaccatttcgtttaacattcgttccattgtttttctattttttgttattagcacaatatcatcagcgtatgctattatttgtccttctctcgttcggagggtgcctttgttgatcttcctgacgacgtattctagggcaagattaaacagagttgctgataatgaatctccttgtctcacccctttattgatgacaaattcttctgtgtcgcctacttgagtttttatactaactacagttctactcattgtcatttgtattaatcttcttaatttatgttgtattcccatttctttcagagctaccattagttttgatctatttattgtatcaaatgcttgtcgaaaatctataaaaagcagttcaatttctattttatatccatgagctttttccataatttgtttaactgtatgtatggcatctgttgtagactttcccttaacaaatccgcattgatagtgtcctatgatattcgtggtagcttcggtcagtcttcgttgtattaaggcggacatgattttatatgctgtgtttaatagcgtcagtcctctgtagtttttacacatctgttgatctccttttttatgaatcgtgataatttgtcctttgtaccattcttccggcattttttcttcgtcccatatgtcttttattaaattgtataatctatcttttaattcttcaccaccatattttataagctccatattgatacagtccgatcctgaggctttaccattacggctgctattaataatttcctcaacttcctcttttgttggtatttgtagctggtttcctaacatcattgtctcttctcctctgttttcatttaggtcttgatcttgttgttctgttaataattctttaaaatagttagtccaaatttctttatactcttcatcgttttctgatacttttccatttttatcttttatgctttttatctttcctttaaacgttttgttctgctcactaattttcttatagaattcttttgtgtttctgttcttactctctttttctatttcttttatcttatcatccaaccactcacgtctaattttccttatttttttcttacatgcatgccttattatattgtattcttccctataatcctgtctatttgttcttatccacatttgtctcatttctaccttctttttaacattttatggcattcttcattataccattcttgtcttttttgtttctttttatccctacgtgtacttccgctgtt

SEQ ID NO: 7378 - DNA, 1526 bp, Diabrotica virgifera
  SmartBlast Evalue=1E-138; Info=Transcription factor NFAt subunit NF45 n=1 Tax=Glossina morsitans morsitans RepID=D3TNH2_ GLOMM
gttatcattccggcgttcattttctttttaatcgatataagagcggtaacgccaaagtgccgaagtttctttttgtttgtaaacgtaaatcagtcaaaatacagaccttaaagatggccagaggtgggatgcgtggccggggcggcatgaaccggaatgttggcggccggcctccatttaaagttaaaatgtttttgccgaggcatccatttgacctggcactttgcgaaacttcgtttcctcgtaccaaagcagctccagacgacacagcttttactcaagctttattaaaaaggaacgccgatctgtcacctacacctggagaacaaaccgctattttgaacttggttactaaaattcagacagttttggacaatttggtagttgcaccaggaaacttcgatgcatgtcaacttgatgaagtccgacaagtaggttccttcaaaaagggaactatgatagcagggcacaacattgcagatattgttgtcattctaaaaactcttcctacccgtgaagctgtagaagcccttggcaacaaagttcgtgacgacctcaggaatctaatgaaaaatgaaatcgtacaaaagggagaacagcttgcacataccactaatgaaaggggtatagaaattcgtaacgcatttgcatgtgtgagagtaatggttactacattgcatcataatatcagaaagttggatccagagattcatttagatcaaaaaatcatgttgagtcatctggcggcaatccgtcacagcagatggtttgaggaaaatgctcgccattcgtcaattaaagttttgattcgtttattgagagacgtaagaagtagaaatgaaggttttgagccattgacaccttggatgttggatttattagctcattttgctataatgcacaatcccagtcgccaagccttgcctcttaatgttgcttttagaagagtcttccagcttttagcagctggtctcttcctaccaggatcggcaggtatcactgacccctgtgaaggagttagtttgagaattcatacaacaatgagcttggagcaacaggatatctgttgtttaactgctcagtcagtagtaagagttttagctcatggtggatataaacacatcctcggtttggaaggaaacgcaaatatagcacaagaattaacggtttgggatggaattgtggtttccccattagataaggcttacgagaatcccccagaaaggaaggaaggagatgaagatgaggatatggaagcagatggtgatgaaagtatggagactcaagatgcttgatctgtgtgagagtattatgtggatatttgtggtaattaataataattgtgttctctgtcactttcatttgagtaatgagacttggttttctatcaatctcttttaatggataagaatttgaatttttcatatgatttgctttaacagtaatacctaaatgtaaaataatataaaactatgttatttccgttaacggcaaaaatttgattttgtaagatgtgtctttgtgat

SEQ ID NO: 7379 - DNA, 1526 bp, Diabrotica virgifera
  SmartBlast Evalue=0; Info="Ferredoxin-dependent glutamate synthase 2, putative n=1 Tax=Pediculus humanus corporis RepID= E0VR49_PEDHC"
gtattaaagttggatctagcatccaacgtaagctctagctgatcaccaatagctctttcaggtcctaagaaacccatagctaaaagaactagatccgctttgaagattttttctgttccaggtacttggttcatctgccaacgtccgctgtcgtctttggtccactccacgttgacagttttcacgccactaacattgcctttaccgtcgtccaggaattcttgtgtcataatgctgaacacccttggatcggaaccataacgaacttttacctcttcatgtccataatccactctgaagactctaggccattgaggccatggattgtcgttagatcttttcggtccaggttccggtagaatttcaaaagtggttatcgaagcagcaccttgccttaaagaagttgcaatgcaatcacagccagtatcaccaccgcctattattatcacatttttgtctttggcatgaggcccatcaaaattggcaccgagttgtttcttttgccaaccctccaggaattccatggcgaaatgaatgccattcaattgacgacctggaagtggtaaatctctcggccatgtagcccctgtcgtaagtacaacggcattatattcttcgctcaattcttttgctgagatatccttccctacgttaacatttgtcttaaactcgatgccttcggcagctaaaagatcaactcttctttggacaactgtcttgcttaatttcatcgtaggtattccgtattgtaacagtcccccaactctgtcgtttctttcgaaaacaattactgaatgaccggctttatttaattgatttgcacatgccataccagcagggcccgaacccacaaccgctacacgtcgaccagtgcgatttgttggaatctgaggcacaatccaaccgttctcgaacgcgtggtcaattatggagcattcgatattcttgatggtaacactcggttcagaaataccaagtacacaagcagcttcacatggtgctggacacacccgtcctgtaaactcggggaagttatttgtctgcagcagatggttcagcgcctgtctccattgattctggaacaccagaaggttccatttcggaataatatttcccaaaggacatccatgactattagattggcagaagggtaccccgcattccatacaacgggctgcttgtacccgcagacctttacgcacatgagtgaagttgtaaatttcgtcccagtctttcatacgcttgtctgcagggcggtaaggggccatttctctcggatacttcataaagcctcttgtcttatccagggccctttcggctttcttctgctcctgagaagcatctccgatagtatcctcaatatcttttattttaggttcaacaggttgattttgagtgacaacaacttcagttgttttttgttttaaagctctttgatattcatacgggaacactttaacgaattctttgcgacggctctcaaattcgtctattagttgttgagcaatcacgctacctgtttcttc

SEQ ID NO: 7380 - DNA, 1526 bp, Diabrotica virgifera
  SmartBlast Evalue=0; Info="Mannosyl-oligosaccharide 1,2-alpha- mannosidase IB n=1 Tax=Culex quinquefasciatus RepID=B0X052_ CULQU"
cttaaccacaaataattatttatttttaaaattttaatccaaatgattttctaatttacttaaaatgttaagatgtaaaataattagtagtgtaattttatttttaattattattcaacattctgttgccataaggacatatactaaagatgatattttgaaattacgagaagaagtaaaagaaatgttttatcatgcttacaatagttacttgaaatttgcatatccatatgatgagctgagaccaattagttgcgatggagtagacacatatggcagctactccttgaccttaatagatgcactggatacattggctatcatgggaaattactcggaatttcaaagagttgtagatatactttcagagaaaaaagattttgatgcaaatatcaatgtttctgtttttgaaacaaacattagaataatagggggccttcttagtgctcatctgctttcccataaggcaggagctaaattagaaccaggatggccttgtaatggccctttattgagattagctgaagatgtagcaaaaagactgatagtagctttcgatactaaaactggcatgccatatggtacagttaatctacacagtggtgttcccaaaggagaaactacagtaacttgtacagcaggtgtaggaacatttattgttgaatttggtacattgagtagattgacaggagatccattatatgaagaggttgctcttaacgctctttattctctgtttaaccacaagtcccatttaggcttatttggaaaccatgtggatacagacactggaagatggacggcacaagatgctggcataggatctggggtggattcttattttgaatacctagtcaaaggttctatcctacttcaaagaccggagctgatggaaatgttttatgaagccaaaaaatccatagacaagtatatgaagaaggataattggtacatgtgggtttctatgaccaaaggtcaagttacgttgcctgttttccaatctttggaatcatactggcctggagtattgagcttaattggtgaaacatccagtgcaatgaaaactcttcataactaccatcaagtttggcagcaatacggtttcacaccagagttttattacattccccaaaacgaagccggcagtaacaaggaaagttatccgttgcgacctgaattaattgaatctattatgtacttgtatcgagcaactggagatccttttcttcttcaggcgggagaagatattttgagaagtatacagcatagtgcgaaaacgccttgtggatatgcaacgattaaagatgtcctagatcataagaaagaagatagaatggaatcatttttcctcgcagaaaccaccaagtatctgtatcttttatttgacacagaaaactttattcacaatcagggacaatccggaacgatcatagacactccgaatggagaatgcgtcattgatgcaggcggatatattttcaacacagaagcgcatcctgttgacccggcagctctacattgttgcc

SEQ ID NO: 7381 - DNA, 1520 bp, Diabrotica virgifera
  SmartBlast Evalue=1E-69; Info=ATP-binding cassette sub-family G member 4 n=1 Tax=Camponotus floridanus RepID=E2AAR3_9HYME
ctgatctttggctatttgtatagaaacgttggaagtgccgcggatacagttttagcaaattatgtatatttgtatggtactcttttactcacagtatatactggtaaaatgcccgtaactttatcatttcctctagaaatgaagatactctctagagagcattttaaccgttggtataagctaactccatatttattgtctgtgatattagttgaaattcctttccaagttatatgtacatggatgtacatagcagtatcttattggttaacgaaccagccattagactttaggttattcttgtttgtcatttttgtaacagcgtgttctctctgtggccaatccatgggatattttataggagccacaacaccagtaaaggtagctgtattcatcgccccagtgttagcctgcttcttatcagtcttcggtttttgcatcagagcaatagacacctctaccatgttcaaaccgatcttcttcatcagttactttagagcagcattccaaagcgtcgtttatagtatttacggctttaaccgagagatcttggtttgcccaatagaggaggaatactgtcattataaagatcctcacaagttcctctcggaaatggatattttagatgtagatttagtttcaaattttatattgattgttattgtttggtgtgttatgcatgctgtgacgtatttgaccttatggttgagattaaataagcgatgattctttaacatgcaaaagatttgatgataaaccacgcagaaactgtgaaacaacaatctttattgttaaattatacgtattttttattatatacttgaaagctgttatgtttttatgtattgcgcatattgtctttacttaaaataatggtgtgtacagaatacagatttttcgtatgcccagtccatttactctacagcgtatttcaaatatgtgatgcagtgtacaattatagggccatacaaccctatggggcaattttcttgacaacattgtcgctcttcagggcagtggcttctcaaaggcagtattaggcaggttcttgtagatgattagatcagatacagatacagatccgtcaatctgttcacgaaaaaatgaactatgaaaatgagcataattttcttatgcctcgcagtgtatagtagtagatacacgttttaggtcacagtaaaatgctaagtttatttttcactttatttctttattatttgctagcttcatcttgtggctgtgattttgcaaaaaaaagaacgacgagcgtcgacaaacgagttagtgagttattttgtttacaataacttattatcggaatactatattcaatacaattgttaatttactggatcaagaagattaagaagtgtgtatttgctacaagatggtccacatatctactttcaatgaaatcttcattttaatgtgccttctccattactgaaggtaattactttattacataactacagcaaattgctctcttatttgagctgttcttagtatataatgtatgt

SEQ ID NO: 7382 - DNA, 1522 bp, Diabrotica virgifera
  SmartBlast Evalue=1E-127; Info=Catenin delta-2 n=2 Tax=Aculeata RepID=E2AHM6_9HYME
ttacgtagaatgcacacagaattctctacaattttattgcctatatttgacttatctatggcacagcgtacaacaaaaagtaatgcatcaactaaaccttcacactctcttaatttttttctagcatattctccagcagaactgacatttcttagcacaccagatgcgtttctgaatactgtggaccaacaagtctcgccgtgatttccttgtgaatcccagccggaatgtggaattataataaaagtaacaatggttattactccgtcgtctattatgtttctcttgagatcttcacacgatgacatgttccagatgacaccggtgaccagttcctttatttcagcctcgtttgatcttcgtaataaattgatcagagcaggaataccgcccgcgtttttaatggctcttttgttttcgtcattttgtctgccataagataaatttcttaaagctccgcaagagttcctatacacctcaatactgtcatgacacaataatttaactaacgggggtatgccgcctagagctctcgttttttgtttgttaggatcatccatataacacagatgttgtaaataggctgccgcattggctttaatcacattgtttgggttgttgaggaatccaatgacttcagtaagattgggatcacgccaacgcatgcccctttgatcttcgtctccgccaatactaccaggagaagcaatattatgtgccctatcatgggtcagtccaacattgtgaccatgcagggacatcttactgacatgcttttgaagttcctcgtcctcaaacaatctcatggtggctcctactggtacaggtccattaatactatctacataaggtctagaaagacttggcgctgtgccataaggagaaggtgaaacataaccatacactacggcagaatcatcttggtaaggatctatacctattggtccaccgggcgacggagtgaccctgtagtgttcaggcagttcatcgtaacctgaaccaacgtaggcagcattaggctgagacgttagaggcagaggagaggggtcaacactatgttcactaggactaggtggagtggggggtctttcagctccagcggcgtagcccatataggcaccgtaagggttcggatagtggtcatagtcttggtaatgggggtgttgatggtactgtgaatacatatgatgtggtggttgttcaatgtagtcaacgtattgagaaggatgggaatatgatcccaaggaaaccggaatgtattctcctgcttgatcgtctaactgctgtacttctcgtacgactttggtcacagtcgtcacttgttgagtcgtctgttgcttctgattcctcactagtggctcgtcgctgtgtactgacatgtggctcgaatttggcgaatgctccgactgtccattactatgtgggtgatatacaccgtcgctcagagtactcgaaacatctgggcctttgtagtgctgcatatcggggccctgttcttgtaatattctctgtctagaaggtt

SEQ ID NO: 7383 - DNA, 1523 bp, Diabrotica virgifera
  SmartBlast Evalue=4E-84; Info="Lipase 3, putative n=1 Tax= Pediculus humanus corporis RepID=E0V9B6_PEDHC"
tttagtttctaactgtgtattaaataatatcgcctactatatcgctaatacaacaataatcattgttaacactggaaaacaagcaattcttccataaatggtatttgcggagccctttggttgtgggtcaactggtatgtatttattctgagtggcaatcacatcatcattgagaattgtgtgcacatctttcgcccaaaggtaatccagatgattaaaccgtctatcttggactaattgtaacttcacaacgttgggtaactccttggacaacctttctacgtccttaactcctaccatatagtcattttttgagtaataaagtacaattggtgcagtaatggcagacaaattgtagtccggtgggaaaagtgaattatatttttcataattacctaattgataatcgtatcttctgaatttccctgaaataatttcttgtccataatgtatagccatttttgaagatattccagcaggtgcattagacaatattattggtacaaatgacctgtcaaattctctattattaaacccactagagaaaaatgctactattgctccgatttcttttgcttgtggtacaacgtcggttatgacaatatacaatttggccagttctgtataaatccaagaatgcgacagcagactatgaatatttaaaatgtccaccaatattaatttcaagatatcaagatattggctcacaatcctcaaactcgtagaactcatgtgattcatataggcaaccggagctaaggctgacattaaagcgattttttcattatattctggtcttaaagctgccatagcaaaaaactgagatgttccctgggaatgtcctatataaaatatcttttcctgtccagtcttattgacgatatagtcaatttttgcgggcaaatcgtagtaaccacattcgtcaaaactgtaatcataatattttgcatcattatcaggatccaatgtctcatgcattctcgaccaagtagttcctctgttatttcctaaccaaacgtcatatccttcatctgctaacatcaatgcaattgatctatttgggccataatttacaaaatccatggcactacttagaagaccatgcataagaagaacagctggtttatcttttgtgttaacgtgcgttccattttggcctcctactagccgttgcattcgaaggatatagccatcttcagtttttacccaatgagtttctacgggatagttatatttggccaaaaatttataaatatcaagtcctagatcagaatatggttcgaagacggcatcgctaacattaaaagatttcctatagtttcttatataatttccaatagcatccaaagtagtgtttttacaaaaaacattggatattgtcaacaataaaattactacttttaatttaacatttcaactaatatatcctgaatcaaacaataattgaaattattggtatttttgaaaaatattttgatgatatttataagtggttaatgttatctaaaaatacttatattgta

SEQ ID NO: 7384 - DNA, 1513 bp, Diabrotica virgifera
  SmartBlast Evalue=1E-151; Info=Adenine nucleotide translocase n= 2 Tax=Cucujiformia RepID=A7XQS5_MONAT
tttctgtttttttttgttttttattaaccatcagtgaaatgatgatacaatgtttaaagaatattttagttacatttaaccaaatataacaacggtacatttgcgatccgcacaactcaaaatgattaactctacatgaactcgacaaagaaacagcaatattcgcagtctccgaatgacaaaaatatagtctatacttcgcccgggcgaggatgttgaacttatttacggcaatcaaaaaaataaataaatgtacaactatatacattctcctccaagtcgtgctcagcaaggggtggggtgacagcaaaaccatctcagtgagctctaaaggtctataaaatggtccgcctccacccggaatggtttgaaacaagcacggctagaagaatatatcatcgaatttggctaaatatttcctaggaaaaatcgattggagtgttgataatgatgcgcgattcttgtagcaatgaaaaacaaattacacaatcaagtttttgatttcgtcgtacatgaccaatacaatagctccaccagtaccacggaggacgttggagaaagctcccttgaagaaggcaccggtaccttcggtcttggcgattgtggcccagcagtgagcagtgcttttgtagatgatttcggtcttcttacgtccagactgcatcatcatacgcctacggacagtatcgaagggatatgagatgataccagcaacagtggttacagtctgtgcaatggcccatgaaactacaagaggagtgttcttaggatcgggcaaaatacccttggcagtatcgtagaaaccgaagaaagcggcacggtagataatgataccttgtactgatacaccaaatccacgatataatcctcccaagccgtcagctttgaagattttgactaagcagttacccaaaccagagaattcacgttcaccggcacctttaccgacgtcggcggccaacctggttctggcgaaatcaagtgggtatacaaagcagagggaggtagctccggcggcaccaccagaggccaagttacctaagaagtaacgccagaattgtgtctttttgtctactccgctcaagaagatctgcttgtatttgtctttgaaggcgaagttaagggcttgggttgggaaataacggatgacgttagcggtgttaccacgccagtatgcaagaacaccctgttcctttgggatacgtacgaagcagtctaccatacccttgtaacgctgatcctcagcgatttgcttggaaatgtgttgtacttgcaaaagcaactttacacgttcgattggagctacacatgtttttgaaatagcggcggaaatacctccagcgaggaaatccttcataaaggcaacgggatcagcgagagacattttgttttattcttttaaaacttttctcaaaagaatatggtagagtacttgtaatcggctgttaacagaccgcgcaccgaactgcaagtgaggaagatgctaggcgttggtgattgtcatcgccgcgcg

SEQ ID NO: 7385 - DNA, 1523 bp, Diabrotica virgifera
  SmartBlast Evalue=5E-95; Info=Sodium-bile acid cotransporter n= 1 Tax=Aedes aegypti RepID=Q16M32_AEDAE
caatactttttgcttttaatctcgtgaatgtaattctttattctttatcaattaagaaataatggttaatgctcaaaggaaattaaaataaataccagaaaataagcttatactataattatctagatttgtgcacctaaaattttttaaagatgtgtcctatatccggcttggttcagtttctgatagttcttgtaacagtgttgctggtatgtcatgcggtaatagtaaagagttgcaaggtcactttcaagcctaattctaccaaaatacacatgtatgattctgttcaagtcgcatacaacgtagataaagatcaaggaggcgagtatattcttttttccgaagatgataatatagcatcacttgacaaagaatatcttatatcgacaatatacgataattggaaaggaagttttaatataactggtaactttttgggtaaaactagagtgtcctgtagaaaaaaaatagaaggaactaaaacgccaaacagcagcatggatgttatagttataagaaaaaagcggtttattgataaaatgtttaccggatctgtggctacattaatcagtattttgtatattaattttggttgtgctttagactggaaagaacttaagacaattcttaagagaccaattggaccagcaataggattattcggccattttgtcataatgcctctgctgagttataccttaggagtattattgtttccaactagccccgaaatgcagttgggtctctttttcacgggtgtatcaccagctggaggtgcgtcaaatgtttgggccgtacttcttgaaggaaacataagtttatcaatcacaatgacagctgctagtaccatagcagctttcgctttcatgccattatggattttcacactaggcagagtaattttccagaacgccaatttgaaagtaccatatgtagagataatgacttatgttgttgcattagtggtacctttggcgattggttatttaatacaaagatatttgaaaaaggtctcctactttttagtaaaaattatgaaaggattctcagcgttgttgatattatttattataatttttgcaattgtgacaaatgcatacatatttaaacttttctcgtggcagataattgtagcaggtatgggtataccttggataggctatctagcaggttttttgatagctaaattgttaaggcaaaatcccgtagactctcttacggttgctattgaagttggtattcaaaatactggtatagctatattcttgctcaaatttgctttaactcaacctgaagcagatcttacaacagtggctccagtctcagtagcagttttaacaccgttccctttgttgttattatttatcattaagaaactcaaagcccagttttatcactcgcattcaaaactatcacaggaagacatcgtaaaagtagacaataataactcgactgaaaacatatccaacaacagcgaattaaaaacggtctactgaaatatctgtacgactttagtgcga

SEQ ID NO: 7386 - DNA, 1522 bp, Diabrotica virgifera
  SmartBlast Evalue=8E-70; Info=Ubiquitin conjugation factor E4 B n=2 Tax=Formicidae RepID=E2AX73_9HYME
cgtctttaaaatcgtttagtgaagtgattatttggtacgcgttataactaaattaaaagaattattttattactattaccaacaccaagtaatccataaagagaaatcatgagcgagttgactcaagaagaaatacgaagacgacggctagctagacttactgccagggaaagtacatcaccgtcaagttctttatccccacctgtcacaccaacctcccaatctcccattaatacaaatctcatccaaattcctccaaactttgacgccaacgtcaacccaaccgacgatgccaaaccagagtctcttgtggagaacaaagcaggtgatctggtcaagaaagatgtgttcaaggagccttcaaaacccatcgatattaatatgccatcgagctcgaaaggcagaactagagctcctccacaaaggagcgattcagagacgagttcgattcatatggaagtagatgatatcagcgtcagcggcgcagataagattagtgccaacactgatattgattctgggtttgagaatatggaggtcgacgatatagacatacaaaagaaggaattacacaaaaaacaagtgacgacatctaccgaattaactcttcagcaactacattcttctgtagcccgagttttactctcatcattcaaagaaccctcagaaacacgcctacatcttccccatacagctatgttactccaagaaaatcaaaatatatcgataagagatctggcctcgaatgctataatggaaattatatttaaaattagtacggaacaaaaccccttccagaacttatctcaggtgacttctgatatgtgcgagactggtagcttggggtccttttcggccagtccatcaaatctcagcccgtcttcggctagtcctgccatggggagttatccggtggttcccataactttgaatagtagaaataaaacgactcaagattcgatgacgatggctataaactttttaatggattcttacaatagggttggagttgaagaaaggaataatccaaagaagtcaagcgttcctcccatgagcgatgtacttaccgaattaagggcccagattattcaacatacaactcttttagctgcaggttgtataataccatccgaacacagactcgaatctcccttattacatccagtcctgcagcaatcaatccccagaggtttcttaaccgaattgatcacgaggacacacacaaacgacaagctcttctccaacgtcttcagtccgatactgcaaggcttgttcaaaatcatgcaacaagccagcatggtgggcgacgaacatcgagtaccaatccaaacccttttcgaattgactgatatcagatgtggaccgaggccgatatgtacgttgctcaccaaacaagcgcagttcatgcctctcgtttgcacgcctggcgccggacgtgagattatgaggtgttcctatcttgggccgttcttgaacgtgtctgtgttcgccgaagatgaacccaaggtggcggagaaatttt

SEQ ID NO: 7387 - DNA, 1524 bp, Diabrotica virgifera
  SmartBlast Evalue=0; Info=Alpha-amylase n=1 Tax=Diabrotica virgifera virgifera RepID=Q9U406_DIAVI
attcggtagaagaatttgattaaggcaggaatagtcagtatgaaaacatacgtgatagtattttgcgttttaagttttactgtttccaatgtaattggacagaagaagaatcactttgctggaggaagaaacacgatcgtacagctgtttgaatggcactgggatgctattgccaatgaatgtgagaatttcttgggaccgaaaggatttgctggagtacaggtatctccaccaaatgagaattgtgtagtaaatggcagaccgtggtgggaaagatatcaaccagtaagctatcaactcattacccgatctggagatgaaactgcatttgcgaatatggtacgacgttgtaataacgcaggagtcagaatctacgttgatgttgtcattaaccacatgtcggggattactggtaatggtaccggaggaaagtcatctgatgctggttctttatcctatccaggagtaccattcgggccgaaccactttcattctcgttgtgatattaataattatcaagaatcgcacaatattagaaactgtgcacttaccggattaccagatttggatcagagtcacgaacatgttcgtaagaaaattgtcgagtacctcaaccatttagtagatctgggagtcgcaggatttagagtggatgctgctaagcacatgtggcccgctgatctgaaagctatttatgacagcgttaaggatctaacaggaaatggtttgagtggaagacctttcgtctatcaagaagttatagatttaggtggcgaggccgtaaagaaaaccgaatacaccagctttggagcagtgcttgaattcaaatacggttccgaattgggtaacgcttttcaaggccgtaatgatctccactggctaaaaagctggggtccacaatggggtctattagatggacttgatgctgtcgtctttattgataaccatgataaccaaagagatggatcgtcagctattctttcatataagaacccaaaaccttacaagatggcaacagctttcatgttggctcatccgtatggaaccacgaggataatgtcaagttatgcatttgatcatcgtgatcaaggtccacctgctaaacaagccggtttcaacactgacaacacatgtacaaacggttggatatgtgaacatagatggcgtcaaatttacaacatggtcggctttagaaatgctgtagatggtacaggtatcaataactggtggagcaacggccaccaacaaattgcttttggaagaggaaataaaggtttcattgctttcactttatacggagacatcaaacaaagccttcaaacctcactaccggccggtacttattgtgatgttatttctggtagtttagaaaaaggatcgtgtacaggaaaaactgtaaatgttgatagcagtggtaaggccgctatttctttatctactaatgaagaagatggtgttgtggctattcatgtcaacgcaaaattgtaaagttatatttttttctaaaataaaatattcaatatt

SEQ ID NO: 7388 - DNA, 1521 bp, Diabrotica virgifera
  SmartBlast Evalue=1E-100; Info=UPF0392 protein F13G3.3 n=2 Tax= Formicidae RepID=E2AT62_9HYME
attgtatcgagaaaataacatgaaactaagagatggtataggcacgggaagggaggactactgtcgcagctttactatgtgtaagagtgaaacagcactgagccaagaaaaaaagatggtgtcgtcacttccctcaacatgactctctgtctatgataaataatagatatgtctatggtcaatataatgtcctcaatggggcctttcaccggttctcatttgtttcgaactgctgtcatatgtcatataatccgtgtctaatatgaatatacgacatatgacagaagctcgaaacaaatgagaagcgttgaaaagtcctatcaaccaatgctacttgcaacttagattgttgatttttcgaccaatcaaaatttttcatcagaaaacctctatttttataggatttgatcaaattcacgatatgacgtcattatgctgtcaatttttggaatgatcaaactaatttgatcaaatatttgaccgtgtgccacggacttaagactgtatctttaattttcgataccgtttcttttgacgactactgtagccgttcgagcctattatctctccagactaggtttcaagaactgcattagcttattgagaacctttcccgtgggtaaattgagttccaccagcccacactttctactcagtctatcgtacacagatttcacaccactcgtgagcccctccttaaacttatacgccgtccggtccacggtggacgacgtcttgatgcagtcgtcacctccaaactcacagatgcgatagtggtgaaggatggccgtatcggggggcacgttcatggtgccgtggccagggataaattcccatatgaagtgattgcctgcttctacggtcagttccgggcggcagatgtatttggatcgctgcttctgtggatggagtttcgtctttcggcgcgtcttcttcatcgtgatcaagttggcggtgaccggatcgtcgaactcgtatactgagtcgtcgtcgtcccattggaggtagaagaaggcgttttggaatgagaaggaggctgtggtgcgaccgttaacccgtttattcaaagtatcaatcatttgtcctaaagtatcgttgttcttgggtagaatgtactcatccaagtctatgagcaaaaggtgagtatatttgtacatgaacctatacaagcagtcgttaagtgccgcaaagagcccttcagtcctgatatccttctgtgagatcatatccaaattccaaggaagcactgtcactagacctctatctatgtaatcccgcaagacgcagtccacctggttgcctacggtgtggttgtagaacgtgaagtgatccactcctagcagcctattcagttctatgaattctattaattgaagagccctattgtattcgaagtgcagcggcttgacacaaacaccgaacttgtaggggctcgagaggccagcgccgcctccggagctgcccacccccaccgcccccgatgtttcgttatggttgttaatgaccgccagcaggttcgcc

SEQ ID NO: 7389 - DNA, 1522 bp, Diabrotica virgifera
  SmartBlast Evalue=1E-124; Info=Glycoside hydrolases n=1 Tax= Aedes aegypti RepID=Q16WF5_AEDAE
tctctacagtcatgactctcaagtatatgttgataacttttttattagttggtatcactgtttgtgatactgaactaaacaaaaagcggtttccaaaagattttatgtttggagtggctacatcttcatatcaaattgaaggtgcttggaacgaagatggcaaaggagaaagcacttgggaccattttgttcaccaaaccccatcacccattgtaaataattatacaggtgatgtagcttgcgattcttaccataaaatgaaagaagatgtggctttattaaaatatttaggagtcaagcattacagattttctctatcgtggtcaagaattctcccaacaggttacaccaacaaaataaaccaagctgcaattaaatactataaaagcctgatcagagaactcacagacaatggtattgaaccggtagtaactatactgcactgtgatacaccacaagcgctggaggacatgggtggctggacgactgactggatcatcgatcggtatgtggaatacgccgcagtttgctttgaaaattttggagccgacgtcaaatactggttgacttttaacgaggcgttttacatgtgcactttgggttatggaacaggtactcaggcacctggtaggaaggctagtggtattggagattatatttgtggccataatattatcaaagcccatgccaaagcttttcatctgtataatgatacatacagaccagtgcagaaaggttcagtaggaatttctttggtgagcatttatgcagaaccaaaatctgacagtgatgaggataaggaagctgctgaaagaatgatatattttaattttggatggtttgcaagtccaataatgttcggttcttatccgtatcaaatggaaataacaataaatgaaagaagtgttgtccagggattcgcacaatcgcgccttccctcttttactgaagaagaaaaagcttatatcgcgggcactgtagactactttggcgttaattattattcgagtgttgtggctgaaaacttgccagatttcaaggatttagacgtttcatgggaagctgatgttgaggtgataccatctcaagacccgcactgggaaaatacgacaacacctcagttttcggtctacccagatggcttgtataaacttttaaaatggatttcaaacaattataacaacatttcaattatgatcaccgagaatgggtatccagataaaggagaaacgctacaagatgacgaacgaataagttatatccagcgacaccttagcaaggtacgagacgcattggatgaaggagtccaagttcttggttacacattttggagtctgatggacaatttcgaatggttaatgggctatgacacgaaatatggactttttgaagtggattttaacagccctgataggactagaactcccaaaaaatctgcggattatgttaagaaagtatacgagtctagatgccttttggaagacagttcggaatgttatgattagatacaagtttttgtaat

SEQ ID NO: 7390 - DNA, 1518 bp, Diabrotica virgifera
ctgtgaaattttgttgtttcacctaaaataacgattttaacatttaatttaacatttttacagaatacattggtagctccaaataatttaggatcgagatggaagattcagctacaccgtcacccaaaaaagtgtttaggttggttagaagaagaccgaaaaatgcagaaagtgaacaaaccccaattacaccactgttaaccctagatatgggcgaggacacgatgaacttatcatcatcggaaacgccgccagttaaacttaagctaaaacgacatgtgccggcatcttcagtcttgtgttcattggatgatatcattaagaagaatttagaaccaattagagaatgctcagaacggaaaaaaattgcccaggatatttattacaacaagaatggtaattcaggtgtaagtccaatgacacgtgaaactcaaaagcgacccgttaaacatcgattaggcagaattgcatacactggtaccagcacttcagcagttccaccaaagaaacgtctcaccaaaaacattactctcaacaataccattaggcacagacttaagcgaaccaattacgcacagatgcgtatagataaaatacgggaacaacaaagattgcagtctacagtagccggggattcaactgtgaatatgcgaaagacagtaattagattaagacgtacagtacctaatgtacgaacagtacctaatgtacccagactccaagtccaaataaaaaataatcgcgtattggctacacgattcaaattggtgctgaatgaggaaattcaatcacagttggaatctttaaaagctactatacaggagaaataaatacaaatgttaaagttgttcctgaagccacaattactaccattgatcagagattttcccgtttaagttagtaagtaagttgtacataaattgctacatctaaatgtcttctcctatacgtcatataatctcaatactgttctaaagctattgtggcatcaaagcggcgtatccatttcgcgagattgccgcgcgcggcttgacaaaaaactaacaaaatttgtctcgtctcgaacatcgttcgaccgcggcagtgttcgatataccgtgcgtaaagacaggtttgttttctagagtaacactttcgagtgtagttgagtgtacactacactggttagtggcaaacgaaaattacaggtgtaccactaaacaaagaaacgttatagtgtaaatagttaatcgttgagttacttggttaggttagaaacaacaaaataaaaattaaatcaaattaaaatttgtaggtaatatacttcttaaaattactaaatgcttcttgaagatattagatttaaattaaactaaaaagaaaaagatagtctgttgtaaacaaacgcatctgacagctaaaaattgtcaaactagtttggatgttactgcgcaatacgagtgtagcgagtgtaaggaacatacctagcgttttatcaaataccatagactatatatatatatgtgtatatatatgtgt

SEQ ID NO: 7391 - DNA, 1516 bp, Diabrotica virgifera
  SmartBlast Evalue=1E-168; Info=E3 ubiquitin-protein ligase MIB1 n=1 Tax=Camponotus floridanus RepID=E2A0Z9_9HYME
ttttactggatcacaatgcggacataacgttgacgaacaacaatggattcaatgcccttcaccatgcggctcttagaggaaatcctagcgcaatgaaaattttgctagcgaaactaccaaggccgtggatagtagacgagaagaaggatgatgggtacactgctctccacttagctgccttaaacaaccatgttgaagtagctgaacagttggtgttaaacggaaaagccaatatggacctacagaatgttaacttgcagactgcgcttcatcttgctgtggaaagacaacacactcaaattgtcaggctgttggtgagggaaggcgctaatttgaacgtagccgacaaagacggggacactccactacatgaagccttacgtcaccacactctttcgcaactacgtcagctacaagatgtccaggacgtggggaaactgcttatgggactgggaacacaaggatcagacaaaaagtcatcagcgagcatagcttgctttttggcaggtaatggagctgacctaaccatcaagaacaagaaaggacaaacacccttggacttatgtccagaccctaacctctgcaagactctgaccaaatgccacaaagagaaacagagcggcgaaatggacatgggctcccaccagaacactcaaaactccaacagtaactcgacattagaagagtgtttggtctgttcggatgccaagagggacattctcttccagccttgtagtcatgttacttgctgttcagcgtgtgcaccaagagttaagaaatgcctgatttgcagagaatctgtcgtcactagaagtaagatcgaagaatgcctagtctgttctgacaaaaagtcctcagtcctcttcaaaccttgcaaccacatgtgtgcgtgtgaaagctgctcgcagataatgaagaagtgtgtgacatgcagagcacaaatcgaacaaatggtaccgatagctgtatgtgcaggaggtctgggtactatttccgaagtagaagctgatgtggaagaagaaagcaaaccatcaacgagtgaaattccagtgatacaagggcctataatgaacaacggaggacgagatactattggtactaacgatatacagaaattgcagcagcagttacaagatattaaggaacagaccatgtgcccagtttgcctcgacagactcaagaacatgatcttcttgtgcggacatggactctgccagatgtgcggcgaccaaatgactgaatgtccaatctgcagaaaagccgtagagaaaaggatactgctttattgagtgaaactgttgttaacttagctagagagataaaaaaatatggttttattagagtatttccatttcgcgaatattttctcgtttgctctgaaatatttgacaagtcaagtgactggttttcgatatacgttatcgaatctcgtatacagttcctgttctgatttctttgagatgtggtgtacagtattcgtacaatcccaagattacattatttcaatgttgaaggc

SEQ ID NO: 7392 - DNA, 1519 bp, Diabrotica virgifera
  SmartBlast Evalue=6E-76; Info=Mitochondrial import inner membrane translocase subunit TIM50-C n=1 Tax=Harpegnathos saltator RepID=E2C935_9HYME
aagataacatcctacacaataaataaattcataaaattacaaagccttttaggtttagtgtaaaataataactttcaatgtcttaacgtcctaaaacagctttctattaaaaagaactaggtgcccatttggaagtttttgaagccccttgttctctttttgcagcagcttgagcttccatttcttctaaaagctgtttttgtttttctctgaaagcggcaatcggatcatcaaaatgactgtagtgttgcaaaacttctcttacatcttctacatcattgtcagaaatggttttcagaaacgaggctaagtcaaccagtgaggaatcatcatcgtttcccgaccaccttttaacatgtaatagattctctggattaaatttcacgttttttgcattccaatctacacaaataactttagacaaatctctgttaagattatttaagctctttacgtgatgtcctcctgaaaatgagtagcatctcttaccagtctataagcaattatactcttaggatctatggcatctattaatggaaatacagtcatcccttgttccgcagtatatattattatttcataggatccatgcaatgattctaaaaatagtctaacattggacgttttttaaacctccatccagtgctgtaagtccagtcaggatgtacaagcacatctgttaattctaacactaatgtatattttggttgcaaataaggatactctaatggatctggtagtaatttttctcttgatggttctttaatcagttttctatagtaatctaactctctataggttctaatgatgtattgtagaacaacaggcttatcagcaagatcatctttaatgggatcaccatgagaatccttttcaggacttcctagagtaaatataacataagttcctatacatgtgaaagagattccaagaaatgcaagggtgagtttcattgttctccatgaattttccctctgtttctttcgctcttcttcttcagctgcttcttgtgccttatcattattttctttcaataaacttcccaaaggaaatgtgggttttgtatcttctattttcgacgtggatttggtactttgacagtagaacacacattgattacagctgtatatgttaatcttgaataaagcacaaccagatttattgtgattagctagtaaatcagaatgatttctagcaatattgctgaataattggattgattttcttgtgagcctcatcatttttgtaacaatgcttttttgttcagatagttttactgaaattacggcttagtttttcattttccacaatatcacaaacacaaaattacagtcttattattggtttgcctttttaaattagggcaatatgttactaatgcaaactcagtctacgcgtatgtaacaggtctctagagtaaaaatccaccttctttacattttttgaacaatgtttagatttaggaacttaaaattatcactaaaactgcgaaattgccgaataaaatatgaaattgaag

SEQ ID NO: 7393 - DNA, 1518 bp, Diabrotica virgifera
  SmartBlast Evalue=1E-112; Info=Niemann-Pick C1 protein n=1 Tax= Harpegnathos saltator RepID=E2BH80_9HYME
atcaccataacatcagttactgatgtgatagctttcattattggatcctcgacaatcttgccatctttagaatcgttttgcatctacgcagcagcaggtgtacttatgacgtttatatttgccgttacatttttcgtagcgtgttttgtgatagatcaacgacgagttgaacaaaataggcatggtgcttttccttggatcgtgtatcctaactacgaaccaaaccagtgcagtcagaaaaattttactagtataatatttaataaattttactctaatgtgatattaaccatgccaggaaagatagctgtgatagtaattagtattatctgcgctggatttagcatagaaagttgtataaagttagagaagaaattcaatcccgaatggtttatcccggaagggacgcatctaggaaacttcttttcagccagaagtacatattttccttcagtaggatttgacgctgggttatacatgggctcagtaaattatacgcacgagttgacaaatattaagagggctgtggacaaattaaatgaaattagtaacgttactgaaaatgttgtatcatgggtagatccgttcagagacttcgttatgttcaattttcatcatgatgtgtttattgaacctttggatgacgatcgattttccatattcctatcgaaatttctaatgagccccagatatgcgcaatatcaaggcaattttatttttgaaaaggagcttgaatgtggggttccagctccaaaaattaagttatctacaattgacttcttctttaaaaaatcagctgaaacgcaacagtatatatctgcgatgtatcaagttagaggtatagctgaaaatattaattttacttctggagatcgatttgcgactgtatggtcgaaatttttcgcaacgtggatcacagatgagttaattggtatagaggtagctcgcaatctacaactagctctcctctgcgtgatgctgtgcacaattcctctgatagcaaactggcaaattagctgctttatatttttctgcgttctcatcacgatggtaaatgtatgtggctttatgcaacgttggggcatcaacatcgatctggtctcatgtatcggactggagttggcgattggactgtgcgtagattatgctacgcatgtcggacacacatttttgacggtttctgaaggaaataaacaagaacgtgccatcaaaactgttacttcgatcggatctgctgttttgtatggaggtttatcgacttttatcggcgtatctatgatgagcttctcgaaggcttacacttttcaatcgttttttaagatcttcttcctcgtcatcgtatttggattgtttcacggaattgtattgctgcctgttattttaagtttcattggtcccgctccttacaaaaagcacaagaaatctgccgtagaagagtcagaacttaaacctctggacagctgacagttgacaacgttaacacatatctagagattacctaagtaggattgataaatt

SEQ ID NO: 7394 - DNA, 1518 bp, Diabrotica virgifera
  SmartBlast Evalue=1E-128; Info=1-acyl-sn-glycerol-3-phosphate acyltransferase gamma n=1 Tax=Harpegnathos saltator RepID= E2BQI8_9HYME
gccctgtacaatatccgaggtttttacaattgaaaaatgtttttaatgagtattgacacaaagactaactaatcatcagatactctagatagagggaaactaatcacagggagacctgaaaactttaatgttgaatgttaagtctacttagacttcttaggaggtgtttcagctccaactccatatgaggatcctttgtcaatctcggtcatgccgatggttttacacatcagtatatagaatgctccaaggattcctgcgccaattgaaaaataaactaattcgccactaaacaataatttcattaggtaatatgacataggaactaaagtaatcaatatccagaagatgaaattgaatatagaatgcagccttggctttactacaaacgaatccacacgagctactcctgatgtttcaaagaaatcacctgtgttgataaagctctcctttattttgtctttctctataaatatatctcttaaaaatgactcctgagctgcggaattatcaggcacttcctccagcggtattctttggaagtaaatatgggcggttgtcggctttcctagtaacatagtagtaatggtcggtttatatggggcatcttctctaaacgcaacttcaatattgtaaatagcaggcactttgcctttcattgatgggagactagctatgaacccttttgttcggggcaacagatggtgctttagtagtggtaaattatgtttggcagcaaattcgacagatgcttcatgttttttcttagtaaagcgagtaccttctggaaagagtagtagccatataggatcaggatgttcggctaattcggtaatttgtttatttataactttcctgtctttgtcaaaatttctctctagaaatacgaattctgagcatttccaagcccaacccaaaactggtatatattgaatgactttctttgcataagctttgcaattccctaagacgtgtattctttcacatatcatccaacctataagccaatctatctcgtatgtgtgattcatgaccaagtaggcgtgttcttttccaaaatatttatcaaaaacggttttatctacatagataattatttctgtttgggaccaccagtcacctaggcatactaattgtgaataaattgtataagacaaataccagttaatttttctgtataaccatttgttaaatggtctaagacttaaataaagaatacactgcataaagttaactatcactcctgatgtaaaaaatgtgattgccatacacaaatgaattatccttgatctttttaaaatatttagttttgtaaggtccatgttgcaattgcagataatactttgtttagttttccttaagaagtattaagtacacaaattgaaatatgtatgtactatcattcaacccttttaaatttaaaacgtttgtaacctcacttcaactacacgtaatttagtactgaaaactgaaacacaaacactgataaaaaaaaaggaacttagtttccttgttctc

SEQ ID NO: 7395 - DNA, 1518 bp, Diabrotica virgifera
gcttacattctagagcatcatcagaatagatagtaaaaatgcaatcatcatacataaaacgattaaaaataacatttaatatcatcatcagtttaacgtacaaatttgtcctctttaaacgaccactaaaaggttttaaaatcttaaataaattttagataaaaagtaggtgagtctgtgtgtacgaaaacaagcctaaattacgtcgaacaattcgtctgaatcacgaattcctttgaaaggaagtcaaagttgaatgtagtcataaaaaattattaaaatggcgtttaattcatgatattcgtaacgatttatagtcgaagcctgaagcagtggcggatctacggagagagaaaatgggacaattttccccataacaaggtcaaaattaaagaaaaaaaattgttgacacataaataaacctgacatgaaacttaaaccacagacagaaaaattcaacccaataaacccgctagttgggaaaattaaagaaacttaatgtatataagttattatttatgtcttttatgtagtttggggttatcttttttatgtcttttggttggtgtttcattggaagttcccctaaggtaaatttcacctcccaaaccaaatgtttagatacgccactgggatgaagagttgccatttcctctgtagtgctaaaaagagaggaaatattgaactaggggttcaaaaaatcctagacatttacaacaaatgttaaaaaatgagaaagctattggaaataattacacttttataaaaaataagtttttataataccacatttttattatttataggacacaatataattaccacatttatttttgagaattttttaagtaaacaaactagcgagacaattttaaatattcattagctattattccaaacgaatagaatattttacatgacatataaagtaacgccatttattgaaaaaactagtagcgccatcttttcagaaaagtgagaactaattttaccatacaaaattaaaatcgcttaaaattccaaataaaactcaatgcataaatgtaaaagttgttgaatattgcattgtcatcgagttctgaactattctgaaaatttcagatctctagctagtcgggaagcacgtttaaaaccgattaaaagattttcccggacaaagtgataatgaggcagacaaagaacagccgaagtatataaaacgtggtaaataaaataccataaaagtagataaaaacaataataaaactaacaattgcctaccaaaacaataaaaagtgcctttaagatcagtttacagcaacgaaaacagaaaatcatttcgaatgattatttggaagcgattttgtataacaaaaatttaacaaacaagatataaaatgttgaataatataacggtaggggagcccaagcgaggattttgcgcgttcctcgagcgtgtcagaaaacctcttaccctgtaattgtacccctaacatataaggactctcaatacaggggcgtgcgttgggggcagtccgt

SEQ ID NO: 7396 - DNA, 1515 bp, Diabrotica virgifera
  SmartBlast Evalue=1E-155; Info=Short-chain dehydrogenase n=2 Tax=Aedes aegypti RepID=Q17IA4_AEDAE
agactttagacctatttatttttactctactttatttaaattgatcagtttggagccgaacaacttaaaaagcactactccttttaatttttataaagattgttaattaaataaagaaattatgattaattcgggaaaacttgctggccttacaatattcgtaactggaggaagtagaggaattggtaaagcgattgctctaaaggcagcgaaagatggtgccaacgtagtcgttgctgctaaaacagctgaacctcatcccaaacttcctggaacaatatatacagcatgtgaagaaattgaaaaagctggaggtaagagtttagcatgtgtcgtagacgtaagagacgaaaatactgttagaaaagccgtccaagataccgtaagcaagttcggaggaatcgatattttaattaacaatgcttccgccatatctttgacgggaactgcagatactgacatgaagagatacgaccttatgcacaacatcaacaccagagggacctttttagtaactaaagaatgtcttccatacctaaaaaaaagtaaccatgcacacgttttgaacatctcaccacctctaaacatgagcccccattggtttaaagggcatgttgcatatactatggctaaatatggtatgtcgatgtgcgttttaggacaacacgaagaatttagaccatataacatcgccgttaatgccttatggccaagaacagccattgatacagcagcgatgcaaatgttatctggaaaagaagcttctgctcagtatagtaggaaaccagaaattatggcagattctgcatacgcaattttagtcaaggaccccaaatcattcactggtaatttctgcatagacgacgaagtactgaaacagtccggagccactgatactgacataaggaactacgcctgtattcccgaaaatgctgataaccttatggaagacttctttttgggagaaggtcccacagataagcccacgcagaaagttgaagctcctgcggcctcttcgtcatcatctgctgctccaacaggaaaaattgcgtcactgtttaagaaaattgaaagcgccatatcgccacaaacgattgcaaagactcaagcagtttacgcatttaatgtaacaggagaagaggctggactttggtatttggacttgaaaaacggagcaggcgcttgcggaaatggcgaggccccacaaaaaccggacgcaacgttgacaatggatagcaaacacttctttgatatgttcaccggtaaaacgaaacccaccacggcttacatgactggaaaactaaaaatcaagggagacctaactaaggcaatcaaactggaaacactgatgggcagcctgaaggccaaattgtaaatataaaatctgttatggactacaagaaggtttttcttgcaactcacaacttgtttttaactatattttgttaattgtatggtaaaatatttttacaataggtttattgatgtaaacaataatttttatataagtaaata

SEQ ID NO: 7397 - DNA, 1508 bp, Diabrotica virgifera
  SmartBlast Evalue=1E-170; Info="Pre-mRNA-splicing factor slu7, putative n=1 Tax=Pediculus humanus corporis RepID=E0VEC4_PEDHC"
aaatggaaatgaaaattgtaaatattgtaataaaataaaataacatcgtagttatttgttatttttcataatggctaccaatcaccaaaaccttccaatttcgagtatccttaaatcaaaaagtgaggttgatgatgaaccaaagaagaaatcaagagaagattggcgtaaagccaaggagcttgaagaagccagaaaagctggtacagctccggctgcagtcgatgaagaaggaaaagatatcaacccccacattccacagtacatttcaatgcaccttggtattatggcacatctggacctacccttaaacatcaaaggccccaagaagagaaacagaaggagtactcaaacatcgacgaatggtacaagcggggtgttgacacttcaaaaatagttactaaatatcgtaaaggtgcatgtgaaaattgtggagctatgactcataaaaagaaagattgtatggaaagacctcgcaaagttggagccaaattttccggggcaaatattgcaccagatgaatttgcccagaaaaacttagcgttgagctttgatggaaaaagagatcgatggagtggatatgacccatctgagcacaaagcagtaatagaagagttccagaaagttgaggaagctaaaagacaactgaaggctgataagttaaatgcaaacgaatcttctgacgatgaagaaaaagatgaggacaaatatgtagatgaagttgatatgcctggtactaaagtagacagcaaacagagaattactgtaagaaatttgaggataagagaagacaccgccaaatacttgaggaatcttgatttaggttctgcttattatgatcccaagacaagatctatgagggaaaaccctaatcctgaaaaagatgctacgtacagtggagagaatttcgttcgttttactggcgataccaccaatcatgcgaaggctcagttatttgcttgggaagcgtatgaaaagggtgtggatgttcatcttttagccgaaccaacaaaactagaactgctcaaaaaagaatatgagaaaaagaaggaacaggtcaaatcaacaattcaaggcagtgtgctcgataagtatggaggacaggaacatttagaagcaccaccaaaaagcttgttgttggctcaatcagaagtttatgtggaatattcgagatctggtagggttattactggggcggaaaaagaagttattagatccaaatatgaagaagatgtgtacataaacaaccacacatcagtgtggggatcgtattggagaggaggacaatggggatacaaatgttgtcactctttcataaagaattcctattgcctaggcgaggcaggaaaaacggttaacgctcctgtaacccaagatattccaaaagatcaagacgttggtgaagcaggcagtacaaaggaagctgggatatcagacggtgaaagcgaagatagtagttccagtaattcatcagaaggcgagaaactgaagaagaaacagagaagatt

SEQ ID NO: 7398 - DNA, 1516 bp, Diabrotica virgifera
  SmartBlast Evalue=6E-96; Info=Ubiquinol-cytochrome c reductase complex core protein n=1 Tax=Culex quinquefasciatus RepID= B0WXM0_CULQU
gtcacttctgtcagattatgctgtcaggtaataaattctgaaaattttgggaagaaagatatttgttttataagttttcacacaccttcattgagaagtatggcttctactcttacaagaactccaatcttgcgagcaatttccgcaagaagctattctcaagccctgccagtatcaggtaatccaagtgctgaactcagaactagtactcttcccaacaaactagttgttgcagcagtagataatgacgccagtcttacaagagtttcaattgtattcagagctggaagccgtaatgaaaaagccgataatttaggtgccactcatattgtacgaacagcagcaggcttgtccactaaaaatgcatcccagtttgccataatccgaaacattcaacaagttggtgcaaatcttacagccacatctgatagagaaaccatctcctataccttagaaggaacaagaagtgccgttgaaaaggctctaccatatttagcagaagtagctacccaccaagaatttagaccttgggaagtgtcagagctctccaacagattaattttggatattttaaccagacctttacagttaagagccatcgatttgcttcacaatgctgcctaccgtagcaaaggtttaggtaactcactcttcattccaaaatcccaagtaggtaaaatttcatcagaaacgttacaacattacgtagccagcaactttgtagctggccgtgctgcagttgttggtacaggtgtaagcgagagtttgttgaatcaattcgctgctagtttgggaattgcaaatggcgaaggcagcaccaatccatctccttacaagggtggtgaactcagatcaaacaaaggtggaccacttgcttttgttgcagtaggaggagaaggagctccattgaagaacaccaaagaagctcttgcgtttgcagttctacagaaagctgtatgtgctggccctcagatcaaatatggcgtacttgataatggagtctacagcaaagctcttggtggctcatcagatgtatctgcgtgcgctgttaatgtgagctattcagacagcggtttgtttggtattttgctcgctgcacctgctggatctgtaggcaaagcagttcaatcagctgttaatgtcttgaaatcaggctccgttacagatgctgatgttcaacgaggcaaaaatcaattgaagacagccatccttcttaacgctgaaagtggagctgacgttgtaagggaacttggaacccaagcagttttggctggtgctccacaaagcgccaatgctttagccgctgccgtagactccgtcagcaccagtgatgtacaaagtgctctaaggaaagcaggaggaaaattaaccttagcggcaattggtaacattaacgatgtaccatatttagatgaattgaaataattttgtaaattttattataatttattgtataatgtaaaagaaacacgtgcatacctattgtaacatctgttaattaaagtattaaaccctt

SEQ ID NO: 7399 - DNA, 1513 bp, Diabrotica virgifera
  SmartBlast Evalue=5E-96; Info=Cytochrome P450 monooxygenase CYP4M6 n=1 Tax=Helicoverpa zea RepID=Q8MTD0_HELZE
attacttcctaggaacaaacttaattctaatttcgttagctggtctaagaacgatgtcagccttaaatctcatgtctgcaggtcttgttacaggttccagcttaaaattgtttatcagtccacaaactgcagttttcagttccaacatggcatatttttgtcctatgcaatttctgcttccagcactaaaaggaatataagcatatggatgtcttccggacatattttcaggtaaaaatctatcagggtcgaattttaaaggattttcccagatctctggattacgatgtaggtcgtaaatcaagacagctactgtacatcctttaggaatagtatatccagttttggtttttatttcttctcctgacaatcgtgaaatactgacggcgcttggatataatcttaagctttctttaatgcatctttctgcgaatttcatttctcccaattcagcgaatgttggtttgtttggatcttcgcatactgcttgtatttcttggtagatttcttcctgagcttcctgttcattagctaagagcattagaatgtggcctaaagctacagcagtggtatcgtggccagccaaaataaaggtatctacttcttccctaatccccagatcatcaatactggctccattatattttgctttaatcatcaagtccaacaaagccaatctctttttggcgaactgggcatcagcacccttctgtaacgtttcatatctttctctaataatattattggaaaatcgtgtagaacttcacaggttttttgtgcttttttaccgacttccgttaagttgaaaaggaatgagccgtgaagccagggtcgaatcatcctgtacatgtaatggtcgccgtagtcgtacactgcttgcttatattcgtcacattttgggtcgtcacgtaaatctttccccaatgaagtttctccaatcgaatacaacgtaaattctgatattggtttaaccacgtcaatgtatggtttgctgcaagatttttttatatcttcaacaagaaggctgacttctttattaaatacttctgcgaattcctgcaaaatgctaaaatgaaaagcaggggtcaaaatcttcctcctcttgtgccattcaactcctttgctagttaaaagtccttgtccaagccaattttgaagaagatcgtagaatacatctttttcaagatgtttagtattatttaataacaactcaatatcctctggatttgataaacttatataagccaaacctgatgcccatcttctaaatattgtaccatataatttaacataggtcctgtccctgacaaaagcttcctctgtagaatctaaatgatattccgttcccactaacggaaatccttcaggaccaggaatagccataacctgtttccaaaactcctcatttttcttctggttaaaatagataagagccaccagtgccacaatagcccccccgaccaaaagccaaaacattttttatgatcccctaaactaaaataatccaaattct

SEQ ID NO: 7400 - DNA, 1515 bp, Diabrotica virgifera
  SmartBlast Evalue=0; Info="Actin, cytoplasmic 2 n=116 Tax= Fungi/Metazoa group RepID=ACTG_HUMAN"
cgctattggttcaagtttagcgcagatacagcgctctcaagcggctcttaacaaggaggggcaaataattatacctgcaaaaacttcgactagacattagaagacattcaaatattgtgatatcagtactgctgtgtttagttttttgaaatatttatttttttaatatactaatcaatcaacatgtgtgaagaagaagttgctgctttagtcgtagacaatggatccggtatgtgcaaagctggttttgccggggatgatgcacccagagctgtattcccttcaattgttggacgtccaagacatcagggtgtgatggtaggaatgggccaaaaagattcctatgttggcgatgaagctcaaagcaaaagaggtatccttacattaaagtaccccatcgagcatggaatagtcacaaactgggatgatatggagaaaatttggcatcatacattctacaatgaactcagagtagccccagaagaacaccccgttctgttgacggaagctcctctcaaccccaaggccaacagggaaaagatgacacaaataatgtttgaaactttcaacaccccagccatgtatgttgccatccaggctgtactctccttgtatgcatctggtcgtactactggtatcgtattggattctggtgatggtgtatcccacactgtcccaatctatgaaggttatgcacttccccatgcaatccttcgtttggacttggctggcagagatttaactgattacctcatgaaaatcttgactgaacgtggctactctttcaccaccacagcagaaagagaaattgttagggatattaaagaaaaactctgctatgtagctttggacttcgaacaagaaatggcaacggctgctagttccagttcccttgaaaagagttacgaacttcctgatggacaagtcatcaccattggtaatgaaagattccgttgtccagaagccctcttccaaccatcctttttgggaatggaagccaatggtatacatgagactacctacaattccatcatgaagtgtgatgttgatatccgtaaagacttatatgccaatactgtactctctggaggtaccaccatgtaccctggtattgctgacagaatgcagaaagaaataacctccttggcacccagcacaatgaaaatcaaaattattgctccaccagaaaggaaatactctgtttggattggtggttcaattttagcttctctttctactttccaacagatgtggatttccaaacaggaatatgatgaatctggaccatccattgttcacaggaagtgcttttaatttttatctatgtttaagtatattctttatatatcttgtttttatatcccccatcttggggcaagaactgcctatgttatatgagtgatcttgtgatttattacacgttcagcataagacttaatgagctttaattttaagaagtgtaagttgaatactctgtttcatatttattttacctttgtaatataataaataaaa

SEQ ID NO: 7401 - DNA, 1499 bp, Diabrotica virgifera
ctttggtattgatgaggctcagttggtgatagttctttgactatactagtgaacatgtcctgttagtgcagttttggaattgtgtcagtacattgatgtgcttaattaaatttacttatgatagtaatgttatttaattgtttaattattcagtatgagttgttttgtgggtgaactaataagtggacagtgtcataaacaacactacaagaaagaagtgtctgaaaattttatcagtgtaagtgacttgcaaactgaagaacaatgtttgctcaaattaagaatttcaaatgaaattaccaatatctgccattaccacagagataaatatttagacaagtacaaccacatctttggaaaaaaatgttgtgacccatttagtcgtcataaaaggccaattaaaaatggtttgcgtaaaatactaattgaacacctttcgaagagtaaaaatgtggacgttagactaatttctggacaggctctatgtccaacctgtgcaacaaatatatttgtagaaaaattgcctgaaaatgagacaaaaaatgttgaaaatgatcctgaatttcttcctggcccttttgaattagtacatgagaatccgttgcatcaagtggaatccatttgtgaaactttggaattgtctcctttatgtaaaataacaaagcttaacaaagaacaatgacggtcagatttgcaaagaaaaactgacaaaattacgagcacggtcaagcgaaagttggaagaatcattctataatgacttagaaactcagaatttaaatgctgtagaaacttcaattagtgagtatgacatactcattactaaactgaaagaaaaatttaaagtgtctaataaagatgataaaattaagataattagtctattaccaagctcatggtcaaagaaaaaatagttgaggactttggtgcatctgaagacatggtaaagttaactaggcagctagtaaaggatcaaggtgtcttaccacatctttcaaaaagacagggcaacaaaataagtgaagctatttttcactgtgttaaagagttttacgaagatgacgaaaatagtcgcttatgccctggtaaaaaggaataatatgtttcatctgtgattgacaatgtcaaggtgcacaaacagaaaaggttaattcttctctcactaaatgaactctacagcatatataaacagaaatatccagatcacaaaattggtcgctctatgttttgcgctctacgacctaagtggtaattcaagaattttacctgtggtactattattactgtccattctttttgaaaagaagaaataattaaaagtttattggtaacttagtgatttcagcacaatttaactttgtcaattaagacaattctaagcccacagttggcaatttagcattgcacgagtgtattaaaaagacagcgttcccactggaattcacaactctataactccaaactcagttaagtctcagtcataactttttttgtgagata

SEQ ID NO: 7402 - DNA, 1513 bp, Diabrotica virgifera
  SmartBlast Evalue=0; Info=Alpha-amylase n=1 Tax=Diabrotica virgifera virgifera RepID=Q9U406_DIAVI
tgatagggtaggcacgagtgagtggccaacatgaaaattgtaatattgttttgcgccttgagcgttactgtatccagtgtaattggacaaaaagataatcacttcgctcaaggaagaaacaccattgtacacctgtttgaatggcactgggatgctattgctagtgaatgcgagaacttcttgggacctaaaggatttgctggtgttcaggtatctccaccaaatgaaaattccgtaataggagacagaccatggtgggaaagataccaaccagtaagttaccaactcactacccgatctggagatgaaagtgcatttgctaatatggtacaacgttgtaacaatgtgggagtcagaatatacgtcgatgttgtcttcaaccacatgtcagcgacatctggtggtggtactgctgggggttcatgtgacgttggatctctatcatacccatcagtacctttcggatcaaatgactttcattctaaatgtgatgtcaacaattatcaagatgcgaacaatattaggaattgttggcttagtggattaccagatttggaccagagccatgattatgtccgtcaaaaaattgttgaatacctgaaccatttggtagatttgggagtagcaggatttagagtggatgctgccaaacatatgtggccagctgatctagaagctatttatggaagcgttaaggatctgacaggaagcggtttgagtggaagacctttcatatatcaagaagttattgatttaggaggagaggccgtaaagaaaacagaatacaatagctttggaacagtactggaattcaaatacggtaccgaattgggtaacgccttccaaggccacaacgctctccactggttggaaaactggggtccagcatggggattattagcaggtactgatgcagttgcctttattgacaaccacgataaccaaagagatggatcgtcagctattcttacgtataagaaccccaaaccttataagatggcaatagctttcatgttggctcatccatatggtactactaggttaatgtcaagttatgcttttgacagtcatgatcaaggtccacctggtcaacaacctggtttcaacgctgatggcacatgcacaaatggttgggtctgcgaacacagatggcgtgaaatcttaatatggtcggtttcagaaacgctgtagctggcacagatgtcactaactggtggagtgacggcaaccaacaaatcgcttttggaagaggaaacaaaggctttatcgctttcactttacaaggagacatcaatcaaagtattcaaacctcattaccggctggaacttactgtgatgttatttctggtagtttagaaaatggatcttgtacaggaaaaactgtaaatgttgatggaagtggtaaggcggctatttctttgtccacgaatgaagatgatggtgttgtggctattcatgtcaacgcaaaattgtagagtgatattttttttaaatatatttttaggaataaaaa

SEQ ID NO: 7403 - DNA, 1515 bp, Diabrotica virgifera
  SmartBlast Evalue=1E-180; Info=Phenylalanyl-tRNA synthetase beta chain n=1 Tax=Aedes aegypti RepID=Q17C95_AEDAE
tagttgttggaacgtggttggaacagacatatgtataggaatataggaagatataataactatatctttatattataaaagttacatagattagtataatatttcatcaccttgaataaaaatctttctatttataatgccgacaattggagttaatagggatttattatttaaatccttagggaaaacttacactgatgatgaattccaggtcctttgttttgaattcggtttggaactagatgaagtgacaacagaaaagcagatgataacaaaagaacaaggagaagatcgacaggttacagttaatgcttctgaagatgtaatatataggatcgatatcccggctaatcgttatgatctactttgtttagaaggattggttcaaggaattctagtatttcaaggaaaagtttctcctcctaaattccgtgctactaaaccagcagagggatcattagaaaaactaataataaagcccgatactgcaaaaatacgaccctatgccgtgtcagctatacttagaaacattacatttgataaagacagatataacagtttcatagaattgcaagataagttgcatcataacatttgccgaaaacgttcattggttgctattggtacacatgattacgatactattaaggggccttttatttatgatgctaagccaccaaaagatattcggtttgtacctcttaatcaagaaaaagaattctctgctgaagaattaatgacattgtattcgacccatgctcaattaaaacagtacctaccaataataaaggatagtccagtataccctgtaattacagacagtaacggtgttgttttgtctctaccaccaattattaacggaaatcattcaaaaattacattggacacaaaaaacgtttttattgagtgtacagccactgatttgacaaaggcaaaagtggttcttgataccatagtgtgtatgtttagccagtattgttctgattcacacaatattgagtattgtgaagttattaaccctgacggtacatcagcattgtatccagatctagaatacaggagtgaaaatgtttcggtcaaaaaatccaataaaaaaatcggaataaatgaatctccggagaatattgttcagttattgtctaagatgtgtctcacaactgagttaacaaataactcagatattgtaaaagttaccatcccacctacaagacatgatgtactacacgcatgtgatatctatgaagacattgctattgcttatggttacaataatattaaaagaacctttcctaaaacaaataccgttggccagcaattttcaataaataaattaacagatttattaagatatcctatagctgaagctggatttactgaagctttaacttttaccttgtgttcaagagaggacatatctacaaaattaggtatagcgtctatagataatgtaccagccgtgcacatttctaatccgaaaacattggagtttcaagtttgtcgtacaacgcttttacc

SEQ ID NO: 7404 - DNA, 1511 bp, Diabrotica virgifera
  SmartBlast Evalue=9E-34; Info=Putative transposase yabusame-1 n= 2 Tax=Bombyx mori RepID=Q75QC0_BOMMO
tttttatcccatagcggcaaggttttgattttatatattgtctaaaaggacactttcctctaaaactcactaactgttcgtcaacggttatatgttcgtatggttcaaaggctttgtcacagttagagacgaacatgtcacaaattactcgtatcgccgctaacttatcctgttccttccgctccaccctggtcactttgtcatcaaacctcaagaaactcgataattcttcaaatcggttcctagctaatgcggctgtaaaaaatgaccggcgtattgaggtgtctgtagaccatatctctcgtgtcgattctttcccacaccttaaagcaccagctttgataagtgctcctaaaaagctatccagttcattgttggtaagtaccgtccactcttttttgttattcggatgtttttcgttccactcttgataacgcctaacagcttcttcattagtatgaaggcatatgacattcttcatctcttcggtcaaaaataaattgaaatagtctaaaaacgtgttggaatttttactatagtttgttaagcctggatgtacatttataatattttttgttgcctcttggatctcacgaaaggtaggctattccactgcattccagatttggatgtatatgttggaccactaacctcactaatattatcgtccacttcggtaggttctgcatctgattcctcgtcactgttgacttctaaattgtcctcagtttccgaaacattttcctcaaaaacatcttgctcttcgctatctgattcgtcggtaatctcatagtcgaaatgggagtctgatatcccttcttctatatttcggataattttttcatgttcttggtcgcttattgtcattttcattctcttacggtccatttttcaatgtaaactgacgaaaaatgttaaaaataataaaaatattctggtgcctctaaatgcccaatcggggtcacagcgagaccccacttatctaaatctctcttacagaccactgcacctcacgaatgttcgtggtatactaacagaaaacgtaggagacacgtcgacacaaatacctgattgcgcggttgccaaatgtttcaaataaagatattatagccaaaaatgtatgtctggggtcccatagtgaccccgattgggcatttaagggttaaggctgtgagtgataaaaacaaaatgaaaagtatgcgataaaaatatactaatttttttttaattctataatagtatattttttatatgcgtgaactttaaacgacgtcgaatgtacactaatggccccctctcccctgtcgtataccgtcgtaataagcaaagtcccccctccccttttcaacgacgtagtttatggatgttcccatacacgaagatattaaattgccgatcgtcgtagtccgttcctttgcgggatggtccggacaagtgggcgcggacctttagtcctcgtcgcctttcagaatttgagcaatttttttacgcaaatagcatgcagaccaaca

SEQ ID NO: 7405 - DNA, 1513 bp, Diabrotica virgifera
tcggtggtcaaatggctgagcaattaatttttaaaatgagagaagtaatgtggaaatcacataacatgatatcaatttacttagttgtgttatttaggtatgtgatatccacgttgcacctctcattttgaaaattaattgctcagtgatttgacaatcgattttgaaaaactttatatagctggacgggtgaatgacgtttctttcaatttacaaaaaaatatactgggtgttccattaaaaaaagtcaacaacgttttttttcggaggtccgccatttttcttttcgtgtttgaaagcgatataaaggattcagtccattcggataggacttttactaaagtaaaacatttcagcgaaaaccgcatatttgtgtcttgagccgtttggaagttgtaggcggttgaaatgggggaaaatataagtggacacccggtattatgacttcttgttcgataagttagtggtggtgtgctccatttttaaatcttatcttttctcaaaggggtcacaatctgacacaggttttgcggaaatcaaaaacaacttaccgatataaaagtaatcagatattaattcatcattatcatcactttcattctgttcaattataataagctctcactatactactcgtgaagtttatcgaagttcagcaagtatgagagtgtagagaggtacttcatgcgacttcgcttctcctcgggctacttccattctatgtcggtttttgcgaccgagtcaaaggactcgaagttagttcttccccgcgcgaatgtgtccttgaagttgaacgagtgtgtagagatgcacttcggacaactttccctagtatgtacttcgtcgaggaacttcgcgagagtgtagagctcgcttatgattcttatcatggctgtctaaactttcattatctgattctaaatacagaatcgatttcgatatcactaaattgattgtcgtcattatatacataatagtttttctaactccacttgagttagggaacgtttacttgaacttgccatttatttatttatttcaactaaaaaaggataattagttttttataaatattagtaggtattagtaatagtagtagatattatttaattttaaactgtaatcttcttctaatatcactaataaaatcattccttaaaaacatactttctatccaatgactatttaatagaaaaatatatacgtatctagtgtaccttgcggcggctataccttaaatttgtttctgtattatataaaatgtaataaggttaaagctttacaagtcgaaaaacataggagcaaattatatatatcgagacaaaagaaacatctaaaagcattattttgtataacatggatattcatgatactatttaaagacatctaccagctgttgtatttaaagttgacgatcaaacgtaagtttatcttcgtttagtatgattaataaatgttacttatttttttttacttattatagttaacttaagaatctataatcaataaatgt

SEQ ID NO: 7406 - DNA, 1509 bp, Diabrotica virgifera
  SmartBlast Evalue=8E-51; Info="Solute carrier family 2, facilitated glucose transporter member 8 n=1 Tax=Zea mays RepID= B6U615_MAIZE"
gtagacacaattctacgacacatgacatcgtatgatcttagtaaaatgtaaaatcatctctacagacatgtcgccggttgtatttatattcgtaattaaaggataagtgtatgaagagaagaatagaatggctagaagtgtggagataagttctgaaaaggagtacagtgaaaaagatagttttactactgaaagggcgagagtgtggccacaagttctagcgtgtcttatagccagtttgggagcattcacacaaggtatcctcttctcatggacatctccgtttatagtaaaaatagcccaggataaagtaaactataacatatcagaagaagaagctgcccgtttaccaaccatccaacctcttacggtgctgctaacctccttgatattcttcaagctccccgacatcatcggaagaaagaagacactgcttcttatcagcattccgcatatactatcttttataactgcagctgtagctagaagcatatatgtgttttatttgtcaagggttttttcaggtctagctaatggcttcttgtggacagcgttgccgatgtatatcggcgaagttacttgtcccaagatacgaggtctttgtgggacgttaataacaacagctatctttgtagggcaattagctgtgaatgtggtggggagctattgcgatgttgccacaacttcctatatttttatgccagtatcgatattgtttgtcattctgtttgcatttatgccagaaacaccgtattactatctgataaagaaagactatggagctgctagaagatctttaatatttctaacacgaaagaaaaatgtagtcgatgacttgaataatctgaagagtgacgttgatcggcaaatgtcagagacaggaacatggaaagacttggttacaattgaaagcaacaggaacgcgttattttgtgcagtctttctaagagtatctcagtcctacagcggaatatcagtttttattcagtatactcagtatatcttcttaaaagctggagggaatgtatctccccagatggcttctattatctacagtattctttgcgtcgttattactttattagtaacattattcgtagtttctaaattcgggaggaaacctctatactcaaattcctcagccctatgctccataatacttgctgtaatggctgtgtatttttatttagaacaattcgtgccaacatttgacatatcgtctttgagctggctaccaattacatcactagttacctatcaggtttgttcctgtttcggtgtagctataatacctagtattatgctaggagagcttttctcagcaagcgttaagtccaaagctgtagcaacgatgacattcgttaatagtggtgggatattcctagcaaacgctacttttaactttttaagttcagtagggggaagttacgctccttttctattttcgcaatctgtacagctgcaacagctgtagttacaagatttgtggttccagaaacaaaggataag

SEQ ID NO: 7407 - DNA, 1510 bp, Diabrotica virgifera
  SmartBlast Evalue=1E-116; Info=Sorting and assembly machinery component 50-like protein n=1 Tax=Camponotus floridanus RepID= E2A0E1_9HYME
gatttatagttttttggctagaagtccgtcagattttttctaaaatcaaataaaggtagaatttgagggagacatgaaagagatgttttaaatttatctaagtgctatcgcgttaaataaaatggggacggtgcatgctaaagccgatgaaaacttcacagatagccccaattctaacttaaaaagtaaagccatgtttagggagccaccagataaggaacaaattaaagaaatcgacttggaaggcgtaaaggccagagtagacaaaatacatgtagatgggttatcacgaacaaaaaatgacattatagaagattgtattaaggaactatttaaagcaagagattttcaagatgtacttctaaaagcacataaagctcgtgtaaaattggacgaattgggatgctttaaaaatatttctgtatatatagataccagtaaaggatcaaaatctactccagatggtttagaggttacgtttaatgtaaaagaacacaaaagaataacaggtggagttagtacccatgtgggaaacaatgaaggtgtcctacaaattggaatgagagctccaaatatttttggcagaggtgagagagttcaagttgagtacagccatggttccaagaaatccagtaatttcaatttagcatttattaagccttttagaggcacataccgtcccacattaaccacaagtgtcttccagtcccattcagagtggccagcttctggctataaacaacttgaaagaggattaatatttgacttaggattttattcttggtctttattaaagcataatctgcaatgggaaggaaacattcgagatttgagtgttttaactcgaaatgcctcattcgatgttagaaaagaatctggtttaagtttgaagtcatccctcaggcacatcttatcacttgatcttcgagacgatttaatctttcctagtagtggttcattactccagttgacttctgaagttgctggtttaggtggagatgttggtttcctgaagaatgacatattcgttcaaggaaattattctattgctgaggatatagtttttcaagcatgtttcagcacgggttacatgaccagtattagtaacgatttgaaaataagtctttctgatatgtacttcctaggaggtccattatcactaagaggtttccaaaaccgtggagttggaccccactccgatggagatgcgcttggatccaaggcttactgggctggaggtctacatctttttacaccgttgcctttcaggccaggtcgaggaggattgggtgatctttttagaacacacttttttatgaatgctgggaatattggaaacgtagaagtacttaaggatggcaacttagtcgatttaatccagaataacttgagggtctcgtatggagttggaattgcgttaagactgggtaatatggctcgcttagaaataaattactgctttccatatatttacgataaaggagaccaaacccacccaggtgttcagttc

SEQ ID NO: 7408 - DNA, 1511 bp, Diabrotica virgifera
  SmartBlast Evalue=9E-36; Info=Transcription initiation factor TFIID subunit 3 n=1 Tax=Harpegnathos saltator RepID=E2BU54_9HYME
agggagacccatatgtgaccttatatgcggttccggcgttttaggtctatttacgattatatccattaattccgattcagtaaatacagggcgatgttgagttttcctgggtttcttaattctgggtttagggtctttccgtcttcttttttctttcggaataggaggactagggtgatatatgatttccggtgtcctgggagttgtcggcggcgaattgtcatcgaaataagtactaggactatgcctattcatcggaataggttcaattgtgatgtcgctcgataaactgattttattaactatgtccgtgccttcatctataatcatattaggcgtattggcccttttctttcttagactgcttttctttaacattcgatatctttcttaatatattaattttcttttatcggttcattaatagtttttccacctgctgcatcatctgaggtgtcatcggtggtacaggagaatgggttttcagtggaatcggagttatagttgtattaaacttctcagtcttggctttagccgcggctaaagccttgtcgggcgtatccctcatcaatttctgagggggaacaggacttactttgatttcgtttagcctaggaggttggaagaacggtaaaggtaaagaatggggtggtaagtgaggattgtttaaattttgcgagtgagacgcagcagcagcggcggctgccgcagcagctgcagccttctgtttcattttaactacgtctttcatagaagcattcttctttaccatcttctcctcaaataaaggtttaaataattccttattgatctttttctcgcgttttttccattttctttttcatagcaggactttcgttaaaacatgggaccaggccccatcgctgaaattgcaggcgcaggcgctggagctggaggaggtggaggcggtggctcaactggcggcggcgggagaggagctttagcttcaggaagtttcccttctctagccggcgacagaaaaccggacgtcgtcatcatcacgctgctgatttctcgcgtagggcgacctccttcgtcttcgcgctttggacgcttgaactccggagaaatgacgtctgcgggtttcttaaactgagcattgtttgagcttgcgccatcatccaggctctcttctttgatcaaagtctcttcttccgtttttggttcgctttcttctaggagaggaaacataggcggcatgtgttcatgaatatgaactggtcttgtaatgacttcttgacttcctggttttaagaaattcaaattgtcctctttgtctattggaaactttggaacggggtttgctggaggacaaaaattaacgtacgtcacatattcatctagatctcccagatttatgccaagttcctgaaaggcgagccccaagtgatccaaattagcttcagtgttaccaaactcgtttgtatattcattagtaactttcgtaatttgcttaaggtattggaccaaaagatcagtaagaacttcca

SEQ ID NO: 7409 - DNA, 1510 bp, Diabrotica virgifera
  SmartBlast Evalue=5E-10; Info=Reverse transcriptase n=1 Tax= Schistosoma japonicum RepID=C7C210_SCHJA
tacctgaacagccaaataagtgcaccgaattacggaccgtaaattaaggtaggtacagtcggaaaaatgaaagaacacccatgaacgatcacatcaatcacccatcctgcacctgctgtctctttctataaataacaaacgtttgttatagaaaaaaaaaacagcaaatacaaaacaagtgattgatgcgatcgcccatgggcactccctcacctttccgactgtaattaggatgaatgagggtccgattctttaacgagattgtaatgagtaagtaaatatttaataacaaaatattattttagatttagtttatattgaatcaatcatgcaaatcatctgcataaagctgcggtagattttgcggactatttaatagacaattatgttggtgaaaaattctttatttccaccaacactttgggctgaagcagctgtaattacagaaaattttacaaatgcatgcgagtcctttcactctcgatttaattcaaatttctattcgatgcacccttcattgtatttatttgtaaacgttttgaacaattttcaaacagatacttacattcgtattcaaagcgttaaggagcctgttaaatgtaagaacaaaattgttaggcgaagattaaacatgttaacttctaaaatgtcggaatataataacggtttgttgagacgaatagattttgaaaaatttgcatcatgttttcataaagtataaatattaaatgtaaatactaatgttactaaggaccagcagtcagatgttgtttataaagtaaattgtaaagactgcaattcgacatacattgggcaaacacatcaatatatacatagaaggatggttgcacacaaacatagtgtacaaaccaacaaagtaaacactacagcattagccaagcattccatagacaataaccatacttttgattttgaaaatgtacaaattttagaaaagaacaaaactacaacaaaagatgtatattggagatgattcatgtaagaccaaaattgcataaataataaaactgacatcaaggatctctccaatgtatatcataatttaataaattgatttaatttttataaatgtacaatttggcaaatattttaaatacggtccttaatggacgtcaattttgaattctgccatatggtttcaagagtcaagctcgcattccacaacaaaacgccaagccaacaagtgcaatgtaaattttagtcttttgttttgttttatgtaatgtttataattattcattaaagtgcttattgaaaatggcagttagccgaaacgtttaagccataacaaagtgttttatttttatcagaccgaaaacccaggaattaaaaagtttctatttaataatttacggtcaggaaataacaaaactttaaatgtaaatatgtgtaacgcttttatgtttaaaatattgtttcttaaataggcaataaatatctacgattattctgccgtcctaagcaagaaggcagtatctcctatctacag

SEQ ID NO: 7410 - DNA, 1512 bp, Diabrotica virgifera
  SmartBlast Evalue=1E-103; Info=Conserved oligomeric Golgi complex subunit 8 n=2 Tax=Formicidae RepID=E2BLS9_9HYME
gaacaaacggaacaagatcgtctgaaaaacacatacataacctcgtaaaagcgtcttttggagtttaacagagaatgcctgctgttctttgtacttgttactagtttctgtaaacatttcgctatgagaagcatggacgcttggagagtatctacaacttcgtctataagcgctatcgggggacatagtcgtagctgattcaaagctgccagaatattgttaagatattccgccaacgggtagaattccagtaaactttctggtggtctaactgtatcgtctttgttgaacttccacgacttggatggattatttttatcaattagagtaaatttctcgatattcttcataaaatttctatctgccttcgccacattattaacgaatcgtttttggatgtgttttgtgaatatcgggataagaagatgcctgaagtcacatcctactttactaaacgaatgtccaaaatacatgcactgatccaaaatcatctcaaacgaagttacgttgtccaaacaactatctaatgtttttacaaatatcccgatctgatactggacccaacctttgaatataagaggctgattgattgttttatcagatgccacagtcaatgggcttcgttcatcgtcattaaaaattgcagagtactgtgtcaaaatgttaaataaattgattctggtcacttctatagttttcgtcaagtgaactgtggggtcttctttgcctagtgagtttaactgttgctccaaccaatatgttcttgtttgtaggaattttaatcggagctctggctcagaaaatatatccatccttcttaaatgtccaacaatttgtagacacttcggaagtgaaatatcttgcctaagttgtgacagtaactgatgcagcataagaatccaggccttgttcacatcatcattaatattcttgaatattgcaacatcagaatgcttaaaggacaacttccttacataattgaacagttctaaagcatcttcatacaggccatccctaataaacgaagtcatcaactggggtatttctagtatttctaatatttgagcgctttttgctaaagttatggaatctatccttcgtagggcgtttattttgctggatacctccccaaatgtttcgcatttttcctcgaatactggaacacctccaagaagatcattaactttgtcttctataacactaaattttgtaaataaatctttggaacacaatgcagtttctataaatgttttgtagtttgtaattgctaattcctgaatttgttcttgtaaaaccaacgcctcttgcttcaatttgtcgggttcggtatttaaatctttaattttgtaagtgcctagtttggttaaataatcctgaattggtggattataaaccaattcatctgttggctcgttaggaaaaagggtagaaagaagagaatttctcgacatgttacttaaacaaactaaaactttaaatttgaaagaacttattaacactttttagcaaata

SEQ ID NO: 7411 - DNA, 1505 bp, Diabrotica virgifera
  SmartBlast Evalue=0; Info=Protein henna n=1 Tax=Harpegnathos saltator RepID=E2C764_9HYME
aataatactatatatctaattagtcatcatatcagttttgataaattacaattttcttagagaatccgtgaggatacacatttcggaggcaatattgttaaccagtctttgaacctgaagtttggaatccagaacttctatgctttgtgtgtaagcgttgtaacgcactccgaaagcccttggaatggttgctgcgtaacgtatcatcttttctttggcatcttcaaaactttctgctacgtagtacaccggctggtactcagtgattggatacttttgttccgcagtcttaactggctcgaatggtctgatttcagatttgagttccaaagcgtattgaagttcaccaaaactggacaaaagacctgctccataggctttgagttctccattttctctgcagaggccgaattcaacagtgaaccagaaacatgttgcgagtttttcaatgtagtcatcgggggctcctagggaggctagtccaatttcttgtgaaaactgtgcaaattcaggatcagcaaaaagtggtacgtgtcctagcaactcatgacaaacatctggttctggtgtgtagtaaggtttactgggtgtctaatatattgggtggagtggaagactctaaatgctaatccagctaagaaatctctggaagaaagcaggcctgctacaggtctaagcgtaaaaccagtacaatctttaaggaaatttgagatatcttctaattgtggaatgttgtctgctctgtatccacagttttctactagtagaggaaaaacatgattatgttctttgcaagcatgtgtgggatataaagttgtgagttgcctaaatactttgccccatgtttcagtttcttctttggtgtaatctacgtgaggaagtttttggccatgtttgtaattgaaggctatgtcggcaaagtatttccggcgtgccctgtagacgggatcagtgaaaccaggatgatcagaatctagctcagcaccataggataaaatctggttagcaaacctgtcaagatctcttatacgccttggaaaccatggtacggtatctttgttatctctgtagtctctggaaatgatctgaaagtactcgctaatctctttcatatcggcaattgcagctccaagattaccggttggagcacattctaccataaattcgtagttgtcgggggttttcgacgatggtctagattcaatgtgtaatagattgacttcatgtttcttgaagattgacaagaatttggcaagaactcctacttcttctgctggaggtgcgaagacgatgcaggtgctgtgcgctgaatccttaccgatcctgatgtagtttccaccgggcattagtttgggtatatcaggtggactgcccatcggcatatcaacagttttcttctcattattttttataatgttagtaggttgagacattggccccatcatcttggaaaatgtcttataaacttgaaatattcttaagaacttctcttcagtgagcactct

SEQ ID NO: 7412 - DNA, 1507 bp, Diabrotica virgifera
gccgcggacattgtgctattttttttcgaatcctgaaaaaaaccaataaatatctttgaaaaatctaaacgcagaatgaaagactatattattaccgagggctaaaagtcccctagaataaataaaaagtttattttgaatgagatagtgtaaattaaatatcacactaaattttcacttagtttttcacccctgtaacttattaaaataaacattatagaagttctcaggggctttcggccctcgccaataacgtaatctttcattctgcatttaaacttttcaaaaatatttattaatcttctcaggattcgaaaaaaattaatccccatttgaatagcattgcagccgaaaatacgtacccatcctcttaaacgaaaaatttctgatcctggtgagattcgaactcacgaccattcggacctttcgatccaaaggtaggtgctctcaccactgagccactgaggggtgaatatatatttttttaattattattattgtttaaaattaaaggtaaaaatatattgtttaaaaaattattctatctacatccatctacactctatcaaagagttcccttattttcattagaagaccaactctccatggctacaaattgttaccattggcaatacacacatattttttactgtaaaatactctttaaggaataatatctacatttaaaatagtagaagtaaagcattattggcctttagcaaacaaaatattcagctttatggcgaggaatataattaaagcatataaaaacgacctctagacatatatgacatattagtaattaaaattgatatactcaattgacttattttgaagacaacttaacatgtgctcttgagcacttaatgatgtaagtgtaaacaagtattgttatgctatctttgaatattaatattcataatttaatcaactgataaacttttgaagggtgtgttgttaccgttatatagtattttgattcaaaacaatatgaagtgacttttaaatcttatcaatactttgaaaattaaacatagaccttgagcccaccacttaaaaaaatattacctgccacatgaggcttttttattcagttgttaatgtcgaatcggataacttttctatttcgaattttcagaaaggaggcttttcgtaaatatagaggtttctaaactttggtgcgttcgacaagtagagcaggtgcgtaataggtagttatgactctctggtgcgctccccatagggcacgcatcatagagagtcgtaaaatttataccctacagctgatgtttgctggattttaaaaaaatattttgataattaactggtaatattgtccgacaaatcttcaaggttactccagttgccggacgtaccaaaccttagaaacctgtagaaaagtctcatgagaacgggtcaatccatgccaaatggtcaatataaattaagttggttgcttgactatttgtaatatttttctacctttcaagcttcagtctacagagac

SEQ ID NO: 7413 - DNA, 1504 bp, Diabrotica virgifera
  SmartBlast Evalue=1E-109; Info=Solute carrier family 25 member 44 n=2 Tax=Formicidae RepID=E2A9R9_9HYME
agttgcacgcgaaaaaaactaatgtggtacttagtgactcattatcaacacaaaaagaagaattcaatgcattttgagtataaatcaaactttttaacactacactttttagttttttaactaaatcatacgataatagatgaaaacaatattgaaacaataaaatttttatacgtaaatattttatacgcgtgtttaaatttttattgtttttacaatcatttttgactcctccattaataatgtaagcgtacatttattccaatcttgtgccttattttatccctttatatttataaaatctctaaggggttgcctccaacaataaaacataatttacgattagatcaccacttaacaaattgtttatattcttcgtttactgatattctttttatagtttcgtaaccaattattatactaaactaaacgtagctgactggatgagtcttgcacttaatcccttggtaaacatgtgaactccttcttctacccacaggtctctaaatgcagtgcgcatagatcctattctttgtacttgcaatctggccctaactacatctaaaggatttgttaaaattgttgtcgtgaatccgcctaaagttcctgatatactttgtagcaagaggtgagagaaccaacttggcatcaaaatgtataattggtcttggtatatatgataaaatccccaccataacgccgaattcggaacataggccgataaacttgcaaaatagcctctgtaaaaaccggcgatgccatccattctgaaaatgtgcttcgctacatcaatggttatcgaaaatttgctttgattcggctttgtcttcatccctaagtgattaaagtcctgttctcctcccctactgttgacacccatcatcataaggtgttgactaaggacgtcaaatggaactattatcgtttgacctactaatgaagcgcatcctccggcaacaagtgcccttaaactagaatgaacatttttttggtgtaatatatgccgcacgccttcgtaggttgagatgtagaaaacgccacttactatttgtactgaagaaacccagaatcccctatagagacccccaaatccttcatatttatatatttttccatatgcatcgaacatgcctgtgtataagtcattgtgcttttgaatttgtaatctagttttaatcaatgtcaatggataaagtgcacatcggacactgaatgaacttaacatggacagaggaaaaaacttggttttgtccatcatatcccattctatggtcctaataattttattattgtcactagcatcgtcggatcctaagtaaaattccattttgctatatcataaattgtatattaccgcaatattaaaacatctgtattaagtgacatgatttgttgcatctttttgtggtgatgcatgatgttttagatgagagacatcgttttttcttaagaaaaccacctgcaacttcgactttggctttcaaatgttgagacttcgttcttc

SEQ ID NO: 7414 - DNA, 1503 bp, Diabrotica virgifera
  SmartBlast Evalue=1E-173; Info=Atlastin n=1 Tax=Aedes aegypti RepID=Q17GF2_AEDAE
catcatattacaaagattcgctagtgaataaataccaataaagccaaatattccggacgcaatgtagaacatcacagccagcgcaaaaaatacggcaggagttcttgcagacttaaaatattcttgctttcattgtgagctttgaattggacaaatgtgtcttctatatccttatccaattgtgtcttatacacagcactgaattcgtcacctcccattttctttttactattgaactggtgtattgctttttctttcactctacgatgttcactttcgattaattcggtattgaggtagggtttggtgcctccgcaaacttcttccatcatattgacgtaagcgtcttttgcgtcggcgacagctgccagattgtttgcttcggcagtagccacaagcatagatttgggttcaggcaattcgttgccttcatagatttgcatatacgatttacaatactgaacaaaatctctgactttcactttgtcgccattaatttttttaagtactaaattttctggcgctagtaacatagggactaagattttgagattatctttaaattctccgtcgatttctgcaagtcgaccatcaaaagttgggcttgttgcaacttttattcctggatgaggcattagaaagcaagctatctcagtaaaacaagaactgatgtgtcttcttagggattgtaactcgctgtgttgatgttcgttaacttctaatcgtttctgtaatatttgctggccgccaacagcaccatatggagcttcgtaagggaaacgccaatctctgactaaaaactgaagtcgctggaagggagttgtgcccgagtctgctaatgccagtcttccatattcagtaaaaagctgtagatgctgtaaatcatcttcttgtatattgcttgataaattgtaaatttgtaccgaacttaacatagtacttagagcgaaaatggtcgcacattcttttactgtgcttttactatcccatgttccttgtgtatccagcaatattactgctatcttttcacctgtactaagttctgtggtataaacttctgaccacataaggatccctgtagtatccctctctgatccacctttccacgaaaatccttctaaaggagcctcttctgcgcctacccattctgacgtattttgtttcaagacgtacttagcattcatatatctaaggaaaaagtccaataaaaacgatttgccatgacggaaagctccagcaacagataccacaacaacaaatcgatctttcagctcttctttcattaaaactttcttgagagcctcttcatctaatttgaatgaatgatcttcatctgcaactacaataggaactgcatgtggtctggacatggtatcctcatattcgaattcatcttctgttgagtgctgtttttcttgaatcagtttccgatttcttatttgagacatggtgtaattattcttattacgatttacaattgaccccttcaaagttgaaacaacc

SEQ ID NO: 7415 - DNA, 1509 bp, Diabrotica virgifera
  SmartBlast Evalue=1E-158; Info=Juvenile hormone epoxide hydrolase-like protein 5 n=1 Tax=Tribolium castaneum RepID= D0W015_TRICA
gtaaactgtaattcgctcgctaattcagaaaatcagtcactctcagtattctcgcttgtttgtttgttgtgtgtgagaagtgagcgaagaaacatggggtgttgcgctaaagttggggctcttgtggcagtccttttagctattttaattgtatattgttcacaatcgttgtttgaaactccagaaagaccagatttgggcgaaaaatggtggaaagtggtaaagccggcaaaagtagatactagtgtcaagccgttcaaaattcaaatttcagatgaaattttaaaagacttgaaagacagactggatcgtactcttccattccaaccaccactagatggcgtgaaacaacattatggaatgaacactaatcttctgaaaactatagtggactattggaagaacaaatacgattggagacaacgggagaagtttttcaaccagtatccacagttcactaccaatatccaaggacttaacatccatttccttcatgtcaaacctgctgagaccaaaggactgaaggttttcccgatgctgatgttgcacggatggccaggatcgattagagagttctatgaaattatcccaattttgaccaaaccgcagaagggaagagattttgtatttgaattgattattccaagtttaccaggttatggattttctgaagctgccgaagtaactggactcaatccagcccaaatatccgtcattatgaagaacctgatggctcgattgggattccagaagtactaccttcagggaggtgattggggttccgcaatagtagccaacttagcatcattattcccagaaaaagtgctgggagtccattccaatatgtgtatggtcaatagtatgctttctaatctaaaattagcattgggtagttttatgccatccttgattgttgatgctgacaagcaacatctcctttatcccagaatgaaacattttggattccttatattggaaagtggttatatgcatcttcagggtagtaaaccagataccgttggtgtcgctctacgtgatagccctgtaggtcttgcagcttacatcatagagaagttcaccacatggacaaatccagaatggaaagacttagaagacggaggattgacaaagaaatttactttggaaaagttgttggacaacgttatggtttactgggttaccagatctatcaccacctccatgagattgtatgcagaatcctttgattctgctaacttggccttgaaggtcgatagacttcccatcgatgtccccagcgcatgctctcaatttgaatacgagctgatgtatttaccagaatcaatcctaaaggaaaggtatcgcaacttattgttagtaagctcgcatccaaccggtggccatttcgcggcttttgaagttccagatcttcttgccaaagatacgtacgattttgtcaaaagggttcaagatttcgaaaagcaaaaacccaaaaagtaatgttttgtatatatttttgttatgaataaa

SEQ ID NO: 7416 - DNA, 1502 bp, Diabrotica virgifera
  SmartBlast Evalue=7E-61; Info=BIR-containing ubiquitin- conjugating enzyme n=3 Tax=melanogaster subgroup RepID=Q9VH01_ DROME
tcgtctgttacccctaaagtcaacctgaggagatataacgcttttttcatatctttgagtagtacttcagcgtatcccggtagcctcaggaacagtccgaaagcagttaacgaatgaggtggcacatgagagattataactgaagatttagaaggcgagttggtcccgatagtatcttcccaaatttcttcacacacatcatcagattcatctacttttatccattccgaatcggaagaatccggtggggattttctaaaatagccgacctaattgcttctggataaacggtaggaagatgttgagcaagcaacgcgaggccgcccatcgaactaaacacttgtaaggcactacaaattggtggttgttggaatacagaagaattcgtttcgctactagatttatcatcattatttttacattggtagatcttaagatgtacataaggccaatctgcggtatttccattagactctatcagtcttaaaagttgtcccaggcttaccgtaagcggcagtggttggtcagaaaatgactcgcattttatgagccttccctcgattacgtcagttgcactggttgagttcgaagcataccttttcttttttgaaagcggcgtcgtcgatgtggcttgattcttcgcatctttggcacgtttatctttggcggtaacacctgcagccatgctcatctcctgctcatcgggagcaaaccaagacgagaagatatccttccgcgtagggaaagttattcttcttgtgaaccaacaaatctgatttgtacgatattttgaaaaatatgtgctgctccaagatttccagtagtgttgtattggtgctcaagcacaacatggcgcggttgtaggtttgtttgaatgccgggtgagcgggtatgtagctctgggttaattttgaacttttgtaaagggtttcgtctgcttctatgcttactggtatcttttcattttcaagcagtagttgcaagattaacctgcgcatgaatccagatattccattaggctgcatgtagataacatcgcaaagtaccttcgataacctgccctgattaacagcgtgacacaaacagcatttagaaaggaatttcacgcaaacttcttccaaatgaacgtgagcttcggtttgcaaactggatatcttggcagtcggcgctttacacaaccattttaacaaaggtagccaaaatgacgaaccatcctccgaccccaaccagtctctcatgattttctcatcgctaacatcagtgaagaattgcagaatgcttgatacattatctagcttcgccataggtacagttggttcatcttcactatgacaaaactctaatattgcgctgttgagtagcttgggcaatcccgagtccagtagctgttgaatagaagtcggggatctgctaactagtgctattgtttctaattcttccctacttagattcaaattagatagttcgcctatcaccaagtgaccgtaccattctgaacttgc

SEQ ID NO: 7417 - DNA, 1510 bp, Diabrotica virgifera
ctactattacgacatcgatattcttagagaataaggctatacataggctataaacatatttaaaaaatcactaaagtcggacagcgggtttgggagattcgagacatcaagggtgacccatttttgaggtgtcccggttttttttggccaggagtgtataaagtttttattttttaaacaatatatttatttaacagcgattaaaatttacattctctacgctcttttgctaacttaagaactgtttatttcagtttcaatactcgtcgtgaattttctcaacgggaataaatatttttaattttagttttagtcaactgacaactctttttgcgtcttctgtttctatctatgcagtggttatataatagggtttatgtggatttctaatttctgatgatgcttgatacttcgtttagatgctgatcaatacaggatacgagatttactagattttctgacacacacccatagtgaaagcacacaattccattaatatcgaaaaaaaaaaatagggaacttgcatacaattttgaattcgaaggaagaatgctataaaatcccaacacaacataatttaaaatatatgtatatcggcgaaaaaaaaagttgtttttgtctttcgtttggtccctaaaaacgattaaaattgtcctgaagctatttctttgtggcatttatgtaatttactatattatggcttatttcccagttagaatagtaaacgattaaaatcgagagaaaattcaaattatagcagcattggtcgtgacgtcataaagttaaaaatgttcaagttcggcgccattaattatttattacatttgatattcgtttacttgttgtagtcattttatggtgtatctatagtgttatagtctttagatagttgctgtgaactatatatttcatatatgagtgtttttgttaagacaatttttttaaaatcacagaagagggtttttctaaatgaacataaatatattattatgattagtttattttattttcacatacatgaagaccgtgagaataaactaaaatgtctttaatatcctttcaacatgcatgtaatcactttattaaacgccgtttattatcgactggtaatctgataattttattgggggttttaatggttgtactttaacacactagtactaaacaacacttacaacatagtatttacttttattttccatagaaaacacacacacacacaatagggaacatgcacatttttttattacataataatgttgttttgtataaaaatgagatttccaaaatttcacgcttcaaaaactcataataacttagaagtacaaatttaaagtcttcggtatcttaaaataggtcaaacggcccgtggcgtcactcagtttaactatatggttccgtttatggttataattaggtatattcttcttcttctttagtttattggcctccacctattttggtatacctcgtcgcggaataaaggaaaaatatttatattctattaaca

SEQ ID NO: 7418 - DNA, 1503 bp, Diabrotica virgifera
cccgcctgcaaaaaatagcacaggtgccccccccctctctccacacacacacatacatacagatactcgtacaacccccgcctcggggacagtatgtgtgttctaatggaacagtgagagtgaaacccacatgtccgaagatcaaaccggtcacactgcgtaacctggagtggtacctatctgaccgcccataacctggagtggtatctatctgacccccaagatataacaccatccctccccatcgcagcatgtaacgaatgaggatgctttgttgtgaacgttaccttaggtgcccagggtgttacttcatgttgtcttggatgccctacctgattttaggggtagctggaagagcatttctccctattaatgactcgattatggacttttgtcctaaaaagtgtgttccacgcagcgagagcgaggcaccgacttaagtcggtgtccccctatccgcaaatatccccggtaaatatagttcggttacagttttattgggcccatcatctgacaaaagaacttcactttaacttttttaagaaattggctaagagaactaagattgtttttttttgtcatttcttctttttcggcttttcttgttcgacttgtgccccaggccccagataattgttttctgaatccatttttactgaactaaataaaaataataactttaaaacctcaagattatgcttccgaagtaatgtaaaacagtaatttaataatagtactgagtacttaacaaatttaattttatattaagtgaatgcaacactagataggtatgaatactttaattgcagagtacaaataatactataaagagctctaaactaaattttatgtaaaatgtttattttaagtattatgtttttatgggattaatacttgacttgatacctattaataaattagacaggcggcaagaaaacagtatcaaaatcttgtttattttactagaaatgtagaaataattcatcctctcataactgctgatataaaagtaacaacttgcaagaaattggaagaaaataaacaaagcattctcattaagagcaaagttgttttgttgaaatatgatatctttgaccaataaattatattactatattacatggcatacatggaaataagaattctatgcggcattgcatatttttgtatattttacatgtgtgatatgcaaaactaacattatgacgaatttaaatcacatttaaaaaatgaatttttctattttagtattttgtataacaccagcagaaaaagctcattctggcgccccccaaacaggggcgcccgcctgcagtgcatcccttgcaggcccgttatcgccggccctgggtataaacattttagatacatcccgtatgcacgccaatggtgaatacaaaattcccagttgcatgtcaaaaaatgcgcaataaccacctcccaaaacccaccaaatttcatttgcatatctcaaccagttttagagcaataaatacatcgtca

SEQ ID NO: 7419 - DNA, 1500 bp, Diabrotica virgifera
  SmartBlast Evalue=1E-135; Info=Endonuclease-reverse transcriptase n=1 Tax=Bombyx mori RepID=D7F159_BOMMO
caaatcatcatcatcatcatccaaccaattcacgtccactgctggacataggtctccctcaattgtttccacacttcacggttttgtgctgatttttgccagtttttactaatccgcctgatatcatctgtccatcgtgtaggcggccttcctctacttcgtttatcttctcttggtctccactccatcagctttcgtgcccatcttgaatctttcagcctggcgacgtgtcctgcccagttccatttgagcctggtgatacgttctacaacatctgcgataccggttgtttgtctgagatcttcatttcttattttatcccgtagagttacgcccagcatggatctttccatgcgcctttgagcaacccgcattttcgacgctgttgccttggttagagtcagtgtctctgctccatatgtcattaccggtagcacacattgtcaaacacttgtctttttaaaccgatcggtatactgctcctaaatatgtctctcagagctccgtaggctgcccaagcaagagttaatcttctttttatttcgcatgtttggttatctctgccaattctaatttcatgacccaagtaaatgtacttttccactagttctacttcttgttcgcgtataatcagctgcccgctaggaatcagattagtcataaatttagttttagaaaagttcattttcaggcctattttccagcagatagcgtctaactcatttagcattttctttacttctcctaggtcatcagttataaggactatgtcatctgcaaacgaagatgatttaacttttctccatctattgtgatccctttattgtcccagttgagcatcttaaaggcatattccagaacagttgtgaatagttttggcgagagtgtgtcgccttgtcttacgccgcgttctatgcttatttgtttggttttatcatgtaacttaacactcattgttgcctctttataaatattatagatgagtgtactgtaacggtagtcaatgcggcattcatttagagcttctaaaatgctatccagctctatcgtgtcaaaggctttatgaaaatccacgaatgctaggacaaggggtttattatattctattgacttctcaattagtaacttgactgcctgcagatggtcgtttgtcccaaagtttgatcgaaatccagcttgttcttttggctggtaaaaatctagcttcttttctactcttgatgtcactacttttgtaaagagtttgtataagtggtttagcaggctaatgggtctataatgttctaagtctgtcttatctcccttcttatgcaaaagtattgttactgcgtttttccatttttcaggtatcgacttttgatgaaggcataagttgaagagattttttattttacctataagaatgtggcctccgtttttaatggcctctattacgactccatcttcacctggtgcttttccattttcatttttctcagtgcttgatggatttcgctagtg

SEQ ID NO: 7420 - DNA, 1501 bp, Diabrotica virgifera
gaacatcgttggatcaccctgattatacttgttactattaaataaagacaaatatcgtcatagctccaattgtttgcaccacctttttcaaatcattaaaactaaaccacttcacttttagatttctgaaaatacatcaaaatacgagtaaaacctataatcatttaaaatattatattgcaaagtaaatataaaaacccatcgttacagattcatataaacagatatcactttcaaataaacaaaatttcaataagcttagggtcactcccaaaaactgcttatgtttctacatacataaatacatacatagcaaataatacataatctgtaagatatgcccttgcattcactacttgaagcatcttttatgtaaatgaagtgataaaaatacagcgctggatttgaaatataaaaaaatgtctcagtttttattcaaatagttagtttgtataactcatctacactttttgatataacgtttgcaatatatacagatcatttctttaatttaagtattaaaatatattataaatatataaataataaataaataaatatataaatattaaatatataaataattaaatattaaaatgagactttatttgatgcagcaagattaactagagccagtagcttagataaaaacattgaatgaaaatagaacgaacactaagatttactttagctttgctgacatctagactagaacaaaatacagacttgttcccaagtcgaaaaagaagagaacgaaaaaataccccattatgagcaattggttgtaactagtagcttagagatctacttttattgtgatgctaaaattaaataaaaatcgacagtaaaaagtcgagtaattaaaaaaccccaaaaatatagacaataatataaatgtgcacatttgcatataaaatgaaaaatatgatttaaagtggaattggaaagaaaagaaatattgagctttcgacaaaaatcaaatttaacataaatctgcaacacttttttatttttttacaatttacaataggaacagttgttgacttactgattgggtgatatattcaactttataatataattttttgtatgattttaattttaatgaatcaaatataaaatgcaagaacatagaagaaaatacatttatctacacataaatgaaacaaatatatgtattgttatataagatataacaataaataaaaacattcaaaagcattcagtcaaaaaaaaatccagtctaaaatttccccgtattctatagtaactgtttcccatttctgagtaattcacttttactattaatacggggagtaatatgggttttttctctaaatttgcgaatcaggtgtgcagcagacagcaaaaacagttaattttaaaaatccacaaggaaaaaggttttcctgtaactggctgtataccatatattacaaaaagtaagtaaaatcctttataaaaggtatatttactaaaattccctaaaaaaggccacatc

SEQ ID NO: 7421 - DNA, 1505 bp, Diabrotica virgifera
  SmartBlast Evalue=3E-70; Info=U1 small nuclear ribonucleoprotein 70 kDa n=2 Tax=Aculeata RepID=E2AQU8_9HYME
tttccctcgatgcattttattacaataatcaatttctaacgataactcttggaaagcaaacagaagacgttatctaaaaacataaattataaataacttacaaagtggaaattggtcacttacaagttcaaaagattagaaatctacataatctattatctaaacaaaaatatatccttaaattagttgtattcgccttcttcatactcatcttcatatcttctagcaccgtttgtatcaagaggttcatacttgtgctcatcttcatcctcatatttaacctttgctgaatcatatgcaggtggttggtaatttgcgtagtcataatcatctacaggttcctctttaactctgatcatttcacctccatcatcggtcttaataaattcaactctttcgatcttatccttttctcttctttctctacgttctctcttacgagcttccctatccttgtctctggatctggatctccttcgtttcctatccttatcacgatccctatccctttctctatctctcctatcataaccatcatcttcaatagttatttcgtccctgttcttgtccttactccttctcctcttttctcttctaggcgatcttgacctgcttcttctcctcctttctctggatctggaccgacgcctttcaaattctctatcacgaactctatctctatccctatcgcgttccctaaccaaacctctctcttccctttcgcgttctaacctataccgttccctttctctttcgttgtcttcacgacccgagtgtttgatattaacgtccggtccacctcttcttgtaccacccagacctccacctaacctcctgggtaaccatcccttgactgtccttgccctttccacatctactaatacccttctgccgtcaattttcttaccgtcggcgtgtttgtaagcagagtgcatgtccctttcatgttcatattcaataaatgcataccctctcggtttaccatttatgctgttatgaatcaaaacgatctttttaataggtccataaacttcaaattctctgcgaagttttgattccgaagtgtcataattgattctagcaataaatagggttttgaatggatctgttgtattattgggtgctgcagtaggattccacatagcaatttcctgttccagtttgtatgcaacttgttcagctctttccctgcgtctcctttctaaccgttcttccctcgtttccactcttgttggtggaggtgtgtctttaggatcctcgaaatcatctaaaaattgtcctacacccaaatatcctcggtttttcttctcatggggtaattttgtaaccggtggtaagtatggtatgggatcgcgtggggcaaaaagcgccaagagatttggtggtaaaaattgagtcattttgatattgttttactattatatttaatacatattttaaaatatatttttttaacttccactttgcacgcaccactgagccaaattcagctttcacaaaatggc

SEQ ID NO: 7422 - DNA, 1503 bp, Diabrotica virgifera
cagatcttcaaaggcattgcgcaagtgtattcttcgctgcctctccatgttgttgtgtaaacttctcttctcggatggttctggttcgctatcgctgctgttgccgtattgtctacgtttgtatggagtgctcaccggtgttctgtattgccgagtttttttcccactccttgtggtttccacgggtttccttttgataggtgacgcctccggtgtggctgttttcctaacgggcatgatagtcttgatgccttgagcttgggcttgtattcgcttcttggatatagcagttgccatacgcatctggatctgttggcgatctttcgtcgatggattattggggaacgaaaacaccgccgttttattgaacgggaacttctcgttgttgacattgacaacatctatttcctcctctgaatcagaaggagtctcgattccaaaggtagccatctgcatggcactctgcttgcccttgtggtagctatgatcgctctcggcagcatggtaaagtctgctgacgctaggtttcacatcatgttcttcaatcttaatttcaacttcttcctcctcttcttcttcttcctcctcctcctcctcttcgtctttcaaatctttatctttgaaatagtccgacaaatcgctgtccgcttctatatcatattcatctatagcgtcatgcagcaattttaatatgttagaagattttgctttcgcttcttcatcgtcggacatggggggagtctgaagaatagctggagccgcagctctgacgtgtgatttgagcaagctctgttggcccgagggtttgggattctcctgtttgatttccatcaccggtggcttcatgataggcggcggcaccgggatgatgcatccggttgacattcgtggttcgtctgcgggatgctctttgctggcgcagtgcccggcccacatacaatcgtggtttctgatctctgggtgtccgccgagaggacatagcagatcgtctgtgatcttcgacgcgtctgcgagaatgctgtctagagcagtccaatcggatagatctatttcgaatttattccatatatcgtcggggagaaggaaatctgaaatggggttcgaggtgtcgtcggttaagtaatcgatcagattcatcttgggaccgaagtcaaaaacgtcttcgaatttaacaggcatttctatattatatttttatctaacgtctctactacttttatcacttataatctagtatcacaaatggccctgaataaaggcagcttcttgataggcagcgtacagctacgaggtatgtcaaattaaaaaagcacagtgtcaaacaagaacttcaactcgaaaaaagtttttttcttacgcacggtatatgtagcagcgcggataataaatcagtagatggtgcgaaaacgtttataacaaaaccactttccttaaattctactgtcaactttgtatacatttctcaggagaaagattaccggctagatatcgccaacgtcttgc

SEQ ID NO: 7423 - DNA, 1504 bp, Diabrotica virgifera
  SmartBlast Evalue=2E-96; Info=Sodium-dependent phosphate transporter n=1 Tax=Culex quinquefasciatus RepID=B0WB17_CULQU
aaataaattataatttatataaatattacacagacataatagaccatacagagactttctttattctaacttcagatatttttctttcttcttcatcatttgatccatcccacttttgacgaactccagaagcaaagagggcaaacaggatgcttggaacaatatacatcatagcggctactataaatacgatgcgccatttaagtttgtttgtctcatcatcacctacaatgaactgaactgataatggtgcaaggatcgataaaccacttccacagctattgcagattgcttgaagggtcccagagaaattcggtgacaaatcaatatgatttaacgtatatcctgcggtagctgctgactgtattcctacagcactgactaacataacaactgaaagagtaacagcacttacaggcaaaaaactcagtaccaataatgatgttccagctccaataccagaaattccattgaaaatttttcttgctgtcgttctacttatgtattttttattaatggtatagtctgcgctaaatccaaatacaaaagacatcaggaagcatgttaaatagggcaatgccgagagaagaccattcgacgacatttgaaatcccataaccttgttcatataatttggcatctctgttagtaatgtgttgtagccccaaatttggccaacttgtgccaaaaacagcgcccaaaatggtctacatttcacaatttctttccacggaactgtcaacttattttggcctttgatattggtagacttctcaatgtactctctttcagcagctgatattctttttgactctgcgggagtactagcaccaagaaaataaaacataataacccatagataaccagctatactatagatgtaaaaacaatatggccatccaagccaagaagcagctataaatccattaactggtaaactcataattgttccaaatggagcacctgataaagttaaacttcccagtctcgatctctctgaaatatgagtccacctaccaagtaaattacttattgaagggtaaacgaatccttggcataagccttgcaccactcttgaacacattacacctattgatccaaaatgttctgcgagaagtgggaccaaagctaaagctgtacaatttatagtcatggctcctaaaagaaatcgtttagatccataccttctgccccaatccgctgcaaataattgcagtccaatgtaaccccaaaaaaatgaagacaaaataacacttttattcttccagtcatagactggaacgcttggatttggcgaggcttctggatcattcatcgctactattgcaactgaaagctgaaccctcattgcgatggcaactgctgcgagactaaataataaaaaaatttgtcgatgtctctcgccaaatcgaggaagacctggtttatcgagagttggcgtatttgtcatattgattttttaaactataacctaacgtaaaatgtgtaacacatattctgtaac

SEQ ID NO: 7424 - DNA, 1504 bp, Diabrotica virgifera
  SmartBlast Evalue=4E-39; Info=CG4663 n=5 Tax=melanogaster subgroup RepID=Q7JRD4_DROME
tgcgtataaaatattataaaaacgtaagtaatacccaaatagctaatcagttcttaatttaagtcttctctttgtcttctgtgtttgtattttccgtttcaacaggttccggcttcactgtgtcttgactagagtgacttggttcggtttcttttttcatcacgtagtcgtctaaatctacgttttcgaatatctggttttctccgaaactaaccctcttctgatgggttttagtaaacacccttggtatgggaggatcttcggttttcgtatgtaaaataggtctattcttgcttatcacaagataattaagtggtactaagcccgacttggctttacaaacagcaaaggcccatccggaatttttcagattcatctcttcttggatgtaagttggggcaagtaagaccatatcgttcgtttgtacagtcaattcgttgggagcagtggctatgaagtcaaaaactgctttggctcggatacctggagatttccaattttcaggatcgcctttatcttcgaatttaggcaaaaatcgactaataatatagggagcagacaccaacattcccaaaaacgctatagtgggccaactggaaccagcacctcctggcgctacggctgctcctccagccacagctcctgtcttcgcttgcgaccaagctgccgatacttgactcatcggtactttgtatcccattaatcgtaaacattgtctatataaccaattgaaaaacctaaatatatttatcgaataccagatatgaccaaacatagtccttagtcgtccgaaattctcggctacgcttaatacagctctaaaactgctagtcatggcaaaaaacgtattgtctaacatcatagctatgctattgaaggctcttacgatgctttccacactggaaaaggtatttctcgagctttcttcggcgtactgaataaaccttcgttcgtgatcgtctaaggcctgattgggataagatccgaaggagttgtaagggtcgtaagaagaaccatgtgagccatatgagccgtaacttccataggaactgtagggagagctgcgatatggcatgtaggaattatacgaattgtagccgccatatgatgaaccagaatatggtaaatatgagttgaaagtattatatccagtatttcctattattgagttggatggcctaggaggcaacagaggggcgtttctaccaccaactactcctgggagactaaccgaattcctcaaagtatgtgaagaattttgcaaattgttttcctcaaagggtttggagaaagacattataagattgttgagagtttttagattgtactgtaactttcacatcactacacaacaccgttttttatagcatttgctgtctgtaacattataaacctctagttcatatttaagaatatataaaatagctataaaactgagctaagctggtaactaatcagcaatcagctctcactaaaaattcagtttcaaagtttactttttaac

SEQ ID NO: 7425 - DNA, 1502 bp, Diabrotica virgifera
  SmartBlast Evalue=0; Info=Probable ATP-dependent RNA helicase DDX56 n=1 Tax=Harpegnathos saltator RepID=E2BX14_9HYME
gtatgtaagcttttatcatgtctaagaacttgaagatctgtaggattgtcttcaaaatagctcttcagtttttgacaattaaatatttcttgtttaatttcttttagtctggcttcccgtactgcgattctagtaatagctctccaagcatcttttgctctatacctaaatgattctacttcttctagcttaaattggtaggacttaaatatcgatgaatcgtcttcattttgcttcaatttcttctcaactttgtctcttaaatgactctccttcatacttacaaatgacaaaacactgccctgattgttacctctagctgttcttcctgctctgtggatgtaggcttgtacatcaagtgggaaatcaaaattaataatattggctacatgctgaaagtctattcctctggaaacaccactctctttgtcttttcttcttttagttttcttttcaccttcttttttcgatactatagttggttcttccaaagcatgttcatcagatgctatgattatgtcatagattccttggttgtattgattaactgaatggcatcttattgtagcaggcaactcagaattcaaaacacaagttctaatgccaaactgctccaaaaacaatttaattttgtaacatttatccactgaattaacaaaaatgatagtctttcctcttatcaaatgcagttttaacagtgtgtaaagtattgtagctttatccatttcttcagcatttaaatggtaatgggttaattgactagaaggggctaattctggttcctcaagcttaatggaaaccggattgtggagaatggaattcttcaaacttttaacatcatcactcaaagtagcagatgccaaaatggcctgatagatttttggaaaatgggtaataagttccttcatttcttcttcataaccaaaagaaaataccaagtctgcttcatctattacgactaactctagtgactttttaagatttaaattatctgcctttatatgctgcaacgtccttcctggtgttccgacaactatatctggtttttcaactaacaacggtttctgtatactcaaatcgactggtaacgaaatatcaatatatctcacttctctagaacattttgtagttagatcttttattacaccacatatttgatggcacaattctcgactgggggctaagatcaatgctttagtttcttgttgagcagctgtctgtttaatgttcaatagcttttgtattactggtaaaagaaaagcggcagttttacctgatccagtcctggcccttactaaaacatcttttccttctaacaataagggaattactttttcttgaattacggttggttgtagccatcccagttttgctatagctttaagaagacggtcgtccaattccatctcatggaattgaactgttttcaagtctgtatcttcagacatgttctttatttttgaaagaattttagtttttaccccttcacgtgttatgtaaac

SEQ ID NO: 7426 - DNA, 1499 bp, Diabrotica virgifera
  SmartBlast Evalue=1E-162; Info=UDP-N-acetylglucosamine pyrophosphorylase 2 n=2 Tax=Tribolium castaneum RepID=D2KLJ2_ TRICA
cttaacgatcaaggaacaaagttagacagtaagatgaaaccagtaccagcccacacatttgaatccgaagaagaagttaattcagatgttttagcgcaatacaaaaaaattggtttagaagaaatcgcaaatgggcatgtggcagtgcttcttatggcgggaggtcaaggtaccaggctcggtgttaactatcccaaaggcatgtactcagtagggctaccatcccgcaaaaccctatttcaaattcaagccgaaagaataagaaaagtgatgagtcttgctaaacaacaaacaggacattctggaagaatagtttggtatataatgacaagtggaccaacagacgaaacaacagagaagtttctaagaaaacatgactatttcggactagacaaaaaagatgttgtgctttttaaacagggtttattgccttgttttgacttcaatggcaagatcttcttagaaagtaatcggtctgtagctcttgctccggacggtaatggtggaatttacagagctcttcagaaaaatggcatcctagatgatatgaagaaacggggtataaagtatcttcatgcgcatagtgtggacaatattctggttaaagtagcggatcctgtgtttattggttattgtgtgaaaaaagaagcagaatgtggtgcaaaagttgttaagaaatctggaccaaatgaagcaatcggtgtcgtttgtcaaattgatggtaagttccaagtcgtagaatatagtgaaataaccgaaaaaaccgcaaacttgcgcgattcagacggcaaccttgtttttagttccggaaatatttgcaatcacttctttacaactgactttttgaataaaatagcgaacagtttcgagtcgcagttaaaacttcacgtagctaagaagaaaattccacacgtcaactcagaaggtgaaaaaattagtcccacttcgcccaacggcatcaaaattgaaaaattcgtgttcgacgtctttcaatttacaaacaattttgtcacgtgggaagttcctcgcagtagcgaattcagtgcccttaaaaatgctgataacaaagaaggcacagctgtcgattgtcctagtacgtctaagagagatctgctgagacttcataaaaagtatatagaaaatgcgggcggaaaagtaacaagtaacgaggtggagatatctcctctactctcgtacgctggagaaaacttggaaatcagagtaaaaggaaaagtattcgataagaccactgtgatatattccgatgaggagcagttgattatgaacaacaacaacaccatcgatggaccggttatttctaacggtaattctcattaatgattaggtatttatttaaataattagacaatacaaaataatccataccgttttaatgttttacttatactaatttattatcttaaaaattataaagaacagtataatttttttctgagtatagttaattaataataattattattaaaaaattacttttt

SEQ ID NO: 7427 - DNA, 1497 bp, Diabrotica virgifera
  SmartBlast Evalue=1E-164; Info="Vinculin, putative n=1 Tax= Pediculus humanus corporis RepID=E0VRD8_PEDHC"
agtggttgtctaatccaggtcacgatgataaaggtcttggacaaagagctatcaatgcaattgttgatgaaggtcgacaggttgccgacggcctaccaggtgttcagaaatcagaaattttacagctgtgtgatgaagttgatagactgtctcatcaattagccgacctttgcgcccaaggtttgggcaattctcctcaagcccaagaagtggccaggaaactttcccaaaaattacacgagcttaaggaaaaaattaatcaggccgttgtgaatagagtagtcgaagatttcattgacatcgttactcccttgaaacagttcaccgaggcagctctagctcctgagggaacccccggtagagatcagaacttttctgacaaagctgccaatttgcaacagttttcaaatagggcggtgaaaacagctaaaatggtggcagcaggtagtagctcaggtaacaaaaagctagcagaggctcttcaaagtgcagctaatcaagtcgaaagtttaacaccacagttaatttctgcgggaagtattcgcatgaattatcctacatcaaaagccgcagacgagcattttgagaatttgagacaacaatacgcagatactttgacgaaagttcgtaatctgtgcgatgaagccacggactctgcagattttgtgaaagcatcagaggaacaaatgaaaaaacacacttttctatgcgaagaggctattaaaaacagacaacctcagaaaatggttgataatacgtcagctattgccagattagcaaatagagtcctgttagtcgcaaaacaagaagccgacaattcagaagacccaaacttcatcaacaatctgaacagagcttcggactcattacaaaacgccgttcctcctatggtgcaagatgctaagttggttgctgttaatccaagtgattcccatgcttcatcaagatggagagattcaaataaagcactattaaatgccgttggtgaggttcgccaagcagtccaaatcaatccagatcttccacctttgcctgattttaattcattaaacttagaaactgctccaaaccgttactttattgacaaagttggcgagccattgcgaaatataccaacacctactggggaccttgggacacttagtcctactcatcatcaacaggggcgtgttagtcctttgccgaaatgggcacgaggcgataattctgatttgctccatcaggaattagccccaaactatcacaaaacagaacaagcaccaccacgtcctcctcttccatatgatggagctccagtcaggccaccaccaccaccagaaacagatgatgaagacgaagtgtttaaaacggcaccgctaccaagccagcctattatggttgcagcccacaatttacacagagaagttagacaatggtccgcaaaagacaacgatctcatagctgcagcacaacgaatggctaaacttatggctcgattatctgaacttgtccataacg

SEQ ID NO: 7428 - DNA, 1498 bp, Diabrotica virgifera
tgttgaacctccataataatggttgttgttgttaataattgttgttgatggctgcgtgtgaatgggatgcaatattggttgaacagggtagtgtgactgaacagggtagtgtgattgaacagggtagtgtgattgaactgggtagtgtgactgtatcccggaaccggttgtataagtgtttcggtaacttgttggtggttgatatacgttcccttgtgagccaggtctattaaacgaacttccaccaaatgatgttgtattccaagatcggccttggtaaagaggtctagaggtactgtaaactggtccctggttgtgtccccagttattgttgttgttaccaggacgccaagtatgcacaggggatcctaagtttccattgcccaaaggtgtctgatagacgggtctctgattggtaaatccagtgctactgttgaagcgtggtcttgatgaagcagttccaaagttattcgaaccagatccgtggatttgtgtattaaaagcagaaccagaatttgggaaaacaggtctctggttattaaatccggtgctactgttaaagtgtggccttgatgcagtacttccaaaattgttaaaagttgatccatgatttggttgtgtattaaaaacagaaccagactttggaggtgcaaaactattaaaaccagatgcattgtttctttggtatggattttgaaaaactggcctgggtgtcacacggccaaactgactcgttccttgattagatgaagaagtaaagaatggattattttggggcttattcggggcacttccatgggaagctgttgtaaagaagggattatacgctggctgtttggtaatggcatggtgaaatccaggagcaggggtaaccttacttggagcggcattaaaatttggattaaaggcaggttgcttagaataagctgtgtgtgaaggtgcaggtgtatgaaatccgcttgaaacatgttgcactctactagttacaggttgaaatctagtagtaacaggatgataattggtaaagggtctcgaagtaactggttttgcagtgactttccatccgtaagatccagaggatccgtgtgatggacttgaaccatgcgatccggtttcgtgcgccaaaaacgatccagaggaacttgatcctcgggatccagatccgaatgaagttccgtgagatccaaatgaagaaccggatgatccaaaggaacttgaaggtcgcgacccaaatccaaatgtactaccacgtgatccactggatccaaatgtactaccacgcgatccactagatccaaatgatgatccagatgatccaaaggaactggaactgcgagatccagatccaaaagaactggaaccacgtgaaccgaatgaactgcctctagatccagaactagacgaacgagacgagaaaatacactgactctgatctacgttagataatagaataatcagtataacacaacaacaccattttaatatcatcatttcgagg

SEQ ID NO: 7429 - DNA, 1496 bp, Diabrotica virgifera
  SmartBlast Evalue=1E-164; Info=Sid-1-related A n=2 Tax= Tribolium castaneum RepID=A7YFV8_TRICA
tgtccgaattatcaagacatcctaatagaatcaaaaaaaggtcttacaactatttgtatcatacgttgagtatcgccatattttacagcatacctgtagttcagctagttttcacctaccagaggatcgttaatcgcactggagatgaagacatgtgttactataacttcctatgcgcacatcctgcctttcgtttcagcgacttcaatcatattttctccaatatcggctacgttattttcggcatcattttcatttgtgtagttgctgacaggcatagaataatcaagttgagaaaggacaaaggaataccagtgcattatggaatatttcatgctatgggcgtggctttaattattgaagggttgttgtcagcatgttaccatatttgcccgagtcagtccaattatcaattcgatacaagttttatgtacattatggcagttttatgcatggtaaagttataccagaaccgtcatccagatattaatgccactgcgtacacaacgtttactgttttgggatgtgccatatttatggctatgattggaattttgaacggaaacttagccatctggatcatcttcgtagtatgctacacgttgctctgtttatttttatcattaaaaatttatttccttaactacgtcgtcgatggattaaatcagtttcgaagttccgtcaccaagaaaggttttactcaacacgcacttaaacctatacggaaagctagatttataatactgctgatagcgaatatagcgaattattcaatgttgatttgtgggctcttgttgtatagcgacaacgtcactgactttggaactttcttgttagcgttattgatgggtaacagcgtcattcattgtgtgttttatacgtgtatgaagctgataagcaaagaaaaaatttgttatgaagcaattctgtatggggttctcgcaatagtgtgttggggttcatcaagtgtatttttcttagatgcagcaactttatggacggtcacacctgcagaatctcgtcaatggaaccaagaatgtatagtcttcaagttcttcgataaacacgatatttggcacctactgagtgccccagctctctattttacttttatgtatttgatgtctttggacgatgacatacttgatgtagaacaaagagatctacaagtattctagattatgggtttaaatttgcagaagaatactgttctaaaccaatattaatttgatatattggtatttgtaggatttaataaactaaaacaggattgacttttgacctattgtggatgttaagacagtgtacctttatcgctgtaatttgaccgattttgatctataccgatttattggtgaggtctatttgtaccgatgtaataacttaagactatcaatcagtcagcaacgaaactcctcttgtgccttctacacttatctgttcgttgctagttgttgtcaatatctcacattctgactttgatgttatttagctac

SEQ ID NO: 7430 - DNA, 1497 bp, Diabrotica virgifera
  SmartBlast Evalue=0; Info=Phosphatidylinositol 4-kinase type-ii n=1 Tax=Aedes aegypti RepID=Q17CZ9_AEDAE
atcaaatgatgtcaccgtttttattctccgtttaattttttgtagtttgtataagataatttaattaaacaataagtggttccaaattctagtcaattaaatgaacttcataccaacgccataatattaacaaacattattatacttgtcatatctcatttaaatgttaaaactaagaatcatttattttctgggtgatgagtgccagtgagactatacctattctgataaatacaagtggctcagaacctgaaacacacggggccttgtcaatagtttgtagtgatagtgaggacgttcaattagtcccagaagtagtatttgaatctacattggattcacctggatttcgagaatcacagcctttattgggagggcttgatgtctcttataatcagttcccagatgatcctgcatttagtgacttggtatggcaagctgaagcggctattgatcatggaatatttcctgaacgaatatcacaaggttctagtggatcttattttgttaaaaaccagtctgggaaaacaatcagcgtatttaaaccaaaggacgaggaaccttatggcaggttgaatccaaaatggaccaaatggacgcataagttatgttgtccatgttgttttggaagatcctgtttgataccaaatcaagggtatttgtcagaagctgcagcctcacttgttgatcaaaagttgaatctgaatattgttcccaaaactagagtagttaaattagtatcagaaacttttaactatttaaggatagataggcaaaaagctagggtaaaaagggcgatcatggaacagtttcctaatgttggattaagatttaataggataggtttgccaccgaaagttggctcattccaattgtttgtagatggatataaagatgctgattattggttaaggagatttgaagttgaaccattaactccatcgctagctcaaaaatttcaattgcagtttgagcgactggtagttttagattacataatcaggaacactgatcgggggaatgataattggttgattaaatacgatcaacctacagttgtaaatggaaactctgtgagtgctcaagtagaactaacagatacaacggattggaatttggtgcagcttcctgagattagtatagcagcaatcgataatggtctagcgtttccttacaaacatccggacagttggcgagcttatccttaccattgggcatggttaccacaagctaaagtaccatttagtaaggctaccaaagacctggtgttaccattattgtcagatatgaactttgtgcaggatctctgtgatgatttatatttactttttaaacgagataaaggttttgatagaaatttatacgaacgtcagatgtctgtaatgaggggccaaatattaaacttaactcaagctttgaaagacagcaagtcaccagtgcagttggtccaaatgcctgccgttgttgttgagaagtctcaaagtcaacatacatcta

SEQ ID NO: 7431 - DNA, 1496 bp, Diabrotica virgifera
  SmartBlast Evalue=0; Info=Actin-related protein 3 n=15 Tax= Diptera RepID=ARP3_DROME
taaaattttattgactgtttaaaattgaaacctatatttaacaatcaaaaacgctatcaatacgtttaaaggaagtataaaaattattttcaatatataaatataatacaaattatgtcattgtaccaaatactggattgtgcctgcagatactgggaccgtattcttcataatcttctttagtatggcaaacagcatagaattcaggcgttgatgctagcatacttcctccaaaccatacagcataccgttgcatatgatgggaaatcacttggacatcaatgggcttgggcttcaacttccctcctcctagggtctcactaagcttcagtcttgcatcaacagttcttttaatatctctctgtaaccttctgctaaaatctttaaacatagtagacccaccagaaagcacaatattatcgtacaaaggtctacgaacatcaataggacaattctgaataacatcatcaacaatctgagataaagggatattaaaatctggattggaaaactcaggatggaaaaatatctcaggtcctaaaaatcgctcatatcccacatcaacgttgaagggttgtttcgttacagaattgactccttcgtattttttcatccattttgcaggatcagtatcatatttagaaaattctttagctatatcgggacatatataacagtacttttcttttattgctttggcagtttctagagattgttcagggggtattcctatttctctttctctcaggagagactggataaaatacgttatatttctaccagctatggggatgtgcttaatgcaacttccaattacgtaaccttcagcaactggaataacatgtgtaacaccatctccactatcaataacaataccagtaagggttctttcttctatacttctacttgcccaactggcagctaaggctaagacagcttgaactgctatgtacaatccaggtacattaaatgattcgaacattatctctgctatgtattccctgttctcgggagtgttcagaggaggttccgtaagaagaaagtagtgatcttcaggttcggcacgaagatacttaaatatacattgttccagaaatttttccattaaatcccagtcttcaacaagaccgtgacgaactgggtacttaacagcgtatcctgtggcatcaaaggcttcatctccaatgaaaaaatcgagatcttccactcctttatttaatctacgacttgttgtatcacctacttttgcagtttctttgattgctattgctgaaggtattatgaactgtggctctttatttgcagcaaatcctaattttgtataccccgtacccacgtctataacacatgcaggtagtttcccatccatagctagacaattaataattcagtattttgttttgtttcctgtaaaatttagaaccacgcctaaaaataataaagatttgcaatattatcacaaaaatccggccctgggtgtgaaactgtcaacaacg

SEQ ID NO: 7432 - DNA, 1496 bp, Diabrotica virgifera
  SmartBlast Evalue=1E-107; Info=Nocturin n=3 Tax=Drosophila melanogaster RepID=Q8MTZ6_DROME
atcacgccaaaacaacaccgttggtgacacttctcggtgtagacgtatttctcggtctaaaattaaaccaccaactatgtaaattgggagaagatacgcaataacgcaatactcagtcacaatcgagcaccagacatctatcgagagcaaaagattattttatcttaacgattaacgatcatcagcaatttattatataaaacctttttgtgctaaatttttttaatcttttgtttagccggttgtgatgacatacaagtggacgagcgtcttcagataccattatcaaaaagtgtgttttaacgcaagtcagaactgtaaaataagaaccttcaagtgtaattgataaacagtgtttgaaaagtgatctttttggtaacaatggctacaaggaatatgattcgtgtcgtgaggcggtttagtagactcaacatcctacctagaatgggcagtttcacatcgactccaaggatcctcaacgaagacattctagaccatgacgtcaaccaccttcctaaaaacataagcagaacggagttgttgcaacattgtcagcgtcaaccaaaaatacaacccatggtgaagagaatgtttcggaaagctagaccatcttcagatttcaactgtggggtcaaagtcaagaagttgaatgctgtatcaagagcatgcagtgaatatacgtctggtccccacaatattcgagtattacaatggaacattttgtcccaagctttgggacaaatgaacgacaactttgccaaatgtccagatgaggctctggaatggaattccagaaggtatcttattatagaagaactggtagagtattgccccgacatcatttgcttgcaggaagtcgatcatttcaactttttaagccatatattggagacgcaaggatacactggcttatttttccccaaacccgactcaccctgtatatacctcgatggcaataatggacctgacggatgtgctattttttatagaaaggacaaattcgaattacttgaggcacagaccaaaattttggagatatggaaggttcaaagtaatcaggtcgttctactgacaatcttaaagatgaaagaaacaggccaaaaaatctgcgtcaccacaacccacctcaaggccaaaaaaggagctctactgtccactcttcgcaacgaacaaggtaaagatctcctccagtttgtgaaagcaaacagccaggatcttcctttgattctagccggagatttcaacgcagaacctactgaacctatctactcaaccgtactcgacaatcctctgaagctgggtagtgcttatgctgactgtgatattgatcctacgatttcctcagctgaaagggaaccttcgtacacgacgtggaagatcagaggtgaaggagaggtctgccataccatagattacgtgttttattccaagaataagctagaactagaggccgtattagatatgccgacgggagaggaaattggagagaacagagt

SEQ ID NO: 7433 - DNA, 1494 bp, Diabrotica virgifera
  SmartBlast Evalue=1E-101; Info=Bloated tubules n=1 Tax= Tribolium castaneum RepID=B6CY69_TRICA
gcagtccaaatggattgactttattgtaaattattcctgcatttgtaacaaatgatccgaagccaacagtggatgagaaaaatacttgaatagctgcataataccatacgtttgcactttccagtaaactccagtcggctttggtataaaagtatatcaattcagactcatacatcactgatttcacaaagagcgctatgagacatgctaaagttgggaaaattaataaaactagtgatctgataaagctttttgtcttgcttattgtcagtagggcagttattgcccatatggcaaataatatcgaagcgaatatcccaaaccaataagggtcttcaaaggctgactttaaaaatgtggaccttaaacatttttgtccgtctttgccataatgtgagtatccatcctctgtaattttcactccactggaacattccgataaaggtatcgatcctttcgcaatccaaattacaaaatagagtgatattcccatatataaaggatagtaaatacttagcatataaccagccaaaaattttacatatccaattcctctaaagaacggtacgaccctccaagatttaataaacccctcctgtgcaagctgtccaattcctaactcaaggaaaagaagtggcagtccaataaaaatagttaatattaaatgtgctattaaaaatggtagtccaccacgtatcatcgtcgtttgtggcaatctgtacaaatttcctaatcctagtgccatggacattgtgcaaagtgttgtggatatatagtacatcatcgtctgacatgactgctctattttcggagggactaatttggctgtagaccccatctcgttggtctccgatccattaagatccattgatcccgatgcaatggacatcgtcccacctccgttgatatattcgtaaaagtgttgatcactgtatcctttactgcttccaacagatattcttgacatactgttggtatcgtatttctgcggcgtgtataaccgtagatcgatgtcattttgaaagttcccttcgacgggcaaatcgttgtatactttgatggctcttaaagatggactatgttgaagatgcttgaattttatattttctaagtctgcgcttctaggaatagtcgaatgaccattaagctgttggttattgctccactttcctcgcattttgaataaaaacgtattttctatttatctctaatagatatgcacacacacttttcacgttcacttggcactctttttcacattattatgagagcctccaacaaagatctattaacataattacaaaatggatgaatgacatgagaaaatctcggcaattgttaagaggaacaccgaacgtgtattattttgtttactaagtactaccagtgagtactcgattgaatagatgttgtcgcgggtacgcgttcggctcttgatttagctttagctaaggaatcaatttgttcttggaagtcgacaacgatttcttgatg

SEQ ID NO: 7434 - DNA, 1496 bp, Diabrotica virgifera
  SmartBlast Evalue=2E-94; Info=Cytochrome P450 9Z6 n=1 Tax= Tribolium castaneum RepID=D6WWW1_TRICA
gtcactcaaatttgtgatacagatatttcgatcagctttgtttcaattaaacaattgacctcagtgtatccaacttagtgatataaagtaccgtactaaccttgaggaccttcaattatctcatcctctacaataaaaatgattacgattgtttttatttatctaaccacatttcacaaaaacaaaagttgcgcgacgattcattcagaatatttttcgcggttattattaagttatttccattaagagtattttagattaggccaaaagatgcttcagttaattctcttaggattagtagtagtgctgttttattggtatgccataaaacccatgagctattggagggaaagaggagttcttcagcaaaagccgatgtggttgtttggagatagttggagaatatttcttaggttagaatcgtttgcatcgatgttccagagagcctatgatctagatcctaacagcagaattgtgggtatatatcaatttactacacctgtattactgataaaatatccacagctattgaaaaaaataacgttaaaagatgcggaatattttatgaatagaaggcaggttcttcctgaaaacggagacccactatttactaaaaacttaataggactaaaagatcaaaaatggaggaacatgcgtcatattcttaccccgtccttcaccagtagcaaaatgaaaactatgtttgcgctgatagacgaatgttgtatcaagtttgtaaaacatataagccaaaaggaccaagaagtagtgaaagtaacgatgatggatattgttggacgatttgcgtgcgacgtcattgcttctactgcatttggtttccgcagtaacgctatggaggatccgaataatgatttttatgtaatgagtgaagatcttacaaattttactactgcaagaaagtctttcaagattatcgggtttatgttagttcctaaattattagagctattcaacgttttcttatttgatggatattcgagacaatatttcttggatctcatatctaaaacaataaaagacagagaagaaaaaaatatcgttcgagccgatatgattcatttattaatggaagcaaagaaagaatctgagaagtcctcttcggctatacaagagatcaacgtagaagacattactgcacatgctatcattttcttctttgctggttttgattcagtatctagtttgatatcattcatgtcctacgaactagctcttcatccagatatacaagctagattaaggcaagaaattgacgcaggttttaaagaatgtaacggtaaaatgaactacgagacactaatgaagatgaaatatttagacatggttatctcagaaagtctaagaaaatggccaagttttcccttgtcagaccgatggtgtaacaaaacctacacgctagaacccgaagctcccaacgagaagccaataatcatccaaaaagacttactaatcatcatccctattaaagcaatcca

SEQ ID NO: 7435 - DNA, 1494 bp, Diabrotica virgifera
  misc_feature (1444)..(1444): n is a, c, g, or t
  SmartBlast Evalue=1E-114; Info="SMC protein, putative n=1 Tax= Ixodes scapularis RepID=B7Q2A3_IXOSC"
ctatgacaattctcagagagactgaagttaaattacaaaaaattcaagagtttttacgtaccatcgaggaacgtctgagtactttagaagaggaaaaggaagaattgaagcagtaccaaaattacgataagattcgtagagctttggaatatattatacacgagttggagttgaatgagaataagaagaagctagcagatttagagaaacaaaggaatgaatctggtacagagcaggaaaagttggcgaataacttaaagaaagcccaagatatcatcaagactcttgtgaaaaagattaaagaattgaagaaagagttggcgactaagaaagaagaacgcgacattctgaacaacgactaccagcacttgattaaggaaaaagctaagcttgacttaattattaaggatttgtcagaagaagtattaggtgacaataaatccaaagaaagggccgaaaacgaactggctagactaaatcagtctattaaggaaaagaagcggagttagagaaggtgaaaccgcaatacgaacacatgaaaaagaaagaagaagagtgttcacgagaattgtcgctcaaagaacagaagagaaaagaactgtacgccaaacagggaagaggaagtcagttcacttcgagagacgacagagatagatggattcagaacgaattgaagtcattgaataaacagttaaaggacaaaaaagaccatcgggataaactagaggtagatttgaagcgggatgctactaaaactgttgagttgacaaagaaaattgaagaacagtcgcaggaattggagaggcagaagaattttatcgatgaacacaataagcagtgctacgagttgaagaaaaacaaagaccagtatcaagctacaagaaatgaacactggcgcaaagaaaacaacgtccaacagaatttgtcgtcattaaaagaagaactggctaaggcggatcaaaaattgcgctccatggtgggaaaacctattctgaacggtcgggatagtgtacgcaaagtcttggagacttttgtaggtagaggtggacgtgaagcagacgtcgccaagcattatcacgggcctgttatcgaaaatttcgattgcgagaaaagtatctacactgccgtcgaagtaacagccggtaacaggttgttccaccatgtggtcgatacggatatgattggtactcagatattgaaggagatgaaccgacagaaattaccaggggaagttaattttatgcctttaaatcgattgaacgtgagagatcaggattatcccaatgatgcggacgcaattcccatggtgtcgaaacttcattatgaccacaaatacgacaaagctatgcgttacctattcggcaagactttaatctgccgtaacatggaagtggcgactaaattggcgcggacaacaggattagattgtgtcacattggatggngatcaagtgtcatctagaggttcattgacgggtggcttattttaacgtct

SEQ ID NO: 7436 - DNA, 1495 bp, Diabrotica virgifera
  SmartBlast Evalue=9E-49; Info=Equilibrative nucleoside transporter 1 n=1 Tax=Harpegnathos saltator RepID=E2BT91_9HYME
gtgacgtttgaagtgtaccgtttataattcatattagtatgaataccaatatttcagattcatctttaaagcagcatgactgtaaggaatccattaaaagttgatgctgcgattactaaagataatgttaaagtaactatttttaagccaacttccggcttgtcttctgaaaacgatctgacactcataaagccaacatgcagcagaaatcccatggacacattaaatattatatggcctaaaataaactcccaatcatgatcgaagataacgggtaagtgtgttcttggttgtgcattacagaacaagtaaaacggtgtgaaactcagtcttaccaacaagaacagtatgtaccaccatttatttgaatgcgtaattgaaaatctgtgagataatactcttcctactatggatgaaacttctgctagtagaaaaacaagcgctggtgtaaaaaatttttgtgtccatacagtcttttcgtatgcatattcagattccactaaggttgtgatcgacggatggacgaaactagacatgaagaacgtaattccaataactaccaggacaggccaaaattgcactatcagctttttcatttcgccaaaattgatgtgttcagcctgtttatcttttatattttcaacctcgtaatatctaaaaacgtgtgatcttctcgcaatcataacaaatattaacgagattgttataagcgtggttcctgcagtaaaataaattaatccggatgtgatgctgttgttggtaacagccaccgcaacgagctgtaagctggtagtcagaactgttccattttgaccaataagatagcagaacatatagcttggaggtaatttagcaattaatataactgatgacatttgaaacgttgctagtccagcactatttaacattaacaaaattacagttaacgcaaaaaatccagtttgccatgaatctgtgttaatttgagtgaatattgcaaatatggcaaacactaaaccaagtaacactaacgcaaccagacttcttaacatggatgctatcttgtgaccataaaatgtccacagtaatgtacacattaccattggtattgtaccaccagccatgagtgcaggctggaaatatacctgcaatctagttcgatcttgtccttctgttatttcatctccttgcgttacatttctaaatttgtacatccaataagaatttgctgtactaaaaaataccagtggcataacattcataaatccaacaaaaaaacaggcgatgtgtaccgcaaacataaaatcttttggtcctttttcattgtcatgtttatgagatacttttcgttcttctgcaaatttatcacttagaactgacagtatggataatttcctagaaatttcaatatccgctgtagtagccatcgtgaagccactgattcgaaaatattttatattaaattagcactacaaacttggtattataatcgagttacacgtttaacttataaata

SEQ ID NO: 7437 - DNA, 1496 bp, Diabrotica virgifera
  SmartBlast Evalue=1E-163; Info=Plasma alpha-L-fucosidase n=1 Tax=Harpegnathos saltator RepID=E2B4G2_9HYME
atgtaatgctataaatggtccatcttgattaataaactttgtagtattactattttttacaatgttattaacgattttattagcgctgatatgtgcttctcaggcacaataccaagcagattgggagagtttggattcaagacctcttccatcctggtacgatgaagccaaaattggtatttttattcattggggcgttttctcagtgccaagcttcgcaaatgaatggttttggtttgaatggaactctggagattatgatataacaaactacttaaaaaattattatcctccaaactggaagtacacaaactttgcaaaggactttacagctgaattttacgatcccaatgaatgggcagagatttttgctaattctggagcaaaatacatcgttttaaccagtaagcatcatgaggggtacactctatggccatcaaaatattcatatagttggaatgctctagacgttggaccaggaagggatgttgttggtgaactagcaacagctgtaagggctaaaaatttaaaattcggtttgtaccattcctactatgaatggtttaatgaaatgtgggtagctgacaaagccaatggttttaaaacaacagaatttgtagaccgcaagacagatccagaattaagagaaattgtaaacgcctacaaaccttctattgtgtggtctgatggtgattgggatgctccagacacttactggaaatccaaagaattcttggcatggctgtacaacgaaagtccagttaaagatgaagtcgtagtaaatgacagatggggaataaatacttcctgtacccacggaggagtttacgcatgtcaagatagatttaacccaggtactcttcaacaacacaagtgggaaaatgctatgacaatcgattacaaatcttggggatttagaagaaacgctaaactgtctgactacatgaccatagaagcacttctgtaccagctggtttccactgtcagttgtggaggtaatcttctgatgaatgtcggacctacgaaagacggtgtaattgcccctattttccaacagagacttcaagaattgggtacttggttgtcaatcaacggtgacgctatttatagtacaaggccatggacatcacagaacgattccttgaccaatggagtttggtataccagcaaaggctctgatgtatatgccattagcctgcaatggcctaaagatagtacattggatctggaatcggctgttgatctgttcaaaaatacaaatactgaggtttatttgcttggcgatggaaatggtgaagcattaaactggtctttaaatgattcctcagtaactattaacttcccggataaggcaaaagtatacagccaatgggcgtacgtgttaaaaattgttcctggaacaagtatagaaaacaagaacagccgaatttaggaattggtaaaatttttaagactattattttttttatttttaaataaaatactttttaagtaaa

SEQ ID NO: 7438 - DNA, 1493 bp, Diabrotica virgifera
  SmartBlast Evalue=1E-101; Info=Sodium-dependent phosphate transporter n=1 Tax=Culex quinquefasciatus RepID=B0WB17_CULQU
gtgaatgttcgttcagaattgtgatttaattgctcatagtgtaaatactgaaacattatcttttatatttggatgagaaaataatgaccaatggacgtaggcgtagaggctattgcaaatgaaaatgaaattggtgcaggcgtagattcaattgaaactgaaaatgaaaatgacagagaaaatcaagctctaataaaaccagctggttcaggcatacgacatttgcaatatgggcttatgttcagtggggctattgttgtatatggcatgcgtacagtacttatggttgcaatcgttgctatgactgcagattatgaggaaaaccgaacatatccaacatatccagactggagaaacaagaaaaatgttattttatcttcattctcttggggccacgtatggtttcagataggagctggacagctggctaaaaattatggtccaaaatattttctcactgctgctattgcagtctcggctggatgtatattagtaataccaatgtcggcagctgcatttggataccaaagtataatagccttaagagttatagaaggggcttgccatggagttctgtttccttcggtgcattatttgctgagcaaatgggcacctatctcagagagggcacaatggggaggatttgtgtatgcaggacaagttttaggcaattgcatatcaatgccaatagctggcataatatccgattcaggttttggttggccgatggccttttacttttatggaacttgtggaatgatgtggactcttttatggtttatattcggatctaatgatcctgatagtgataatagaatatcggaggaagaaaagatgtgggttaaatctcgaataccagacaaaaaggaagagatctctccgacgccatggaaatctctttttacctcagtaccttttatagccataataatcactcactgtggtcaaaactggggattttggaccttattgacagagattcctagctttatgaagtatgttatggattattcaatagcaaagggtagtgtactggcagccttaccatatttcattatgtggttgacgagtttatttttgggtccattagctgattttataatcgatagaggttatgttagtcttataaggagtagaaaaatctttaactctattggtttcttcataccggctttggctctaatctcaatttcgtttatacaaagcaataataaatggttaatagaaacaatcctagtaataacagtggccttcaatgctggacactacagtggatttaacatcaatcatatcgacttgtcaccagtttttgcaggaactatgatggggataaccaacacgatttctgcgcttttcaccattatggcacctctagcagtagacgctgtcaagtacctttccaattatactgaggaggataaggagctctggaacattatattttctgtctcagcaggattttacgttattgctggaattacctttattttctt

SEQ ID NO: 7439 - DNA, 1493 bp, Diabrotica virgifera
  SmartBlast Evalue=1E-160; Info="Acetyl-CoA acetyltransferase, mitochondrial n=1 Tax=Camponotus floridanus RepID=E2A7A4_9HYME"
aaaatcgtatgtttataattttttcatattagttgaacaattgtagggtcaaagtttaatccaaagtggtggggaaggagaatactttatcacttatttgttctggaaatattttgagaattgtcgttcacttattttagaagataggcttaaaaatgatcatgtcaaagccaactaaggttattcaaatgagcagaagattctacagctctggctctaaaaacgatattgttattatttctgcagttcgaactccaatgggtacgtttctgggacccttagcacctttatcagctcccagattgggagcagttgccatacaagcagctgttgaacgagctggaattcccaaagaagaagtcaaagaagtcttcatgggccatgtttgtcaaggaggcgctggacaggccccagccagacaggctacagtttttgcaggtcttccaaagtcaacaatatgcacaactgtcaacaaagtatgctcatcaggcatgaaatctgtaatgtttgcaacacagagcttgctactcggcgaccaagacgtcatactagccgggggaatggaatccatgtcgaatgtaccatactatatgagacgaggccagacaccatatggaggagtacatcttgctgatggcgttgtagctgatggtttatgggacgtttacaacaaattccatatgggtaactgcgcagaaaacacagcaaagaagctgaacatctccagggctgaacaggatgagtatgctatcaacagttacaagaaaagtgccgaagcatacaaaaacaatgcttttgcttctgaattagtatcagttaatgtaccacaaaggaaaggacaaccagatttggtggtttcagtagatgaagagtacaaaagggttaactttgaaaagtttaacaaactgccaacggttttccaaaaggaaaacggcacagtaacagctggaaacgcttcaactttaaacgacggtgcagctgctttgatcttaaccactgccgaaaatgccaagaggttaaacgctaaacctctagctcgagttgttggttaccaagacggtgaatgtgacccaatcgatttcccaatagcccctgccgtagctattccaaaattgctcgaaaagaccggagtcagcaaagacgaggttgccatgtgggaaatcaatgaagcgttcagcgttgttgtcttagctaaccaaaaaatccttgggctcaatccagacaaagttaacatccacggaggtgctgtcagtttgggccatcccatcggtatgtctggtgccagacttatcactcatctcgttcactctctcaaggctgaagagaaaggagtcggtgctatctgtaatggaggaggaggagcttcttccatgatgatcgagaaattgtaagtggatcttggatctcagaactgaatcttaggtttaagtgcaaaaatcatatattttttaagaattttagatgtgcatttatgaactgatattataatttta

SEQ ID NO: 7440 - DNA, 1492 bp, Diabrotica virgifera
tctccatatttgcgtactctatacacaaatttataatacaatactaagcctgaaattaaggctatcactaatgttccaacaacacaaactataattattataatgtaataattgctagctactgagcacatgtgagctttaaaatacttaactgtcataaattcattattagacctgcactgtaagtcttcgtaatatgaactgtctttaattttttgatcggtatctgaacaatcacagtctcccaggtaaatatttttgaattgtacattgggctctgacacactcagtgctccactgctgagtttgcctaatctgttagaatcaaaagcgaataaggattcacctaacagcatatcttttctaaaagtgattcctctgagagcaccatcatccatatgtgtaaagttgttgtttcggaaaataactctgcctcttgatataactttgaatgcttctccatttaaatctttgacgttagtatttgtcacttgaaacactaaagggttgtatacagtaaatcctcccggataaactgtatcaaaggtacaattttctatggtaaaattttggtatacggtgatattggaaaacgctctacttggtactagatcagcatgaacattgattagctctacgtattccgtcgaaaactttttaaaacttgtacacctacgttcctcaaaactgaatcccttattgatattttttcagtctgtagtaagttaacgaacgccaagggatctaaacgttcaacattcacatcttcgaaagttatttcactaattctacctgcgaaagcatgactttgaatttgggatatgttactcttataaacgttaacttttagagaagggacagcgatgtcgaaccgttcttcttctatttgtccgctgttttctttgtatccataccagttaatactgtctgtatccagttgaatgttaccaattttacttaaagataatgcccttaagtttcgcatgtctgctacagcatttgcttccattttaactgacttacatccattgattaagatttctgaagtcgaaaaggagttaatggagtctgctttgattgtcatctctgctccgttttcgcaattgcaagataactttgccattgatcctccgtgccatgtacacccatattttctgtcatcagcaatgtcttgcgactctactatctgatacaatgcaataaatgaaatagccaaaaatttcaaatttctaaaaattctcattgtcacagtccatctcagctacatgctgggtccttgtttcaattatttgcaacagcgcgaaaccatgtatccattattcattacatagcagaataaatcgataactgggcaaacatcaccaacgaaatactgacaaacgagtatctatcatttattacacattttgtttgctcaattattaagcacttcgtcagaaacacaccttatactaagtttgttcactttttaaacattcgacacgtctctgtt

SEQ ID NO: 7441 - DNA, 1491 bp, Diabrotica virgifera
gtgggatttaacgttttgataaagttggtaaaaaatccaacatatcgttctacagtcgtaacatctgaagctgggtacttagatagatcagcacctgcccaaagatatcgtccatcttctccatgttctactctgccacaaccttcatatgtgagattatttcttccgagtaaaccatgataagaaaactggtacaggtacacgtcatcgtatttggcttgcatttgtgcgtatcttataacacctcgaatgaacatatcgtcactacgaaaccttattacttcacctaagtgatgttcaaaatcgcttgttccggtataaacgtttttaatcacagatcctgcttttttcaaaatttccgcatccgtaatgcgcagatcccggttaacaagtgtggctggattactatcgtaagtcttagctgaggaccttaaacctgcttcattggaagccaaactgatatactcctcagagttgaatccaatcactaagggaaccctattgaaccgaccactctccaacagttcatacatcgattcggtaatgaatgccccttcatgtttgccttcaattactggcgcgaacattgcgtaattgcttcctgttttatgtatctcctcagcatcgactctcatcagtaaatcataaatctctttcggtgtagccgttttgctcattgtgggatcgatgattctggcaattcctctagctacgtgcagaccacttccattgacgttagcccaactatttaacgctgaaccgctgtttgctattgcagctctaaataaaccttttgaagcaggacttaagatatggtaagttacagaagctgccccagcactttgtccatgaatagtgactttatctggattaccaccaaacagatgaatattcttttgaacccacttcagcgcaaatacttggtcctttactcccatatttccgggaatggtatcgtcatccgtcgataaaaatccaaatggtccaactctgtaattaaatgtcacaagtatgattcctgcttccaaaaaataatcaggacctgttgttccaattgaggcaaagccatgggtaaagctgccaccataaatagacaccataacaggcaaaccgcctgattgtccaggtttgattggtgtgtagacgttcagtataaggcagtcctctgtttgtggataatgtacttttgagctaatttgatagcaaatcttcttattgtctttcgcttcaaaagtcccattccaaggttgtaccgggtgtggcggcttcattcgtagctgcccaatgggaggagcagcaaaaggtatgcccaggtaagcataaaattctgttttgtctcttatggtataagcagtaagaccctcaattgttccgtcaagaagatggatagttggaccttcgcaaatcacagagctcactccaaaaattagcagtatcaataacatctttactacaaagtataactgactttgtaaccaacataaacgtttt

SEQ ID NO: 7442 - DNA, 1484 bp, Diabrotica virgifera
  SmartBlast Evalue=4E-14; Info=Endonuclease-reverse transcriptase n=1 Tax=Bombyx mori RepID=D5LB38_BOMMO
gtttatttaatatctcttacaaatacaaaaacatatttaggaacaaataaaaataataaaaagctttaacttcaattattggtggtatttggttagaacgtaacaataattagattaaaaatatttgatcagatttttaacaaaaagagtaatacaatagcactaaaggaaataaataatatttacatctaattacagagctaataaagtattgtgaaaaaaaagggttatatacaaaagcgtattcatcgtgtagtcaaaatgatagcaaattttgaaaaacatgattcttattccaagctatagttgaaagtattaaagagtacctggtaattgtctttttattcttctgcggacatagttcatagttatatccaatctgtcatcaaagttctggtgaaagcaagcattttgcaattcttcctgattaaatgtaaagttcgactccgatgaagatatttcgatattggtgatattgcgatacgtgatacttagatatttgaatacgtgatatgttgatccttgttatatccttgtataataaccaggatcgaaatatcacgtaaggtttttataacctggaaaccttttttatgtaacagaaatctctcgatgaacattcacaagaatatcctgaaatgttatgttgtggtctatcttattgtatggttgtgacaaattgactttaaaaaccataactctaagcaaattagaaacattcgaattgtggtgctatcgacgaatcttaaaggtatcgtaagtgtcgcacacttcgagtgaagatgttctccaaatgatgaattcagaacgtctgctcataaacatcataaagagggaaaacagaatacttcggctcggccatataattagaggacctaaataccatctacttcgccttataatacaaggaaagttggagggaaagagatggattggtcgaaagaagcttcatggttgagtaatattagacaatggtgtggttccacagtagaagagttatttcgcgcagcagcagatacagaaaggtttcaagaactgctaattatgataacgactaacgtctgaatactgacacggcacctaaagaagaagaagcacaatatgataaaaatatatttaaccaaactctaagataacttagaagtatttcttaaatataggttatatttacgtacttaaataacatcttaagaatattgacaaaactgtcattttggtacaaaatactgatttataaagtgaaaagcgtggaaagaacaaatctgcaggaagggaactggcaaagtagaaagaactggagagtacgggtggtacggttgagtgaaggaataagtgaaaactgggaaaatccttagtatatgcgtgaaactgcaatttgaactaaaggaaaagtaaacaccgtgaggaaaataaaacccaaacaagaattcggttagacgcggcaaaaaaaattgatgaaaggaactagaaaatcgcttaatccc

SEQ ID NO: 7443 - DNA, 1487 bp, Diabrotica virgifera
  SmartBlast Evalue=9E-95; Info=Sodium-dependent phosphate transporter n=1 Tax=Culex quinquefasciatus RepID=B0WB17_CULQU
gtgttaacaattaactggttgacacgatggttcaagataataaaataagtaacaatttggtgtatcaactcgtaaatacagaaatcaaagagggagatgacgtaacggcaagaattgaagaaaaaaaggatgacgaaatagattctggtcccaaatttggaaagcgccatgtgcaagttatatttttatttacccttttactcataggatattgcataagagttaacttgtctctcacaattgtggctatgacagatccgaatgccaatgaaaacaaagatattccgacttttgactggaaaaaccgaaacgtcatcctttcagcgttcttttggggatacgtaacgccacagatcctagccggttggttaatgacccgatatggcccgaagtggttccttgttggatctatggctattggcgcaatattgggctacgctatacctctgttggctacatattatggatcaacggcagttattatatgcagagttattcaaggggcttcgcaagggttcttcgttccaggtatatcttgctttacaagccgatggataccaatcgcagaaaggggaagactgggcacgtttatgtatgcagcaagtccaatgggatctgtagttagtatgatgttatcaggagcaatttcagcaagttcgtacggatggcctatggtttttcatttctttagtacactgggaattgtgtggtgtgtcctttatcttttctgcggttctaattccccttcggagaataaaagtattaccgaagtagagaaaaattacatactccgaacttctgttgatgttaacaagaaaccattaccaacaccttggaggcacatattaacctcaatacatttttatgccttaatatacacatacacgtgcaatgtgttgggactgtggcttcttttaacccaaattcctacttacatgagcaaaatcatgaagtttgatataaaatctaacgggactttgacagcctcaatataccttagtcaatggctactgagcatcattttgggatccgtgtcagattatgtgattaacaggaaaattctcagtttaactctaacgagaaaactagtgtctggtgtaggtaccttcggaccagcgatttcacttgtattcctagctcaatgtaccgaagaaaatactgtcaagggtgtgattctgctatttcttgcagtcggtacaggaggtgcccaaatttgtagcattttaatcaacagcgtagatctttcacctaaccatgccggtgttcttcaaggaattgtcaatgcattttctcacgtctttgctatattcgcaccgctgatagcagaatttttggtttctgacgaatataatccagctcaatggcaaatcgtattttactttggtagctgcgtttatctttctggtggaattattttctctgtctttggttctggaaaagttcaaccatggaatgatctctataacagtaatgttggggctgatact

SEQ ID NO: 7444 - DNA, 1486 bp, Diabrotica virgifera
  SmartBlast Evalue=1E-106; Info=Serine/threonine-protein kinase PAK 3 n=1 Tax=Camponotus floridanus RepID=E2A8V1_9HYME
ccgttggcggtgatgagatacaaagctctcagtggcggctccctgagatacggtggttccccgtccagcatttcgacgatcattatacctaaggaccaaatgtcgactttctttccgtacttttgtctggttacgacctctggagccatccaatatggagtgcctaccatggtttctctttgttcgtttcctactacgttggcacagaatccgaaatcggtgacttttacggttccattcatacctagcaacacattatccgatttgacatccctgtgaatggtgcccctttcgtgcaaataactaatggcttgcagcacttcgcagcagacagcagcaatctggccttctttcatcaccgtttcggtaaccacgtccgtcagcggacctccgtccaacaactccatcacgacgtacaaatggtcgtcgttgacgacgaaggcgtcgaggaaattcactagatttttgtgtttgaaattcttcataatcttaatctcgctaagtaaaagatccttcttgtgttgctttgtcatatcaatatctttaatggcgactagttcacctgtttttttacaggtggcagagaatacgatgcctgacgcgccggagcccaagtctttgtagcttcgttcatagaaatcgtcgggatgtccgggattgcaaatccttcgaatctcgtccatgtagtcctcgtcggataagccgcttcgtcttcttatcacgtcgtcgtcgtctatggtagggtccgacttatttctatattctacgtcttctttcttaactttaggttcgtcgacgagagtaaggtctactaggttttgtgcgaggtttttggtctgaattaggttggatccgtctatttttctaggaggtctaactggatgcgatgaccttttgtcatctttttgttctttgtctgagtcagacaaagaatccttgctcttgtgtgcatctttcgaaagtgtataaagatctatttgcttggattcttctaccaggtccctctctgtaactatgtgcttaaattcggccctttcttcgttcttttttatggaaaagttataatattgtaggacttgtttcactaccagtggattctccctctgttcatcttttgtgatttgagtaccaatttgcctcatccatgctgaagggagacctgtgagctttccttctgtgtttactgtaacatgaatatcgtggttaacatttgttggagttcctataacagcgatgttgggttcctccttgtgctgcctttttctaaaaaggaaattcattgtatttcaacgacacacgaaaacagcacaaaggaatcaaccgaagtatcttcttaattgactattagtattatcagtcttgactttgttgcatatcttactattaattactgtagtatttaaatatatttataaaaaaatagtttaaaatgtcaagtatcacccgtagcctatgggcaatgccaatgacattaggtacgcgatga

SEQ ID NO: 7445 - DNA, 1485 bp, Diabrotica virgifera
  SmartBlast Evalue=1E-161; Info=Beta-galactosidase-like protein n=1 Tax=Tribolium castaneum RepID=D6WCM8_TRICA
tgtgtttgtgagtttgtgtttacgtttacaacagtaataaattaaaatggctgataaggtgtctaaaagtgacaaaataccgacattatacgaatattttactgatggcggaatacaatcgggtttgaatgacaaaaaacctcattttacactcaatggtaaagaaatatccatttttagtggagctctgcattattttcgcgttcctagagattattggaaagacaggttaagaaaatatcgggcagccggcttaaatactgttgaaacgtatgttccgtggaacctacatgagtatgaagatggcgtttatgatttcggtaacggtggcagtgattttcaagatttccttgatctcgatttgtttattaaattagctaaagaagaagacttgttcgtaatacttcgacctggtccgtatatttgtgccgagtgggattttggaggtttgccgtcttggttattaagatacgaggggattaagataagaaccagcgatgcaaagtatgtaaacttagtcaaaaggtactttaaaaaacttttgagaattgttgctccacttcagtttactaaaggcgggcccataatagccgttcaaatagaaaatgaatatggtaacctagaagacggatcaaataacattgacgcgaaacatttggagcagctaaaagatattttacaagaaaacggaataattgaacttctttttacgtccgacactccttcaaatggatttgctggtacagttcctggagttctagctactgctaactttcagcatgaacctgaaaaagaacttacccttttgaaaaacttccaacctgataagcctttaatggttatggaatactggacagggtggtttgaccattgggcagagagacatcatactagaactgctgataactttggagaggtgctagatggtattttaaactttggggcatcagtcaacttttatatgtttcatggaggaactaactggggatttttgaatggagctaatttaaaaaataagtcagttacagccaccgacaatggaagttttcaaccagatattacatcttacgattacgatgcccccttatcagaagctggtgattacactgacaaatattacaaggccaaggaaatcatcgccaaatatagcaaactaaaaatcaaaatacctgcgatgccagagctgcataaaagaatgtcgtatgctcccatagacattatcggggaactgacattggcagacattataaaccaaagtcaagtccatcacatagagagactggtgtcgatggaattaattgatgttaataataagtctggtcaaagttatggttacatagtatatagagcaactgggattaatattcctaaaaattctatattgcaaatagaaggaaggataaatgacaccgtactggtgttaataaatggacaactaatgaaccctacattgaaatctaaggcagatttggacggttttggata

SEQ ID NO: 7446 - DNA, 1487 bp, Diabrotica virgifera
gccggtaaccaaagagcgctgtccaagcttgaggttgggagaggaatgggtttactgtatttgcagaaattggaccacattttaaccattttatttcttacgttcaagtctttcttagaaaatggaagattaaccttaaataggtaggctacgtcttcaccatgaacaacacctgaaaaattaaatccaagtatcttttcaacatctcctttgtagctaaattgatacaaatacgtattgggaacatattttttaacatcagagacaaatctatggataggtcggaaaaacagatcaatattaaagaaatttattaaatgactgtccattgtaatatttggtgcatttccaaaaaattcttttctgattttcaatcccgcttccgtcagatttttgttggaaattatatctgcaggtactagttttcttggttctgtttgtaatgttggtatagaaccggaaaataatgctggggccataatcccaagttcatttgaagtatgtcccgctagtattggaactcgagtgaactgtcctgataataaggcattatcacttttaacggtcaagaaagctgttggatgtggaacttctataactggtcctagggcgataccaatcaatgggaaattgttgaacgtcgttacagataaaatagctgaagcattttgtagactagcataatcaactttttttagattttctattaactggctcgagtttgcggatcctacacccaatgcggttccagtgttgtgagccaattcattacccgttctcgataatgcccataaacacaaagaaacgccactgttcataatagccccactaaatagtcctttagatcttggagaatttaaatgcaaagaaacagacgctgaacctgcacttgctccccaaattgtaactcgtttgggatcccctccaaaatgtgctatattccgttgaacccattgcaaagcaagagtttggtcttttagtccccagtttcctgggcaggtcagatctcccgtacttaaaaatccgaagacgcctaatcggtactgaatacctacaaccactaggccttcttctaaaaataattcaggtgaatatgttattaaagatccatttccagcattgaaagtacccccatggatccacacaagaacgggagctcttccatttagttttggactagctatgtttaaatataagcagtcctcagaaccttccactatgccaattccttgcacacattggtccctttcatacgtacagtttaaaacaccagtccaattagattttggaacagcgagctcgaatcttttaggaggttctgcaaatggtacaccatggaacatgtacatcgttttgtttttttctgataatgaagtcgttcctaagatcgtaccttcatttgtagttacttgaacattctctgaggaaacttcaacaaatattatcgctaataaatttacgacaaacaataagcctgtcgcagtcat

SEQ ID NO: 7447 - DNA, 1485 bp, Diabrotica virgifera
  SmartBlast Evalue=0; Info="Elongation factor G, mitochondrial n= 2 Tax=Culicini RepID=EFGM_AEDAE"
aggtaaaattcccatagctttttcatattcgacaataagtttctcttgtacttccggcaagcaaggcgaatacctggaatactccatcgtgaattctcctttgccttgcgtacttgaccgtaattcacctgcgtaaccgaacatatcgtttaacggtacttccgcgtggaccgtgaaccaaccttcggtaccttcagtaccagtaactattccgtgtcgcttgtttatttgagctatgactgccccttggaattcatctggagctgttacttcaacagccatgatgggttcaaggacgtgccagacaccattctcaaatgtatccttaatggcaccttgagctgctaggaagaaagaatgttcacttgagtccactatatgatgagcaccatccatgagtctaaactttaaacctgccagtttctgacccgcaagcaatcccttttgtgccatttccaagaaacctcttttaacgccaggtacaaattgttttggaacattagtacctactgtttcatcagtaaattccagaagagtattcctgtgaggtggtagaggttctagaacccctgtaactcgagcatactgtccttgaccaccagactgctttttgtggagatagtcaaattcgcaagccgatactaatgtttctctaaaggcaacttttggttttcctaatgacactggacaattatattccctctccatcctttgagcataaatttccaggtgaagttcacccataccagatacaattgtctctttgctatcgtcatcgaagtaaaaatggaaagttggatcttctttagtaaatctagcaacagcttttgagaagttatctctatcctttgagttcacaggtttaattgccattgatacaacaggttctggtacaaatattgattctagagacagatctaatttcgagtcagttacaaacgtatctccactagcacagtctactccaaataaggcaaaaatatctccagaatagacttcattaacgtcttccatgttatttgaatgtaaacgaatgagtcgtgcaattcttacttttctttgagttctcatgttgtagatgctatctcctttttgaagttttccctgataacatctcatatatgttaattgaccaaatctaccagcttccaacttaaatgccaacgacacaaaaggttttttcccatcccttgaaggatccaataaaattttttgagcatcttctccttccttttcttttaaagcatagttagtaacttcgccaggattaggtagataatccaagactccatccaacaatggttgaacacctttgtttttcaaggctgttcccacaaagacaggagtaaaagctctcttaaggcaagaccttctaatggctgcttttatatcagcctctgttattggtttttcttcaatgtacatttctccaaaatgctcgtcacagttagaaaggtgttctataagttcatgtcttctttcatc

SEQ ID NO: 7448 - DNA, 1485 bp, Diabrotica virgifera
  SmartBlast Evalue=1E-63; Info=Secretion-regulating guanine nucleotide exchange factor n=1 Tax=Harpegnathos saltator RepID= E2C5D2_9HYME
tcagctcctccataacccaactttttttttcagacggcaggacgcgtgtttcaaaaattttacaaactaagagcaaaaacgttccggaaaatcttgtttttttatcagaatgaagttatattgttggggagctaacagttatggtcaactaggactaggatataggtctgaggaagaaatttcaccaaaagaagtttccttacaaaactgtgattttgaagcagatgatattgtatcaattgcagggggagctggacatactttgatattggataacaaaggctttgtctattgttgtggatggaactcaaaaggtcaactagctctttcagatgacagcctgaagttaacccaaatagagatcttgaaggaatttaagatagttcaaatttcatgtggttgggattttagtgctgctgtgtcagaatgtgggaaacagtttgtgtggggtaacaatggtaatactcaactaggtctatcaaaaagtataacctgtactggaattccatcaagactgcaagtttcacagaaattagcgactggtttcaaacacgttagctgtggattaaggcatagtgctatgataacaaaggacggaggacttgtagttgctggtactggagccaaaggtcagttagggctaggtgataattttgatgataataactatctaagtatatccagagttcctgatttgagtgatgttattagtgtagcaagcgggcagcatcataccgtagttcttaaagacaatggtactgtacttagttggggtgaaaacaagtttggccaacttggtgtgaatccaaatgtagcaaacagttttgtaccactcgaggtgttcaacaatgaaggtttgaagactgtgtttgctggttggactcacagtgcaggtttaaccaccaatggagaagtttttacatggggtagaaataattatggacaattgggagcagagaaggaaaagccatatgaaccagaaaagattccaacactgaacaatgtgagtcaattaagtttaggctcagaacataacttggctgtgacagcagaaggaaagttgttcacatggggctggaatgaacatggaaattgtggtactggagacaaaaaggatgttaagataccaactcacattctagctaataaaaaagttaagtctgcttttgcttgtactggtagttcatttgctgttgttgaatagtaataaacttttttcattcagtgaatctttatgttcataagtattttttataaagagttgatcacgattaattgtaatttctgtatttttataataaaattgtgttgcatgtaattaaattaatttttcttatgttggtaactatgtactatttgtttgtattgatcattgatttgttgacattgtcagtagaatataccatcaaaaatgttaaatcaattccgttctagaacaaattggtaaatattataattttatatattatattgtaaataagtggc

SEQ ID NO: 7449 - DNA, 1484 bp, Diabrotica virgifera
  SmartBlast Evalue=0; Info=Insecticide resistance-associated cytochrome P450 n=1 Tax=Diabrotica virgifera virgifera RepID= Q9NGQ5_DIAVI
acataagcgaatggatgtctatttacacaattttcaggcaaaaacctatcgggatcaaatttctcagggtctggccaatatttcgggtttctatgaatgtcataaatcagaacatcaacagtcgcctccttaggaaccaaatatccatttaattctatatcttcatccaacgaccgtgctattaagggcaccgccggaaaaagacgtagagtttctttaataaatcgttccattacttttagttcatttaggtcgttcaggtctggttgcttttgtgcatctcctaatacagatataatttcttcataaatttgatcctggtattcgctatgtattgccaattgacgtaaaacccatgatatagctgttgcagttgtatcgtgtccttcaaacataaatgtattcacttcatccttaataccttggtcatcgatgatgcccttggaaatttttgcattcaacaataaatctagaaaagctagtttcttcctctttatttcgccatctgtatttacttcaaaaggtttgaaatctcttgatctttctagtaaaatacgttctgtaaagctatgcagcgttgataatacttgtttgagtctaacgccaacagaagatacaatactaaatataagtaaagaatggaaccaaggccttattattctatatatcaagatttcacccatttcatgaattgcagatacgtaatttttgtcgtctgttttggtcaaatcgagcgttgttccaaaagatgtttctgcaatagtgtttaaagcggtttgagaaattagtggaactatatttgttgccgatttcttattttcttgtttgattgtctcgactaacctagcagtttctttgttaaacactttaacgaactcctgtaaaatactaaagtgaaatgcaggtgtcaaaatctttcttctttgctgccacagagaacctgaatttgttaaaaggccttttccaagccatggttccacaagtttgtagctaaatcctttgctaagatgttttgatccagcggcgattttttcgaactcttcagctccagatatacatactattggttgtccaaacacaagaaatgcataaactggtgagtatttctgaccccattctcgaaattggttaaatagttgcactgaatcacagtagaacaaatcaaagaagttcccaaaaatcggcagttttggaggacctggtaacttataaactttttttaaaacactacgtaattttaaaaatttgtaaacaatataaataacaaccactgctactaacacggaatatacgtatttaaaaacatccattgcttcataaatatcttttcgtgtgtgtagttcagaataaaatacgaatattgtttgaggagatctctaaaatgttgaccgttcaaggttttggtacttgttaaccttgttcagaatattttttaaaaataaattaagatttttttttgataaaaataactgtttttataaaga

SEQ ID NO: 7450 - DNA, 1484 bp, Diabrotica virgifera
  SmartBlast Evalue=1E-76; Info="Mitochondrial carrier protein, putative n=1 Tax=Pediculus humanus corporis RepID=E0VNB1_PEDHC"
tgaagttaaaaacctcgattagtgaaaacatgtttgtattattcaaggacgatctcatatttttaaatcgacattgatgcattcgttcgtaatcggaaatcagttaatgcgctttatataaacacttcaaaacgcgaaaaagtgctttatctattgtaaagtgcgcaatttatcgatttgtttctttgaacaatttatataaactaatttgctaaaagagtactaagcaaatgttaattatttaaaaattattatttatttttatatggaaaattagggcatccttagaccggtaaacaattccacgtgatcaaagcatggtattagttggaaggggggatgtgtcaagagatattttacaggaaaatagaatagtctctatttctaaaatgttgaagaatgaagttttgtactgaatacggggagtttgtcacgtagtagcgtgttaaagaatcttgtaaaaatacctaccctacgctaggaatattaccccttttcgtcgttactgccgtgttttttttcgagttgtgttccaaaaatgttagtttcgtactggttataaacaagtggtggttatcaaactttgtgaaaaaaattaaccctaatgtttatgtttctaaattattgtgattttgtgacatgactcaaatacagagagacaccgttatccatttggtggctggaggggtggctggaacaaccggtgccatcgtgacctgtcccttggaagtagtgaaaacccgccagcaatcttcaaaaaatggtttcgtcgttgtccgtgacctccccaacgtccccggcgaaacaagtcagccgaaaacgacgtgtaggaccgtccccgatcagaggcgtaggttatggacaacatgtcaatatagccggcctcaagttgtagctctttcaggttattcgcttgccccggcgcagtccctcagcatagtccaatgtctcaagcatatcgtccaacatgaggggcccatggctttatttaaaggtcttgggcccaaccttgttggcgtcgctccgtccagggccgtctacttctgtacatattcccaagccaaggccttcttgaacggggtaatgcctccggattcgccgatcgtccacgtatgctcagcatcatgtgctggattcatggcaagtaccctcaccaatcccatttggtttgtaaagactcgtctccaattagattttaataggaatagtaatgtgactgctatgcaagtcgtaagaaggatatatgcttctaagggcatcctaggattttataaaggcataactgcttcctacatgggtatatcggaaacgattgtccattttgtgatatatgaagccataaagccaaactgatagcgcacagatcgcacgtcagcgatgaaagaagctcaaaagactttttggagtttatgttggccggcgccatttcgaaaactgttgcttcttgcatcgcttatccacacgaagtagcaagaactaggtta
